United States Patent Application Publication US 2005/0208558 A1 - sequence listing, part 6

SEQ ID NO: 5008 - DNA, 3594 bp, DROSOPHILA
cgggaaaaaaggatacttatgcagagcctgttctactgcggaggggtcctcgaagtcgaagtgatccaggagcttaaatttcttttcgttgttctcgctaatcttgtcataatcgtgctcctcgaatcgggcgcgcaaccaatagaaacgaaaggacgcctcgcactcctgcacttcctgtagcccaaatgatatggcatccagcacatagaaggtgtccgcatcctcaacatacacgcagtctagtattgtttcacccttttggagctgccagtcgccgggcagcgaggatcggaaattcacgaacatccagccccctttggagtacgccttggtgatccccttgcttgccaccacgaggcaccttttgcccactggacaaggtaccagcagccactcgttgagatcgtcgggcttatggcgcagccactccgagagttgtggtctgtacgggatgcctttttggtgaccagaacgtttcccgcttttctttcttggcaccggtttctcttgattttgcagcggacggtagtcatcctgttcctgctgtcggcggagtttctgctgctttagcagctccttctggcgctgcttctgctgctcacctatatccaggccttttttatacagctcctgaaaactcgactccatattgaagagttaatcaaatcaatgtgccggctagaaatcagtgtgaccgggccgataacgatacaaaacacatacactacaaaaaaagtgttcaagcaccattatagttttaataaaatatgtatatataaaccatttatttaaaataaataactttaatgtgttgcacctatatttacacaaagaataaaaaaataaatttaaaaaataataattatcattgtattcaagtaaataggttatgccgtttctcagttaaatatgtaggtatattttgattacctattgctggtcacactgggaattcatattattgttttgcatttactttgccggtcttttaatggaataatagcaataaaacaatatcaattaagtataaaacatgaataaggcatcccgaattttctgtccagccctgatcacacccaaaaatgcggtggtcaagcaaacggagcaactgtcccgcagccaaaaggtagagaacacttccatggtgttacgaaagaagtagtcattgaaatcatacaaacattccagctgctgacagaacttggcttggtaaaatcgggcagcaatggcacctaccagataatgcccatggcccagcgatcggtagacaagtgcattgacttggtccaaagcaacatgcaacaggctggtgggcagaagatcaccctgcccatcctgacgcccacaggactttggaagaagacggggcgactggacggcgatatatccgagttctacatggtgcgggatcgcagcggcaagcagttcctcatgagtccagtgagagagtgagcagttttcttcatttccgattccaataaacacttatttcattgattagacccacgaggaggcagtgactgccatgctggccaccacctcacctatttcctatcggcagctgcccttgagactcttccaaatcggtcccaagttcagggatgagcttaagactcgatttggtttgatgcgagccaaggaattcctaatgaaggacatgtattcctttgatgtcagcgaagaaacagccatggaaacttacacactagttaatgctgcatacgataggttgttcaaacagctggaggttcctttcgttaagggtaaatataatttccgtaccgaaaaaaactgcattactaacatagatttcatttacagtgaatgccgccactggcataatgggtggcagtgtatcccacgaataccattatgtatcgcccgtgggcgaggacaacctactgcagtgcagttcctgcggctttgctggcaactctgaggttgtaaaggccccagctagctgtccgagctgtaacagctcggatttgaaagaagttcgaggagttgaggtggcccacaccttcctgttgggggacaagtactccaaacccttgggcgccacttttctcaacaccactggcaagccgcaatcgctggtcatgggctgttatggtattggcatcactagggttattgctgccgctctggaagtcctctcctccgaccacgaactccgttggccaaagctcctagcaccctacgatgtgtgtttaataggacccaagcaaggaagcaaggaacagccggaagcggaagtgatagagaatgaacttcttctgaatgtaggagagatttgcggccaccaggagttgttgcatgatgatcgcaaggagctgactatcggcaaacgtttgctggaagccaagcgtctcggacatccgcttacgattgtagtgggagccaagtcagcccgtctggattcccccaagctggaagtgcacaccagcaaaggagaaacatatgagctcgatttcagtgaaaccctgaaactggtggcagaacatagccagcacaaaaagagtctagaacgaggatgttttcagagtgaaactgaagaaagtaaaagtcgatcggttggccatcagctttagctttatgcaataaaggtaacaataacacacaactttttacaaccgcgcatccagactgattaaacgcaaatcaacgcccgagcagcgtgcactactataatgactagtgatccgcgtagtcgggttccggaatctgcgggtagatctgtacttgaagttgtggcttgcgtggcggcggtggtggcttagtcaccatgctggtgtacgaccaaggcatctggttgcgcagctcttcgctaacgcggggatttacgggagcaggatatatctcgctgtagcgattgtttagtggcgacgtcaccgccagttgttggacagccggcgaaggagcacgtggagtttgtggctccgaaggtggatagttgaggtggtcgggatgagcctcggtggtgcgataggtgttgatgtcaggctgcggggacacaacatctctctgctgaggaacttgtggtggtagcaccatcaccggcgattgcaaagtggtgcgatctccgggtgcgaactgctgggagtttggacgctgggcaccctgctccgagggaatgaaaatgggcagcggcttgggtcggatctgctccggatattgagggctctcttgcggggccgaaggctgaatggattccactagcgtggcctccaccaccggctggactaatgccaccgcaggctgtggtgtcggctgtcgggtgggagcctggctcctgctcaaggcggctgatttcgcattctgctccgccatgattccggacaacgagagacagaaggtaactccaatgatgttcagcagccagatgatggctacgcgacttgtgaggcacagtagaagaatcgatggcgtcgagaagtatacgccgaagggctccattagagtccagacattactaacaatttcgctatatgagactccaatgtaatcaagtgcatctttcatggactaaaatgtaagaattataatttatgaagactggaacatagtttaccataccgttgtatgacttat

SEQ ID NO: 5009 - DNA, 1413 bp, DROSOPHILA
taatagcaataaaacaatatcaattaagtataaaacatgaataaggcatcccgaattttctgtccagccctgatcacacccaaaaatgcggtggtcaagcaaacggagcaactgtcccgcagccaaaagctgctgacagaacttggcttggtaaaatcgggcagcaatggcacctaccagataatgcccatggcccagcgatcggtagacaagtgcattgacttggtccaaagcaacatgcaacaggctggtgggcagaagatcaccctgcccatcctgacgcccacaggactttggaagaagacggggcgactggacggcgatatatccgagttctacatggtgcgggatcgcagcggcaagcagttcctcatgagtccaacccacgaggaggcagtgactgccatgctggccaccacctcacctatttcctatcggcagctgcccttgagactcttccaaatcggtcccaagttcagggatgagcttaagactcgatttggtttgatgcgagccaaggaattcctaatgaaggacatgtattcctttgatgtcagcgaagaaacagccatggaaacttacacactagttaatgctgcatacgataggttgttcaaacagctggaggttcctttcgttaaggtgaatgccgccactggcataatgggtggcagtgtatcccacgaataccattatgtatcgcccgtgggcgaggacaacctactgcagtgcagttcctgcggctttgctggcaactctgaggttgtaaaggccccagctagctgtccgagctgtaacagctcggatttgaaagaagttcgaggagttgaggtggcccacaccttcctgttgggggacaagtactccaaacccttgggcgccacttttctcaacaccactggcaagccgcaatcgctggtcatgggctgttatggtattggcatcactagggttattgctgccgctctggaagtcctctcctccgaccacgaactccgttggccaaagctcctagcaccctacgatgtgtgtttaataggacccaagcaaggaagcaaggaacagccggaagcggaagtgatagagaatgaacttcttctgaatgtaggagagatttgcggccaccaggagttgttgcatgatgatcgcaaggagctgactatcggcaaacgtttgctggaagccaagcgtctcggacatccgcttacgattgtagtgggagccaagtcagcccgtctggattcccccaagctggaagtgcacaccagcaaaggagaaacatatgagctcgatttcagtgaaaccctgaaactggtggcagaacatagccagcacaaaaagagtctagaacgaggatgttttcagagtgaaactgaagaaagtaaaagtcgatcggttggccatcagctttag

SEQ ID NO: 5010 - protein, 458 aa, DROSOPHILA
MNKASRIFCPALITPKNAVVKQTEQLSRSQKLLTELGLVKSGSNGTYQIMPMAQRSVDKCIDLVQSNMQQAGGQKITLPILTPTGLWKKTGRLDGDISEFYMVRDRSGKQFLMSPTHEEAVTAMLATTSPISYRQLPLRLFQIGPKFRDELKTRFGLMRAKEFLMKDMYSFDVSEETAMETYTLVNAAYDRLFKQLEVPFVKVNAATGIMGGSVSHEYHYVSPVGEDNLLQCSSCGFAGNSEVVKAPASCPSCNSSDLKEVRGVEVAHTFLLGDKYSKPLGATFLNTTGKPQSLVMGCYGIGITRVIAAALEVLSSDHELRWPKLLAPYDVCLIGPKQGSKEQPEAEVIENELLLNVGEICGHQELLHDDRKELTIGKRLLEAKRLGHPLTIVVGAKSARLDSPKLEVHTSKGETYELDFSETLKLVAEHSQHKKSLERGCFQSETEESKSRSVGHQL

SEQ ID NO: 5011 - DNA, 3642 bp, DROSOPHILA
ttttgttctaactgatattttggcttcttaacatggttgatttgaaatgaacttttgagtttttaatgtcgacggcacttgtcatccaaaactcaaggctaatgccacgctaaagatctgataatgtgactaattgtaattctgcaggattctcaaaacgacgagaaacgtaactcaattgatttggatggtcccgagaacgcggacacacccgaaactacttctaacaaggatgaatcgacagagaaagccgacggagacttcaagtccagtgtgaaaccgtatggaacagctctcttatggcccactttacggtgtcctaattgtccttatatttctttccacagggatgagttcaacgttcgtcgcatgcacacagcaataaaactaaacgaggttattgtagaaaagtcacaggacgcccagttggtcataatgaatctacctggaccacctagggaagtgagagcggagcgtgaaagaaattgtaagatctgaaaggggaatgtatctgaggcacaaactaacccgtttatatccaatccgtagatatggaatttctggaggtattaacagagggccttgaaaaagtgttaatggttcgcggaggaggccgagaagttataacaatttactcttaagagcattaatcgctcagttttataagagttcgcaacactagacaagtttaagaatcaatcaaatttttaaagaaggttattaatttgttatattcaatcatatgtccaaatattttatttttacgtaaataaaatatcaaaaaattgtaacaataagaaccgaaggcgtttatcatttggtctacatctacacacataccctggccgcgtcgcttggaaacggagtaaacagcgtttgcaagatactttacctgtctttctacaatcgcgacgtaaaatcagatgcatctggcagattgaccaacactgctactcgatggtttctccccacttttgttatttcaaccgtggcgagttgtacgttctattacctcggatggcttagaaactgtgtggtcgaaacagaaacgatccaagctccagaaaatactcgaaataagtgtgaaaaactgtatagatcctcggaaaatacaccattcatgaatccggaatcgagggacctggatttgagaaaggtgcgagtgctggcctgccatcgaaggtggctctgtttattttgaacacgcaagcaactttcggtatccagctaacaaaagaatctaaacatatgcatctgggttgatccgagtgacatgtaccccattcattgattgaccattttctctgccacagggcgatgtcgagaggccgcacttcgaggcggttaccacactgtccgactcgcaggcgatccggagcgtcgactttcatccgaatggaaagttgtacgcggtgggctccaactccaagaccttccgcatctgccagtaccccgcgctgtccaagctgaggtaattaaatcgcagtgtgtcgcaactcgtctttgccttcaactcgtttcccatcccaatcccatgcagacatggacaccaggcagcggtgtatcccccgtccgttctctgcaagcgcacgaaacaccatcggggctccatatactgcacctgctggtcacgggatggggagctaattgccaccggatcgaacgacaagaccatcaagtacatgcgcttcaacaacgacaccaaccagctggtgggacacgagatggagctgaacatgcacgacggcacggtgcgggacatgtgcttcctggacgactcgtccaccaagtcccggctgctggcgagcggcggcgccggggactgcaagatctacatcacagactgcggaaccggcactcccttccaggcctacagtggtcatactggccacatcctgtccctctacagctggaacaacgcgatgttcgtgtcgggatcgcaggtgagtcgggggaagatccttcccagcctgtcccagctataaccatatgcgatgatctctttcaggatcaaacgatacgtttctgggatctgcgagtgaatgtctctgtgaatacgctggataacgatcgaaaggatggtggtctggagagctccgctgtaaccgcggtctgtgtagatcccaccggcaggctgctagtctctgggcacgctgacagctcctgtactctgtacgacatccgtggcaaccggcccattcagcgcttctatccgcacaccgctgaaataaggtagtagagctatcctctcccgcttggcatttggtaaaattggctttcacttccccaaaggtgcgtccgattctccccatccgcctactacatgctgacgtgcagctacgacaactcgatccggctgacggacctgcaaggcgacctggcccacgagctgtcctccgtggtggtggcggagcacaaggacaaggccatcaccatccgatggcatccgaccgagttctccttcatctccacgtcggcggacaagacggccaccctctgggcgctgccgccctcgtagctccgtggtccaatgttccggtccagtggcggctttaaattcgttgtcgatattgtacttccgcagaatagttcagactgatctaatttattgaataaacccattccaacagataaaggaaaatgaaacagggccgttctaatttatatatttggtatatatttatttaaatccgttcttactaacccacagttccattaatattttactttctaaggcaaataaattgatttatgttggatttaatgttgcagttgcaagtaacagggctggcttagcgattaatacacgaatgataaaggcaggaaaactcgtcctccttcacattcactttcacattcgtatcggctttggtggtccaaacctctacatcctgtcgacgacgacatcaggaactacaatttcggggcgaatacggattattacgtggcgattctcgatcggagggagggattaaccaacgcaagagcaaaccaaaactcgtgggggaaatggcgatggagtggcactgggtaccagttaagcggcatcttccgaaattctggaatttggcagcatcggtgggggatcgtacttacagcctagtggtttggagtttcttgggggagatgtttgagtgtgcttgattctctacttggattggaggcggggcgggagaaattgaattgagtagagtagagtacacaggccgggttcggatttcttgttttattgtttcgtttacgtttagatatcttacatgctgaatttcaaatctgtgttttctcggttatgccggcgagtgcgatggcaatgtactagaccataatgtacagcaattgttcttttctacattcacatcgacatgtcgcacccggacataatataataactgcacgtacttttctaaagcagggatggattcaatttgtgttatggtaactaatcggggtccagttaatgaaatctggggttgactgtataaaataaaacaatagttcattgagagatggtaggtaggttgctttgtaggtgggcagttgggtacgaataggtcgtcggccaaggaggattcaggtgtaccaacgggtcacgtgcatcgtgcaagcaaacgtaacttagaaataggaatagaaacggggagc

SEQ ID NO: 5012 - DNA, 1291 bp, DROSOPHILA
acgttctattacctcggatggcttagaaactgtgtggtcgaaacagaaacgatccaagctccagaaaatactcgaaataagtgtgaaaaactgtatagatcctcggaaaatacaccattcatgaatccggaatcgagggacctggatttgagaaagggcgatgtcgagaggccgcacttcgaggcggttaccacactgtccgactcgcaggcgatccggagcgtcgactttcatccgaatggaaagttgtacgcggtgggctccaactccaagaccttccgcatctgccagtaccccgcgctgtccaagctgagacatggacaccaggcagcggtgtatcccccgtccgttctctgcaagcgcacgaaacaccatcggggctccatatactgcacctgctggtcacgggatggggagctaattgccaccggatcgaacgacaagaccatcaagtacatgcgcttcaacaacgacaccaaccagctggtgggacacgagatggagctgaacatgcacgacggcacggtgcgggacatgtgcttcctggacgactcgtccaccaagtcccggctgctggcgagcggcggcgccggggactgcaagatctacatcacagactgcggaaccggcactcccttccaggcctacagtggtcatactggccacatcctgtccctctacagctggaacaacgcgatgttcgtgtcgggatcgcaggatcaaacgatacgtttctgggatctgcgagtgaatgtctctgtgaatacgctggataacgatcgaaaggatggtggtctggagagctccgctgtaaccgcggtctgtgtagatcccaccggcaggctgctagtctctgggcacgctgacagctcctgtactctgtacgacatccgtggcaaccggcccattcagcgcttctatccgcacaccgctgaaataaggtgcgtccgattctccccatccgcctactacatgctgacgtgcagctacgacaactcgatccggctgacggacctgcaaggcgacctggcccacgagctgtcctccgtggtggtggcggagcacaaggacaaggccatcaccatccgatggcatccgaccgagttctccttcatctccacgtcggcggacaagacggccaccctctgggcgctgccgccctcgtagctccgtggtccaatgttccggtccagtggcggctttaaattcgttgtcgatattgtacttccgcagaatagttcagactgatctaatttattgaataaacccattccaacagataaaggaaaat

SEQ ID NO: 5013 - protein, 348 aa, DROSOPHILA
MNPESRDLDLRKGDVERPHFEAVTTLSDSQAIRSVDFHPNGKLYAVGSNSKTFRICQYPALSKLRHGHQAAVYPPSVLCKRTKHHRGSIYCTCWSRDGELIATGSNDKTIKYMRFNNDTNQLVGHEMELNMHDGTVRDMCFLDDSSTKSRLLASGGAGDCKIYITDCGTGTPFQAYSGHTGHILSLYSWNNAMFVSGSQDQTIRFWDLRVNVSVNTLDNDRKDGGLESSAVTAVCVDPTGRLLVSGHADSSCTLYDIRGNRPIQRFYPHTAEIRCVRFSPSAYYMLTCSYDNSIRLTDLQGDLAHELSSVVVAEHKDKAITIRWHPTEFSFISTSADKTATLWALPPS

SEQ ID NO: 5014 - DNA, 2971 bp, DROSOPHILA
tcccgggctcctgtcgtccggacatcacccaccagtgcctgttgatgctcttcgattcgccactgaaccgggccggtctgcttcaggtctttgtgcgcaccgagcataatgtgcttatcgaaatcaatccccagacgcgcatcccgaggacatttaaacgctttgctggcctaatggtgcaattgctgcacaagttccaaattcgcgccaatgactcctcacgtcgtctgatgagtgtcattaagaatccgattacggatcatgtgccggtcggttgcaagaagtacgccatgagcttctctggcaaactattgcccaattgccgggatctggtgccacatggtgacgagacgtcggccagctatgatgagccggtggtcatcgttattggagccttcgcacatggcgttctcaaaacggactacacggaggagctgttctccattagcaactatccactttcggcggccatcgcgtgctccaaaatctgttccgccttcgaggaggtttggggcgtggtataatccaagtccaaagcattgtttttcttagtttagtcatagctagtagttagtctacatattattcttttgattgccttccattaaaatttggtggaatatccagaccagaatactattttcatctttcttaaagtttagaacatacaaagacgcttatatatatagttataatataatctgggatcctaattaatcatcacgaaacacacgcactttctctgtttttacaattagttggtttatttatgttaattgcagttacaaaagataggcttagaaaacttgcataattttgaaggtatgtttgcggtaatttatgcttaactaattgcactgttcatcaaaaggattattgcgaattttgtatacgttgcacgattgagagctctattaaatcccacatgggaaagggaaggtttcaaaagggatggattatctacttggcacccggctttttggtgcccacatcggctgccttcttttccgcctcccgcttggcggccgcctcctcgcgctgctgccggatcaaagccaatctggccagatcggccttagcctcggtggttttaccagcagcatggagtttctcgtaacgctggcgcgctctctgcttttcgatctgttcgcgttcgcggcgagaaagctccggcttgggattaccgccggcaccggctggcccgtcgtccagcttgatggccgatagcttttgtgtggccttcttggtcacccggttgggattctcgatttcgatgagtgaggccacgcccttcttggcatcgcgcgcttccgcttcggagtcatcgtcggaatcctcgccagactccgattccgaggaacttgccgcaccggcgcccgccgctgatcgagacttttgattgcgattcacgggcgctttacgtgtggcgggtgccttggctttggacgcagaggaactggctttgccgccggcagcgtctttatcgtcgctatctgatcccgagccgctggtctggtcgctatcctcctccgattcctgttgcagttcctcgggagatgtgaaatggcgactgcgacctttgtggttgacgaactttcctcgtggcatgatgatttatggactgatccttacggtttcccgggtattcgcaggtctctcctcctgtatgtccgatgtgcttgtatctagagcttttactctggctacgttaacggattcttacggtccgtttatgtttcgaaaattatctatatttaatcacgttgtaaaaaatttttttgcactattcacagtgttgtacagtgccggtcaaaagtgcgcccgtgcattcactgcatagtaataccgcataaataacacgaatggtaataccgtatcacgcctggcgccctcaagtgttcaagtttgctgtactcggtaattaaccgcttccataaccgtttcaaaacaaagcgggaaattcgaaaatgtctttggttgtttaattttttgaatttgcttatttttttttttttttgctcacttcgcttgactagcactttgaataggagcctacttagcgtagtttctgagcattgcaagtaactttgggataaactctttagttttatgattttttgtttatcattgtaattctaaaatataaaatatttgtatacattggaaattaaatacatatataatttccttgcccttcacctgctatctatctgtatataatctcactaaaaaatatcccgattttggaagtgtgctctttgcggcttttataagaaaaaaaaacggaaaactgcttaaaattgaaataaataaggcacacgtgttgggaattctcatttgggcgatggcaaaccataaattagtggtacatattccactcttttctttttattgggtcaacaccatcgattgaaagaagaaaaaccgattttacttttactcactgattggtttcttttttgaaaccgccattttgtcgattcgctgcaactgcaactgcagctgcacagaatctcgagatgcaggaaaacgtgattatgtatgtatgtatgtttgtgtgtatataaatgagtcgcactggcattggtctgctgctgtgatttgccggaaaaccagtttttcttcgcttttcactggccgcccgccacaagttgcaagcgaataatgcggcattaataaccagaaataaacgaaaatcgttttgcatatttgtgtcagcgcacattcctcgatatcatgcatctcattaacggaaactctcacatatgtacaacttattgattttggccggcaagaaaaaaaaaacacaaaaaaaaaaaacaataaaaaaagagccagaaatataaccaaatataatatactcgaaaatttaatgcacgaattaattatgaattccatgtgtgctcgccacgaaagcggcaaacaaatattcaaaaattcatcgtaaatgctgttcttctcgcccgctctt

SEQ ID NO: 5015 - DNA, 1227 bp, DROSOPHILA
acattttcgaatttcccgctttgttttgaaacggttatggaagcggttaattaccgagtacagcaaacttgaacacttgagggcgccaggcgtgatacggtattaccattcgtgttatttatgcggtattactatgcagtgaatgcacgggcgcacttttgaccggcactgtacaacactgtgaatagtgcaaaaaaattttttacaacgtgattaaatatagataattttcgaaacataaacggaccgtaagaatccgttaacgtagccagagtaaaagctctagatacaagcacatcggacatacaggaggagagacctgcgaatacccgggaaaccgtaaggatcagtccataaatcatcatgccacgaggaaagttcgtcaaccacaaaggtcgcagtcgccatttcacatctcccgaggaactgcaacaggaatcggaggaggatagcgaccagaccagcggctcgggatcagatagcgacgataaagacgctgccggcggcaaagccagttcctctgcgtccaaagccaaggcacccgccacacgtaaagcgcccgtgaatcgcaatcaaaagtctcgatcagcggcgggcgccggtgcggcaagttcctcggaatcggagtctggcgaggattccgacgatgactccgaagcggaagcgcgcgatgccaagaagggcgtggcctcactcatcgaaatcgagaatcccaaccgggtgaccaagaaggccacacaaaagctatcggccatcaagctggacgacgggccagccggtgccggcggtaatcccaagccggagctttctcgccgcgaacgcgaacagatcgaaaagcagagagcgcgccagcgttacgagaaactccatgctgctggtaaaaccaccgaggctaaggccgatctggccagattggctttgatccggcagcagcgcgaggaggcggccgccaagcgggaggcggaaaagaaggcagccgatgtgggcaccaaaaagccgggtgccaagtagataatccatcccttttgaaaccttccctttcccatgtgggatttaatagagctctcaatcgtgcaacgtatacaaaattcgcaataatccttttgatgaacagtgcaattagttaagcataaattaccgcaaacataccttcaaaattatgcaagttttctaagcctatcttttgtaactgcaattaacataaataaaccaactaattgtaaaaac

SEQ ID NO: 5016 - protein, 215 aa, DROSOPHILA
MPRGKFVNHKGRSRHFTSPEELQQESEEDSDQTSGSGSDSDDKDAAGGKASSSASKAKAPATRKAPVNRNQKSRSAAGAGAASSSESESGEDSDDDSEAEARDAKKGVASLIEIENPNRVTKKATQKLSAIKLDDGPAGAGGNPKPELSRREREQIEKQRARQRYEKLHAAGKTTEAKADLARLALIRQQREEAAAKREAEKKAADVGTKKPGAK

SEQ ID NO: 5017 - DNA, 3704 bp, DROSOPHILA
tttgtcatgactaagacaaatgtatggttctaacttgttcaaaacaatatcatcatactcagcattccgtataaaaacatcgaaattttaaaaaagtataaatatttataagatcggtagaacttaaaactttttacacgttggtgatcgttctgacatttcatttaactgtgaaccctaaaagtattcttctctattttgtgtgtaagtcggagatgtatgtaaaaaactgggctcactatagttctgtcgacgatctcaaggtggcgccaccaaatttaacaaaaatgggttaaataattttcatgataatcaaataaatgaaggaaaatcattcagtctttattaccttctttatctttattgtagaacatccccctatgaaagaaaacataattttttcaaaaatgatcaatgtaggaataagaaataaaagattatttactacgttttaatctcgaatttatttataaaataaaaacacatttcttttgttcaaaacaatccatagaaataaaatacacgtattaaaaagcgtcgcttgcataaagaaaaatacaaaattgttgagcgatagatacgaaaagcggaaatacacgtccccgaaagggtgtacttaagcattaaaagtagatgaacgccgtaccactaaattagcagcagctatatacgatctatgtacatgaacatggatgactggatgcggaaagtgttggggactaaatgtggatatatttgtagctaagaaatgatcgatggacagcggtatgccagcgatttgtgatccttacgtgcgatcaccatggattgtccatgaaataatgtttttgattccttgtcttcaattgatcttggtgcgaattcgatttggcttagatgtaggcttggactccctatgcttacgtttaatttaaatgtacggtattttaattggtagcgtaattaatttatgcttatgtgtgtttcatgtttggctggctggctggttggctggcggcgctcacttgttgccggcgttcacgagcacacgctgtctcgtcgaggagttcagggccggattgcacatatccgtggtgaacttggagaaggtgttgtggaagccgttggcctggccgttgctggttggcgccacatcgccgtccttgagcgccttcacgtgtccgttggcatgtccgtttgccttcaccgacgctttgtcctgaaaaaagaacatttggttaaatatatgctgtcataagctttttaacaattttaaaaatacatggttatacatactagcctttggctctagtatagcctagctagcattcttaccttgccatcgcgtttcacataggcacgcttgtagaagtttgagaacaggaagtagaacataaccgcatgggctccgatgaagtaggcgaagccaattgggtagttgcagtcgttcttgaagaacagctggaaggagtgcaccataaccaggacgaactggatcatctgcatcactgtcaggtacttcttccaccacaggtacttctgcaccttgggtcccatggcggccagcatgtagtaggcgtacatgaagatgtgcacgaaggtgttcaggaagccaaagaaggtcgagtggccaccgggggtgaacttgacgccccaccagacggagacgggcatgatgccgtggtggatcacgtgcaacgtggacacttgatcgtaccgcttacgcatcacaaagaagaaggtgtcgaagaactcggtgaactttgagaagtagtaccaccagcagccctcagcggtctgaaaaatgtaaaggtcattttattagttatttctatttaccattattggatgggttttaacaaattaaacagttggcctcagaagtacttgccaaatgctttctagcaataatttcctcaaattacgattatttcttagaatgcttatagaaattcaaattctagtcataactaatatctgtgctcattcccctcccatatttcaagcatttattgttatgctaaaaataatcacagcttgggtagatcgattccgtttggcctggaactaacggttggacaaatcccaagcttatcaataacaagaaaatgggcgatttgcaaaaatctttcgcctggcaactttctaagaccgccactttctttgggtcatttacccactttagccagcctggcgacacacgtgagattcctcaagccgcagaatccactggccacacagccggccggctttcagtatccatttcttcgtgattagcataagagaacctgtcgccattgccgtttttctaatatcttgtctcttcgtggccgaaaactggttgcttacataaaatctggcccagtcaacaaaagaactttgctatttgccaaccataagctaaaatcaaaatttatagcccgatgtttgagtatacatattagcttagcgcggtatatagaagcttccacaaatacttacacgaatagctttgggcgagtaggaataattaacgggctcgcatcgcaagttatagccgttgagccatccacctatgcaggactataaaagaaaaagaaaaagaaaaaaagaagggagtaagtggaaattaactataatatatgtattacattacctcgtaaaaaagccaggcactgaagataacctgcgctgcattgtagacgatcaagactttgcggagctcgaaaggctttctgttttccatgagcttgggtccgagtacctgcaataagatgttgattagtttcagtgtaaggcgtcctcttcacctcgaatcttaaatctcacgtcttgtcttcgttgtctttgcgtgtcatttacatagtcaaacagaggccgaagcctgttgcagcaattatcaaatcaaatcaatcgtcgcgaccgactttgtctgttggttttgtgacaagttcgttgccgaagtcttttgtttggccaaccgccgtcccggcgcgttcgcctatcgaatttagcagacatgtgaaagtaagttaaatgcttttgtaaaattatgaatgtgaaccaatgcaaagcgggaaacctaaatagaaatcgtttttggaattgattttttaaattttgcataatctcccgccgcctgtgcttgggtcacctttcgacaccagctcttcgagacgatcatagcagaaattggatggccctgaacccttagctcgggtttcacagtcattttgcaatgcaataaagcgaaactagtttgcgaaaaggatccgcataatcagcagatgagaatctgccagttctggtctccgaaatcagcgtaaattacccccatcggaatgatgttgttctgttctgttgcgttctgtttagtccgttttttgttcgattccattcggctgcgcctggccccactccaataattatggattggtgcttccccaaacccagaccacttacctttacgatgtacgcgtatgtcagactgatagctatcgtggggaacggcgagctcatgagcgggtagtctcgtgttcgcggatccgatttgttgtccatcagatcccgccagccgtcgtagaacattgtgaggtaatcctgcaagtgtaaagaccaaaaagatgaaagataagtcatgtgtgctaactgggagtggctaatcacccaggctacttagcgggatcaagtgtcaaatcaataaatttgaattgctattgcaaaactgccgtttcaggcaaaatcag

SEQ ID NO: 5018 - DNA, 831 bp, DROSOPHILA
atggaaaacagaaagcctttcgagctccgcaaagtcttgatcgtctacaatgcagcgcaggttatcttcagtgcctggcttttttacgagtcctgcataggtggatggctcaacggctataacttgcgatgcgagcccgttaattattcctactcgcccaaagctattcgtaccgctgagggctgctggtggtactacttctcaaagttcaccgagttcttcgacaccttcttctttgtgatgcgtaagcggtacgatcaagtgtccacgttgcacgtgatccaccacggcatcatgcccgtctccgtctggtggggcgtcaagttcacccccggtggccactcgaccttctttggcttcctgaacaccttcgtgcacatcttcatgtacgcctactacatgctggccgccatgggacccaaggtgcagaagtacctgtggtggaagaagtacctgacagtgatgcagatgatccagttcgtcctggttatggtgcactccttccagctgttcttcaagaacgactgcaactacccaattggcttcgcctacttcatcggagcccatgcggttatgttctacttcctgttctcaaacttctacaagcgtgcctatgtgaaacgcgatggcaaggacaaagcgtcggtgaaggcaaacggacatgccaacggacacgtgaaggcgctcaaggacggcgatgtggcgccaaccagcaacggccaggccaacggcttccacaacaccttctccaagttcaccacggatatgtgcaatccggccctgaactcctcgacgagacagcgtgtgctcgtgaacgccggcaacaagtga

SEQ ID NO: 5019 - protein, 276 aa, DROSOPHILA
MENRKPFELRKVLIVYNAAQVIFSAWLFYESCIGGWLNGYNLRCEPVNYSYSPKAIRTAEGCWWYYFSKFTEFFDTFFFVMRKRYDQVSTLHVIHHGIMPVSVWWGVKFTPGGHSTFFGFLNTFVHIFMYAYYMLAAMGPKVQKYLWWKKYLTVMQMIQFVLVMVHSFQLFFKNDCNYPIGFAYFIGAHAVMFYFLFSNFYKRAYVKRDGKDKASVKANGHANGHVKALKDGDVAPTSNGQANGFHNTFSKFTTDMCNPALNSSTRQRVLVNAGNK

SEQ ID NO: 5020 - DNA, 9516 bp, DROSOPHILA
ttttattttgcacgccgaaacacacacgtaaattggacgaatttacaaaatgtaaacgggttgaagggggtaaaggtggtccaattaaagaaatttttctcagtgaattattaaaagctgaaaccattaaataatggttcccaccttatcgttctttcgcattaatcttatcaatatctttcttccaagaaacacttttaaatttagaaagccctatttaattttgtttttatttttaattgcccgtctgaagattaaagctacatcgctgggcaaactgagtaaaaaaaaaaaactttcctttaaatggcgccaatttagacatttggaattttttgaaattcttatgtgtgctcctctaatcttgaaagcttaattggttatagcacctacgttcacttcaaggaattcgaacatcgagttcaaatattttctaacgacatgcaaaataaagctagaatttctgagcatccccttctcattttcagtcataatttcggccatctcagccatcgaaccgcaattggccagcctcggaataaatgaagccctaatgagccgcaatcgatcaactttgctgatatgtggctcaccctaatgcgtatatatcctcctcactgtcgtgcacactgtgcatttgggcgtgggagtcactggctggtgaaatgggggctacagggacgtggcaaatggcgtcgcatcgccaagggattaacaggcagtagctggggccgcctgagggataataagtgcattggagcatcaaatcaataaaacgcgcacactggcccacacaaaacacacacacactcactcgcatgggacagtggccattggagcatggggcatggagcacggagcatggagcatggggcatgtgaggattgtgcgggtccctcgccccactgccacaaagaattcgctgcatcagtggctgcaattgcgaaacattgttaatttatgcaaatttagccaacgccgctcgctttgtgaaacgccaatgaggcaagagagtcgagccgcgacgcggcgcggcgaattggaagcctccgcagagcagtgcaaccaccaacggcgtcgtcatagccgcgaccgcagcgccaacaacattaacggaggagctgcagctgcagctgccactgcaaagggcggcgttcaccgctgctcgggcgccatctgcgaaaggtggaaacaaaatcgctggtcccatcatccggttgggccctccgggtgccgttgcataatttgacccaccaccaccttggcgtatttgcatttgcctccatccacccatccaaccatccatcgcctagatcccgatggcaaccacaaagcctatttaggtttgggtccactccaagccactgggtttcgagcgaattagcacacacctagccagaaggtttctcatcgatggccactccagcagtcataatattaaatacatctgaacactgtccacgcaaagattgcaatttaaattaaactaaaatttataactataactaactatagaagtaaatagtaatataacggatacattcaggtgataagtacagagttttattgtttattttataatttaaagtccaaaacaatctaataactggagatacacaggaatttatgatatcaatataattgcagtgtacacatatttgataatacaaatatatggctaactgtatttattgtattgtctagacacacgaaaaccgcaatttgactgcgcctgcattgcatttaccatttttattttgttttttattttttctctctttcaactcgatatttcgtttttgttgcacggcttaaccgcattaatggcaaataaaaaaaataaaaaaaagtaaagcaaattccacttaattgttcaattttcatggaattcgccagtccaggctcaaagggcatatgcaattggccagcggagagggaagttcgaagttcaaagggtgccggtggtgggagtgggattcgtgggatccatgacagatgttgggcgcacctttcgacctccgggtaataatgtgcactacaggtgtgcatttcatatggtaattacgtctccggtggaaacttggatttcttaatagaaaataatgctaagcatggaactattctcactttggcttaaattggcaattacaattacaattacaattaattaattaacaatatgaaacaacaatgtaacgttagctaagcttatgcaaatttagctggattacattgggagtgatacttgaactctggaaaactcggcctgcgatcgtaaatttcaacggcctccccctccagttatacaatattttttggaatctgctcagaatctagacaagatctgtcccaaatgatatgcatttgggacagctgaagcgttatcttaaaacgatatacaaaaaaaaggaaaaataccatggacatgaccatttccctttgactgcgtcattggcgagaaaactgcactcttgagattaacccgtggggttacgcggtctgtcgaccccaagaattggattgagtgaaacttcacgaatatgtatgtatgtatattcgtattgcctgtctgtaggtctgctcttttaatatctgtgttattatgtttatttacctagctgggggcaaataaagcaaagactccagtcaacggaaatgcgcagcccgctttatcaacatttacgttgacattagtgttggccaagattaagattacgtattaaagagtcaaaacaaattggccaaaagaaaatgttctaaacgctaagataacaagtctgagtcattagagcaagtttatatagtgcatggtacatagattcatatgggcttgatctctactatatcatctaaaagttataaattatatatatatatcgcttatatgcttgatcatttggttgatattttaaactttagatataacctgcgccgcaataccataaattggtttagccaaaacgtttatcggcgagagcaaacaagcgattatcgcgtatttggccagcgtcagcagagatttcgctcgggaagttggcaagatctgaagatagcgagattgttttttttttttttgcataaaaaccctgaaggctggcatactggggatagtaacgattcttcattcgaaccaaaaacacatccaacgaacacgatgacaacgaaccgatccaccagactactggtgttgctagtggtaattgcataatcgcagccatcgcgtcatccaacgatccaagttcaatcgcaacttgtatcgcaatggattttgtatccgaactttttactcgtttgttgttttttttttttttatgctgttctatttggttgtatttactgacgagttgtattttattgaaattcaatcggtggttggttggcacttggatacgcacaacacacgccgcgaaatcacgaaatccccaaaactataaaatgcaacaatcaaaatcgaaaccataatcgaatccttagctcccgggactcttgttactttggataacgttcaaagcgctcggcgatcaatcgaaagtatcctatgcaagtgaaaagaaattacagtgtaattgttaaggtcccgagacaaacagtgcaccgacccaatcccatggagaccgcatccccattaatacgatctataacccaccaccacacggtgggttctttctttctatcccacagttgaccgccctggtggccagccatcaggcgcatgccgccgccgtgggattgaagtgcggtggtaagagcgccgtctgcgtgggaccactctcctatcagcagtgcgttgatgacctgaccaccggtccggtggtgccatgcgcattgaacacccgctgtgtcaccgacggcctcgagatttgtgtgccggtcaagtcggccgctgaggcgcccacggcggctgtcgccaagatggtgaccatcaccgacagtcccgttgtgagcgagtcggctccgctagtggattccaccaacagcggttccggtgtagagatctccaccgagggcgcaccagccagcgctgttccgactaagccatctattccggttgagaccactcaggcaccggttgagaccacccagattccgctcgagaccacacaggttgcggttgagaccacccagattccgcttgaaaccacccaagcttccggcgagacaactacagcagccattgaggagactaccacaggttcggaagcaccactggaaccggaatcgacggtgcccagcgatacaactcccgtggactccacattggcacccggatgggaaggcacttacccaaccattgaacccaacacaccagcagaagatcccaacgctcctgcgggaactactcttgctcctggcgaagtcgatcccaacagccccattgaccccaattcacctctggacccgaacgcaccagaagaatctactaacgaacccggcttagttgaccccaccctacctgctgacacaactactgctccagattcccctgttgaaggatcaagcgcagctcctggcacaccggctgatgtcacaactgccgctcctggtgctccagctgatggatcatctgccgctcctggttctccagctgacggatcttccgctgctcctggctctcctgctgatgtcacaactgccgctcctggtgctccagccgatggatcatctgccgctcctggcgctccagctgacggatcttccgctgctcctggctctcctgctgatgtcacaactgccgctcctggtgctccagccgatggatcatctgccgctcctggttctccagctgaaggatcttccgctgctcctggcgctcctgctgatgtcacaactgccgctcctggtgctccagccgatggatcatctgccgctcctggcgctccagctgacggatcttccgctgctcctggctctcctgctgatgtcacaactgccgctcctggtgctccagccgatggatcatctgccgctcctggttctccagctgaaggatcttccgctgctcctggcgctcctgctgatgtcacaactgccgctcctggtgctccagccgatggatcatctgccgctcctggcgctccagctgacggatcttccgctgctcctggctctcctgctgatgtcacaactgccgctcctggcgctccagctgatggatcatctgccgctcctggcgctccagctgacggatcttccgctgctcctggctctcctgctgatgtcacaactgccgctcctggcgctccagctgatggatcatctgccgctcctggcgctcctgctgatgtcacaactgccgctcctggtgctccagccgatggatcatctgccgctcctggttctccagctgaaggatcttccgctgctcctggcgctcctgctgatgtcacaactgccgctcctggtgctccagccgatggatcatctgccgctcctggcgctccagctgacggatcttccgctgctcctggctctcctgctgatgtcacaactgccgctcctggcgctccagctgacggatcttccgctgctcctggctctcctgctgatgtcacaactgccgctcctggcgctccagctgatggatcttctcccgctcctggcgctccagctgacggatcttccgctgctcctggctctcctgctgatgtcacaactgccgctcctggtgctccagccgatggatcatctgccgctcctggttctccagctgaaggatcttccgctgctcctggcgctcctgctgatgtcacaactgccgctcctggtgctccagccgatggatcatctgccgctcctggcgctccagctgacggatcttccgctgctcctggctctcctgctgatgtcacaactgccgctcctggtgctccagccgatggatcatctgccgctcctggcgctccagctgacggatcttccgctgctcctggctctcctgctgatgtcacaactgccgctcctggtgctccagccgatggatcatctgccgctcctggttctccagctgaaggatcttccgctgctcctggctctcctgctgatgtcacaactgccgctcctggcggctccagctgatggatcatctgccgctcctggcgctccagctgacggatcttccgctgctcctggctctcctgctgatgtcacaactgccagctcctggcgctccagctgacggatcttccgctgctcctggctctcctgctgatgtcacaactgccgctcctggtgctccagccgatggatcatctgccgctcctggttctccagctgaaggatcttccgctgctcctggctctcctgctgatgtcacaactgccgctcctggtgctccagccgatggatcatctgccgctcctggcgctccagctgacggatcttccgctgctcctggctctcctgctgatgtcacaactgccgctcctggtgctccagccgatggatcatctgccgctcctggcgctccagctgacggatcttccgctgctcctggctctcctgctgatgtcacaactgccgctcctggcgctccagctgacggatcttccgctgctcctggctctcctgctgatgtcacaactgccgctcctggcgctccagctgacggatcatctgccgctcctggttctccagctgaaggatcttccgctgctcctggcgctcctgctgatgtcacaactgccgctcctggtgctccagccgatggatcatctgccgctcctggcgctccagctgacggatcttccgctgctcctggctctcctgctgatgtcacaactgccgctcctggcgctccagctgatggatcatctgccgctcctggcgctcctgctgatgtcacaactgccgctcctggtgctccagccgatggatcatctgccgctcctggttctccagctgaaggatcttccgctgctcctggcgctcctgctgatgtcacaactgccgctcctggtgctccagccgatggatcatctgccgctcctggcgctccagctgacggatcttccgctgctcctggctctcctgctgatgtcacaactgccgctcctggcgctccagctgacggatcttccgctgctcctggctctcctgctgatgtcacaactgccgctcctggcgctccagctgatggatcttctgccgctcctggttctcctgctgaaggatcccctcccgctggaggatcccctgctggttccaatgtccccgctggtggagaccctgctgattccaatgtccccgctggtggagcccctgctgattccaatgtccccgctggaggagcccctgctgattccaatgtccccgctggaggagcccctgctgattccaatgtccccgctggaggagcccctgctgatgccaatgtccccgctggcggagcccctgctgattccaatgtccccggtggaggagcccctgctgatgccaatgtccccgctggtggagcccctgctgactccaatgtccccgctggaggagcccctgctggttccaatgtccccgctggaggagcccctgctgattccaatgtacccgctggaggagcccctgctgattccaatgtccccgctggtggagcccctgctggttccaatgttcccgctggtagctcccctggatcatctgttctgggaccaaatccgccagctggctcagttgtaccatcgattcctgtacttcctggcggagctggctcttggccttggcatcctcgaccaaacattccaatcgtgccaccgacctggaggcccctgcttcctggacaaaatggctcaggcgctcctggcagtggactaatcaatggcatcgtcaacccgccccaacgcccccatcccttctggcccaactggcaaagctgggtgaacagctggcgaccaacaaagccagttcctagcactgaggctcctgtccaaccgcagaatcctcagcagccgcagaatcctcaacagcctggaaacagcaatcctgagaccgccgaaagcgtagagcaagctgctccagtaccaccagccaatgtaccagcgtccaacgagaatgcctccgttgaggacagcaacaaagcttccagcgagaagtccaaggacaagccaaagtccggtgaggatcaatccaaggagcaggaacagaagaagcccagctctgaggagaaagagaaggacagcaaggagaagaacgacaaggacagcaaggagaaaaaggacaacgatagcaaggacaagaaggacaagtccaaggaggagaaggacaacgagtcccagaaagacaacgatggcgacgacgagccgagctccaaggagaagaagcaatacgtcaaggatctgatcaagaagctgaagaagggcgacgagtgcgacgaggacgacgtctatccggatgtccgtgattgccgcaaatactaccgttgcgaggtcaagaagtccggcaagcataagttcgcccacctgcgttgcgacaagaaggagcgattcgactggcttacccagtcctgtgtgcccaaggatgaggcccgttgtctcgagaaatagaactggcgtgggatgccacaatcaactgcacttaaatattggcaatgatattctatctccatttcctgggtcctatctaatttattgcacttaaacttaaatatctatcattttttgttttccttaataaatcttgaactttatgaaaatctggcaaatcgattgtttcattttgggttaaatactctatctagaagatttcgtttctttacgatcttcaaagataaaatcgaaatcgaaaaactctggacacttgcaatgcttaaactattcaaatgcgtttaatgcacagctgttttttgagtttcgcccagtcatcattcttgttcctaacaatttgctgattatgcctccaatccttctcgatggcgcataatgagtgaaggaactttggaggaacaaagtttccgcagcgcttccttaaagcatctcacttacacttgccaactttttttttttttttcctatctaaatatttagtgtagcatacaattttgaagtgaaatgtaaacaggagcaaaaaagcgctgaggggaaagtgcattgggctggctccagtggaggccaaaaggcagatatagctgaagctggagccggaactggagtccctgacccccaactacgggataccagatccagtaaaaatagggagatatatatacatatatatatagatagagagagagtgagggagtgaagcagagcaatacacttaagttgattcgctgtcatccattgcagctcatttatcattagacggagtcacacaggaccaggcccggcgacagtttcagtgtcgtctaagcagggcgaggacgaggacgaggacggtgagaaggatcaacgaggagcggatacatgggcgcgtcaagagcaagcccaacactttgccgggaacgaaaagcggggagaccacgacaacgacgacaaagtaattcaatttttatcgtgggtaattttgtaacgagaaacgaagcaagcaaat

SEQ ID NO: 5021 - DNA, 4954 bp, DROSOPHILA
atgaggcaagagagtcgagccgcgacgcggcgcggcgaattggaagcctccgcagagcagtgcaaccaccaacggcgtcgtcatagccgcgaccgcagcgccaacaacattaacggaggagctgcagctgcagctgccactgcaaagggcggcgttcaccgctgctcgggcgccatctgcgaaaggtggaaacaaaatcgctggtcccatcatccgttgaccgccctggtggccagccatcaggcgcatgccgccgccgtgggattgaagtgcggtggtaagagcgccgtctgcgtgggaccactctcctatcagcagtgcgttgatgacctgaccaccggtccggtggtgccatgcgcattgaacacccgctgtgtcaccgacggcctcgagatttgtgtgccggtcaagtcggccgctgaggcgcccacggcggctgtcgccaagatggtgaccatcaccgacagtcccgttgtgagcgagtcggctccgctagtggattccaccaacagcggttccggtgtagagatctccaccgagggcgcaccagccagcgctgttccgactaagccatctattccggttgagaccactcaggcaccggttgagaccacccagattccgctcgagaccacacaggttgcggttgagaccacccagattccgcttgaaaccacccaagcttccggcgagacaactacagcagccattgaggagactaccacaggttcggaagcaccactggaaccggaatcgacggtgcccagcgatacaactcccgtggactccacattggcacccggatgggaaggcacttacccaaccattgaacccaacacaccagcagaagatcccaacgctcctgcgggaactactcttgctcctggcgaagtcgatcccaacagccccattgaccccaattcacctctggacccgaacgcaccagaagaatctactaacgaacccggcttagttgaccccaccctacctgctgacacaactactgctccagattcccctgttgaaggatcaagcgcagctcctggcacaccggctgatgtcacaactgccgctcctggtgctccagctgatggatcatctgccgctcctggttctccagctgacggatcttccgctgctcctggctctcctgctgatgtcacaactgccgctcctggtgctccagccgatggatcatctgccgctcctggcgctccagctgacggatcttccgctgctcctggctctcctgctgatgtcacaactgccgctcctggtgctccagccgatggatcatctgccgctcctggttctccagctgaaggatcttccgctgctcctggcgctcctgctgatgtcacaactgccgctcctggtgctccagccgatggatcatctgccgctcctggcgctccagctgacggatcttccgctgctcctggctctcctgctgatgtcacaactgccgctcctggtgctccagccgatggatcatctgccgctcctggttctccagctgaaggatcttccgctgctcctggcgctcctgctgatgtcacaactgccgctcctggtgctccagccgatggatcatctgccgctcctggcgctccagctgacggatcttccgctgctcctggctctcctgctgatgtcacaactgccgctcctggcgctccagctgatggatcatctgccgctcctggcgctccagctgacggatcttccgctgctcctggctctcctgctgatgtcacaactgccgctcctggcgctccagctgatggatcatctgccgctcctggcgctcctgctgatgtcacaactgccgctcctggtgctccagccgatggatcatctgccgctcctggttctccagctgaaggatcttccgctgctcctggcgctcctgctgatgtcacaactgccgctcctggtgctccagccgatggatcatctgccgctcctggcgctccagctgacggatcttccgctgctcctggctctcctgctgatgtcacaactgccgctcctggcgctccagctgacggatcttccgctgctcctggctctcctgctgatgtcacaactgccgctcctggcgctccagctgatggatcttctcccgctcctggcgctccagctgacggatcttccgctgctcctggctctcctgctgatgtcacaactgccgctcctggtgctccagccgatggatcatctgccgctcctggttctccagctgaaggatcttccgctgctcctggcgctcctgctgatgtcacaactgccgctcctggtgctccagccgatggatcatctgccgctcctggcgctccagctgacggatcttccgctgctcctggctctcctgctgatgtcacaactgccgctcctggtgctccagccgatggatcatctgccgctcctggcgctccagctgacggatcttccgctgctcctggctctcctgctgatgctgacggatcttccgctgctcctggctctcctgctgatgtcacaactgccgctcctggtgctccagccgatggatcatctgccgctcctggttctccagctgaaggatcttccgctgctcctggctctcctgctgatgtcacaactgccgctcctggtgctccagccgatggatcatctgccgctcctggcgctccagctgacggatcttccgctgctcctggctctcctgctgatgtcacaactgccgctcctggtgctccagccgatggatcatctgccgctcctggcgctccagctgacggatcttccgctgctcctggctctcctgctgatgtcacaactgccgctcctggcgctccagctgacggatcttccgctgctcctggctctcctgctgatgtcacaactgccgctcctggcgctccagctgacggatcatctgccgctcctggttctccagctgaaggatcttccgctgctcctggcgctcctgctgatgtcacaactgccgctcctggtgctccagccgatggatcatctgccgctcctggcgctccagctgacggatcttccgctgctcctggctctcctgctgatgtcacaactgccgctcctggcgctccagctgatggatcatctgccgctcctggcgctcctgctgatgtcacaactgccgctcctggtgctccagccgatggatcatctgccgctcctggttctccagctgaaggatcttccgctgctcctggcgctcctgctgatgtcacaactgccgctcctggtgctccagccgatggatcatctgccgctcctggcgctccagctgacggatcttccgctgctcctggctctcctgctgatgtcacaactgccgctcctggcgctccagctgacggatcttccgctgctcctggctctcctgctgatgtcacaactgccgctcctggcgctccagctgatggatcttctgccgctcctggttctcctgctgaaggatcccctcccgctggaggatcccctgctggttccaatgtccccgctggtggagaccctgctgattccaatgtccccgctggtggagcccctgctgattccaatgtccccgctggaggagcccctgctgattccaatgtccccgctggaggagcccctgctgattccaatgtccccgctggaggagcccctgctgatgccaatgtccccgctggcggagcccctgctgattccaatgtccccggtggaggagcccctgctgatgccaatgtccccgctggtggagcccctgctgactccaatgtccccgctggaggagcccctgctggttccaatgtccccgctggaggagcccctgctgattccaatgtacccgctggaggagcccctgctgattccaatgtccccgctggtggagcccctgctggttccaatgttcccgctggtagctcccctggatcatctgttctgggaccaaatccgccagctggctcagttgtaccatcgattcctgtacttcctggcggagctggctcttggccttggcatcctcgaccaaacattccaatcgtgccaccgacctggaggcccctgcttcctggacaaaatggctcaggcgctcctggcagtggactaatcaatggcatcgtcaacccgccccaacgcccccatcccttctggcccaactggcaaagctgggtgaacagctggcgaccaacaaagccagttcctagcactgaggctcctgtccaaccgcagaatcctcagcagccgcagaatcctcaacagcctggaaacagcaatcctgagaccgccgaaagcgtagagcaagctgctccagtaccaccagccaatgtaccagcgtccaacgagaatgcctccgttgaggacagcaacaaagcttccagcgagaagtccaaggacaagccaaagtccggtgaggatcaatccaaggagcaggaacagaagaagcccagctctgaggagaaagagaaggacagcaaggagaagaacgacaaggacagcaaggagaaaaaggacaacgatagcaaggacaagaaggacaagtccaaggaggagaaggacaacgagtcccagaaagacaacgatggcgacgacgagccgagctccaaggagaagaagcaatacgtcaaggatctgatcaagaagctgaagaagggcgacgagtgcgacgaggacgacgtctatccggatgtccgtgattgccgcaaatactaccgttgcgaggtcaagaagtccggcaagcataagttcgcccacctgcgttgcgacaagaaggagcgattcgactggcttacccagtcctgtgtgcccaaggatgaggcccgttgtctcgagaaatagaactggcgtgggatgccacaatcaactgcacttaaatattggcaatgatattctatctccatttcctgggtcctatctaatttattgcacttaaacttaaatatctatcattttt

SEQ ID NO: 5022 - protein, 1612 aa, DROSOPHILA
MRQESRAATRRGELEASAEQCNHQRRRHSRDRSANNINGGAAAAAATAKGGVHRCSGAICERWKQNRWSHHPLTALVASHQAHAAAVGLKCGGKSAVCVGPLSYQQCVDDLTTGPVVPCALNTRCVTDGLEICVPVKSAAEAPTAAVAKMVTITDSPVVSESAPLVDSTNSGSGVEISTEGAPASAVPTKPSIPVETTQAPVETTQIPLETTQVAVETTQIPLETTQASGETTTAAIEETTTGSEAPLEPESTVPSDTTPVDSTLAPGWEGTYPTIEPNTPAEDPNAPAGTTLAPGEVDPNSPIDPNSPLDPNAPEESTNEPGLVDPTLPADTTTAPDSPVEGSSAAPGTPADVTTAAPGAPADGSSAAPGSPADGSSAAPGSPADVTTAAPGAPADGSSAAPGAPADGSSAAPGSPADVTTAAPGAPADGSSAAPGSPAEGSSAAPGAPADVTTAAPGAPADGSSAAPGAPADGSSAAPGSPADVTTAAPGAPADGSSAAPGSPAEGSSAAPGAPADVTTAAPGAPADGSSAAPGAPADGSSAAPGSPADVTTAAPGAPADGSSAAPGAPADGSSAAPGSPADVTTAAPGAPADGSSAAPGAPADVTTAAPGAPADGSSAAPGSPAEGSSAAPGAPADVTTAAPGAPADGSSAAPGAPADGSSAAPGSPADVTTAAPGAPADGSSAAPGSPADVTTAAPGAPADGSSPAPGAPADGSSAAPGSPADVTTAAPGAPADGSSAAPGSPAEGSSAAPGAPADVTTAAPGAPADGSSAAPGAPADGSSAAPGSPADVTTAAPGAPADGSSAAPGAPADGSSAAPGSPADADGSSAAPGSPADVTTAAPGAPADGSSAAPGSPAEGSSAAPGSPADVTTAAPGAPADGSSAAPGAPADGSSAAPGSPADVTTAAPGAPADGSSAAPGAPADGSSAAPGSPADVTTAAPGAPADGSSAAPGSPADVTTAAPGAPADGSSAAPGSPAEGSSAAPGAPADVTTAAPGAPADGSSAAPGAPADGSSAAPGSPADVTTAAPGAPADGSSAAPGAPADVTTAAPGAPADGSSAAPGSPAEGSSAAPGAPADVTTAAPGAPADGSSAAPGAPADGSSAAPGSPADVTTAAPGAPADGSSAAPGSPADVTTAAPGAPADGSSAAPGSPAEGSPPAGGSPAGSNVPAGGDPADSNVPAGGAPADSNVPAGGAPADSNVPAGGAPADSNVPAGGAPADANVPAGGAPADSNVPGGGAPADANVPAGGAPADSNVPAGGAPAGSNVPAGGAPADSNVPAGGAPADSNVPAGGAPAGSNVPAGSSPGSSVLGPNPPAGSVVPSIPVLPGGAGSWPWHPRPNIPIVPPTWRPLLPGQNGSGAPGSGLINGIVNPPQRPHPFWPNWQSWVNSWRPTKPVPSTEAPVQPQNPQQPQNPQQPGNSNPETAESVEQAAPVPPANVPASNENASVEDSNKASSEKSKDKPKSGEDQSKEQEQKKPSSEEKEKDSKEKNDKDSKEKKDNDSKDKKDKSKEEKDNESQKDNDGDDEPSSKEKKQYVKDLIKKLKKGDECDEDDVYPDVRDCRKYYRCEVKKSGKHKFAHLRCDKKERFDWLTQSCVPKDEARCLEK

SEQ ID NO: 5023 - DNA, 18173 bp, DROSOPHILA
ctgcaatcaagtacgaagagttcaattcatttcgtgagcacctttgtgaaagctgaaatcgtgtgaaaaaacctgctgccaatgcttaagctgcgtttaatagctacttaatatcgtatgcatatggtttaggttttagtttcagtttcagtttcagttttagttgggtttggcttggcttgctgcccatagctcggtgtgttctcattaggcggtagtaactctaaatcaataatatagtatgttcacttcctcgactgctgccgcagcttggattctcttacacaactgagtataacgaaattgttttataccggagtttttggtaatttccgtctagttggcgatgctggtgatttgtctgtggtggtttcgggttctgtttttcggtaaatcgtttgtcgcgataagaagtaacaagaaacgagagcaacaaaggaaaattatgtgaatgtttacttgcagggtacatataaatatatatattatattgaattgctgggtacattatgtacaggataatcaactgggttccattgacggcacttacccgctatgaggcccagtccgacgggaccgtctccggatctccgaggtccgctttggccaccggcattgccgggcggtaggttctcatcgaagagatcgcacatccggaagtccgtggcatgctccaccagaagctccacaacgtctccggttcggtccatgatggagcacacctcctcgaaacttcggtcgatcagcgacattccattccactcgagtatctattgatggagataataccataagatcttagttacataatcctttcctacttagagacttgaatgtaaaaatgtaataaaagattgtgaccaaatgttatttgctgaagtttgtcattttatttactgtgtactttcagtatctcgtgtcgaaaatcatcaatcatgtgctattaatttgggactgccatctggccgagtgctcaacgcggttggccgcactttgccaccaccctttcagtcattaccaatcatggcaggctggccaaaacaccacccaccacccacacaccatactcaccttgtcgccctgctgcaggccattcttctcggccgctcctcctggaacggtccacacaatgtaggcgaagagacggccatcggctcctgtttttccgccgacgacgcgcattccaaagccacgtgctgcgggagtagacaatgtcagatttaataagagcctgactgacgcgctgagcgattaggcgaagaggccaggaggacggaataatcaatagttaggctctcgaactggcccaaaaatcggggactgcgactaggcacgtactcgcagatacagatacaaatttcgggcatgtggcaacaatttgcgttgatttcatttgcactttgcagtgccacagaagtcgcaaactgaaccgaaaaaacccagccatgcccacgttgcgtatacgccatgtcgcccgccctgtttgtgtttgtctgctaagttcttttttttgccaagtcagcgagttttgctgtgtagatgaatgtgcgcttctgtgcattttccagtatttttctttctcccaaatttgacacaaatttattccccaacttaaacttgaccccgcggacatttataacaatttaagtgaccaaactgctttaaagatggcaccagatttagcgattttaacatttccgccgaaaagtacaactttaacctcaatatatgagttttacaaaatgtcttcgacaactgaaaagatttcgtttgccgaatccaaacaatttaattaatttaattgcaatttcggggcctgcagttcagtttcaagtacttatcatttggcgcagaaaactaatttcaacaatttgtgcaccgaaaacttggaaaagcggatttccgtcgccgtaggacgggctgcagacaatggccaggaaagttaaccagccaccggagcagcgatgacaatgaatttgtgtctccaaggtgagatctccagggatctggaaggagggcgcaagataaaggactaagggagccggaaggacagcatggcaggtccaagttttgcgcaggaaatggcggcaaacttggccagtatgcaataaaatgttgcgcatccgccatcgctgttgattcaggcgcattgatacccaattaggataaagcgacattttcttacagcccgctgtttgttgagtgtcttttaatcaaaacttttttttcgaccctcgccttaagactgcaataaaaacgatatataaataaaacgcaaatccttttgctgacagtggggaaaaggcccaaattattcgatgacgccacggttttcggatatatcgcgattgatgcacttaaaaaagttagatataacacatgttttcggttagtactatgggctttaaaaaattaaaacaagaattacaatgctatgaataagagaaccacttgtgtgatactaaaagtctaatatttattttgaaaatagaatcaagtgccgatttgagtaacatttgagtaagtttctctctgagtgctgccatttgcctttaagcccgcacttaacatggagctgagtgaaattttcgattcgttttggccataaaaatcatgagtggaggtaaggtccttgttttggccgtattccatgtcctttgtctcattgtaccgctgcccactgtccgctggcctttttcgtgcttatttgccattcctggccgggccagacttttatgatacaatttgtttgccggatggccaacgattttttatgtggccatcattgggatttaataagccgcccagcacagacacacaaaggtgtgttgtttatgggcagcgggtcggaggggttgcaggggtttattcctattttgggtatccgtttcctttgttagccatgagccgtaaacatgctggcaaattgaatcaacatttgtatgtaggtcattatttaggcacacaggattcactttgaaggccggtaccctttaactggcctaagtcactttaattggaaaactatccctgagcagtgcccttaaagtttctcccctgcgtttctttggcaactttttaattcgtgccatgtccttgcatcttctctgcctggcagacacatgctgcacatcgccgtaatggcattaagtgagcaaacttttagctgacacacatcgaacgacttaatcgatgcacacctgcctgcatccttcgagtccctcgaatccctcgctggagcccagcatccttttcctgtccgggaaaacgagtcatggagtcatgagcgtaagcgatttagtggcttctatcagctgctataaaaattgtctcttaattaaactagcagagcaagcgacgagcaaggatactactcgtatgtcctggctatcaggatttcagtgggttaaactaataaacccgtttaaggcgatgagcatcctttggcagcagccaggaaaaaatgccaacatccttcgattgaaacatgtagttcacttttttaacattctgcattcaaaagtatctaaggatctgagcaagcaaaggtctttcaaatgtctatatgttattcacaaaggatgcttttttttcgtgtagcatagaaggaaatggctcgttttgagtgacttgtgaggcggataactatgaagggcagccaagcgaacagttgtacgatgtgggccaaaaggaggcgtggcacttggccacctgtagctggggaaagcgagcacgcaatgccaaagccggaggttcgtgattcgccccaataaatgggtgtatgtgtgtgtggctcttgagactgcattaaatttgattaggcgtgttagggcgccatttgccgctacacctggcccctgttctcacctggccagaacccccatcgcgattaacagttgctatcggaacattcggagctctgcataattgaaaagctcgccgaaatgctgcctggatacaattgaattacacatcgccatcggatgcctaattagccatgcgagtgcagcggctaattacgctcacctgcgtgtgcacctgcaaatgttaacgcaaaaagtgtagcatgtttcatgggcgcagcgctcaaattacaaggcattcagctcagtcaatacatcaagacgaaattgcagcacagctgccacaaccacaagccatgtgtgtgtatatgtgtacgctgtggttaaggagacgccgctcctgtcaggcacaaggatgtggataaggacgaggatacggatagccgtgcaggtgtgttgtacaacaaagaccagcaggagcaaccaaggaaatggtttagcacattaaaattccacttgcttcgctgcatatcaaatatgccgagctaagcagccactactggggcatggatatactcttatatatgtatgtatggttatatagacaaggtccttgagagcgggcttaactcacgatatcgcttgtggtatagaatacattccattcgcctgcactgctggtttctgtgcgtatttgttgggtattgacatttttttttttatgatatgcaaattgaaattttatattagcaagcgcacgtcgcacaggtggctaaccgttgggaaaaatggggaaaaagcctgcagggcggccagttatttttattgggattataggcgctcgttaagagctctccacaagattctaccaaataccacgaacgccaagagaattatgagtggctttgagagctatttaaagtagttttttcatagttgggctgaacaaaaataatccagcgaatattatgagaatcgtttatgggaatttctgtgaatattaattatggaaagtaagacctcgttttctagttaccagcttgaaatctgaaaattggctttgcccttgtcgagagtgcatttaagtgtcgaggagaaaagtgtgcctttctcgttcacctctggccttctggccaggatgttggccactttttgccgcatgtgttcatgaactggccaaaagagagccagccatgcatgcatgcatatgccaaacattcgggggcattattatttatggccagcaggcgtgaagttttccatttctattcctatttctatttcccattcgattgggtgggggaaaaatgccccatttaaattggcgttgaatcctaatgcacatgctcacgtacctcttcgtattgatttttatgctccgagtccgctgtcgataattaaaaattcatttggcctgctatcctggcagactggccccttgaggtatgcaacaaaaatgcatataattaaaatacatcgacaggaagtgggaaacaaagcgaggaaataaaaaccccggcccacactcacacacacgtacatacccaaatgacattggccaacaatgccgaacagctaaatgtcctttgtatgtgtatatgtgtgtgtgtgtgttgggtgtccttgttgctgcaactgggaactgaaagctcgtaactcggaatccggagctctcggtgcctttatgtcgatgaaatccgctcagttgcttaatctgctaccagtctgcttccgctttgggtttcattaaggcccacggggaccaaaccacattatcctggccgtcctaaacccggctctcccttagctcctgcactttgctgggggaattaaggtaccacgcagatacccagctatacccacaaccgacttcaccgcagctccggcgaattagcataaccaaacgtcgtaatgcgtcctgtttactcgcccatttccggtgcgcttccaagggcaggacatcaaccggtgccggatggaacggacaaacaaaccgaactcagtccccttcacacatcgacagaattctcaatattaacttatagttttaatgaaaagaaatgatacacaatttgtatctgtatctgtggagatcacagcttctatcccctgatttgtttccagtgcactgacacacaccatcacgccagtttaggaacacattaagctaagcccgggtcttcgctaccttgtgtcttagtccctaagctcggtactcactgcggtgcgccttgtccgtgggatctcggcgcagaatgatgcgccgcttagatgcacaaatcggccccgaatccacgtcgtgaataacgatccgtatggcctcgccgtccattgatgtttgccgtcgcggcgcctccaaatcctccagattggggcccgtaaatgaagccatgggcggcggaatcgaggagggcggaaccgcaggcagggcaccacgattctgcagcatcgctatatcgggtctgaaagatggaatggatgtgctcttaaatttccacaactttgaatatataataaaagattttaatttcaacgcagtttctgaagtcaatatgaattttaaggtagtggtacacttacagctgcgatccgcgtcgccgcatccgccggtcatcgtcgacggtcaggacggggctgcccttatccggcgagccgggcgagtcgtcgttctggatgtcctccgagggatgtggcacccggaacgagggtcgcctggatccgggcagctggatgggcggcatgatgccaccctcgccgggcgatctctgcagctgcgtggcaggagtggcaccaccttgcgtcagcccgggggcgaacacatcataggcggacttcctgttgggggaaattgcgggtcaatctggctccgttgaccccttaaaatcaacctcctacctgcgtggcatggtcggaatgccgaggcccgctccatccgcacccaaacccagcgccggaccaccaccgcccatgctgccacccacgggtccggtcttcatgtcgtcatcgtagctgtgctgccgtgccacccgcgacccccttcgcgactgcatgcgcgacaggggcgcaccgaaggggggctgtccatctgggccctcgcccctcggcggactattggatcgactgggcgccatgctgcggccgcctttcagttgctaaaatacattttaaatgggttttaattaaaatgtgggtttagttaaagaatccatctgtagtagaaaacttgagtacccttttatgagtatgaagatattaaacgtccttatattttacgatccctagataccaaatttcaacttacccgctccaactccttcagcgaggctggcgaaacatccgagtggcgtcgcagttcgggacttcgcggcggggcaagggctgctccattgctgggggccagggtctgcgtgctgctgcccagcttggcgtccgagtgtcgccgctgcagtgcctccagcaccggaacgtccagcatcgagtccgtcgagtcctgcggaatgcacacacgcgaggccattttccggcggcacacgctgcagcgccacatggtctgcggaatcgagagggcggaaaatcaatttccattgctgtggcaacgcggcaggcagtgcacgctgtgctaattaaaaatttccagcttagcgctgggatctatttgcggacccacacggcgtcctctactatttattagtggtcggcgagggctcaagaaaacccattatgctgggcagcgagaataaatattaattactttcagaacaaaacttttcgcccacccgccggcgtgttgtagtgcgttacacaaaatcctttcttcaggcgctcctgcttttgctcctgccccagtgcatccgcacggaaaatgggggacacaggtgcgcctgcatcgcgatcccctcaagtccgcctcgctgcattttccacttcctttttccgcggcacgcccgcacaatgctcgttacatttccacctggctgctgattcattttgcccggcggcttcaatcgtcatgtgtggcagccacgtccttttcgtgctttcctacccacttccaaccttttttttcctcccacattcaatggctgcactggcggaagctgccgccattgtaattaagtcagtgcacagagaaaaaccaccgaaaagtgtcaacaattcggtttaaaggcaatcaaaattgtttgtatttgtggtgagtaaacagggaatcagctgaaaacattcgcatgtttcgaaatatgaaagtcaagtctttataagtttaaaatcaccaaaagttcgccagagtgtaagaatgatatgatatgatagccgccagctttcagacagtttttgtatataccgattcagaaaggtctttattccggtgcacatatgctcatggcctgtactgtacgcaacagctgcaacaagagcccggttctggtttattgcctctgtgctccccagttgcgtgctctgtaattacatggcgatggtgtagtgtggctgccagttcatgatcccatcgagaaatcgactgaaaagttatttcctagctgccacagcaacgttagcaaagagcaaccaagcacgctgcacgtttatgaaaatttaagatttcttttgctttcatcgcgtatgcaaaggcatgcggaaatcgatttttctgagagagctgagctctgagcaggaagtctaccatgaagcggcaaataagccataccacattgcttaataatcagcactttcggaaatatattccaaataatcagcactcaaggatatatgtcttgaatcctgatatgctagcctggatttagactgccatggtaatcaatacaaattttagagattttcatttcggtttagtttgaagagcgtactcatagctatctactttgccttttcctccgagtgactgaaatcaaatttccatttggtatcgaccatatctggagttcatgaacaatcaaatggctggctagtgctcagtgtggcatgctctaaatgattatttcagcagggaagcctccaagtgtccagggatgggaccacaatacacagcaaccgactccacctccatccgctctatcggaatacccataattacactgggtgggtatgacaggcggttgtgggctggttgtgtgctgtagtcaacgcccatgaacatcaatttcaattagccaaagtggccaggttgacagacaaacgttaaattttatgttcagggcgttggcgtggcttcttgacaaattaccacaagttcgggtgaagacaatgttgcatggtgtggttatcaatgatcattatgcggcaagtgttgataggatgttggagcgacagggtaaggagcagcacatcggaggagtgcagcagagaagggcagctacccgctgccggcgatgccatttaatctcgttaattcgtcctttatcttgttaatgtcccgcgatgaataggccgcagttaagcccagttggccattgtcaccgaaccccttttgcagtgccagtaatctaatttatgtgcactgacacccatcgctggtaaccaccccccgtagtcataaacacagcaaaaaaaaaaaaaacaactttaaagctttgattgctttagtgactttttcagctatgccgaacggaattgcatcgtctaacttttaaaagtactactaatgcatatttaatttctatgttaaatgtatatttccatggttggaaatattttccctctgtgaccctccactattttcttattaatgaagtgtcgcggcaagcagtgtttatatctgccgcgagaaccgcgcgaccatggcgcattgcctagtggcccggaaggtgcatcctggccagcccatggccgcacccacatcctgctgctgactgccagcctgatagactggcaacttggcaacttaccgcatcctcgtgctcgtccagcttgctgtagctggcgcagtcctcgcacactcgctgctggcactcgaagcacgtcttgtggtagtcgtccggcttgaaggacttcagacacacccggcaggctccggcccttcgtcctggctcctgtttggccgccgccccacctccaccgccgcccgttgtcgccgtgccgccgccgctgctgttgttattgttgttattcagactgctgccgtagtcctgctgctgctgctgctggctttgatagctgggcgagccgtaactgccgctggtatccgcatccgtcggcaccagcgaggggcgtggcgacattttattaactggaaaagagacagaggaaaagcggacgggctatgtaatcaattactgaggcaaccgagcaaccaaccagcgaatgcagccccttgtccaatggaaacttgttgattttccgctgattgcatgcactatagtctgtggactgacccaaatgcagtgtgtgttttacccgaagccgcacactctgctctatgcttaatttgttgtcagcgcacataatttgtttggtctgctaattgggcaagcgacaggcaggcaaatgcaataaataaaacaataatcggataaaacggacatttctgacagccttcgttactcattaaacgagatgctcggaaaggatgtagtgtaaatggtagctaaatcggataattgctaatgctaaatatgtatttggtttctcaaattgcactaaaactattcactaatatatgcacatactttaatgaaatacttatataatcaatctaaaacaaatatccgatttaacatgtacgtttggtgtggagtaaaactatggaaaaaaaagcttactaaagcactctcttaaattacataaaatcacttatgcaacgtttaattttctattccgagtgcgttttttttttgtgcagcggaactacctgaagaagtgaaaccttttccccaggactggcacacatttatatgattatatgcttatacaccgtgtgtgttttatatatattgcacccttgagaaactggcgaaaagtttatgcggcccggaaaaagtcgcggtgcattagtcacagtcaggagacaaggacaaaggcgggcttttgttgtgcgcctggcattgctcatacgcacagttgcacctcgtgctttttcaccttttggcaagtcacgcttgacattttcagccgtaaaagtggcatggtaaatataaaacaatgctagagagagaaaccggcaaggaaaaaccttttccctttttgttacaaaaagcgatttcacctgctcaagggagcacttaggtggcaggtaagataaaagaactgcgcaactattaaagtatttgcaagtttttctgcttttaaattatgtgtcagctcttcactgtggttggccacaaaaatctgggagcttgccaactagctggagagcaatctcgcagagctgcatcctttggggagtcgaagggaactcgagtgccaaaatatttgcccaaattatgtgcacaaatctgtctcgttcttttacgatcctgctaaataaacgtcgtgaaataagatttcatttcgttctaataaatcgaatggctcggcaataaaatcaacaagccacagctttcgcttagctggtggccaactaaattgtgataaaaataacacaaaagtcaacacaacattctcatgtttcccgctgcttctttcagcactaaataaatacaccaatgctcaagataatagtagttttaacattacttcaacacatttcttcaagcttttagcactggatatacatatatacaaaagtgtttgctctgcacttattatatatcaatatatagaagccaataagaatttatagtcttggcatcgtttgtagtgaactactgctattactttgaactcagctgtttgcttgggtggtgctaaaaacagaagtcaccgattttattgactttgtcgcagcgtttatggactccataacaatgacagtgtgaatggcgatgacttggcatgcagcatccactgaccccttacattattcaatatgcgatgcaaacgagcgtgagcagaaaatatattgcgtatacgcaccgttagccgccgaatgctcattgctgcgacttacgtgctctcgcagaaacacacacaaagtttgctcaaagtttagcaagcagctttacgggcacttgtatgaaaattcatgccataaattcgtatgcacttacggcaaggataaccgcacagaaaacaacgcacacacacctaaatctacacatccacaactacaatcatgcttacctttatctgtgacggtgagcagcgaggaggaaatcgtagccttcatcttgttcagggcccccgtttgggaggcccctcctcccgagtccgctgcatgctgctgccgttcgctggtctgctcgtcggtggccaccatctgcggaaaacagaagaggaaaagcggaaaagttagaggtcagcgcgcggggctaaggaaatgtggataaatattggcgtatcgcgctgttggtttgattttctgcagccgtaaatctttatttcggtcttggcttgccatgaacgtaaaacgcgaagcaaaatgacgggattattggcgtgtattacaaaaccaggtttcctttctatacgagttaaaacatttgaaaaatgtttataaaccatattattttgattagtagtggtatttacctaatatagctcgtaaaatttatatttttttgccgaaaatgacatgcaatacctttttgtgctcgtaaataaatttcaaatcgatttgcattcaaaaataaaaaaaaaaatttttgtgaattttttgaaaaaaaagatgatggtaccccttacaaaaaatgaaaaaattggtcaaaaattattttttcaaaaacagttgctcagtgatagggttttttagttgtggttattagctgcacaaaacagtcattgattttgctctgtgccatttttttgccaagttatggaaaaaaatcctacataaatattgtaattatgctaaaaatttctatgtccatttttgggcgaaaaataaacagtattttatctatagtaataaaagtattgatagaaaaataaaacgtcctacatcgttgaactcgtaattttcatgtcaataaagtgtaattcacactttgaaatgtaaaatttttgcgaattttcagaaaaattgatgatgtaacccctatctaaaaatggaaaaattgcataaaaaattttttttttttaaatcaaaagcttagtggtagggcctgttagtttggtttataagcaacataaaacactgatagttttcgccgtctggcgatttttttccaagttatgccaaattaactaatgaatatttaagggttggcctcattttttatgagactttaacaaaaaaaactcctttttggtatctggcggatgaagtcaaagcaatacacaccatttttgtcttttaagcttagcgtgagtgatcattttcatacccttagcttatctaaactagacgaatataatcatcaaattcccagccagggagcagttttccctgtgagcaaggttattaccctgatgttcctcagattttctctgatttttttgcgcagtcatcacgggcacgcaggtgaaagtaacgcggtgcgttttatttgatttttttctgtgttccactggaggcgtctgaagcgcaacaaattgccaagaaatcgtaaagtgtggcaagtaatttttgattaaacaacggggcaccaaaggcggaatccaccagccggagagtctttcaaaaattaccgtcattctttttaatgcacacagcctgtaagaagggggcttcaccgggcttagccgtctttgtgtgtgtgtgtgttgtgttccgggcaggaggataacaattggaggcgactggccgaccagccgagccccgaaaacataagtgctgctctgctatgtcagcattttatgaagtggaaattttctatttgccaaagcgccaacgaaaccggaacaaacagccgcacagttgagtacacagaaaacaaatggtggcacagctcttagccagtatcttcgaaaaaacctctatacatttaaacctttaaattaaagttggttactcagcatgttatgcctggaactaattactttaccagtgataccatgtaacactgtctgtttaatatataatccaacgtcgggattaagtactacaatggattataatattttttcctatgcattaaggacgatccatatagtgcagccatctcgttcgcacagcgcaaattacgctaagtgctttggctgcagcgctttcggttacctacctttgtgggtgggtatgggctttagagggttaagagcgggctttgcgggatgtgcgggaagtgcccagggggtcaggatcctactctggcgggaactaagcggcatctactgtcagattatggccgctttgtgctcagcccgggctacatttttgatgatgtcatttgatgtcggcctggtaatattcatgctgccgatttatgggctcctttcttcctacattttgcctgccaactttgccgggaagcccatgaaatcttagtgtaatgtatagttgtttgctcggcggtcttcctgtccagatcccacctgcagcccagaaaccccacttaatttatgtgctcaggtgtctgacgccatttttcttgcgcacgggtaaactactcggcattcctcacggtttcagctccgcccacagctcctcgcacaattattgccgtgttaattttgtcatttattatgattttttgctccgtctggcccggtctgggtcttatggcccgaagccgcaaatagtttcatgtttagtgccgaaaattatgtgttgacgtttaagagctgctgttcccttccatcctcgccctccctcgcatttcccgccgcttttccactcgcttttccccgacacaacaataatatggcgcgcaatatgtgcgccctttatggccgcaaagtatgctacataaaacagcagtcaatgcgaaaagagatgaggagaaagttggtcgccagcagggagaaagttgcgccttgtcagccgtgaatgaatgcgcttgcattccgccaggatagacatccttgcagtcggaatggaaatcaatagcaaattaaacgaaagctgcgagcaaatattttaccacttaaaagttgcgcacaagtttataacgaatgtcttgcagaaatagtgaggacacgttgcgagttttctgaatttaatttcaaattggagataatattaattgggaatactaattttgtacacggaatgtattaaattttaattatccaattcaatgaattcaaaacagttttcaaaactgctgctatctgctcaccacgactgttttgaaaagtttggagcagtaatataaagtttgagagctcaatgaatattttattcaggtgtaaaaagttttctaattgcaaccgagttaataagcaagaaaattactagcgactttaaatttaattattatttgttgcagccaactaatgaacacctattaccagtttatcctctaatatatttgataaaataaatgtgtaaattcaatcgatagaaagggattatcatcactttatttaatatattattcaaaacaacatttagtttttccccatgtgtaacaagtagtttgtggggcaggcacgtgcttgtcattcggctcaaggcttcgagttgcctgttgcaagttgcagctgcctgccgcctgttgctgtttatggcctgcacccaggcacaataaagtgcagcacactgacagcaaggggcaaccgactgggacacgtgtggtcaggatggaatggaatggccggaatggaatgaaatggtcgggatggcctggccaggatctgtccacaggcgagtctaggcgccaccgcaagcaaatgggtaacgagccaagtgcggcagtggtcagggaactttacagcggccggactattaaggaaattgctgcaaataaactgcaggaggttgtgcagctggcaggactcgtgctctgcattcacggtctagtgccccgtggtgtcctttgatgtcctgcggtccctgcgcatttgtcgccaaatttcagaacggaatggcccgactggttgttaggcatttgaatggcaaatagaaaaaactttgccaaatcctttttgccaacagacttgctaacggactgtcaacggctcatcattgttttgagatgggttcgtttggcttggaagctgggccgctttgatttcgtgcttcatttggtctaatcaaacttggcgaaaacacaaaaatctgcagcatttagttggctggcatttgcttgtcagccggcatttccccagcctttcatttcgaacttggtttttattaactttgcaaagtattttctgccaaaccggaatttctacggaatttacactcttcgagggcttttctttttctttttcctttcttttcttttctttgctttgcccttccctttccttcccttttatttttgtgttattttgggcttcacacgcccatgtataattttattcctcattttccccttgcctgcccgatcccgaaaacaatttccgcattaaaaaaagggacaccaactcggcggggcaggtgcttcgcaggataattgaaccacttcgattgttgccagtccgtttgcgtttatttttttgtgaatttttgatatttttcgagcgcataaacaaaagggaaaatcagtcgggcgggcaaagcatttaaagggctttttaattaaaaagttttgtttgcccttccgacaggcgtttgtttttgaagcctgttcgagaaggttttaggcgattgctaatgcacgaacttttacctgcagccgtgtccgtacgttatgcagttcttcgtaatattggaatttataaaatggacgaattccttaaaaatattccattgattggctatgaagcctgcgcaaagaagttcttaacgatatacatttaagtgcgcgcactttgtgggcagaaggcaaatgaattaaaattccgcttttattgcatttcatttgctactcattatcatcgggggaataataattaaggaatcacaactggcgaatgaaaatgaaattaagcataaattacgagcttctgccagtgacaacaatgctggggctatgtgatttatatattcattaaatatcgaagtgtcacttacctttttcatgaatgacatcacatttgttggcaacattttgaaggttgtttttactggccctttccttggttgaaaatgcgtttctcgttcgtttcgcttgtgtatttaaagtgcaattaatcatgcatccgccgtgttggacggtgcgtatacgttatatacgttatgttcgttttttctgctgcaagctggtaagccgcattaagtcatttcgatttggattgttttcatttctcttggccaggtattgtttattctctcctctgatggccatttttcattggccatgtaaataggcattgacaggggtatattggcataccagttctgcatgttgcgccagctctcgatccagattgatttatgtgtagctctagttgcgcacttggcttttaattaactttggccataactcaaaaacggtattattgccgccggctgcagctgctccttttggcggaaaacatggaaaataaaccgagaaagaggcggaaaattataattagtcatttggcagtgggagaaagttgcacgcagcgctttaagtgctcaactcacggacgtgtaatggtccgctcggcttacaccgtacttagccgggctccataaatttccctacgataaccatcaacagtgttttgggtttccccgctcccctgcagccacaaaccatctcgcacacatacacgcacatgcggaaaagtggtgaaaagtcgagcggcaaaagtttataaggcggaaataatgtgtcgcctggcatgcaaacgtcccttttccattgacctgcataatatgttggccctgctaagtgggttagccaacgaaaccttaaagttaatgcccgaatgtgattttcaataagactgttttagccagtctgcagctggagttataaagacttaagttactgaagttcattgctggcatataaggattacttttacacccagtataaaacattgtcatgtttaaacaacaaagtaacatgaaaattacttaaatttattttttagattatcaaatatttattttttcaatgctatcaaagagggactatacattttttgttttaccaaactatttggctgctgtgctaagctctttggctgccagataagctgctctagatcgtcgccatctagcagtgcaatcacaatgctttggccagcttatcgagcgttcactgcagctgggctgca

SEQ ID NO: 5024 - DNA, 2294 bp, DROSOPHILA
cggcttaccagcttgcagcagaaaaaacgaacataacgtatataacgtatacgcaccgtccaacacggcggatgcatgattaattgcactttaaatacacaagcgaaacgaacgagaaacgcattttcaaccaaggaaagggccagtaaaaacaaccttcaaaatgttgccaacaaatgtgatgtcattcatgaaaaagatggtggccaccgacgagcagaccagcgaacggcagcagcatgcagcggactcgggaggaggggcctcccaaacgggggccctgaacaagatgaaggctacgatttcctcctcgctgctcaccgtcacagataaagttaataaaatgtcgccacgcccctcgctggtgccgacggatgcggataccagcggcagttacggctcgcccagctatcaaagccagcagcagcagcagcaggactacggcagcagtctgaataacaacaataacaacagcagcggcggcggcacggcgacaacgggcggcggtggaggtggggcggaccatgtggcgctgcagcgtgtgccgccggaaaatggcctcgcgtgtgtgcattccgcaggactcgacggactcgatgctggacgttccggtgctggaggcactgcagcggcgacactcggacgccaagctgggcagcagcacgcagaccctggcccccagcaatggagcagcccttgccccgccgcgaagtcccgaactgcgacgccactcggatgtttcgccagcctcgctgaaggagttggagcggcaactgaaaggcggccgcagcatggcgcccagtcgatccaatagtccgccgaggggcgagggcccagatggacagccccccttcggtgcgcccctgtcgcgcatgcagtcgcgaagggggtcgcgggtggcacggcagcacagctacgatgacgacatgaagaccggacccgtgggtggcagcatgggcggtggtggtccggcgctgggtttgggtgcggatggagcgggcctcggcattccgaccatgccacgcaggaagtccgcctatgatgtgttcgcccccgggctgacgcaaggtggtgccactcctgccacgcagctgcagagatcgcccggcgagggtggcatcatgccgcccatccagctgcccggatccaggcgaccctcgttccgggtgccacatccctcggaggacatccagaacgacgactcgcccggctcgccggataagggcagccccgtcctgaccgtcgacgatgaccggcggatgcggcgacgcggatcgcagctacccgatatagcgatgctgcagaatcgtggtgccctgcctgcggttccgccctcctcgattccgccgcccatggcttcatttacgggccccaatctggaggatttggaggcgccgcgacggcaaacatcaatggacggcgaggccatacggatcgttattcacgacgtggattcggggccgatttgtgcatctaagcggcgcatcattctgcgccgagatcccacggacaaggcgcaccgcattcatgaacacatgcggcaaaaagtggccaacatcctggccagaaggccagaggtgaacgagaaaggcacacttttctcctcgacacttaaatgcactctcgacaagggcaaagccaattttcagatttcaagctggaaaaggatgctgggctccagcgagggattcgagggactcgaaggatgcaggcagatccctggagatctcaccttggagacacaaattcattgtcatcgctgctccggtggctggttaactttcctggccattgtctgcagcccgtcctacggcgacggaaatccgcttttccaagttttcggtgcacaaattgttgaaattagttttctgcgccaaatgataacacgtggctttggaatgcgcgtcgtcggcggaaaaacaggagccgatggccgtctcttcgcctacattgtgtggaccgttccaggaggagcggccgagaagaatggcctgcagcagggcgacaagatactcgagtggaatggaatgtcgctgatcgaccgaagtttcgaggaggtgtgctccatcatggaccgaaccggagacgttgtggagcttctggtggagcatgccacggacttccggatgtgcgatctcttcgatgagaacctaccgcccggcaatgccggtggccaaagcggacctcggagatccggagacggtcccgtcggactgggcctcatagcgggtaagtgccgtcaatggaacccagttgattatcctgtacataatgtacccagcaattcaatataa

SEQ ID NO: 5025 - protein, 589 aa, DROSOPHILA
MWRCSVCRRKMASRVCIPQDSTDSMLDVPVLEALQRRHSDAKLGSSTQTLAPSNGAALAPPRSPELRRHSDVSPASLKELERQLKGGRSMAPSRSNSPPRGEGPDGQPPFGAPLSRMQSRRGSRVARQHSYDDDMKTGPVGGSMGGGGPALGLGADGAGLGIPTMPRRKSAYDVFAPGLTQGGATPATQLQRSPGEGGIMPPIQLPGSRRPSFRVPHPSEDIQNDDSPGSPDKGSPVLTVDDDRRMRRRGSQLPDIAMLQNRGALPAVPPSSIPPPMASFTGPNLEDLEAPRRQTSMDGEAIRIVIHDVDSGPICASKRRIILRRDPTDKAHRIHEHMRQKVANILARRPEVNEKGTLFSSTLKCTLDKGKANFQISSWKRMLGSSEGFEGLEGCRQIPGDLTLETQIHCHRCSGGWLTFLAIVCSPSYGDGNPLFQVFGAQIVEISFLRQMITRGFGMRVVGGKTGADGRLFAYIVWTVPGGAAEKNGLQQGDKILEWNGMSLIDRSFEEVCSIMDRTGDVVELLVEHATDFRMCDLFDENLPPGNAGGQSGPRRSGDGPVGLGLIAGKCRQWNPVDYPVHNVPSNSI

SEQ ID NO: 5026 - DNA, 3624 bp, DROSOPHILA
ggaggcggacttttccgccagattcttttcagcggcagtcagcttatctttcagtgatctggtctcctccaccttggcgtcgtagtcttgctgtaggacatcctgttcctctttcagggtcttgaactttcgacgcagctcctccagttcctggccattccctccagacgcgatggccacaggctggctactcagatgctccagttcctgggtcaaatacgattcggcggcgagggcagtgtccagattcctttttagctcataaatcctttgcgcatccttttcgctctggtctttcagctgctggtggcgatcgtgcagcagcttgtactcctccacgatgtcatccacgctaagggtgtcaaggtccaagtttttgtacatttggtttgcataaaaaagacgccaattttttatatttttcaaccgtcaatcgatatttgactctaaagtaatcggtatggattgctcgcattgttgatcgattacaaataacagggagacttgtgctggtaagcgcagactaacagtgttgttacattaacggttagcgccatcttccggaagagaaatgcatttttaaaaattttgactaaaatttcactcagttttaagttttaagctaaacaatctttcttttattctaagtagaatattacttttgcctttgcaactttttacagcaaacttctatacggcaagctatgttaaccgcatgctaacattcaactcgttgccgccctcttccggtaattcaaagcatttttaaatattaggcaatattaaaatttttctttattctagtaattaaatgaatgaaaaatgagctgatactaaaaaaaatagtataataaaatagaaataaaagggtataagctaggacgcatgcgctcggtgtgtttacacacatatcgttaccttggcgacaattttgtttccaaacagctggctcacacttaacactagtttatttaggaacacaacaaataaaaattgtaaaatgcagcaagatgatgaacaggaaaaatcccagcagctacaaaactttcaatccgatgacttactggaaaaattgaagttactcaactacgaaaaacatttgctcaaggaattcaaactaaaaccgctgtcgcgtttctatttcgtaaaggccacaaatcccggagagcaattctatatgtttactttaatatgctggtggctatgcaagaaactcggaaaggatatggagcggccacaggagtacgatgatccaaacactgtggccgccaatatcattaaattgcttggggagattgtgagtactaggactaagttgtattactacaatactacaatattttcattgtaggatgtcccagtggatttccagcccaataagctgattcgtggagctggacccatctgcctgtcggtcctggaagttctctccacacaagcctgcaaagtggcccaagtgggctaccaaaagctgcacatcgcccaggaggaggagttcctgggcgattatctggaggacaatgcagagatcatattggagaaactggaggatgagcagaatgcagccgccttaagtgatgatagtgacatggagttggaggcgcacaatttccggcagctgaactggttgaatcgtccgcaaaagaaatccaatggagatgtcaacctggatgaacgaaatcctgaattagatgctcgcatgagcgatcatcaggagtggcatctggaactggaaagagtcctgccccaactgaaagtgttcgtcaaagcagacgcccgggactggaggacccacatcagccagatggagaccttaaaaacaaacatattggaaaactccgataccgccgaggctcaactaaaaaaactgcacagcgagttcactttcgacttggaaaagatcgaaagccgcgaaaaacatttgaacaatgagctcaagccactgattcagcagttcaaggagctatccattgaactgtccaccatccaatatgcccagaatcagttgcaggaggacatggagaagcagaccgcagagctcaacgaggtcatgatggagcaggagctgaaaaaggaggaaatggagcgacgcggacaggccatgtcggatgggagtgagtatgggaaagttaagagatattgggttacgaatgaagtgtatataccatcttttcaaaaagtaacaaaaaatattctcatgaatacatatatcagcattacaatggaatttttcaaaattataaagagcactgacattcccatagatagcaaatatggtacctttaacaccgacacctttcaaactctatttgccctgcaatgataggacgtcgtctatttgccatcgtagatccctgattctggtcaacagaaaatcacagatcccgatccctttggaagccacccacagtgctatgcggtgctaatcccaatcccaaaatgcctcttccatttcttttttatcaggttcggtgcagcaaatcaggaaagcgatcgccaaactgaaggatgacactgcgcaactgaatctggaggtggctctgctggtgcatgcccacgaccaggacattgtggtgcggcagttgcagcagaaccaaaccaccgacctggcaaacaacccataaaacatataccccgctgataagcactacttagcatgctaaatggtacaatatatctgtatatatccctaccaaccagccagcccgatcttttcacacctcgcgaatgggtgtgctctcgtttgcactcgatctgcaggagatagctgcactggaaaaaaatacgctgataggagcgtttatttttattaaagatgtttgaatttatgcgattgtttttactacaacggggttttacgcttgataacttcattttctccgtgtgcacattattcttgttcgagactaaacaaagagctgttgctgttgtggcctttccaaattttagtttgtgatttttttctgagtgcaagaatgcatcaggggacttcattggaccaccggcgttgaccccgcccgctttgacgatcgtttgattcgattgccggtgccgctgataagtttcgtaattggttgccaagccaattgggcggtcaattatcacctccttgttatctgctccttggacaaacacacacactcacacacacagtcaaactcacaacgagggtgtagttgcagcaacaagcgcgtgcgatccttatccttcgccgatcgatcggagataacggtacggaggtccgtggcgcacgtacttgaccaaagaagccgccgacgacgccgcaactaccacacaactacctcttacatcgccgtgcactgcgagaaagcagtgcaagaagttctattaccctaaatcataaaagtgttattttaatggttgcgcttggctaatcagcctgtgaactaaaagcgacacttctacaataagcattgctctagaaatatgaaaccaattctaaatcaacacatttttttgcagtgcaaccgcaagcagagcctaagcaaaccaatttgaacctggaaaaccctcgaaacgctgtaaagaggtgttgtcccctgcatcccactttgcacatctgaaataccatatcccacatccctcgtcccgcgattccttgtt

SEQ ID NO: 5027 - DNA, 1218 bp, DROSOPHILA
atgcagcaagatgatgaacaggaaaaatcccagcagctacaaaactttcaatccgatgacttactggaaaaattgaagttactcaactacgaaaaacatttgctcaaggaattcaaactaaaaccgctgtcgcgtttctatttcgtaaaggccacaaatcccggagagcaattctatatgtttactttaatatgctggtggctatgcaagaaactcggaaaggatatggagcggccacaggagtacgatgatccaaacactgtggccgccaatatcattaaattgcttggggagattgatgtcccagtggatttccagcccaataagctgattcgtggagctggacccatctgcctgtcggtcctggaagttctctccacacaagcctgcaaagtggcccaagtgggctaccaaaagctgcacatcgcccaggaggaggagttcctgggcgattatctggaggacaatgcagagatcatattggagaaactggaggatgagcagaatgcagccgccttaagtgatgatagtgacatggagttggaggcgcacaatttccggcagctgaactggttgaatcgtccgcaaaagaaatccaatggagatgtcaacctggatgaacgaaatcctgaattagatgctcgcatgagcgatcatcaggagtggcatctggaactggaaagagtcctgccccaactgaaagtgttcgtcaaagcagacgcccgggactggaggacccacatcagccagatggagaccttaaaaacaaacatattggaaaactccgataccgccgaggctcaactaaaaaaactgcacagcgagttcactttcgacttggaaaagatcgaaagccgcgaaaaacatttgaacaatgagctcaagccactgattcagcagttcaaggagctatccattgaactgtccaccatccaatatgcccagaatcagttgcaggaggacatggagaagcagaccgcagagctcaacgaggtcatgatggagcaggagctgaaaaaggaggaaatggagcgacgcggacaggccatgtcggatgggagttcggtgcagcaaatcaggaaagcgatcgccaaactgaaggatgacactgcgcaactgaatctggaggtggctctgctggtgcatgcccacgaccaggacattgtggtgcggcagttgcagcagaaccaaaccaccgacctggcaaacaacccataa

SEQ ID NO: 5028 - protein, 405 aa, DROSOPHILA
MQQDDEQEKSQQLQNFQSDDLLEKLKLLNYEKHLLKEFKLKPLSRFYFVKATNPGEQFYMFTLICWWLCKKLGKDMERPQEYDDPNTVAANIIKLLGEIDVPVDFQPNKLIRGAGPICLSVLEVLSTQACKVAQVGYQKLHIAQEEEFLGDYLEDNAEIILEKLEDEQNAAALSDDSDMELEAHNFRQLNWLNRPQKKSNGDVNLDERNPELDARMSDHQEWHLELERVLPQLKVFVKADARDWRTHISQMETLKTNILENSDTAEAQLKKLHSEFTFDLEKIESREKHLNNELKPLIQQFKELSIELSTIQYAQNQLQEDMEKQTAELNEVMMEQELKKEEMERRGQAMSDGSSVQQIRKAIAKLKDDTAQLNLEVALLVHAHDQDIVVRQLQQNQTTDLANNP

SEQ ID NO: 5029 - DNA, 3608 bp, DROSOPHILA
gaacatatcaattgtatcttagaacaatcacaatcacagagacaattgactgttgtgcgcagtaggtagatatcttagattagtcatagtataagttacaaaggaatcagaacttagtcatctctgaaggcgtgcactgcgaaatgcagttaataacaaacctaatcgagcaaaaatagctcaagagagtgactggcgaatgtgattatttaataattgtggcatatgcgcggcaaaataataatactacttatatgtatgtgctggtgttccacgcgaagtaaacaataagaagcgttgatagaagcgggcaaaacaatcacaattagagaaatatgcactcaagtgttagctatagtaaaaatcgctaaattgcaactgggcgcgcgtcgcgttttagtttttcagtatgtctaaaaataaagcgaagcaaataaatttacatttttaattgcaattatcgctggctattgttgtagttgctcgttggctactgtttgcctttggcgtttcgaacaattaagatgatttattagcagcgcatttttatgagacgcagtacaaaagaaatggaaattaaatggaaattactcagatatatttatgctccgtggtgatcgcatatacaaattgatttatcacatctgtcgttcggtttgcctattgcctgccacataattacaatcaagacaattccaggctgatttcataaccggagacgaaagctaattgccgttttatgctgtcactgaagaccgtctcagagcataaagatcacaaaattatttgaatttgaatggatattaaaaatgttaatgaaaaaagtcgtaaaaatttcatagagcaaaattaaagaggaaaatcgtaaaaacaaatttaaacgactattgcccgtctgcggttcaagagcagctccattaacgaactgccccacatatgtacatatatgtatatgcaagtatacaactaaatggatttatcggcgagcgagggcgttacactacggcacgaccaggaaatgcagatccatcacattggtacccgtgtgtccagtgagcacgtggtgctctccctgcgcgagattcttgtaaaagttgtagctgtcgcagtttcgcagcgtttcggccagttcatcgagggtatgatcacccagataggattccaccacgctgctgtctccaaaagctccggccgcatcggtgggtccatcgatgccgtcggttccggcgctcaggaaggtgcagtcccgcatggcctcgtcgcggtgcagagcctgcgacatcagcagggccaagtgctggcttctgccgcccaatccatggccagaaacctacggaaaaagaatcgtgaatgatttgatgaccatttgaagtagtttccacaaactttaatgactggctctcctccacagatcaggaacagtggcttcttgctgctcatgtggtcctctagggccctccgaaaagtcggataacttctctccccaaaggcgtacttctccctgagttgaggatccagtatgccatgctgcttggcctcctggataccgtgcagcaatctctgatagtcgccagccacttgagccacatctccctggacagcacaactgagcacgcacggaatgtagcccagcctttcggcctcatgagccgctgtggaagtggctatcacattgctgcccaccacaaaaaccttgtgctcgggcagcgatgtgttcttctgctcctccggctgctcaaagacccgccgaatctcgggggacagctcctcccacacatgatgctttttaaggatgtcggatggagatgctgccgcctcgggttgtatggtgggaccgcaggctatcagctccaagggatcaccgatgatgtcgctgagcacaaaggtcaccaggagtcccgcctggccggccaacctggccaagcgaccgccctttatgtccgagcaagcaatcctgacagcattgatctcctgtatgctggctccccgcttcatgagcttatccgctatgctgcgcttgtcctccagcgtcaaaggtgaccggggcaagggcaaaagggcagaaccgccaccggagatgaagacgaagaggatgtcctgggcagtcatcttttcggccagctgcttgatttcccgggctgccttgagagcattctcatccggcagattgttggctgctccttcgtggacaaccaaaccaggtgccaccggttgttggaactgcttcagggtgtttaccggtacactgaggactccaccggccgaggtggctcccaaatcctgttgcactttgttggccattcccaggactgctttgccaaaccccactatgtggcaggtcttgccgctgatgtcttggcgctctccattgagttttatggatatatccgttgcgttttccccgatttgaggccgcaaatcgaacttttgaaagtcagcgaataccttttcgggatgcactgcgtttaccgcctggacaaagatctggcgcatctgctcccaagtctgtcgcttggccattatgtaaaggtgcttcggacagggcgatcctaatcagcgatgctgaaattccagttttacttatcattttcaaaacagctcaagatattatatatttattagtgcgacctcaggcggaagattcgaaaacaccaaaatgttagggacagattaaattaacttcactaaagagatagattgagctatgcgaatattatgtacaaatttatttaagggaagtaggaattaaaagttaaaattgatttttaataatttaaaacttatagaattttctttaatttaaagcggaatccccctattatgttactggtatgtgtcgcaggcttgctgctatgtcacgcactgctttttgtaatgctaacagatactgttaattcaaaagtgaaaatcgaacgcgactgaaaaattgtacacttttaagccggaaaataattgaattgttctagaatgtatttatacgaataaatatattcattccaacattcgaaaaagcaagtaaaaacctgcaagcttattgagttaataaaaatcaattgccgtgttggctaaacaattagcctaactaatttaccaactagctgctttattaattatgttttgatgtaagcgcctctgattagttaatacattactttcactaaatcagaaatcagttcaaccgtgaaaatgccaatggagttgggcaaatttacacttttttgcaaacaaacagaaaaaccaaatactgaaataaatttcgtaacataaacactaattgattggagccaaacacgtgtgataaatttaaattaaacgcatggttaattagagcgtttaaaaatgtttgcttagagcccttagatattagcccactaaatcactcgttcgcaatacttttcccaacacaacacccccgccaacaacgcgaacttcgactactttcgttctcgtttgacaccaattggtattagagcccaccattggacaccaccatgtgccccagtgtgggtgcttacatatgtatgccactggctcaatcagttaccaatagaaagatcgccggctgcgatacctgctacacttaaatagcacccgctctcgttgctcgg

SEQ ID NO: 5030 - DNA, 1552 bp, DROSOPHILA
atatcttgagctgttttgaaaatgataagtaaaactggaatttcagcatcgctgattaggatcgccctgtccgaagcacctttacataatggccaagcgacagacttgggagcagatgcgccagatctttgtccaggcggtaaacgcagtgcatcccgaaaaggtattcgctgactttcaaaagttcgatttgcggcctcaaatcggggaaaacgcaacggatatatccataaaactcaatggagagcgccaagacatcagcggcaagacctgccacatagtggggtttggcaaagcagtcctgggaatggccaacaaagtgcaacaggatttgggagccacctcggccggtggagtcctcagtgtaccggtaaacaccctgaagcagttccaacaaccggtggcacctggtttggttgtccacgaaggagcagccaacaatctgccggatgagaatgctctcaaggcagcccgggaaatcaagcagctggccgaaaagatgactgcccaggacatcctcttcgtcttcatctccggtggcggttctgcccttttgcccttgccccggtcacctttgacgctggaggacaagcgcagcatagcggataagctcatgaagcggggagccagcatacaggagatcaatgctgtcaggattgcttgctcggacataaagggcggtcgcttggccaggttggccggccaggcgggactcctggtgacctttgtgctcagcgacatcatcggtgatcccttggagctgatagcctgcggtcccaccatacaacccgaggcggcagcatctccatccgacatccttaaaaagcatcatgtgtgggaggagctgtcccccgagattcggcgggtctttgagcagccggaggagcagaagaacacatcgctgcccgagcacaaggtttttgtggtgggcagcaatgtgatagccacttccacagcggctcatgaggccgaaaggctgggctacattccgtgcgtgctcagttgtgctgtccagggagatgtggctcaagtggctggcgactatcagagattgctgcacggtatccaggaggccaagcagcatggcatactggatcctcaactcagggagaagtacgcctttggggagagaagttatccgacttttcggagggccctagaggaccacatgagcagcaagaagccactgttcctgatctgtggaggagagccagtcattaaagtttctggccatggattgggcggcagaagccagcacttggccctgctgatgtcgcaggctctgcaccgcgacgaggccatgcgggactgcaccttcctgagcgccggaaccgacggcatcgatggacccaccgatgcggccggagcttttggagacagcagcgtggtggaatcctatctgggtgatcataccctcgatgaactggccgaaacgctgcgaaactgcgacagctacaacttttacaagaatctcgcgcagggagagcaccacgtgctcactggacacacgggtaccaatgtgatggatctgcatttcctggtcgtgccgtag

SEQ ID NO: 5031 - protein, 487 aa, DROSOPHILA [sequence omitted]

SEQ ID NO: 5032 - DNA, 2936 bp, DROSOPHILA
aacgcccattgagtttcctcaattattcgcacatggcctgaaaccctggagatccttgcttctgcacggaccaccgggcagtggaaaaacccttctcgccaaggctttgtattccgagacacagggtcaagtgacattctttaatataactgccagcattatggtcagcaagtggcgtggtgaatccgaaaagatactgcgagttctctttcacatggcagcaaaacgagcaccatccgtaattttcttcgatgaaatcgaaagcttgacctcgaaaagggacagggccacggatcacgaaagttccaagcgctttaagaacgaacttttgcaacttttggacggtatggagcactctctgaacggcgttttcgtcttggccagcaccaatttgccctgggacattgatgaggcctttttgcggcgtttcgaaaagaaactgcttgtccagctgcccaatgcggcggaaagaagttgcttgattaaccgacttttgggcagcagcatatcgctgaatccacgactactcgagcagctggtggagatctccgatcattttaccggcgacgaaatacgtctggcttgcaaggagattagcatgcatcgtgtgcgttgtgccaccaagattggtgatcgatcaatcggcttgcttgctaaggaatcgccggcagctatcgaagcgaatgtggagaaggccttccggcaagtgcgacctttgggccagaagctgttggccaaacacgagcagtggcagcaggaaaacggctcgtaggctggaatctcgtaatatggatatattttttaaaagcaactcaataaatatcttttttttttttaatttacaataaaacatttaagcccgtttgatgatttcaattgactttttaaatgttcgcttgcgtagccaataacttgagtaatggtaagggtaattagaatttcctttaaaacatgtctaattaattgtgtatatgtattgcacatcaatatccttcatttgttacctgcccgtggtgcgtctcctggctccggcgattgtcatccgtgagacatatctacgaatccgtccgctcgacctgcgttgcgaggtattcccggtggtcaccgacttgacgctgtattccgtggccgtggagcttcggcgatcgctggtcattagatcggagcacatagatgaggacagaatagaggcagccgatctgcgcttgccgccagtaaaggttccaccgccgctcgacgaggtggtggtggcggaactatccgatctggagaagagcgacgatctcttgctgcgactcgatgatccggtgcctgcggcatcctgtatattgctatagaactcctcggtctctcggtcgtaggtctgatcctcatcgtcctcgtccatgggatccacatcgaattcctcgccctccgcctcagtggccattgtatcgcttctctggcttagtccacgatttccacgatttccattcgatagggacgacgaatgctgttgcagttgatagtattcgtggcaatcgcctcgagagccccgggatctactgctaccactcagatatcgatacggtgccgagctggagttgcttgtggtggtgctcaaggagtgtcgtttgctggggcttacatcgaggttaccaccattgatggcctcgccgccaccatcgctgtcgccaccgccaacgctgccactgaaggtgacctcatggaatttcgatgattttcgacgagttctcggcgccattgcctcgccgttgttggccaacgaaatcgagggtctcggccgattgttattctcacccttttgattcagatcgccgcgatgatcctcaccgccttcgggcatcagggtcaaggccaaggcaggacgacctcgttttctgctccacggaaaggcgcgaataaatgcaaagatgatgaacagtgtggctatcatcttgtcacaaaaatctctacttctttcccaaggaatttgtatttcgtactctagaaaatggcgcgcacatccttgggcattttgatttcgttgtcggattttaaattttttaaataggtttttaatttcgtttgtcttgcacttgctcttattttagctaagttcgttttcgattttctaattttcagaaagagaaggagaaagagtaagatgcgtggcgaggcgagacagaagaagtgtggcggtgtgtataaatgaagctgcagttgacagacacgtgcgccccgaaatgatgatggatcaacaacggtcagccgaggaaaataagggaaaatcgtaaagagaatcacattttcaaaaattgcactaaactatacattgtacattctatttttcttaaggttaggtgtacttaaggtgagtcatcgttgcttaacttttgagcgactaacataatattgttttttcgttgcaggaggaaaacccaaaaggatttgaaaagcataatttgtttgttgttacgttagccaactgcaaatacattttccactctctgcgcgtttgctgtttcctgatccgcccttcatttatatatatatacataaatatattatacagatagcgcatccttgtgcgagtttcgttccgtgtgactgacaaactggcggataaactgctggatggacacgcttgtctatctggctgcgagtgaattttatgcgcaattttgatggcgctgcgagcatattatgataatcaatgcacaattattgcacacacacatgcacacaccaggacatgggatatagcgcataaaggactctaagtgcagggcaacttttcctttctcttcgcgtttttttttctttcttccttctcgagtagcgttttcgctttgtaaaggttccccacatctcgttttttttttttttttcattttcccttgttaggaagacaacaaaaattgtccatgttgtatgggggagcgcaggacaacaac

SEQ ID NO: 5033 - DNA, 885 bp, DROSOPHILA
atgatagccacactgttcatcatctttgcatttattcgcgcctttccgtggagcagaaaacgaggtcgtcctgccttggccttgaccctgatgcccgaaggcggtgaggatcatcgcggcgatctgaatcaaaagggtgagaataacaatcggccgagaccctcgatttcgttggccaacaacggcgaggcaatggcgccgagaactcgtcgaaaatcatcgaaattccatgaggccatcaatggtggtaacctcgatgtaagccccagcaaacgacactccttgagcaccaccacaagcaactccagctcggcaccgtatcgatatctgagtggtagcagtagatcccggggctctcgaggcgattgccacgaatactatcaactgcaacagcattcgtcgtccctatcgaatggaaatcgtggaaatcgtggactaagccagagaagcgatacaatggccactgaggcggagggcgaggaattcgatgtggatcccatggacgaggacgatgaggatcagacctacgaccgagagaccgaggagttctatagcaatatacaggatgccgcaggcaccggatcatcgagtcgcagcaagagatcgtcgctcttctccagatcggatagttccgccaccaccacctcgtcgagcggcggtggaacctttactggcggcaagcgcagatcggctgcctctattctgtcctcatctatgtgctccgatctaatgaccagcgatcgccgaagctccacggccacggaatacagcgtcaagtcggtgaccaccgggaatacctcgcaacgcaggtcgagcggacggattcgtagatatgtctcacggatgacaatcgccggagccaggagacgcaccacgggcaggtaa

SEQ ID NO: 5034 - protein, 294 aa, DROSOPHILA
MIATLFIIFAFIRAFPWSRKRGRPALALTLMPEGGEDHRGDLNQKGENNNRPRPSISLANNGEAMAPRTRRKSSKFHEAINGGNLDVSPSKRHSLSTTTSNSSSAPYRYLSGSSRSRGSRGDCHEYYQLQQHSSSLSNGNRGNRGLSQRSDTMATEAEGEEFDVDPMDEDDEDQTYDRETEEFYSNIQDAAGTGSSSRSKRSSLFSRSDSSATTTSSSGGGTFTGGKRRSAASILSSSMCSDLMTSDRRSSTATEYSVKSVTTGNTSQRRSSGRIRRYVSRMTIAGARRRTTGR

SEQ ID NO: 5035 - DNA, 6959 bp, DROSOPHILA
aaaacaaaagaaatatgaatatatattttggctaacattttaaatgaaattgatccgagtttaaaattaatttaactggtttgtggcttcgactactttaaaggctttttctttcctttcaggaaatacttctcaaatcgtgttttaaatatttcatttaattttgctttaaaattagaattaagcactgcctaggctttaaataatttaattcatttcattttaaatagaacttaaaacaaaattactgaatgtgtttcacttaagtcgttctcacaacaagaatatatttttttacgattttcataaattttttgattagcttaatttctctttcccttgccgctttctctccctcctcctcctccttcttcttcttcttctgcagatccgcatccgcatcctggactcaactcattcattcttccattcggtttagttagttagatttcactcgcattattctcaaattggaatgaccttcattagaaacatgtacttttgtttttttcttttctctctttatcgatctttacaacattttaggcttacgttttaatgatagtttatgataagttttacttgttatgcttttctaaatgttttggctgttttttgtagttttttgtggtttttgtttttcttgcttatacaggaaagggtgcaaaagtatggttttggagtgtaactcccggcaattttggcattctttttagtttttcttggaaatagtaaagtttcgaaatttcaactgacgttcaaatgttttaaatgcatttagaaaataaataggatttgttttgttttgttttgtttgtgtgtgtgtgtgtttgctttcttcgaaacgaattcttcaggaatattttcagaaaagtgagcaccacgctggattgtgagttttgttttttctcgatacggaacaaagttgggaaaatatattaatgaattctagaaaattctgccctgccgctttgagggccatatgaatacataaaaccgcctagactgtaaaatctcccgccgcccagttcatcttgtaatcgtccatgttgaacagatcgaatatatcgccactagcattgaaggcgtccactgccccaccggtgccgttgtccacgcccattcctcctccggttccattggccatgctcgtcgacgtcgcgtattcgacgtgttggcccgcctgcggttgggtcaccgcctgcataaaagagttgagtgtactctcgaaatcatcgcaatccattggtgtgctgtggctcccaaagtgactattcaccgccgacgacgaggattcaatggatccattgcaattgaccccaggactgttgccatttccagtgacgtgctgactcagttgggccacaaagctatccgcgtcgaagtccacatcggcacccgtgttattgttcagcagcacgttgtccggactgctcgcatccagcagctcattgatggacggctgcaggctgggattgagatcgcgtcgcaggttgccgttgttgttgctactcttcgccgccgaggcgtgacaatagccactggagtcatctcccatgtccatctcaagttgctgcgacataagctccagcagctcgtactcatcaaagtgattgagcttggcatccgggctgtttggcttttcactaccgctgtggcaacttttgggcggtgtgctcggtggcggcgtggcatgatgctgctctaggaaaatatctaaggtcttggccacgctctcagcatcaatggcgcttgaatcggtctgcaggggcgaggccatgtctatgctctcgatgaacacatgattcggggcctgattgctggcgaagcctacatgctgcacatttgtgtccatggccacgtcgaggttttggactggcgtgactggcgtctccagcttgggcaccagcggtactatgctggctccaccagccgcagtggtgggcgtggctccattgaacatggacaactcgggcagcggcgtcagcggtgtaatgggctccagagcagcactttccggcagttcaccctgcttgattagtatgtccagaacatcgctgacttgttcggacttaatgcttgccgtcttgcgtttgcacagaggagctgtctgcggcagaggagctgcactaggagcgggcgactgaacgggctcctctttaatcttgaccagcggtaggaggccattcaatgctgccgccttactggccgccagctgcttagtggcctcttcgtactgcggcggtggtgctggtgcgggcttgatgtccacttggttgagttgctgctgctttggctgctggacaggctggaattgctgttgctgctgttgttgctgctggagttgttgcaactgttgctgtgtaatgatggacttggtttcgatgggaaagacaatgctgggcagggagtttgtgcgttggtggccattcagtatcttctttggcggagctatcgtagatgctgcaactggagtagccgctggcggtgctgctgttgtcgtggtggtggccgtcaagctgatattgcccagcgtgtgcgccgtcatgtgctgatcattcagacccagcagtagtatggtctgatttccttcgttccacagcaggcccaagttattgtggtgttgattgcctggcgaggctgctgccgccgcaactgccgccggcttggctgcttgcatcatggttgcggtggttgtatttgtattgttggcgggcacattggatttcttggtcgttgtcttggcagaagcgttatttatgtgattgttgttgttgaatggaatgaatacagtttgtgtcttttgcgtgagcaggcgcacctgttgctgttgctgctgctgttgttgctgttgctgcagtgcctgctgctgctgctgctgttgttgttgttgttgctgctgctgctgttgctgtgcggcggctgctgccgctgccttttgcttctggattttagcctccagctgctgcttgaccaccattttctggttgattggtggcggattcgatgaggaaatgttactattgctgttcgagttgctgctggctggcttcttggctgcggatccctgttgttgcagtccatttaccttatggttgctattgcctccagtagctttcactgtcactttggcgggaaaattcttctccacttgctgcggcattacagtcagtgtttgctgcggcccattcgaggtcgtggtgatcagcgtgatttgctgcgaaggcaatgcattcaccacttgagcggtaaccgtctgctgctgctgatgttgctgctgctgttgccgctggcgtatcttctgcagttcctgttgcgatcgctgcaattgcctctgcaactcgtcgatcttgcgctgctgctccctcagcaattcctcgttggtcaggattatggttgcagtttgcggttgtggaggcagaatggtctgcagcgtcattggatgtgtgttatccatctgttgctgcaccacatccatctgctcgtgctccatgcttgcatctgaaaccaacatggtcaccggtggaggctgctccaacaaaccgcagttgctcgtgtccatcgcatcgctaattgtgatcacctcgggcgtggtgttgctgttgttggaggtcggagcgggtgttacattgctatccagtggctccaggggcagatacggtttcagcctctcaatcagatgtggtttaggaccggaaacgggcaagttcctgcgcttgagatgctgctttaggtcagagaccttcatcttctccagtcgggccaagtctgtgatggaactggtggtggattcggcgtagctggtggccggactgggcggaatcgaggagctgaccgaaagcgctggcgagggcagtggtggtgggtgttgcactggagttggttggtgcagctgctggtgttgctgatgcagctgcaactgttgttgtggtgcagcgatcagcgacagagtgggcggtgtgggtgtggccgccggcgtgggcgtcaacatggtggcatctccaaaattaagtggggctcctccggaactgctcgttatggatatggtattgggcaggctgatgggagctggagctggagcggattgcgaggccaatgctggcaccgtctttgtagtaaccgtaatgctgttattggtcgcaccaggagctgctggaagcataacacccggcgcactgggcgctgggatgatggactgattcttgttgaggttctccaggaactttagcagacagttttgctgctccaacatcagctggtaggaggtctcttccggctgcgtttgatcctgcttttgcccggcggcactcggtggacccttgtactcgtggaatttaatggtgcgcgccttggacacgggcttggacttggatttcttacggttcttatccttcccgggagcatcagacttcacggacacgggagcaaggtgcagtcgtgtggtggtcatcggtggtggtggcggagaggcgatggaagacagcggacttagtgtggaagtactagaggctagggagcagggcgagtacagatgattgaccggacttgccgtagtaccagtaacactttggcagagttcctcgtacagattggccgtctcctgcttcaccttgatgatactggccatgggcagtggtggtggtggcggcggaggtggtggcactggtgctggcaccactatagccttcggttgctgctgctggggaagaatctgtggcgaggtgaccaccagttgaccagctgtgggcatggtcaatgccatggtcactattcccgccgaggcagccgccgcctgcagtacatcggtgggtgaactagaggtggcaaccatagcctcatccaaacgcggcggtgtctgccttgtatcgctctctgagctcagggaatcatcatcgaaggtcacataactgtgcggatgctgcggcctcgtgagcaggccctcgctggttgccttgaaggatacgagtccctccttgactatcttctcgatcggcttctccgtatgcaggatgttctttttgattagctccagtggaccaggacggtgttgaatctgagagttgagctggtccgctaggcgagccttcttcagcatccgttgcttctccgccaaactgggatcgatgtggcactcgtcctcctcgagaatgtgcagcctctcgagatcttcgcgattcggtcgctgctggatcttcgccttcagcagatcgctggtcttggcgcgctccagttgcttgcattgttcgtggatagcgggcgaggttttcagagctgttgaatatatacaaacatttggttaggcaattcagaaattacaattaaacgaagttacttaaatgaacaaagaaattagtttccctaaaaaggaagatgctatttcagatgcttacaaatgtaggtaaagggaatatgaaaacatcatctgctcataaacatctaatacacttaatgcatttcctagccacgtcgatgaacccctattattcctatttggatacacaaaatgtatttctgatccagtgcccaaaagttggctcagctttttttccccggctcttggcgcctcagcattgctacaaatttatcatctaaattcaaattcactttcggctgcgttgagggctttgaattagtttgtaaatttgcgtattttccaggattcttttcttcggcttcgccttttccttgcgcataaatttgaaagccattgaaatgaaatgttcgacggcagtatttgcatatcctttttggctgccgatgaattggacgccagcagatgctctgaaccggctaagtgaggttaatgtgtattttatcgatctgactaagcggctaaatgctgtgacccggggcaggaatagaatctgcttttcggaaccctctacttacatggtatgatgccctgctcgacgagctgcgagtgtggacgtcgcaccatgagcttcactttgagcgctgcaaaatatggagaaccaaagaagcaagttagttaagcaacaaatagtgttagtaaccaatcaatgatgtaaaaatatacgttttctatgcctaataataaattattgaacttcaatttgagatctgggagaaaaagtttggtaagctgcatagcaccatagctggccgacaacttgttagcaacaaatcaaaaaccacaaaaatcataaattatagaacaattcgcgggggagtggagatcaagcataggaatcccataaagaagtgctcgaaacagctgggggaaataattttgggcgaaaactttgcctttttctagctttttgacaatgccagggcaatggcaataaatgtcgagaggcagctgtgaatgggaggagcaaggcagcgcgaaaaaaggaaaagtttttaatatctttatgtgcgggctattatggtgtgaacaatatatacatatatatatatatatacgcacacccaagagtaaaaagttcgggctggaaaattaaatatttaagcccggaccgaagccaaagtcagaagctgccgactggcgacgaaggtgtggccccatggggcgtatgcgtaataatctgattagattgccactgctccgggcggctaaataacagattgatgtcaattaacgtggcatccagtcaatggaagccgctgtgaagcgaggaccgcgtgacaaactgatggaaaataaataatcggaaacgaggaacaaggaatctccataagctcacgatttgactttgaaagatgagacaatgctctctcgaagttgctttaattataatcggaaagcgtataaaataatcaattaatgggacattatcctttcaacattaaatccgaatggccgattaaatgcgtgcgagcattgtataatgtaatttcagtctcgagagaatgttttggcatattaagcatacgacctgctgtcctaatatcattaccttcaattagcattccgggcactgtcgaaattgatt

SEQ ID NO: 5036 - DNA, 4275 bp, DROSOPHILA
gcagcgctcaaagtgaagctcatggtgcgacgtccacactcgcagctcgtcgagcagggcatcataccatctctgaaaacctcgcccgctatccacgaacaatgcaagcaactggagcgcgccaagaccagcgatctgctgaaggcgaagatccagcagcgaccgaatcgcgaagatctcgagaggctgcacattctcgaggaggacgagtgccacatcgatcccagtttggcggagaagcaacggatgctgaagaaggctcgcctagcggaccagctcaactctcagattcaacaccgtcctggtccactggagctaatcaaaaagaacatcctgcatacggagaagccgatcgagaagatagtcaaggagggactcgtatccttcaaggcaaccagcgagggcctgctcacgaggccgcagcatccgcacagttatgtgaccttcgatgatgattccctgagctcagagagcgatacaaggcagacaccgccgcgtttggatgaggctatggttgccacctctagttcacccaccgatgtactgcaggcggcggctgcctcggcgggaatagtgaccatggcattgaccatgcccacagctggtcaactggtggtcacctcgccacagattcttccccagcagcagcaaccgaaggctatagtggtgaagcaggagacggccaatctgtacgaggaactctgccaaagtgttactggtactacggcaagtccggtcaatcatctgtactcgccctgctccctagcctctagtacttccacactaagtccgctgtcttccatcgcctctccgccaccaccaccgatgaccaccacacgactgcaccttgctcccgtgtccgtgaagtctgatgctcccgggaaggataagaaccgtaagaaatccaagtccaagcccgtgtccaaggcgcgcaccattaaattccacgagtacaagggtccaccgagtgccgccgggcaaaagcaggatcaaacgcagccggaagagacctcctaccagctgatgttggagcagcaaaactgtctgctaaagttcctggagaacctcaacaagaatcagtccatcatcccagcgcccagtgcgccgggtgttatgcttccagcagctcctggtgcgaccaataacagcattacggttactacaaagacggtgccagcattggcctcgcaatccgctccagctccagctcccatcagcctgcccaataccatatccataacgagcagttccggaggagccccacttaattttggagatgccaccatgttgacgcccacgccggcggccacacccacaccgcccactctgtcgctgatcgctgcaccacaacaacagttgcagctgcatcagcaacaccagcagctgcaccaaccaactccagtgcaacacccaccaccactgccctcgccagcgctttcggtcagctcctcgattccgcccagtccggccaccagctacgccgaatccaccaccagttccatcacagacttggcccgactggagaagatgaaggtctctgacctaaagcagcatctcaagcgcaggaacttgcccgtttccggtcctaaaccacatctgattgagaggctgaaaccgtatctgcccctggagccactggatagcaatgtaacacccgctccgacctccaacaacagcaacaccacgcccgaggtgatcacaattagcgatgcgatggacacgagcaactgcggtttgttggagcagcctccaccggtgaccatgttggtttcagatgcaagcatggagcacgagcagatggatgtggtgcagcaacagatggataacacacatccaatgacgctgcagaccattctgcctccacaaccgcaaactgcaaccataatcctgaccaacgaggaattgctgagggagcagcagcgcaagatcgacgagttgcagaggcaattgcagcgatcgcaacaggaactgcagaagatacgccagcggcaacagcagcagcaacatcagcagcagcagacggttaccgctcaagtggtgaatgcattgccttcgcagcaaatcacgctgatcaccacgacctcgaatgggccgcagcaaacactgactgtaatgccgcagcaagtggagaagaattttcccgccaaagtgacagtgaaagctactggaggcaatagcaaccataaggtaaatggactgcaacaacagggatccgcagccaagaagccagccagcagcaactcgaacagcaatagtaacatttcctcatcgaatccgccaccaatcaaccagaaaatggtggtcaagcagcagctggaggctaaaatccagaagcaaaaggcagcggcagcagccgccgcacagcaacagcagcagcagcaacaacaacaacaacagcagcagcagcagcaggcactgcagcaacagcaacaacagcagcagcaacagcaacaggtgcgcctgctcacgcaaaagacacaaactgtattcattccattcaacaacaacaatcacataaataacgcttctgccaagacaacgaccaagaaatccaatgtgcccgccaacaatacaaatacaaccaccgcaaccatgatgcaagcagccaagccggcggcagttgcggcggcagcagcctcgccaggcaatcaacaccacaataacttgggcctgctgtggaacgaaggaaatcagaccatactactgctgggtctgaatgatcagcacatgacggcgcacacgctgggcaatatcagcttgacggccaccaccacgacaacagcagcaccgccagcggctactccagttgcagcatctacgatagctccgccaaagaagatactgaatggccaccaacgcacaaactccctgcccagcattgtctttcccatcgaaaccaagtccatcattacacagcaacagttgcaacaactccagcagcaacaacagcagcaacagcaattccagcctgtccagcagccaaagcagcagcaactcaaccaagtggacatcaagcccgcaccagcaccaccgccgcagtacgaagaggccactaagcagctggcggccagtaaggcggcagcattgaatggcctcctaccgctggtcaagattaaagaggagcccgttcagtcgcccgctcctagtgcagctcctctgccgcagacagctcctctgtgcaaacgcaagacggcaagcattaagtccgaacaagtcagcgatgttctggacatactaatcaagcagggtgaactgccggaaagtgctgctctggagcccattacaccgctgacgccgctgcccgagttgtccatgttcaatggagccacgcccaccactgcggctggtggagccagcatagtaccgctggtgcccaagctggagacgccagtcacgccagtccaaaacctcgacgtggccatggacacaaatgtgcagcatgtaggcttcgccagcaatcaggccccgaatcatgtgttcatcgagagcatagacatggcctcgcccctgcagaccgattcaagcgccattgatgctgagagcgtggccaagaccttagatattttcctagagcagcatcatgccacgccgccaccgagcacaccgcccaaaagttgccacagcggtagtgaaaagccaaacagcccggatgccaagctcaatcactttgatgagtacgagctgctggagcttatgtcgcagcaacttgagatggacatgggagatgactccagtggctattgtcacgcctcggcggcgaagagtagcaacaacaacggcaacctgcgacgcgatctcaatcccagcctgcagccgtccatcaatgagctgctggatgcgagcagtccggacaacgtgctgctgaacaataacacgggtgccgatgtggacttcgacgcggatagctttgtggcccaactgagtcagcacgtcactggaaatggcaacagtcctggggtcaattgcaatggatccattgaatcctcgtcgtcggcggtgaatagtcactttgggagccacagcacaccaatggattgcgatgatttcgagagtacactcaactcttttatgcaggcggtgacccaaccgcaggcgggccaacacgtcgaatacgcgacgtcgacgagcatggccaatggaaccggaggaggaatgggcgtggacaacggcaccggtggggcagtggacgccttcaatgctagtggcgatatattcgatctgttcaacatggacgattacaagatgaactgggcggcgggagattttacagtctag

SEQ ID NO: 5037 - protein, 1417 aa, DROSOPHILA
MVRRPHSQLVEQGIIPSLKTSPAIHEQCKQLERAKTSDLLKAKIQQRPNREDLERLHILEEDECHIDPSLAEKQRMLKKARLADQLNSQIQHRPGPLELIKKNILHTEKPIEKIVKEGLVSFKATSEGLLTRPQHPHSYVTFDDDSLSSESDTRQTPPRLDEAMVATSSSPTDVLQAAAASAGIVTMALTMPTAGQLVVTSPQILPQQQQPKAIVVKQETANLYEELCQSVTGTTASPVNHLYSPCSLASSTSTLSPLSSIASPPPPPMTTTRLHLAPVSVKSDAPGKDKNRKKSKSKPVSKARTIKFHEYKGPPSAAGQKQDQTQPEETSYQLMLEQQNCLLKFLENLNKNQSIIPAPSAPGVMLPAAPGATNNSITVTTKTVPALASQSAPAPAPISLPNTISITSSSGGAPLNFGDATMLTPTPAATPTPPTLSLIAAPQQQLQLHQQHQQLHQPTPVQHPPPLPSPALSVSSSIPPSPATSYAESTTSSITDLARLEKMKVSDLKQHLKRRNLPVSGPKPHLIERLKPYLPLEPLDSNVTPAPTSNNSNTTPEVITISDAMDTSNCGLLEQPPPVTMLVSDASMEHEQMDVVQQQMDNTHPMTLQTILPPQPQTATIILTNEELLREQQRKIDELQRQLQRSQQELQKIRQRQQQQQHQQQQTVTAQVVNALPSQQITLITTTSNGPQQTLTVMPQQVEKNFPAKVTVKATGGNSNHKVNGLQQQGSAAKKPASSNSNSNSNISSSNPPPINQKMVVKQQLEAKIQKQKAAAAAAAQQQQQQQQQQQQQQQQQALQQQQQQQQQQQQVRLLTQKTQTVFIPFNNNNHINNASAKTTTKKSNVPANNTNTTTATMMQAAKPAAVAAAAASPGNQHHNNLGLLWNEGNQTILLLGLNDQHMTAHTLGNISLTATTTTTAAPPAATPVAASTIAPPKKILNGHQRTNSLPSIVFPIETKSIITQQQLQQLQQQQQQQQQFQPVQQPKQQQLNQVDIKPAPAPPPQYEEATKQLAASKAAALNGLLPLVKIKEEPVQSPAPSAAPLPQTAPLCKRKTASIKSEQVSDVLDILIKQGELPESAALEPITPLTPLPELSMFNGATPTTAAGGASIVPLVPKLETPVTPVQNLDVAMDTNVQHVGFASNQAPNHVFIESIDMASPLQTDSSAIDAESVAKTLDIFLEQHHATPPPSTPPKSCHSGSEKPNSPDAKLNHFDEYELLELMSQQLEMDMGDDSSGYCHASAAKSSNNNGNLRRDLNPSLQPSINELLDASSPDNVLLNNNTGADVDFDADSFVAQLSQHVTGNGNSPGVNCNGSIESSSSAVNSHFGSHSTPMDCDDFESTLNSFMQAVTQPQAGQHVEYATSTSMANGTGGGMGVDNGTGGAVDAFNASGDIFDLFNMDDYKMNWAAGDFTV

SEQ ID NO: 5038 - DNA, 5248 bp, DROSOPHILA
gagcgtaagaaatctaaaaatataatttgcttgcttgtgtgagtaaaaacaagagacgagaacgcgtataagtgtgcggtgttgtgctagaagacgattttcgggccgaaatcaattctgatcgaagaaacgaatttacatggtacatattagggtagtttttgccaatttcctagcaatatgataaaataaaaaaatttttaaaaattcgcgccctgaatattataattttaaagctttttaaatttggttgttaaaatcgccgctcgaattagctaccgtttacacatttatatttatggttaattctaatttggctctcatctgacaattttttaaaagcgaaatattttttttgaaacacttttaatggtaatgttaccatcatattaagtcaaatgatttaataaatatactaaataattaaatatgcaattaaattaaattgcaaaagtaatatcaaagacaatagaatttattctagtgtctttgctttgttcatatcttgaggcacgaagtgcggacacaagcactcaaacaattgccttattaatttttcacacgccgcaacatgaatactctaatgacaaatattcttatataaagtcatttttgaaatttatttatcaaaaataatatagatttaaagccaaagaacttctaaagtgaagggcatattttgtcaaatttacaatgcatgtgaatacgtgtgcacacatactgatgtctgctatcactttgtgcgttgaaaagagctgttcgctgtagcgctcttcgctctctcgctctctaacaaaaattcgagagagcctggagccacctctagagccacggccaaaaaatcgtgtgccaaaaaatcgtatggcgttacgcatcttgttattctagggtctttgtccaaactaatatgcattaaaacacaagtttatattaaatgcaagcaaatattgtatttatttcttagcaagcgcatttaacaagcaagcaagtctaaaaagttctcagcgaataagtttttaattttgtttggcggctttaaatctcaacggttaacaaagcgagttacttttttatacaatttctgtatatatgccattatgcgatattgtttattttggtggatagttacaggtactaccacattactccgccttcactggcacataggtcaggataatgctggagtgcggggccaccttgagatccttgagattcacgcgtccagcatgagcaacctttccggagttatccatgttattgttgtactgctcgctgaaataggacaccgtcatcttgtccggcagattgtctgggatagtaaagttgctcgcctgcggcagttcggtgggattgaagatgacaaagtagccagggtttccagacttgatcctgtggaaaaaacataaaatgggtttaaaaaaaaaacaaaaagataactgaaatcttttaactacataataacacaactaataaattaagcataggttatagtaggattgaatataaatgaattcagaaatatcgaaaattaaaatactaatatataatatatagggacacttggtttaagtttttacctctgccttcatgtggcaagcattaacgaattatacaaaagttagtgacaaatacaatcgagaaagtaaacaacttcaattacctggagaaggcgaccagtggatcggcctggtagagattaagatttccatgcatgtaggatgcagtcttgcgcagagaggtgatctgcctgtaggtctcctcggtaacgttttgataagccacagcatccacagccaccacgggaacaccgggcagcagggataggaacatggccagagcagatggatcctgtggggtgtcgacatagacgtccgctaagttccactgcagccagctgtccgtgcccgattgggcgagtgtgttatccagttccttctgtagcgacgtgtctggcttagatttgctgagcacctttacaaagtttccgtacataggcagatcgatgccgtatgctccagaatctccgctcaactggtacacctgtggttccatgacatcttcggcaaccgagaagaaagcctcgtcggaggcattcttcacgatgctcaggtaatcatagagcacatcgcccaggccggataggaaagttgtttgtctgtgggagtagaagccatattcattgggtcccaggctgaagtccttcggcgatgacgagatctgctcatcctcgaggctatcgaatagcgcaaagaacttggtattcttcaggcggaagcctcgaacgcccaatgccaccagatgctttaggactgctccgaactcgttcctaatgatggtactgttcatcttgaggtcgtagtacccgtcttcgaactgggagagcacatagttgtctccaaccttttcccaggcgctgcgattgccgcccaccttgagccagttgttgggaagagctttaccgccgctcacccagacaaaggccgatctcttctccgggtttgcaatggcatcctgcacaagctgcgagttctttgccgcgtagttgggcgtcaggtcaagtataaccctggtatcgctgccctggtacagagccaccaaatgcttgatcttctcctccacctccggcttcttcacgtcgtaggtcagagcagctggaagctcataaatcgcgccagcggaaaccagttttttggcgacctgaacatcctctggcctacaggtctcaacgctggcgaacttggcatgtggtccacgcttgtaccatggaagtggctgcggagcagcgcacttgggggctccgatgatgattaggatggcgcccaccagcatgcccacccaaatggcccagaagcacacgaagaagatccagcggagtcgcacccagaaagggtcgttggcgtacttcatgagctcctccttgctcataccagtgaaggcctgtaatgaaaagaaataattattaaaagtactattttataaaataataaaatgcgtcagggtaaaagcagaaagtagagactaattacatattagtaatatgaaaaacgagtatttcataacaataaaactgcacaaataaatttcaataattgcgaatacacatgtatgttacacacatatatacacatatatatatatgcacatgtgcacccacatattaatacatatgtatatttattgaatgacaagccaaggtcattaaccggagaacgaaattcaactaagtgtaacttgaattctagcataaccacatgcacacatacatatgtatgtacataactagcgattttgtttaaattatttaagttgcgcagcttttgaaataacggtctaaccaatggcgtttacatatattattttcctttctcatttttaaattaattttcaaaaatgtatgtatgtttaatactcacgggcttgcctccgtttacggttccgatgtcgatcttggcatctccgttctggtgatcgcccttgatgaacttaacctcatcccgacgctcggccagcttatcctccactccgttggagcccagcatctgttcgtcggcgccatcggcgtgggccgccttctcatcctggaccatgtcgactaaaaagtaaatgattcaacaatgattcaatttgctctaatcagtttcaattaagcgtaagcacgttaatctcaagccaacagcctttctctggggaaccgagctggttttgtaaggttaagtcgaaatcagaagccacattcctcatgattcacaggagaagggaagttttccgtgtgtgggattttctctggaagaacttgctgacgtcacaggatgcgagccacgcttcgagtttgcgcttcattggaaaatggacctgtggcttggtctaaaatcgatatcgctttccgtatactcttcttatctcccgcgtactgataagcacacgcccaccacgaccccagccactcatgaaaaatacacatatacacttttaaatatagatacttagatacattttcatgagtgcttccagtgaaaattcgacgcattgttacgtcagccatacatttttccccagctgtagacacaatttctttgtttaattacctttttcggggttcgaactggctgccacaaaagtatcttcggctatagttttgtagacctccgtggaatcgggtgggtattcagcagctgcgttgattgtactatcacatacgcctaaaatagaccgcagcaagaattagcgaaatgaacgcggtgaagaattccttacaaatgcctcgtttgtgtggtatgtaaaatattttatagattgaatacgggcttaccaggaattaatctacccatcggtcataccttattccatatttttataaaatacctcggcgattttcagtgcctacttacgctgtcttacagatgctcgttgctacaaaactgattggcgggaaatttgaactgttagcttagaaaaactcaccaggagctggtagcgtaacggagctctgcaatatttttaatcacttaaaatgctgagatatttgaatttaatgtacttactttgctggccccacctcccaaacgtatcaagcgcgagaataggttcatggcagtggtgatttcctgagatagtgaagaatttaatttatattaatgaaaattactgtgcttcaaacagactagcccaaaaccaatttttacttaagtattgtattgaagatatgtatttctgatgaagtaagctcttaaagaaatattgtaattttataccaattcatttgtagttacagctcacaattatataatgataattgggatcgaataaatataaaacattgtaacaaggtatgtattggcacacactaaaaaatattatatgtacacatacccttagcttttttgaaagactgttaataaaactataaacaataaatgagatatttggcactggcttgtattttgcactgtgacctgcccaataagaggtctgattcgcaactaaagttgcagtttcgctctggcagtgcatcgcccccagaggcgcagccccaatccgaaccgctcctcgagtttgatttaattatacctgtgaaagaaacgcgttccgtgtgcgtaagtacgatttatggctcgcggcgattgagattgagccgggcccaaaaaaactacctgtctgcgtggcagcttacctgagctctctcgcttgaccaaaagccaagttggtggaccgggttttgtggccagccaccagcgcagagcaaactgca

SEQ ID NO: 5039 - DNA, 2008 bp, DROSOPHILA
aattcttcaccgcgttcatttcgctaattcttgctgcggtctattttaggcgtatgtgatagtacaatcaacgcagctgctgaatacccacccgattccacggaggtctacaaaactatagccgaagatacttttgtggcagccagttcgaaccccgaaaaagtcgacatggtccaggatgagaaggcggcccacgccgatggcgccgacgaacagatgctgggctccaacggagtggaggataagctggccgagcgtcgggatgaggttaagttcatcaagggcgatcaccagaacggagatgccaagatcgacatcggaaccgtaaacggaggcaagcccgccttcactggtatgagcaaggaggagctcatgaagtacgccaacgaccctttctgggtgcgactccgctggatcttcttcgtgtgcttctgggccatttgggtgggcatgctggtgggcgccatcctaatcatcatcggagcccccaagtgcgctgctccgcagccacttccatggtacaagcgtggaccacatgccaagttcgccagcgttgagacctgtaggccagaggatgttcaggtcgccaaaaaactggtttccgctggcgcgatttatgagcttccagctgctctgacctacgacgtgaagaagccggaggtggaggagaagatcaagcatttggtggctctgtaccagggcagcgataccagggttatacttgacctgacgcccaactacgcggcaaagaactcgcagcttgtgcaggatgccattgcaaacccggagaagagatcggcctttgtctgggtgagcggcggtaaagctcttcccaacaactggctcaaggtgggcggcaatcgcagcgcctgggaaaaggttggagacaactatgtgctctcccagttcgaagacgggtactacgacctcaagatgaacagtaccatcattaggaacgagttcggagcagtcctaaagcatctggtggcattgggcgttcgaggcttccgcctgaagaataccaagttctttgcgctattcgatagcctcgaggatgagcagatctcgtcatcgccgaaggacttcagcctgggacccaatgaatatggcttctactcccacagacaaacaactttcctatccggcctgggcgatgtgctctatgattacctgagcatcgtgaagaatgcctccgacgaggctttcttctcggttgccgaagatgtcatggaaccacaggtgtaccagttgagcggagattctggagcatacggcatcgatctgcctatgtacggaaactttgtaaaggtgctcagcaaatctaagccagacacgtcgctacagaaggaactggataacacactcgcccaatcgggcacggacagctggctgcagtggaacttagcggacgtctatgtcgacaccccacaggatccatctgctctggccatgttcctatccctgctgcccggtgttcccgtggtggctgtggatgctgtggcttatcaaaacgttaccgaggagacctacaggcagatcacctctctgcgcaagactgcatcctacatgcatggaaatcttaatctctaccaggccgatccactggtcgccttctccaggatcaagtctggaaaccctggctactttgtcatcttcaatcccaccgaactgccgcaggcgagcaactttactatcccagacaatctgccggacaagatgacggtgtcctatttcagcgagcagtacaacaataacatggataactccggaaaggttgctcatgctggacgcgtgaatctcaaggatctcaaggtggccccgcactccagcattatcctgacctatgtgccagtgaaggcggagtaatgtggtagtacctgtaactatccaccaaaataaacaatatcgcataatggcatatatacagaaattgtataaaaaagtaactcgctttgttaaccgttgagatttaaagccgccaaacaaaattaaaaacttattcgctgag

SEQ ID NO: 5040 - protein, 565 aa, DROSOPHILA
MVQDEKAAHADGADEQMLGSNGVEDKLAERRDEVKFIKGDHQNGDAKIDIGTVNGGKPAFTGMSKEELMKYANDPFWVRLRWIFFVCFWAIWVGMLVGAILIIIGAPKCAAPQPLPWYKRGPHAKFASVETCRPEDVQVAKKLVSAGAIYELPAALTYDVKKPEVEEKIKHLVALYQGSDTRVILDLTPNYAAKNSQLVQDAIANPEKRSAFVWVSGGKALPNNWLKVGGNRSAWEKVGDNYVLSQFEDGYYDLKMNSTIIRNEFGAVLKHLVALGVRGFRLKNTKFFALFDSLEDEQISSSPKDFSLGPNEYGFYSHRQTTFLSGLGDVLYDYLSIVKNASDEAFFSVAEDVMEPQVYQLSGDSGAYGIDLPMYGNFVKVLSKSKPDTSLQKELDNTLAQSGTDSWLQWNLADVYVDTPQDPSALAMFLSLLPGVPVVAVDAVAYQNVTEETYRQITSLRKTASYMHGNLNLYQADPLVAFSRIKSGNPGYFVIFNPTELPQASNFTIPDNLPDKMTVSYFSEQYNNNMDNSGKVAHAGRVNLKDLKVAPHSSIILTYVPVKAE

SEQ ID NO: 5041 - DNA, 10368 bp, DROSOPHILA
ggagaaattaagacgctggtgcaatttcattcacttggcattgatctaggcaatctacaaacatcacaatttgtttttgacctgaaatgtagcataattaatatttattgcccacccttatcagcatcaaagttcattcagctgttggaatagttattccagattcctatcacttcatttgccagcaatttgttacgttttagacagttctaggaaagttgatatgcatcatgcagattgttatcgcccgtttcgaagtggctcatttaattaacaaattacccgttgagctctggtttcacagctggttttccaccgatctcgttggcaaataaatgctttgctttttatttagtttttaatcaacaaaacgaagcgctttggcacttgcttccctctctcttatcaacacgtattggggtatacctgtgacggtgttgttgctgcgttttaatgctgcgataagctttttgccattatttcacttgaatctgctttttgccgagtacttgaactaattttgataagctggcgaaattttaaattgacacctgagctgctatcaccttcgatagctcagttggtagagcggtggactgtagaagttttcagatctgatcacactttccaggtgatcgaatccagcaggcatccataggtcgctggttcaaatccggctcgaaggataacttttttttccatatatatgtataccatatacttttcttttatccctcaccagtaatccgtagtaaataaagaccattgtatatatattttttttttaataaattgttttcttttatatttttcatctttcttttcatccttgctcctgcatcatcgtcgtcgtcctcaaaaatacgggttgttttaaataaataaaataataatgtttatatgacaaactgcatatacgagacgtgcgctgcaacatcaggcacgaatcgatattttccatttatcgggttttctttttgtggggttttttctcttttctctcgtttctattaatttatccaacatgctgagcttacgcgttaggtcttacgattctagattaattaacgtttacggatttattcgagcttagcttagaacgcataacgatgtagatagttattcatatatttatagggcattcgttttgtttatacagttacgtttagttgaatgcgcaacgaagtttgaataccctttcgtcgatatgtgtgtgtggttgtgtgtttgctaatgggggtgagtgagtgtgtaccgcatataaagtatataggtgtttagtacatatacaagagagttacatatgcaatatctgtttgtttttctggtctttctacaactatgtgtttaggatgatagttcctaagtaatttcaagtcattattcggttatgctctcgctagttaatttacaagtggtttgctattgctttataaaattattaacaaaaacggctagtagaataggtctcctttccacatacatgtacaaatgtatacaaagataccagttcgcatcgatagggttttttaatatatattagcatttctatacaatttgttcaattggtcgctcttactcctaagcatactcctcttttcctcccttaacttctccttcagcagcagcagcgcacacagatacgaaagtatctaatatctgaagtatctggcggatgggcggggactatctgtgttgggggcgtggcatggcggctatatacagtggactctgcgctctcaaatctgcactctgatctgggatttttcgccagcctggctggggaaatcgacagaggctccaaggcgggcggttttggtggggacgtggatgtgggcgtggctgccgcctgtttgctcgttactcgatacggctaaagtctaacgatttacacttaaaattcaaatattcagtccattttgtttgcgttgtgtttaaagcattgacggcttggaaccaaacagcatttgatgctctctcgctcgcgatttcccatcgcattcactcggttgagtggatggcgtggtatggtgcgatggtggtgcgaatctatcgacagccacagcccaccacggtcatctcctggtagttcttcagcaccaccgtactttggtcgttgagatagagcatggccacgctgtccagttgcgtgggcacgcagcacgccttcggcaccttgccgggattcatattgttgaccagggtctgcaccacggcgtgattggtcgagttaaagtggtcggccagcgggaaggggcacttcccgtggcagtaatatgcatcgtagcccagaggcgccacaatccagtcgtcccagcccacgtccgagaagtccacgtacagcgagtgccgccggcaggtgtcgtcgtggttcttgcgcctcgtaggccgtctcggctgccgcttgttccggccgcccttgccaccgccctctccgccagacacgtcccgaatggagcgcgccttgtgccgcccgtcgtccgtgtaggtgaacaggagcggctgcttgtgctgccaccgctcgtgcgcctcgtccgcgctgcggcgcaggcgtacatggtggtgtggggccggcttcagggagcggaccgtccgcacctccaccagcagtccgtagttgcgctgcggactcgccagccaccggtccacggccggctggacatcgaggctcaccgtgtccgtgctgttaagccggaccgtcttggtgtccaacagcagatagctcggctcccgctgaccacgcaccccgacgcgcgtgatgtcgtagacaagcacctggtagcgcgtccgattcgccgacgatctgctggccaccacctgttgactgagtgcgtcccgggtcagctgcagctccgccgccttcagcttctcgtcggcgggaatgctcttcacgtcgaagtgcagccgaaaccggtggtggtgcggaaatcgatcgtcgattttactatctgcaaggaaacggaaaagaaggatattgcgggtgagcttggagcaaagaaatcataggaacttagctattgaatctaaaaaaaaggactacctctagcacaccccatctttttaaaggtgattctaaaaaaacagcccacttccagctgtctgctttatccacctgaaatcggaatcagcgaataaaaccgtacaatccggaggatcaagtgcatgagcctctatctgtggggacataacgcgggctcggatctccggctagataattagacacaccttccttcatctacctggtttcctggaccagtaagtaccccctgcttaaatacacccactactctagagcgtggaaagtgcagggaaatcggggacgacaaaggtaggtcgaaaatcgcacgttccagttgtccagccgcctttttacgactggcgcctgtgctaaagaccctggcccacaccggcctaccttttcggatctgtctatatacacatataggtaaagtatatgtatttgtgcggcaaggtgcaaacgctgcacgcttgccgaaaaatcttaatttgaatcgacgccgccgctgccgttttcaagtaccttgcacaaagagccaagcgagtcgtaaattcttttgggaagcgggaatcaaccggagggttgggttccgagtccgaaaaccagaaaccaacaacggcacagatgccacagcctaaagacgtggccagaactgaaccgtaaccaagacaaactcgactcgccagtcggcttagacacttggctttagacacttggtttgtgcggcttgcttacctgcacctaactgctttattgttcgaccctataatcctgcggaaaataatgcgaaatacgctttaataataattgttattcctacaaatacaatataaaagccatttagcgcatgcgctaaacggtcctggtgtaattcttaggaaaaatttcaaggtcactgccgagctgtcgtcgcggaagagcaggtaaaaggactctcgtgtccttttagctgttcattttggaaagccgtggaatttccgcgtgatttcacagcgcttgcgtgaatgatatgaggggtggatcgatggatcgaggacagaaggatctagggatcggcaggtatgcaaatcgcttagatgaaacagaaatttcaggaaaatccgactggctcttcattcgcattttggtagcggaaagtacgcattgcgatgagtgggaatataaattacggctaatacacatcgaagcctttcgcggtgcacaaaagcctaggcggatggcaggtggaaaattcaggtataggaagtaattgaaaatggattggattacctttatgtcctaataaaaggggcaagctactctgatttttttgcatatataagattcgttagttttaattttaagcaaacctaagatgtaccatgcgatctagataaaccagattgaaatcaataaaaatggaaattattcttcttataaaaagcaaatatatatctgaaaacgttggatgaaatgtaaatatattcgaaagttgcccataacaacattttgtctgttttagtttgtgaccattgcattagttttaattgactaacattccaaaaggaatcatactcgctgtattaaaagtaataccattagaatgcaaagtttttctatatccgcttccggttttctagttctggttttaaacatttgaaaaggagactcacctttgtgtgtaaaacttcgcactgtgttggccgacttggtcagcagacccggcttggggatgttgaccgagtcgagctcgtggcccatgatctcggcgtagagcttcttcatcggctcggggatgatgatcttggagcggtcgatcttgggcggccgcttcatgttgaacagcgagagcaggctcttctcgatctcgactagagtggaggggtctggcttcagcttgtccttgatgagcgcctccttgctgtaggtggacgggccctgctcggcgatgatggccttggcgttggcgggcacgttgatggaggccacctcgcggtcgagcaccagcgtcggctcctccacgaagattgattcaatcgacgaggattgatgagattctgtggatgcactggcctgctttggctggtggctgcgatggtggtggctcttcttgtggtggctcctctgctccttgacagccattttgttgtggttgggtttattaactaattgtttagacttatttttggaattttctaattggtctgttcttggcttatgcacttcgttgaactgtcggttcgcgtcacttttgctaggttttttgtttgttttactccgatggcttttatcactatcactgaacgaggcgggctcgctgaatggattaaatgcttttgctaatgctgtgctggtcgaggctcctaccgatctagatccagatcgtcctgatcctgatcctgatgctgatgccagcggaatatgagcggcaacgggcgctatggcggcgatgaatctctgggatatatcctcggtgctagcaactcgaacaatcgtttgaaaagtcgccagcactgcgaggagtagaagccatgcgcgcatggtcgcttgcaactctgaaacgagacaaagacgaagacatgggttaagcgctggtcggcaagggttaggtggcttcggataggattcggatgtgggttcggatgtggaccggaatggaatcgcgttcgtattccactcaatccaatccgctcttgcactcacactcaggcggccatgggtgcaagcgggacgactatagggcccaactcttcgtatctggcagatagtatctggtatctttcgcggcggcggcgactcaacgtatctgtatctgtgtgcgtgtcggtgtgtctctgagcgtgtgtgcgttggacgacgtgcgctgcgcgactgaacgctgctcttcttcttcggcaggtaagcgacgtctgcagcggcggtagctgcggcagcggcagcgctgcgaccgcggcagcgacgtcgcctccttttggcccatttgagggaaaaagagagcggagcagtacgaacagaccagaccagaccagaccggagagcgcctggccaaagttttacgaccacggatggcccttcggggtgaaaggtgcaactaaaaaatggtggctctcctcctccgcaagctctcccctctcgctctaacggcccacccctctcacttgcacatcggcaagtgttgcaatcgcaggcggacattgcaccttttgcactgacacacgatcttttcggaccagctttatcgttttgtgtctacgaatagaaattcaatatagccccataccaaaccaaaacttcaacccccaccccaccccctggatttttcggttattagagtagcttcgatcgtcatattttccacttatcgctcgctatagcgctttgatttacaaacaggcggcaatgctcaaaaaccccgagagccaaacttatctggaaaatttatgaaaattattagaagtattctatatactttggttataggctataaatttcccagattttatctcaagatgcgtttgaaaaaggtatgccgtacgcacacgcacacacctagaacaaattacatgttgtttttcacataaagattaccatcttatcttgtactaaaaaatttgttatatggcagggcgcttaagcgcaaagggatctttcgaaaatggttaaattggaatttggaaaagatggcacacgctggggggtgcacaagatcttgtgcctccgataaggcggatcggtggaaattggttgaaaattagaggggatcgctgagggaaagggtgaatgaaattgaatttcataaatacgtttatgatttgttcataatttgttgtttgtttttaatatgttcccagaattccaaattccttggcttgtggttgcgtgtggtttcagtcgcagtctcagtccccgtctcaaattctcagttttccagttttcagccagagtttagcagtatttataggttctttactacctgcccgatggctggtggtgaaatgggacaaacgggggtttcccctagacatccgagcgatgaatgccaggcgctatccggaatttccaagctcgccgcccattcagtgaaactacgcgcaccagataccagataccagatacgatactatgtctataactcgaactcagctcaattcgagccgtgaaaagtcgcaagcgcctgctaaagttcaaatttcagctttttgtcgcatcaccaacgactccgaaatgtttcgcaaattgacacatttttattgttaatgattaacgtttgattccggttacccaaaacccaaacgcacccataccatagctacactagaaaataatctgtgccaccactgcgtcagcaattagattggttaataataaacgccaacttggactcaaaacccttggacactcacgcacccagaagatacaatagaactgaagtatacatatacgagagtatattctgccgggttatttatgtgccaggatattgacatttttgttttgtgtttgccgccgctttttatgttctcttttttttttttttgagatttgagagggtccatctataatattagttgtgtatcagaacggtactttattgtgctggttaacaaaggctaaaggagttctcggaataggatcccaggacgggatacaacacgattatgatgtacgtggggaaatattttgattaagcgctacataaaattggattgaaatcaggttgacttgagttacattctttttcaaattcacgccctattttatgagtagtgctatccttgacactttgataattcttttcacttggcaaaaagaattttatattaaaatattctcataatatgtggaagagtacgcgcagccaattgactgtgaaaacgagttctggccaaccacattcgccaaatatatcccattaccaattcctatggacaatttgagttctctcgaatgacacgactgaatgccacatgccatcgacaaggcgaacaacccgaaaattcctcggatcgacaagtaccatatttttcaatatcaaatgaacttggctcgatatcgaatgcacgactgccattatgcaagggttttgtgtgcagttctcacaagttcagatatgtattcacctccgcccctctcgtttcacttttgatattttttgacacatttacataagcttagtggacgaaggcacggcactcacctcagtcttataaagtttcctatggtcgagtggtatcgcttgatattggatctccgggggcccgtatcgttcaagtcgaatatcgatacgacatgtgttcgcttattaattcgaaagccgtttgatggatggatcgcccggttggtaatggtaatagtaacggtaatgataatggtaatggtaatggtagaggtgaaggaaaacaatcaaaataggagcgaccaactgtctcgtccacttttccacggaatttatgacggggctcggaatcggaatcggtttggattcagatttggattttgatttggaatcggaatgggatccgttatcgcgtctagcggctttcggctttcggcgttcggttacacttggatatatttgcacaatttacagatgtttatggcgctgcgaccgtttcgctttccaaataaatcacgcttgtgtaaatatctgatagggatgtcggctactgttttcctccgataattgtagatgaagtagatcgagttcttgttgaaaattgtgttgccgcattcgaggcgcacctggtcggtagatgtggctgcggtcggtatgccgcggcacatgacacactggcaccctgcggtcgggatctggatgtggatctcggtctgggctcgggttggtatcctgggggatacacctgtcacccggcggctccttgggcggacggttcgcaggtaatccacatatttttccactggcactcgcgcaacgcactatatttgcaattgaattgtttctgggggcatctccagtatctgtttctctattcgaatccgaatctgtatctgtttcagtaactgtttgttgtacttaattcgtattcacagctttatttgctttggctggccgttcggatttcagggtttccctttacaacccgtcagttgacattccacacacccagctgaagacacacactcgcgcacaacaacaatctcttaatagtgcctcaatttctttgtttccgcacggagatcttttggcgatcttaacgcttcgcgtcgcgaaactgttcgatactttttccgatatttgtatatgggggtccgagaattttcctcgaaagctttgggttcacgccaagtggctcactttccgccgctcatttcggtatagatttaaactcgatcagcgctgttgaacgactaacgcctttctgtctacctctacctgattccgatacttcagatactcggctcggttacagatacatcggcgcggcgagcacacagatacacacttcggcagctccactccacgagagagaggtccgtcgtagccgagagagtcgagtcgccgatcgggagaggagaactcggaaagttggggctttagccccatctccatcattatcgcgatcatgatcacgcatctcgtctagcgtttctcggactcggattcccagccagcgcgacgtcaaaatcttcctcgttttttcgccgctctcttgagtggccgaccacacacacacactcaaccagttaattggtcgatgttctctggggttttgagtggttttttttctcaccagagagagaatctcactcgacgttctgagctttttaaaaatctttgggcttcagggcaggcattttggaaaactcgatgtgggtactttgaggttcggcttgtggcgaaatctttatgtaatgtagaatatgcacaaaactcatttagggaaatattctgcacttgtccaaaaaaatcgcaaaatatttaaacaatatcttcaaacagttctattgtttcggcctttggagcactatctatgaaatgcttggtagtttagtaaaaggcgataattgaaaacggcggtaaacaactttggagaacaatcacttgccttaataaaagcattgcgttttgctctcgattaaagatttgaacaaatgcttccttttaagcaagcttctgactattaaacacaacagttttattatatatattttttggaaattccttttatcaaaactaacaaatgtgtttcattttgcgcattacccattttgtgacattttatataagagctcgaaaaacgctttcacaatcagaccctacttacatctgacactcctgagaattatgtatccaatcagccgagtcgcttccttcgagcagcagagtggagcatctagctctcggggat

SEQ ID NO: 5042 - DNA, 4003 bp, DROSOPHILA
gtcgttcaacagcgctgatcgagtttaaatctataccgaaatgagcggcggaaagtgagccacttggcgtgaacccaaagctttcgaggaaaattctcggacccccatatacaaatatcggaaaaagtatcgaacagtttcgcgacgcgaagcgttaagatcgccaaaagatctccgtgcggaaacaaagaaattgaggcactattaagagattgttgttgtgcgcgagtgtgtgtcttcagctgggtgtgtggaatgtcaactgacgggttgtaaagggaaaccctgaaatccgaacggccagccaaagcaaataaagctgtgaatacgaattaagtacaacaaacagttactgaaacagatacagattcggattcgaatagagaaacagatactggagatgcccccagaaacaattcaattgcaaatatagtgcgttgcgcgagtgccagtggaaaaatatgtggattacctgcgaaccgtccgcccaaggagccgccgggtgacaggtgtatcccccaggataccaacccgagcccagaccgagatccacatccagatcccgaccgcagggtgccagtgtgtcatgtgccgcggcataccgaccgcagccacatctaccgaccaggtgcgcctcgaatgcggcaacacaattttcaacaagaactcgatctacttcatctacaattatcggaggaaaacagtagccgacatccctatcagatatttacacaagcgtgatttatttggaaagcgaaacggtcgcagcgccataaacatctgtaaattgtgcaaatatatccaagtgtaaccgaacgccgaaagccgaaagccgctagacgcgataacggatcccattccgattccaaatcaaaatccaaatctgaatccaaaccgattccgattccgagccccgtcataaattccgtggaaaagtggacgagacagttggtcgctcctattttgattgttttccttcacctctaccattaccattaccattatcattaccgttactattaccattaccaaccgggcgatccatccatcaaacggctttcgaattaataagcgaacacatgtcgtatcgatattcgacttgaacgatacgggcccccggagatccaatatcaagcgataccactcgaccataggaaactttataagactgagagttgcaagcgaccatgcgcgcatggcttctactcctcgcagtgctggcgacttttcaaacgattgttcgagttgctagcaccgaggatatatcccagagattcatcgccgccatagcgcccgttgccgctcatattccgctggcatcagcatcaggatcaggatcaggacgatctggatctagatcggtaggagcctcgaccagcacagcattagcaaaagcatttaatccattcagcgagcccgcctcgttcagtgatagtgataaaagccatcggagtaaaacaaacaaaaaacctagcaaaagtgacgcgaaccgacagttcaacgaagtgcataagccaagaacagaccaattagaaaattccaaaaataagtctaaacaattagttaataaacccaaccacaacaaaatggctgtcaaggagcagaggagccaccacaagaagagccaccaccatcgcagccaccagccaaagcaggccagtgcatccacagaatctcatcaatcctcgtcgattgaatcaatcttcgtggaggagccgacgctggtgctcgaccgcgaggtggcctccatcaacgtgcccgccaacgccaaggccatcatcgccgagcagggcccgtccacctacagcaaggaggcgctcatcaaggacaagctgaagccagacccctccactctagtcgagatcgagaagagcctgctctcgctgttcaacatgaagcggccgcccaagatcgaccgctccaagatcatcatccccgagccgatgaagaagctctacgccgagatcatgggccacgagctcgactcggtcaacatccccaagccgggtctgctgaccaagtcggccaacacagtgcgaagttttacacacaaagatagtaaaatcgacgatcgatttccgcaccaccaccggtttcggctgcacttcgacgtgaagagcattcccgccgacgagaagctgaaggcggcggagctgcagctgacccgggacgcactcagtcaacaggtggtggccagcagatcgtcggcgaatcggacgcgctaccaggtgcttgtctacgacatcacgcgcgtcggggtgcgtggtcagcgggagccgagctatctgctgttggacaccaagacggtccggcttaacagcacggacacggtgagcctcgatgtccagccggccgtggaccggtggctggcgagtccgcagcgcaactacggactgctggtggaggtgcggacggtccgctccctgaagccggccccacaccaccatgtacgcctgcgccgcagcgcggacgaggcgcacgagcggtggcagcacaagcagccgctcctgttcacctacacggacgacgggcggcacaaggcgcgctccattcgggacgtgtctggcggagagggcggtggcaagggcggccggaacaagcggcagccgagacggcctacgaggcgcaagaaccacgacgacacctgccggcggcactcgctgtacgtggacttctcggacgtgggctgggacgactggattgtggcgcctctgggctacgatgcatattactgccacgggaagtgccccttcccgctggccgaccactttaactcgaccaatcacgccgtggtgcagaccctggtcaacaatatgaatcccggcaaggtgccgaaggcgtgctgcgtgcccacgcaactggacagcgtggccatgctctatctcaacgaccaaagtacggtggtgctgaagaactaccaggagatgaccgtggtgggctgtggctgtcgatagattcgcaccaccatcgcaccataccacgccatccactcaaccgagtgaatgcgatgggaaatcgcgagcgagagagcatcaaatgctgtttggttccaagccgtcaatgctttaaacacaacgcaaacaaaatggactgaatatttgaattttaagtgtaaatcgttagactttagccgtatcgagtaacgagcaaacaggcggcagccacgcccacatccacgtccccaccaaaaccgcccgccttggagcctctgtcgatttccccagccaggctggcgaaaaatcccagatcagagtgcagatttgagagcgcagagtccactgtatatagccgccatgccacgcccccaacacagatagtccccgcccatccgccagatacttcagatattagatactttcgtatctgtgtgcgctgctgctgctgaaggagaagttaagggaggaaaagaggagtatgcttaggagtaagagcgaccaattgaacaaattgtatagaaatgctaatatatattaaaaaaccctatcgatgcgaactggtatctttgtatacatttgtacatgtatgtggaaaggagacctattctactagccgtttttgttaataattttataaagcaatagcaaaccacttgtaaattaactagcgagagcataaccgaataatgacttgaaattacttaggaactatcatcctaaacacatagttgtagaaagaccagaaaaacaaacagatattgcatatgtaactctcttgtatatgtactaaacacctatatactttatatgcggtacacactcactcacccccattagcaaacacacaaccacacacacatatcgacgaaagggtattcaaacttcgttgcgcattcaactaaacgtaactgtataaacaaaacgaatgccctataaatatatgaataactatctacatcgttatgcgttctaagctaagctcgaataaatccgtaaacgttaattaatctagaatcgtaagacctaacgcgtaagctcagcatgttggataaattaatagaaacgag

SEQ ID NO: 5043 - protein, 588 aa, DROSOPHILA
MRAWLLLLAVLATFQTIVRVASTEDISQRFIAAIAPVAAHIPLASASGSGSGRSGSRSVGASTSTALAKAFNPFSEPASFSDSDKSHRSKTNKKPSKSDANRQFNEVHKPRTDQLENSKNKSKQLVNKPNHNKMAVKEQRSHHKKSHHHRSHQPKQASASTESHQSSSIESIFVEEPTLVLDREVASINVPANAKAIIAEQGPSTYSKEALIKDKLKPDPSTLVEIEKSLLSLFNMKRPPKIDRSKIIIPEPMKKLYAEIMGHELDSVNIPKPGLLTKSANTVRSFTHKDSKIDDRFPHHHRFRLHFDVKSIPADEKLKAAELQLTRDALSQQVVASRSSANRTRYQVLVYDITRVGVRGQREPSYLLLDTKTVRLNSTDTVSLDVQPAVDRWLASPQRNYGLLVEVRTVRSLKPAPHHHVRLRRSADEAHERWQHKQPLLFTYTDDGRHKARSIRDVSGGEGGGKGGRNKRQPRRPTRRKNHDDTCRRHSLYVDFSDVGWDDWIVAPLGYDAYYCHGKCPFPLADHFNSTNHAVVQTLVNNMNPGKVPKACCVPTQLDSVAMLYLNDQSTVVLKNYQEMTVVGCGCR

SEQ ID NO: 5044 - DNA, 5920 bp, DROSOPHILA
ctcttcactcacatgcatgtactcctgttcgtgcttgacactggtcagcgtgccggagagctcccgaatcatgtcctccagcttggtgtggcccacctcctcctcgccgggtgctccgggcgcacgttgcggtgcgtcacccacgtcgatggagaacatgaccagcttgggggtcatgctgctgcgttcgttgttgaagcacacggtgtaggttcccttggcgggggccacaaaggtgtacttgccggacgactccttttcgctctcgtgcatcacatggttatccgggccgctgatcttgatgtccacgtctaggaagccaccgtcgatcacctcgaaggtgacgcctgtaaagtcaccatcattttatcagcatagatcccttgtcaattgaccgaaaatccatatcgctcacgtaccaaacttggtgccgccttcgacgttctcgaagaagcactcctcattgtgggcgtccacgctgacgatgaaggcgtggctggtgcggcacaggatcagcaggctgcccacaaggagcagcaccttggcgagtgtcgattccatcgtttgtcttagtacttttggcctggttttaatcgctattaaacgcactgcagccacgtagttgtagtcgattcgatatactccgatagatgtagacaaatagggcatatcgaagaacagcagtttccgatagattcggcatcgataggtgcacgcgacacgcgataccgaatttttaacggatcactacaaaaaactcacaactcataaaaattcaaaagcaacatgaatgccgcgaaatgtttcggttaaagtattggatatcgtaactaatacattactttatttatgtgcgtacctatatgaaaaactcttggtgcattccatcacagttagttaaagtgttctagtatttttgtgctatgtgttaatcggcgactatcgacagttgcccaccattaggaaacagaaagctaaaaaaaaaaatgcaaaaattggccagaatttcggcataaataatagtatcccttgcaaaacttgcaagctgcgtggcaggacgagcagctgaccaccagatcgtcttgaggattcaacatcaggaacaaaggtttcacattggacgcatttgcaaaaaccgaaagggaaaactgccaactcccacacacaaaaaaaaaggaaaaaaaaaatcatcagcacggaaagtaaaaggtcaagtggtcaaccgaaatctgggtaatccgggggaatctttgcaagaatgcagcagaactcggccagcaatcccttcgccatgtccacatatgtggagcggccccaaatgggactggacgtcgaattcggagcggatcctgccagcggagcagctttcttccaatccgatggacgcaagcatgatgatctcaagcaaatgttggacagcaacaaggatggactaaagctggaggccatgaagcgcatcattggcatgattgcccgcggacgggatgccagtgatctgttcccggcagtcgtcaagaatgtggtgtccaagaatatcgaggtcaagaagttggtctacgtctatttggtgcgatacgccgaggagcagcaggacttggccctgctatccatttccacatttcagagggcgctcaaggatcccaatcaacttattcgcgcctcggctctgcgagtgttatcctccataagggtcagcatgattgtgccaatcgtaatgctggccattcgggatagcgccgccgatttgagtccatatgtgcggaaaacagcggcacatgccatccccaagttgtattctctggacgcggatcaaaaggatgaactggtcatggtcattgagaagcttttatcggatcgcactactctagtggtgggatcagcggtgatggccttcgacgaggtgggtctgcagctaaagtaaaacatttatcctctatatacgacggatctttattcgtaggtttgtccggaacgtgtagatttgatacacaagaactaccgcaagctgtgcaatttcctgctggatgtggacgaatggggtcaggtgatcatcattaatatgttgacccgctatgcgcgcactcagttcgttgatcccaatgcggatgatgaggatctggtcaacgatggcctgggcgaaacgcccgttagtgaacgcttctacgacgaatcctcgcactcctcttcccacagcgatgatggcagtagcgatgacgaaaaaaacaagtcgagtacgaacaataaaaacaatggcggaggaaatggcagtagaacacccagttctccgagcaacagctaccacatcgatgtggatcaccgcctgctgttgaggcaaacgaaaccattgctccaatcgcgaaatgcctccgtggtgatggcagtggcgcagctctatcatcatgtggctcccaagaacgaagtgcaattgattgccaaggcgctgatacgactgctgcgatcgcataaggaggttcagagcgtggtcctcaattgcattgcctcgatgtccaccaaacgaaaggcgatctttgagccgcacctcaagtcgttctttgtgcgcaccagcgatcccacgcacataaagcttctcaagctggatattctcaccaatctggcctcggcgggcagtatttcgctcattctgcgcgaatttcaaacctacatctccagcagcgatcgttcgtttgtggcggccacgattcaggccattggacgatgtgcatctagcattaaggaggttaccgagacctgcttgagtggcctggttcatctgctgtccaatcatgacggtgcgttaagctttcttttagccatttgtattttaattttataagtattccgttattccatttagaacacgtggtggccgagagcgtggtggtgattaagcgtcttctgcaaacgaaagccgccgagcactttgagattatcacccaaatggccaaactgatcgattatatcaatgtgcccgcagctagggcagccatcatttggcttataggcgaatacaacgagaaggtgccgctgattgccccggatgtgctgcgcaaaatggccaaatcgtttgtcgatgagcaggatgtggtgaagctgcaggtcctaaacttaggcgttaagctctatctgaccaatccggagcagacatcgttgctgtgtcagtacgtctttacgctggctcgctatgatcccaactacgatgtacgcgatcgtgcccgttttctgcggcaaatcatctttccggcgagcggaacgagctcggtgctcagccagcatgcccgccaagtatttctcgccagcaaaccggctccggtgccggagagtaaataccgggatggcaataacttccagttaggatcgttgtctcactacctgaacatgccagcggctggctacaaggaactgcccgcctttccggtgattccaccggattcatcggtacgcaatatagctggatttatgcaggacaagctgccgggtgaagactcgccatccggacattcaaaggataaatccggccgtgaaggcggtaaggaaaagggtgctggtggcgagaagggcttcctctctgagtcggacgacaagtcttccgcttactcggaatcaggcagcagcagtggcagtggcaccagcgacagtgaatccgatagcgatggcagcgggagcagcgatgaggaggaggaggaggtgcaaaagcagcagccgaccaaggtttcctcggtgaaggagcggcttatcgatgctggaagcaatgagctggccgctacttcttcgcctgtaaaagcaactataaacaacaataacaatgcgagaggttcgtcaggaacatcggacagcgaggattcatcagcgtacagtggcagtagtagtgatgacagcgcttccggtagcgataatgaagtgaaaaagaacgaaacgaaaacggacacaggcacaaagccggagaagttgaaagagaagcacgagaaacagccggagcaaacggctgtcaagagcaatctggacctgctactcgatctggatgacattccgcccattggtcccgtgatgacgccctcgttgggaggattcctgacgcctggtaaggtgatgcgcatctctaaattggcctctttatataataattcttcaataggcacaccaatgatggctggacaggcggcgccactgcagccgcagcacgcccgcaatcgggtggaattggtgggtccctcgcacatcgagttcaagcacaaggagctgcttaacaaggtcagtggccatggactgcatttggcctaccgtttcacccgctccccgcatctgtactcctcgagcatgtgctccattgagctgcagttccagaatcgtggcgaaaaagagattacggccattcgtctcgggcaaacaactctgccggcgggcatgcaattgaatgagtttgcgccaatcactgttctccagccccaacaaacagcgagtggtgtgctgggcgtcgatttcaatgattcgacgcatgctgtagacctggagcttctgtcaagtgcgggcagttcacgactgcaattgaaaccgccggtgggcgagctggtgagatccgtccagatcggcgagagctgtcatcgcgaggagcgggccaagctgcgtggaatgaatgagcatcagtgcgagttgcgtggcctgaggcaggacctaatcgatgtggtcgcattgcggcaaaaggttttcgagtccatcaacgtggcgcatacgcacagctcttccagcggtcagctacactgtttcgccggccaaaccctgagctccaaaagcctcgtgctactcaccctcgattggaaaacagaggatgccctcacgctgctggtaaactgcgagaaaatggtcattggatccatggtgctcaacgagctgcgcaatgctctgcagctcagtttcgccatgtgagcgatggacacgaaagcgaacaagacgaaagcgagcagcgaactaacttgaggagtggaatcccctggagcagggctactcaactgagaataaggcaaagccgcctcactacgtaaacatagcattcatatttagctatacacttgtaaacgggcggggagaacgtaatctttgaaattagctgataacattagctgagattacaggtgttttaaattccattttcgagagattatatgtaaatgtgcagtgtaacagatgcaacttaagtgttcaagtgggatcgaaatccaaaactaatttaaattgcaatttcaactgtaattattacatattctttaacttgttgaaaactgaatgaaaagtgatgcaaactattgtgtaaatgctacaaaactatatttattgttatacacattcgcaaattcttaatgaaacttattgaaatgggaaacacacaacttcctatatatttgtatccgcttatactgagatattttgcataaaagagtcaccatttccttttatgaatggatgaacacaacatgagattagtgtagctttcatatccaaatcgaaaattattcaaggattaccaaccgccccgcccaaatataaatgaaacatgatcctaacgcttttaatattcctatatacaaactgcaaccacaaacaattccagatgaaatgagatgttacaattgattgaactcgaatcgttgccgatccaaacaaatcctatcctccaatccatcctacttagctaggcgtgtgtgtaatgtgtgtatgagtaatcgaaacgtatttgtaaagtgtttgatgttgtaaatctgttgccttcgtgctctatgcggccttcttcaaaacgtagcaaagacaaacgaatatcgaatctatatattatatattatattcatacaataaacagcgcaaattctggcaaattaaagtgaacaaatgaaacgtattctaataaagaaacaaatcaatctgttaatat

SEQ ID NO: 5045 - DNA, 3741 bp, DROSOPHILA
cagaatttcggcataaataatagtatcccttgcaaaacttgcaagctgcgtggcaggacgagcagctgaccaccagatcgtcttgaggattcaacatcaggaacaaaggtttcacattggacgcatttgcaaaaaccgaaagggaaaactgccaactcccacacacaaaaaaaaaggaaaaaaaaaatcatcagcacggaaagtaaaaggtcaagtggtcaaccgaaatctgggtaatccgggggaatctttgcaagaatgcagcagaactcggccagcaatcccttcgccatgtccacatatgtggagcggccccaaatgggactggacgtcgaattcggagcggatcctgccagcggagcagctttcttccaatccgatggacgcaagcatgatgatctcaagcaaatgttggacagcaacaaggatggactaaagctggaggccatgaagcgcatcattggcatgattgcccgcggacgggatgccagtgatctgttcccggcagtcgtcaagaatgtggtgtccaagaatatcgaggtcaagaagttggtctacgtctatttggtgcgatacgccgaggagcagcaggacttggccctgctatccatttccacatttcagagggcgctcaaggatcccaatcaacttattcgcgcctcggctctgcgagtgttatcctccataagggtcagcatgattgtgccaatcgtaatgctggccattcgggatagcgccgccgatttgagtccatatgtgcggaaaacagcggcacatgccatccccaagttgtattctctggacgcggatcaaaaggatgaactggtcatggtcattgagaagcttttatcggatcgcactactctagtggtgggatcagcggtgatggccttcgacgaggtttgtccggaacgtgtagatttgatacacaagaactaccgcaagctgtgcaatttcctgctggatgtggacgaatggggtcaggtgatcatcattaatatgttgacccgctatgcgcgcactcagttcgttgatcccaatgcggatgatgaggatctggtcaacgatggcctgggcgaaacgcccgttagtgaacgcttctacgacgaatcctcgcactcctcttcccacagcgatgatggcagtagcgatgacgaaaaaaacaagtcgagtacgaacaataaaaacaatggcggaggaaatggcagtagaacacccagttctccgagcaacagctaccacatcgatgtggatcaccgcctgctgttgaggcaaacgaaaccattgctccaatcgcgaaatgcctccgtggtgatggcagtggcgcagctctatcatcatgtggctcccaagaacgaagtgcaattgattgccaaggcgctgatacgactgctgcgatcgcataaggaggttcagagcgtggtcctcaattgcattgcctcgatgtccaccaaacgaaaggcgatctttgagccgcacctcaagtcgttctttgtgcgcaccagcgatcccacgcacataaagcttctcaagctggatattctcaccaatctggcctcggcgggcagtatttcgctcattctgcgcgaatttcaaacctacatctccagcagcgatcgttcgtttgtggcggccacgattcaggccattggacgatgtgcatctagcattaaggaggttaccgagacctgcttgagtggcctggttcatctgctgtccaatcatgacgaacacgtggtggccgagagcgtggtggtgattaagcgtcttctgcaaacgaaagccgccgagcactttgagattatcacccaaatggccaaactgatcgattatatcaatgtgcccgcagctagggcagccatcatttggcttataggcgaatacaacgagaaggtgccgctgattgccccggatgtgctgcgcaaaatggccaaatcgtttgtcgatgagcaggatgtggtgaagctgcaggtcctaaacttaggcgttaagctctatctgaccaatccggagcagacatcgttgctgtgtcagtacgtctttacgctggctcgctatgatcccaactacgatgtacgcgatcgtgcccgttttctgcggcaaatcatctttccggcgagcggaacgagctcggtgctcagccagcatgcccgccaagtatttctcgccagcaaaccggctccggtgccggagagtaaataccgggatggcaataacttccagttaggatcgttgtctcactacctgaacatgccagcggctggctacaaggaactgcccgcctttccggtgattccaccggattcatcggtacgcaatatagctggatttatgcaggacaagctgccgggtgaagactcgccatccggacattcaaaggataaatccggccgtgaaggcggtaaggaaaagggtgctggtggcgagaagggcttcctctctgagtcggacgacaagtcttccgcttactcggaatcaggcagcagcagtggcagtggcaccagcgacagtgaatccgatagcgatggcagcgggagcagcgatgaggaggaggaggaggtgcaaaagcagcagccgaccaaggtttcctcggtgaaggagcggcttatcgatgctggaagcaatgagctggccgctacttcttcgcctgtaaaagcaactataaacaacaataacaatgcgagaggttcgtcaggaacatcggacagcgaggattcatcagcgtacagtggcagtagtagtgatgacagcgcttccggtagcgataatgaagtgaaaaagaacgaaacgaaaacggacacaggcacaaagccggagaagttgaaagagaagcacgagaaacagccggagcaaacggctgtcaagagcaatctggacctgctactcgatctggatgacattccgcccattggtcccgtgatgacgccctcgttgggaggattcctgacgcctggcacaccaatgatggctggacaggcggcgccactgcagccgcagcacgcccgcaatcgggtggaattggtgggtccctcgcacatcgagttcaagcacaaggagctgcttaacaaggtcagtggccatggactgcatttggcctaccgtttcacccgctccccgcatctgtactcctcgagcatgtgctccattgagctgcagttccagaatcgtggcgaaaaagagattacggccattcgtctcgggcaaacaactctgccggcgggcatgcaattgaatgagtttgcgccaatcactgttctccagccccaacaaacagcgagtggtgtgctgggcgtcgatttcaatgattcgacgcatgctgtagacctggagcttctgtcaagtgcgggcagttcacgactgcaattgaaaccgccggtgggcgagctggtgagatccgtccagatcggcgagagctgtcatcgcgaggagcgggccaagctgcgtggaatgaatgagcatcagtgcgagttgcgtggcctgaggcaggacctaatcgatgtggtcgcattgcggcaaaaggttttcgagtccatcaacgtggcgcatacgcacagctcttccagcggtcagctacactgtttcgccggccaaaccctgagctccaaaagcctcgtgctactcaccctcgattggaaaacagaggatgccctcacgctgctggtaaactgcgagaaaatggtcattggatccatggtgctcaacgagctgcgcaatgctctgcagctcagtttcgccatgtga

SEQ ID NO: 5046 - protein, 1160 aa, DROSOPHILA
MQQNSASNPFAMSTYVERPQMGLDVEFGADPASGAAFFQSDGRKHDDLKQMLDSNKDGLKLEAMKRIIGMIARGRDASDLFPAVVKNVVSKNIEVKKLVYVYLVRYAEEQQDLALLSISTFQRALKDPNQLIRASALRVLSSIRVSMIVPIVMLAIRDSAADLSPYVRKTAAHAIPKLYSLDADQKDELVMVIEKLLSDRTTLVVGSAVMAFDEVCPERVDLIHKNYRKLCNFLLDVDEWGQVIIINMLTRYARTQFVDPNADDEDLVNDGLGETPVSERFYDESSHSSSHSDDGSSDDEKNKSSTNNKNNGGGNGSRTPSSPSNSYHIDVDHRLLLRQTKPLLQSRNASVVMAVAQLYHHVAPKNEVQLIAKALIRLLRSHKEVQSVVLNCIASMSTKRKAIFEPHLKSFFVRTSDPTHIKLLKLDILTNLASAGSISLILREFQTYISSSDRSFVAATIQAIGRCASSIKEVTETCLSGLVHLLSNHDEHVVAESVVVIKRLLQTKAAEHFEIITQMAKLIDYINVPAARAAIIWLIGEYNEKVPLIAPDVLRKMAKSFVDEQDVVKLQVLNLGVKLYLTNPEQTSLLCQYVFTLARYDPNYDVRDRARFLRQIIFPASGTSSVLSQHARQVFLASKPAPVPESKYRDGNNFQLGSLSHYLNMPAAGYKELPAFPVIPPDSSVRNIAGFMQDKLPGEDSPSGHSKDKSGREGGKEKGAGGEKGFLSESDDKSSAYSESGSSSGSGTSDSESDSDGSGSSDEEEEEVQKQQPTKVSSVKERLIDAGSNELAATSSPVKATINNNNNARGSSGTSDSEDSSAYSGSSSDDSASGSDNEVKKNETKTDTGTKPEKLKEKHEKQPEQTAVKSNLDLLLDLDDIPPIGPVMTPSLGGFLTPGTPMMAGQAAPLQPQHARNRVELVGPSHIEFKHKELLNKVSGHGLHLAYRFTRSPHLYSSSMCSIELQFQNRGEKEITAIRLGQTTLPAGMQLNEFAPITVLQPQQTASGVLGVDFNDSTHAVDLELLSSAGSSRLQLKPPVGELVRSVQIGESCHREERAKLRGMNEHQCELRGLRQDLIDVVALRQKVFESINVAHTHSSSSGQLHCFAGQTLSSKSLVLLTLDWKTEDALTLLVNCEKMVIGSMVLNELRNALQLSFAM

SEQ ID NO: 5047 - DNA, 3788 bp, DROSOPHILA
aaatttttttgtatttatacactattatcacaagaaattgtgaaagatactgctggccattgctgccctcaatgggtttcttcggttgtagtagataagatatttaatattaccaaattcacagtacacttcttaatttctttaagtgcattgtgaaatgaacactgcttttacagcatgtaaaaccgcccactcaacttgacctttttcaaggtacttcctatatgggcgcttctctgggcacacgttttctcttggcaaatagtgctgtggaaaatatgcaataaaaagaggaaacgctgaaatgcaaacgaagttggccaaaaacgaaacacaactacgtgacgaacggaagacgaattgccatgcagagaaagccgagaaaaatcagtcaaaatgctacaaaaattaaataagaacattctgtcactgacgttagtgcagatcgcaacggaaaactgaagctctgcaattggagtacgaaagtgcaactagaggatcgattggatatataatttatttcgcaacttagagagattgccgccatatgttaatgaactgaacaaaatggtttggatttcgagctgggggcaactttggctggtgttgctattggttgtgggcctatcgttgggtcttccgagcttggaaaaccagacacacgaacaaatcgaacagataataggtgagtcgtggatttattcgatacgaaactagattttaataactcttttctattctacattcagcctgcagacagccaaaggcacctggtttgtgccggggtcaccagttgcgatatgcctacaacaagaagaccggaaactgcgagagcttcatctacacgggctgtgcctccactgagaacaatttcctgaccttcgaggagtgtcgcagggattgcatgcaacgtctgcgctactgaagtcgcttttaacgatgcttaatatatatatttgttgtcacagaaattgtcaagtcatgcgtaaatcttagtagactacgatctctttggcttcttgccaactttcttgtgggccaacttcgatggattccgtttgcacagatagcataggactaggatcagtaaaattaaaggtaacaggatcagggctacactatccagtgaatggtagacaaatccattcagttctatgcctggagattgaagtagtctggcggcaatcaatccattgctaatgacgtgttccacagaccaaatggctgattccagaggcgtctgctgacgctcattgaacaccttggagacctcaagagatcgttgggcatagctgcaaagaaattggttaaaacaactttgcttatttgaaaagcattagaaaatcacctgtttttgctgagctctgcaagagctttctttaggtttggtacagtgatgtcttggtagtccaacttcagacccattccccgattttgcaccgagaatgcattaaggaattgatctccgtagattggggtgactagtaggggtttgccacaatgcaccgattcagtggttccaagtaagccgccatgggaccaaaacaactttacttttgggtgacctaaagtagaagcgatcttaagtaagaaaatgtaaatagctctcgtttgcgtttcacggcataactggttttaagtccattaataaattagaaacctgcttagggaatttaaacttacatagaagcgccaattggggagcccatttgacgaagagaaacttggaggcatctgtatcgggagtctcatccgcctcccatttccagatgatcttcaagggctggctttttagaacttctagtatggctgacagtttatcttcgtcaatacttgaagcccgcaccattgaaccccagcttatgaagatcacaccctctgctgattggttaaggaaattggcgatattctggggtaactcctgctccgctttcttggtgatatgtactcctccgatttccacaaattgcagtgattgtggacgacttcccatcagggagtaatgttggtttccaaatataaaagcagtttgagttcgagctacttcttctacgtctacttccactccaagatacttccgtaccaactcgttgtcagccctgttggaatggtacttgtacagaaactttaataacttggcctgaacaaagttgagcagccgttcgtgccagttcagttggccagcgaaacccacgaattccgactgtatgaaggcaggtgtgtcgggcaaatcgatgcgatcgtaatagtagggcatcagcgcgcaggtacttaagcctataattggcagatttaataacttggccaaggccagttggcaatcggagttgaagtattccgtgagtagcagatcgtagggcttatttcgatgtcgttcgatggcccgttctatgtggccactggcgaagaggtgctcgcaggtcttctggccctcttcgtgcagatctacatactcacggatgaggactcccagggatctggtgggtgtgtgctccgtcaggggaaccaagttgatcgtggtgctcgactgatcctcaccgggagccgaaatcagtagctcctcatagttgggataggctccggcttgggggttcttaacgtacgagattaccgtgatgtcatgaccacgatgcgccagctcgttcaggatgggcatcaccaccttgaagtggctgaagccgaaatgcggatacacggccagaatattaccggcagatatcggttcgggaattcccagaatcccaagcaaaacaattattaacactccgctgcgcaaacacgtcgtcatcgttccgtagtttttcaccgattgaatcggttacccaactctctgatccgataaccttatctcccattgtgtagtgagattctaatgggatcgctgtgttttggttaatcaaagtgtttgttgtggtttctgattggagagtgcaatcgcaatgagttgcacttgcttggcttccaactggaactgatatcgatagtcatatatcgatacggcgtgggtgacttaaatactttgttttgatataacatgcaaaggccgatgctgttgcaatacagttgagtatctagtgctaatccctaagcaattagctttttattttaagtatattgtcatatcctcataaaaaacgatattctcccatatttgtagcatgctttcaggcttaacagaattctttgcttgcgttgccaccaggttttacagcgctcagctaggtggcgccactaatgccgctaagatttaaatataagttataataagttttatatatatatctaaataatatgggaaacatctttaagatcagggaaatatttcatataaaagcttgtgaaaagaatttccgtatgtaagtaagcatacattaattcattttaattttgtacccatattaaagaaattctatcatttatgttcaggcttcaaatatccattttaaaatcaaatcaagtgtcgtctcaacgacgaatgcaaaagggcctcaagatagtcgactggacaattgaattgcgatggcgatgcggaaatacgccctcaaaacacatcgataatggacagtagtaagcgttaattgaaccgcaagcgatgtggagcgataataaatgcaattgccattcgaaatgcagccaggcatcgaaagaatatccgcccagagttacagatacagatacattcacacacgcagatacattcgccagctgctgcagctggctgtctgtcaagtgcactttgcactttgagctgcggtcgtcggtcgctggatattggattttggatttgg

SEQ ID NO: 5048 - DNA, 1614 bp, DROSOPHILA
atgacgacgtgtttgcgcagcggagtgttaataattgttttgcttgggattctgggaattcccgaaccgatatctgccggtaatattctggccgtgtatccgcatttcggcttcagccacttcaaggtggtgatgcccatcctgaacgagctggcgcatcgtggtcatgacatcacggtaatctcgtacgttaagaacccccaagccggagcctatcccaactatgaggagctactgatttcggctcccggtgaggatcagtcgagcaccacgatcaacttggttcccctgacggagcacacacccaccagatccctgggagtcctcatccgtgagtatgtagatctgcacgaagagggccagaagacctgcgagcacctcttcgccagtggccacatagaacgggccatcgaacgacatcgaaataagccctacgatctgctactcacggaatacttcaactccgattgccaactggccttggccaagttattaaatctgccaattataggcttaagtacctgcgcgctgatgccctactattacgatcgcatcgatttgcccgacacacctgccttcatacagtcggaattcgtgggtttcgctggccaactgaactggcacgaacggctgctcaactttgttcaggccaagttattaaagtttctgtacaagtaccattccaacagggctgacaacgagttggtacggaagtatcttggagtggaagtagacgtagaagaagtagctcgaactcaaactgcttttatatttggaaaccaacattactccctgatgggaagtcgtccacaatcactgcaatttgtggaaatcggaggagtacatatcaccaagaaagcggagcaggagttaccccagaatatcgccaatttccttaaccaatcagcagagggtgtgatcttcataagctggggttcaatggtgcgggcttcaagtattgacgaagataaactgtcagccatactagaagttctaaaaagccagcccttgaagatcatctggaaatgggaggcggatgagactcccgatacagatgcctccaagtttctcttcgtcaaatgggctccccaattggcgcttctatgtcacccaaaagtaaagttgttttggtcccatggcggcttacttggaaccactgaatcggtgcattgtggcaaacccctactagtcaccccaatctacggagatcaattccttaatgcattctcggtgcaaaatcggggaatgggtctgaagttggactaccaagacatcactgtaccaaacctaaagaaagctcttgcagagctcagcaaaaacagctatgcccaacgatctcttgaggtctccaaggtgttcaatgagcgtcagcagacgcctctggaatcagccatttggtctgtggaacacgtcattagcaatggattgattgccgccagactacttcaatctccaggcatagaactgaatggatttgtctaccattcactggatagtgtagccctgatcctgttacctttaattttactgatcctagtcctatgctatctgtgcaaacggaatccatcgaagttggcccacaagaaagttggcaagaagccaaagagatcgtag

SEQ ID NO: 5049 - protein, 537 aa, DROSOPHILA
MTTCLRSGVLIIVLLGILGIPEPISAGNILAVYPHFGFSHFKVVMPILNELAHRGHDITVISYVKNPQAGAYPNYEELLISAPGEDQSSTTINLVPLTEHTPTRSLGVLIREYVDLHEEGQKTCEHLFASGHIERAIERHRNKPYDLLLTEYFNSDCQLALAKLLNLPIIGLSTCALMPYYYDRIDLPDTPAFIQSEFVGFAGQLNWHERLLNFVQAKLLKFLYKYHSNRADNELVRKYLGVEVDVEEVARTQTAFIFGNQHYSLMGSRPQSLQFVEIGGVHITKKAEQELPQNIANFLNQSAEGVIFISWGSMVRASSIDEDKLSAILEVLKSQPLKIIWKWEADETPDTDASKFLFVKWAPQLALLCHPKVKLFWSHGGLLGTTESVHCGKPLLVTPIYGDQFLNAFSVQNRGMGLKLDYQDITVPNLKKALAELSKNSYAQRSLEVSKVFNERQQTPLESAIWSVEHVISNGLIAARLLQSPGIELNGFVYHSLDSVALILLPLILLILVLCYLCKRNPSKLAHKKVGKKPKRS

SEQ ID NO: 5050 - DNA, 2681 bp, DROSOPHILA
aatatgtatgtaaataagtttcaatttgatttttttgagaaataaaatgtagaacaaattgtggcaaagatttcaagcatttcgaaagcacttgactaaccgcatgactcgctggggttttcgaccacaaccgaagattggtgtcgaaatcgcggcactataaatacagaagcgagtggagaaccagaaccacaaccacaaccagacccatcccagtgcaccatgacccagccgtcgcaagtggaagcggatccgtaaatagatcgtagatcttcggcaaaacaatgcgatcacaatgccagacgggaaggtcaacaatggtcgggcaatctggccatatgcatctactctcgctttaaaacaaacagcaccagctgtaagtgaacatgtaatttatggccagtgggacaactggcagattcagaggcctctctgcagcaaaaacaagcccaaactaaaccgaaaaacacacttagggaaagatcaacacgagggcaggatttaaaaatggaattccggaaaggtatacaatatttctatttctaggccaactgaaaagatcttcagagcagaaaacttggccttaagccatctttttagcacagaatcatatttcttcttaaacttagtagaacaaactttaaaagtagcgatatttttttaaggcacctttagcacctttattgcaatcccaaatctcaatcgaaactcacctgtatagcttgtagcagagtccgtgctgcgtgaaaaagaggcctctttcgcccggatggctcctgttcccggtgctcggctcagtcatggtgtgggcgtacttgtagaggaaggcgtactgcttggcgatgacgcgacactgacgcattgccagagcggctgcagcggtgccccggaggagctccatctgcttggtggtaaagtatagcacggtgttgtatttggcaggcagaacatcaatgtagggccgccactcgctgaactcgccacggatcttctcgatgaccagatcataggccaggttcaagtgggtggcctgcgtcattttgccaaataggcggcaatcggagttgttttcctcggataagatgagcttccggggcacgctgagcaccagctcatccttggccaacggtcgggtggcccgcagacccagttggtagccgggaaagatggctatctccagtccctcactgtgaactccgccatctttggcccacgcactgaacgcctccactttggccagacgggtctgatcgtcgggggaatcgctgatctgcggacacactgcttggctgagtggctcctccaggatcatgatttgtttgagcagctcctgtagctgcccgtactgcttccattcctcgttgggattcgccggttgcttttccaccaagtcaagcagttcctcgacgagcttgtttagttggctcctctttttgccgtttaaactgggcaacgaactggccgcctgctggtcctcaaaatcctcgactgctgtgccggatgcggatgcagttactccgttttgttgtggctgctgttgctgctgttttgtcttcttgttgcgcttcgtgttcttacccatggcggtgccgttggtgggagcgagagagaaagacagagagagaggaagacagaaagctaagcggtaccggcggcccaaaacaacaacagccaaataaggaaaataaagtcgagaaatctgcacgcgggcgatcagctggccggcagtgtggccattcgtcgggcgccactaaattactccgacaattggtcacacattcgacgagcttttatgctgaaaactttttaataggggtactcctaagcttttttttattacaaaacttatgttttcttgtaaaataaattgtaattcacgttgcatttttggcacatcaataatattataataattactctttatagttattaaaatggccagtgtttttttatattttatgttgcattcttgaagagcgggaaatttaaattgagaatttgtcctaaaatccaggttgcagaagctcgtatgtataataatatatttatttatttatataaataaaatcgctctttccatgtcttttagtttctatttataaacaatttgacaatggcccatagggttatcttagattttctaaacgtcatccaattgagaaacgttatgttgataacaagaaatccacgaaataaaaatgttattgtacgaaaaagaaataattgtttgttgagctttgtgggtttttgcaaaacaaaaacaacaagaaatatttacgattttcttatctacggtaaaaaaaacttgaactaaaaaactaggagataatgccgctcatcagatgtttacgcactttgtgccatttttggctagggtggaccaacacacaaatcagcgtttgagttaatagtaagaaacaaattccgtccaaatatacaacctaggatacgaaatctaaaacatgataagtgcatcttgtaagaaagacgcagtttgagaaactttcgacaaatacggaatatggtccaccctaaggcgctcaagcaatttgagagtggctcagttctcagttcagtgactccaatgcagcaacaacggcggttggagcaccagcgggcagagcgcgaaagagaggcagtggtggggctccaaaggcgtaggcaggatggaccatccaaag

SEQ ID NO: 5051 - DNA, 972 bp, DROSOPHILA
ccttatttggctgttgttgttttgggccgccggtaccgcttagctttctgtcttcctctctctctgtctttctctctcgctcccaccaacggcaccgccatgggtaagaacacgaagcgcaacaagaagacaaaacagcagcaacagcagccacaacaaaacggagtaactgcatccgcatccggcacagcagtcgaggattttgaggaccagcaggcggccagttcgttgcccagtttaaacggcaaaaagaggagccaactaaacaagctcgtcgaggaactgcttgacttggtggaaaagcaaccggcgaatcccaacgaggaatggaagcagtacgggcagctacaggagctgctcaaacaaatcatgatcctggaggagccactcagccaagcagtgtgtccgcagatcagcgattcccccgacgatcagacccgtctggccaaagtggaggcgttcagtgcgtgggccaaagatggcggagttcacagtgagggactggagatagccatctttcccggctaccaactgggtctgcgggccacccgaccgttggccaaggatgagctggtgctcagcgtgccccggaagctcatcttatccgaggaaaacaactccgattgccgcctatttggcaaaatgacgcaggccacccacttgaacctggcctatgatctggtcatcgagaagatccgtggcgagttcagcgagtggcggccctacattgatgttctgcctgccaaatacaacaccgtgctatactttaccaccaagcagatggagctcctccggggcaccgctgcagccgctctggcaatgcgtcagtgtcgcgtcatcgccaagcagtacgccttcctctacaagtacgcccacaccatgactgagccgagcaccgggaacaggagccatccgggcgaaagaggcctctttttcacgcagcacggactctgctacaagctatacaggtga

SEQ ID NO: 5052 - protein, 290 aa, DROSOPHILA
MGKNTKRNKKTKQQQQQPQQNGVTASASGTAVEDFEDQQAASSLPSLNGKKRSQLNKLVEELLDLVEKQPANPNEEWKQYGQLQELLKQIMILEEPLSQAVCPQISDSPDDQTRLAKVEAFSAWAKDGGVHSEGLEIAIFPGYQLGLRATRPLAKDELVLSVPRKLILSEENNSDCRLFGKMTQATHLNLAYDLVIEKIRGEFSEWRPYIDVLPAKYNTVLYFTTKQMELLRGTAAAALAMRQCRVIAKQYAFLYKYAHTMTEPSTGNRSHPGERGLFFTQHGLCYKLYR

SEQ ID NO: 5053 - DNA, 2832 bp, DROSOPHILA
caggctgctctcgcttctgaaaaaccagcggatgcgccaaaggccattgaggaaccgaaggctgcacccaagaaggaatcaccaccacccacaaaaccagtgacggcaacagttccggtagcacctgccactcctgctgaggcgccatctcctctggctccctccactccgccatcgactcccacctcggtgccgccctctgcagcgacagtgactcctccatctcccgccacggtgactcctccgtcgcctgctgtagttactccgcctcagaaacagtcggcggctccccaagcgggaatcaagaagcaggaggcaggaacgaagacaaaacagcagcagccagccaacaagccccaacaaccgcaaaagcagccaccaggaggagcaggaggatcagctgggccaggagggaacaagggcgtgcagaaacagccgaaccccaatgccaagccagcagttgctccaaagccggcccaggccactccaaaacccgctgctgcttctccaaaagcatcccccaaccagacgaatccacaacaacagcagggaaaagcagctaacaaagcgtctcctccaaagcaaactggaccaactggggggcagcagaagtcggcggcgaacgcctcgaaggccacagcctccccgaaatcggctgcatccccaaaagccacctccccgaaggccggaactcctaccaatcctgcttccgcctctgggggtcccaactgatcctccttcagtctattttctaatcggcgcccttgcatttcaaactcactcgcattttcagagcccattttcgccttcgttaatctctgatgaacccgggtactaaccgttttttgattatttgtggcctttacatttttgaataaaattatgatttaacaaagactgaagtgaatcgagaaattctttctcaatatctttggttattccattgcaatgtcacaacaaattgtagcctattaatcgttctcgagaatagcattgaaaattacgattctttaatttattattaacacataacacatagggaatttttgaacgtgcagcagcatatgatactttgaatttagcgccccattggaggcactgcttatcgatattttatccaactttgcccagccctggttcgataggtcggaaagccctgcaatttgcatgaaagacacccaaaattacttgtttttcgtttatcctgggcttaactcgacttagcgtggctgctagagggcttctcctcgtccttgggcgcctgctccttctccgggttcagcttccagatggcgtagttcagagccgtcgcgaatcccagccaggcgacgtagggtacgaagagcaatccagcggtcttgttcactcggtagaacagaacgccgcaggcggacgcggcggccgtgagtgcaactatgtcaataaggccctggtggatgaagcggattagacataacacctgggcttggtgatatcagcagtactcacgcccttgatgttgtgctgcccgaagaaaatgggcgtccacgcccagttcaaggccagctgggtgccgtacgcgatcaggggcagtttggccgcctcgccggcgaagcctccgccatcacgccacaccaggtaggagccgtagcccattcccgcgtacaaggagatccacatcggcgcaaagaccgagttgggcggcttgaaggacgggaacttaaggttggcgtaccagctctggagatgctgcctggtcagccgcccgttatagatgccgcccagattgggcagaatcacggccccggcgatgcggagaatgtttccagcacacggacgatcagccattttcagagttcgcactgcaaatgaggcgcagtagtggcgaaccttctggtttcactgttttgtttgccggtgatttcattcgaatgcacgagtattgcgagttaacggggcgaatacgcgacggatgattgtgtgggtaagctccagcgatgccaatttggctagatttaaactagctaaagtatgtggaatgcaacttgaaatcaaagacgctagaattaattaatagaatcgcatggttatttagagctgtgaacatttgatttctgccatgaaggaattctcatgtttttctttaacatgctatctgattaatagggatttaatatttatctggaattttggcaaagctgcaaagtcattgctaagccgttaatagctggttgtcacatgtgcaggggaggagcataatgcttatcaatagattccaaaatgatgtaatgaatgagtaatgtcgtcgatctatggaagtaattattataattatatctacccattcgtatttatttaaaattatcttcgctgctgggtgtcggaatcaccctgtgggtaggcagatttaacaaaacccgttaagttttgaaaatagaaatagaactgtattgttgggaagtaccatattaaattccctggaaaagttttgtttagcttgtttgtttgttttaccccatgacaaatcgtgcgatcaagtggtgaatgataacttgagaactcataaaccaaagagttatttgtcggtaaagtgaattaatggtgaaataaaactattgtgcttatttgctctttgcaatatccaataacctggatcaagttggtatctcaattaatcaattgcttaggagcaaccatgacaaccgttgctaggcaaacacattgttactgtgttttggctcctgccaaaacaaattcatccactaaaggtggaaaaccggtgtgatgactctctactttgacacgaaaatcgagttcttggactcggatgcagtgagcaccatcagcagctgg

SEQ ID NO: 5054 - DNA, 773 bp, DROSOPHILA
tgaaaatggctgatcgtccgtgtgctggaaacattctccgcatcgccggggccgtgattctgcccaatctgggcggcatctataacgggcggctgaccaggcagcatctccagagctggtacgccaaccttaagttcccgtccttcaagccgcccaactcggtctttgcgccgatgtggatctccttgtacgcgggaatgggctacggctcctacctggtgtggcgtgatggcggaggcttcgccggcgaggcggccaaactgcccctgatcgcgtacggcacccagctggccttgaactgggcgtggacgcccattttcttcgggcagcacaacatcaagggcggccttattgacatagttgcactcacggccgccgcgtccgcctgcggcgttctgttctaccgagtgaacaagaccgctggattgctcttcgtaccctacgtcgcctggctgggattcgcgacggctctgaactacgccatctggaagctgaacccggagaaggagcaggcgcccaaggacgaggagaagccctctagcagccacgctaagtcgagttaagcccaggataaacgaaaaacaagtaattttgggtgtctttcatgcaaattgcagggctttccgacctatcgaaccagggctgggcaaagttggataaaatatcgataagcagtgcctccaatggggcgctaaattcaaagtatcatatgctgctgcacgttcaaaaattccctatgtgttatgtgttaataataaattaaagaatcgtaa

SEQ ID NO: 5055 - protein, 185 aa, DROSOPHILA
MADRPCAGNILRIAGAVILPNLGGIYNGRLTRQHLQSWYANLKFPSFKPPNSVFAPMWISLYAGMGYGSYLVWRDGGGFAGEAAKLPLIAYGTQLALNWAWTPIFFGQHNIKGGLIDIVALTAAASACGVLFYRVNKTAGLLFVPYVAWLGFATALNYAIWKLNPEKEQAPKDEEKPSSSHAKSS

SEQ ID NO: 5056 - DNA, 6131 bp, DROSOPHILA
attccccaaatggccatatatcttattcttgtggtttttctattacaactattatgagcacaattaattccgagttttgccaacgcctgacatacatacatattccttagttcaatgaatgtactttttctaccgctcgtaaaatatgctaaggccacatttaatttatttatacttctattcctatttaatcttcttgagctcaacgcaacacgggtggagagggcgtggaacgcgatattgtgtccaacaatcttaatacatctaatcaggcttcagttaaggtaagtgaagtggagataaaggcaaacaaaggaaacataaagcgctctaaaagggtaattgaaacgaaattgctgcgcacaatgtacatggaaaagtatgaagtgaacgggcaaagtaaacaaattgaaaatggacttgaaaggtgagcaggcaagaaagctggaaggaagatggctataaattctcaaatactttggaaaaagttaagaaagatctaaagagtgatagataattacaagaaaggtgctgcactataattaaatcaataagttttaggttttaaagctatgtcataggaaatgtaaatgatttgataaaagatcacactgtagtaggaaaggattaaatggcaaaggagtacgtctcagaagtgcttaactcttaattctgcgagctctcttaggatttaattaaataaggacacctaatctaggtctaaacttaaatccggcataagcgtaaaacgtaagctggctaaaagctaatcatcgttaaatatacatatatatacatagtatacagaagcacttttttacatttatttcgttttactccttttttgctgtagtataaccttcacccagtggcttgcattcgaatgtccgcgtccagaatcgtcttgaatcgtgagcggaaaaagtgtcagcattcgtttttttcctggatgtgtagtgtagtggattgtgtaagttgggtttttcaagcgttcattatcacgcaacgatggcggccattgcggacgacgacgacgacgatgatgatgatggcggtgatgatgatgttgacggtgttggtggtgttgatgatgatgactggtgatgcgaagtgggggcaacctgagaatgatgctgatgctgcttctgctgccggctgggcttatgttgggactgggactggtgatgggactgggaaatgtgatggaccggaaaactccacagagcaaaaggcatctgctgctggaccaacaaaagcagttggcgtaatttgttggttgtcgttgttgtcgctgccgttgtatccttcccacttcccccagctcccccgccagttattgtcgcggtcgtggttgctgctcttgtttcgccacccgggcaggtggcactggcatcatccccaaactcgctaccattccgccgcctcgcgcagcgcatctgcatcagctgcagctcgccgcgtcgtcattcatcccagaggcactgttgtttctgccgcacataataggtgaactgtgtgcacttgcggcaggtcttgatgccgcagcgataattcgtcggctgtgcctgctgctgggcgcccgacgagtccgctccggcgactcccttgcccttgcagtacttgagcccgcagggataccagccgatgcaggtctccaggttgcacaggcagggcgcccacaggctgctcacctcgttgcagcgcgtcgagagcgtgtccgggaacttttcggtggcggcctccaggctggaaatcgaggagcctgccaggagcaggagtacaacgaacggaaagcgaaacaaaagcgtaaacaaaaagtttgaaagtggcaagaaccctcaaaactggtcgatatctgtactgaagttttccatctaccaagatttcagacggatttctctaactaactttcctaactttcgattaacatgtttttgttttaataattggtaactctttaaaaggcaaaactggaaatgaatgctttaactttttcctcattgtatatatgcacgtactgcttttatagattcgttttaataattttgtttgtgcaaaacttcaaccatattgcgcagcgcacgcgatgactttttataggtagaactttaaataatcagcagcgcaaacggttttaatattatccaaaaaattgaaaacaattaaaaagaaaaacattcaaccataaatgtgctttaaaattacttatagggatattccatttaaagatttaccaatttcacgcactgaacatccccagggaagcactcacctggtagctccgcccaagctttaaggtccacatcccggacataggtggcgtccatggcctcggcgcagagtccctgcagatgtctggtgatgggcagcgagcggttgagctgtacccagctgctcatggtgaaggtctcacggcccttgtcctcctcgggagtgcggatggtgtgcggattcttctggcgcagcttggccattgccgccgaggagatgaagtcgcccttgttgaacttggttgcgaagcacatgacctggtactggctctggccacgctcctcctcgccgagaaccagagccttgaggatttgaacctcctgaggggaagatggataagaggttttcaatttcaattgggtctctcgccctgctctctagagcctcggattcttcactcacattgcgaaagtcgatgacctgggtgatgagcgttccgtcggtcttctgaaactccagcgttatcaggtcctcgccaatgttggaggtaatactctcctggatcacctcgccgccctgcaaaaaatgaaaaacaggaaatgaaacggattagagagagcaacaagtgttaaattacattctcggcatccctcccctagccagctaaaatattaatacggcacaaaggcagtgacgagatgttgcagaggggttccttacgttgtcaggacttaaattaactatgacagctcctgaagctgggcggccatgaaccaaattagagtcaagagagttgaaaaatagaaaaaagacaagcatgggggccaacgaaaacgaaacgaagatgagtgggatgggttttggcaaaagggaaggatgggttttgggtatgaagatgagagcggaggagccaactcctcattccacgacaactggaaatgtagttcaacaacaacagcagcagtatttgccctcaacacgtgtacatgaaccaatttgttggatgtgggtgatgttgttgttatgataccctggtatagactaatttcactgctctgattacagatatcttaatactgatgtcatttagtagctggtacagaatgtcgactaattaactattagaactagtatgattaagaactggatttcatagggtatatcgggattcgacccttgcaacaactatgctttctgctttgttcttgtttctgctgggttttccgtgtgtttgcacaagggcgcatgtaaacaaagaatagccgaaagaagtgagaagagaagaggaagtatggaggagcgaaggaagagagccatcaggacattttggggccagggacagagcgcagagaacaatgaaggatgtcacatgtaaacaaagatgtacgaaaatacgctgtgtgcaagtgaaatagggaaagagagaaagagagaggctgccttcatttcaagcccggtgctttttcggccagctaatctaaaatttatggaaaagccgaaagcaaagtgtcaatattgaggcagtcaaacaaacccaactaatattaaagtggaaaaacgaaacgacaggcaagtgaaagtttcaatactggcattgaactgcacatatgtatatgtcgcattacggatgtattctgaccactgtacgtgtctgtcatattattaccatggtttgaccactgtgcttgcaagacgcagctgcgcaatgagttcggtatattgagaggtcattcttagaatttgactatcacgaagaatatgactggcgtcaaagtaccgttacgagtgaggcgacggcgttgtcgcgctgtcgcctagttggactacactagcgtgtgtaaaggatagatcgatgcgtagaaaatacgatcagttgcatacagacgatcgcgcacgccggttggaattcgcttcactcaacatgggagatcaggcacaagaaaatgtcaacgctgcgacatatgcatgtacatacatatgtacataatggcgttgcaagcatatagaatagagctttgttttatggtcatcaggcatcgatggattatctggcctacttaacggtatactaattagatatcggcgaagtacaagctcacagaacatgtttccattcggagaatcctgtattttgcataaatcaataggggacatgatttgttgtgcacatgtgtgctgcacgaatcaacgtgggctgtgtatgcgtgtgtgcaatcctttacatttgcaacttattggatgaactgcgtgttcttaagaacgaactaagcattgtttatgaaataccgaatccttgctaattctaaaagcaatatattggcgtattttacaatatgactaggcaaattttaaatttcagatacatatacttgtcatattctactgtcatagctgtaataactgtcactgaattactatctttttaatatttaatttgttgttttcgcagatttgtttatttgtcttgagcacctctctttcgctctctcattctcccgcgttttaaatttgttttgttttggcgcgcaaattttcgaaatgagatgttcgaaaatcagatgggcagcgctgccagcgtcgctgtttgtcgttgttgcgttttgcgttgttgggatttaagtgttttaaaccatttttttttgcgatttcgcacctgattttggacgttaatgagcagctgggagtgggcgaatgcgtccgcgttcatcactaagttgcacagcaggaaccacagaaacgcgcgactgtgcttgaaaaagtgatttttactgacgacgcgaccgcagcaattgccgtgcgctggtgttcgagtgcggctgagtgccttaagatgcgccattcgccagcggacctgcgcctgccttgccgcatttgcggcagtttcgatgctctggtgtgggtgctcctcctttaagatcattgcgatccgacaacttttaaataaaatcacaagaaagcacaacgaaccactcgcgtcgacgaacgaaaaataactggcagaaaatggtgaaactgactgaaacgtgacttttcgaaatcagctgacaggtgtgaccgtgcggtaatcccaaagggtgctgccaaccttctcgaacaggagcctacgaatttcgattgtagaaaatataccaacccaatatagctgcattacactggcacacatatctatatctatagaataaatagactacattcattttcatttagtatttaaatattcatattggaatttccactgcatacgttcacaccagccgcacagctgatgcctgtactatgcactaaaatttcccaaaacgcgttgcctcgccgtcgcttgtgacgtgttgtttttttgtaaaatatgtttttcagctgctaaaacggacatagattgttgaaaatccactgaaactaactcagaaggacgggctaaagacggactatataatgctgaccctgcgggagcgccaaatcagtgagaaactatgaaaacaatgcccccattgaagggaaaacctaattaatggattttcatattaatcattgcagatgccattaagcagatgcttaatttgaactcgcagcagccgaaagccctagctgccgagcccgtgtggaagatccttatctacgatcgcgttggccaggacatcatatcgcccattatttccatcaaggagctgcgcgagttgggcgtgacgctgcatgtgtaagttgtgcgagatcctccaggaatccagaaattatagctttggttaacctccaggcaactgcactcggatcgcgactccattccggatgtgccggctatatacttctgcctgcccaccgacgagaatttggacaggattcagcaggacttctcgagcggactgtacgacgtgtaccacctgaacttcctagctcccataacgcgcagcaaaatcgagaatctggcc

SEQ ID NO: 5057 - DNA, 1462 bp, DROSOPHILA
atgatcttaaaggaggagcacccacaccagagcatcgaaactgccgcaaatgcggcaaggcaggcgcaggtccgctggcgaatggcgcatcttaaggcactcagccgcactcgaacaccagcgcacggcaattgctgcggtcgcgtcgtcagtaaaaatcactttttcaagcacagtcgcgcgtttctgtggttcctgctgtgcaacttagtgatgaacgcggacgcattcgcccactcccagctgctcattaacgtccaaaatcagggcggcgaggtgatccaggagagtattacctccaacattggcgaggacctgataacgctggagtttcagaagaccgacggaacgctcatcacccaggtcatcgactttcgcaatgaggttcaaatcctcaaggctctggttctcggcgaggaggagcgtggccagagccagtaccaggtcatgtgcttcgcaaccaagttcaacaagggcgacttcatctcctcggcggcaatggccaagctgcgccagaagaatccgcacaccatccgcactcccgaggaggacaagggccgtgagaccttcaccatgagcagctgggtacagctcaaccgctcgctgcccatcaccagacatctgcagggactctgcgccgaggccatggacgccacctatgtccgggatgtggaccttaaagcttgggcggagctaccaggctcctcgatttccagcctggaggccgccaccgaaaagttcccggacacgctctcgacgcgctgcaacgaggtgagcagcctgtgggcgccctgcctgtgcaacctggagacctgcatcggctggtatccctgcgggctcaagtactgcaagggcaagggagtcgccggagcggactcgtcgggcgcccagcagcaggcacagccgacgaattatcgctgcggcatcaagacctgccgcaagtgcacacagttcacctattatgtgcggcagaaacaacagtgcctctgggatgaatgacgacgcggcgagctgcagctgatgcagatgcgctgcgcgaggcggcggaatggtagcgagtttggggatgatgccagtgccacctgcccgggtggcgaaacaagagcagcaaccacgaccgcgacaataactggcgggggagctgggggaagtgggaaggatacaacggcagcgacaacaacgacaaccaacaaattacgccaactgcttttgttggtccagcagcagatgccttttgctctgtggagttttccggtccatcacatttcccagtcccatcaccagtcccagtcccaacataagcccagccggcagcagaagcagcatcagcatcattctcaggttgcccccacttcgcatcaccagtcatcatcatcaacaccaccaacaccgtcaacatcatcatcaccgccatcatcatcatcgtcgtcgtcgtcgtccgcaatggccgccatcgttgcgt

SEQ ID NO: 5058 - protein, 332 aa, DROSOPHILA
MILKEEHPHQSIETAANAARQAQVRWRMAHLKALSRTRTPAHGNCCGRVVSKNHFFKHSRAFLWFLLCNLVMNADAFAHSQLLINVQNQGGEVIQESITSNIGEDLITLEFQKTDGTLITQVIDFRNEVQILKALVLGEEERGQSQYQVMCFATKFNKGDFISSAAMAKLRQKNPHTIRTPEEDKGRETFTMSSWVQLNRSLPITRHLQGLCAEAMDATYVRDVDLKAWAELPGSSISSLEAATEKFPDTLSTRCNEVSSLWAPCLCNLETCIGWYPCGLKYCKGKGVAGADSSGAQQQAQPTNYRCGIKTCRKCTQFTYYVRQKQQCLWDE

SEQ ID NO: 5059 - DNA, 12276 bp, DROSOPHILA
acgtgtatccctaaatttatatagcatgttccgatattaaacaagtttgatatatcaccttacttttagcgcagactaaaaaaattagttttcaaactaagggggtatgtttttgaactaaaacaaaaaatgttttcattcgctaacatttaacaacatcccacaatagagtaactattggaagcaggacttcttcaagtgacgttagttaagatactaataaaaggtgcatcttcaatcttcatggatcagtattttgacgcatataggaaaacataggactgcttgctattaaataataggttaaaaattaaattttgagttatagcaagactgtagaaagtcttccattaagtttgcttatatgctagcaacttttgaatcatgtaaaataaaataattaacccagaaatagtttttttgcccggttggttaaacatttcaacagatttaagtaaaaacggcaaggcgcttcattttttgcattttgtttggatttaatcgtatcttcttttttgtatttagtttaaatattaaggttataattatacatataagtttaaaccgattacaataattaatttttgtttgttttgttttttctcattcacgttatgtttgtggttttgtggtttatttaatatatatacttgtatttttaatttactgttctgcatttccggtttctctcttacactcttaaatctgttaaatcgttttacgcctttaataattaataattgttactctttatctttgtaaatttatttgtatgcaatgtgaaaatggtacttggtatatttatgcggatgttgctgtatgtttcgttctactctttgttgtgtgaggaagtgtgttgtgtgtgtggttggctttaggagtcgcctccgcaagtgtggggtgtggtgtgtcttgaggctgaggggaggagggaggcgtggtggtcaggacgctgctgagcggcgcctttacagtgcgttcgtagtaaaaacgtttcttattaagtaaagtatgatcgcttatcatcgtatattagataatcattctccgacgctggcgaggatttctcgctccccaccttgtcggcgagtgcttgatgttgttgttgttgtggtggcggctgtggttgtggctgctgttgctccttgacgagcatcagcaactggccgggaatgcccggcatcgccgatgttgtcgtcttaactattgctgctgttggtgtgttgctggcatccacgctcgttgtggagttgctggctgctattgtggtcacttttgagttggttccgagtgtgatgggcagcgtccgggcattgctggcgctgctcttgctgtagatgtggtgaatgggcgtggtggtggtggttgttgttgttattgttgtggtgctgctgctattgctgcgaaggctataaaagtcgttcgcgcgggcgatctgcaggggccgccagatcgtgttctccggaagctagttctgtccggcccagtacgagggcgagtagccttgcttgccagcagacttcgactggctggtcgactgttgacgctgcccggcactgttcgagtcctgcaacgatacggttggggatcagtacatatgttaaacgcaatctggactgattgatgcttccgccttcccaagcagaatcagaatcatccgcttcattcggaccgcacccggtcatccatacaaaaatgtgggttaacagttttatatacacatattcgctgattatatacacggcagtattatattatagtaaaggcacatgaatatggatatgcatctgattatggcggtgcggcacgacccgttttcggcaatcgacatcttttattggtcgccgcttctgtggtaaacatgcaactagagactagatgatacgtaacatattctttcgatgcgacagattacatgggtatgagacatgcgtgggagggttaaaattatgcagttcaccaagaattaagcaactttacacgtgattacaacaaaggaacttacccggcgggatgagctatgaatcctgccgtccatctaatagttgtcccataaaaaattaaaagaaattataaagaaaagtcaaacaatagaacagtttcatgcatttctcaattatatgcctcactaccgtcgtatgaattaagccaacaaactttccaaggacactctttactcgtacttctgctgatgctccaaatcaatttcaaagtatcagaaaatgcatgaaatgttatttgttagtaacgatcccaggtgaaaaagaaaaggtttaatgattgtcacacataaaatactttgggtgtttgttttacagatgatgtgcgtagataggtaatagaggacttacaaatatatgcttggcggttagtgttgataatggaaacaatttacaaatacatgcggttcaacaaatcaactccatagctacagggcaaaaaaaaaactggtaagtgtgattatccaggattagtgtaggtataagcttatttaaggacataaacctatatgtaatcacagtcaacaagtgtacaatgtattggcgggtgtgcagctacacaattggtgaaaataaaattgatgtgttaacaataacaagatgagttccctaagcatttcatcagtcggcgaagaaggacaagtcgttgttattgtcatgaacacagcagtcgatattaggttcaaagttattgcaatgagcggcaacgagctgattctgacactggacaggttcggtttgccagatccggtggtatgtaacttgaggaccgttcacattcccatgaatgagaacatgactttccgtccctccgcctacaacaacctgaagtggtaattctgaatgtacctggtggatgggctgatggatcatattgtggtgtccggccgctggcatcggcaagtacatgccgtacggttgggcagaggtgcctccagccgtctgagtgttgggcatgttaaacgggggcggagtgcccgaatggaaactctgcttctcgtacgactgaataacgaaaaatacaatggtacaatgtagacacgtcgggagataaggtgttttaaccagggctgtgaaatcttattgttgtattgttttttgctcaaagataattgaagtcttttaacatcgaattcaggctatgatgacctgcatccaaatccacagccctgcttataaccatacgtacattaaccttgttcagcgccacgtgtccttttccgtacatagaagaggtcagatcggatccagtgcctgcctgcgactggttggacacagtctgagttttgctctgctgattcacgctcgacgagtagccgcccttgctgtagtcctgcgtggtctgcgacagagtgtcatagctggtcgagccgtagcccgcgctatacgaaggcttcgggaactgttgaccggaggcagtgtttgctgccggtatttgctgaaattgaataagtttagacgttgattagatactgcatacaaagtgatttgaatgtaataggcttactggatatatggcgggcgtgccatattgaaaactaccgggcattacattgccaccatagaagtaggcgtaaggaacatttagcatgggcgcacttgagccagcctgttgcgacattgtgctggagacctgcaaaataaacatttttaccatctatcgatctatctatctaagctgagcacatacattgccgaccggactggagttattgtcagtgcgggcaaagcgtccatcattcatagcagaatacgtcacagagccgaggttgtcacgtccagctcctaaactggccggcggatagttcagatcgtaatatccctgctgcaattgagaattatagcattaggttcgtcttcacgcgagcattctgggcgtgttatggctgtgaagatgatgaacggatcactttgtcagaacttcttaccgaaacaaaataaatatgtgataaaggtctgacaaaaccacgtgtaccagtttcaacaaaatgaaatacgttatgttcaatgtaagaaatttatacattagtcagatgttaggttgaagaaaaaaaaaagggtaaaatgttagtgatcgaatgaaatgggtcagtaaggagcacagatttcgttgtagttagggatgcaaagtaattcaagtatatatatatttatattttaaggttatatttcttcgatttgaattggctttgcatccctaattccacaactacattgtagatggaaacgaggaagaacgttcggattagtttttggttaattttgagtgtaaagcagagcctgggaggtaagcaatacatgtggattgtttatctttttttttttgtgataatgccaggaatgtggaactggatgaaaacggaagcggatggtgcagggtggcgaaggaaagtgtcagctttttacacaatcacacacacacatacatattcaaacagacacagacttttaggaggtggtataataaggacttgatcacagacatcgcggtatatgtatgttattatgtacaatgcacgctgagaaacggttaggagtgggaggccgcaacgtcaacgagccaggatccggattaacgatttcgatcagcagcgggaggcgagctgggatgcgctgagcagttgtcgtatgcgtttaaattttaaatggaactaggtcttgactaatgcgaaaacgttgtataatgggagcatattgatacgattactgtttgattagaaacggttcggttgattggtcggttgcattatgtagttgttggtttgatatttgcttttgcttttctccatgaactcaccacatgtggcactctctgttgcatcatttgcaattcctcgtaggaatacactggttgctgatagtatggcaatccagtctgaatatattgactaaccatttggatgttggtgggcaccaagccgctaccgctgccaccaccactaccagcaccaccagcacccgacgagctgcccacgccgccggtgcttgctcccgcaccttgtccgctggcgttgcccgtcgtcgtggcagcactgccaccgctgccgctgctattgctgctgctggtgttcttgttggtcagcgaggccagcactgcagcggtggttcccgtggctgtctgggcaacggtcgctgctcccaccgagctggcgctgctgctgttgttgttcacattcacaccgacgctggacgcgctgccaccgggcacgccgactccactacttacgccgctctggcttacgcctccgcccacgccagctacgttgccactcgcaacgcctgccgtcacattgctgaccgagctgctgccgctcacgctgttatctggagaggacggaaaggttttagtttaaatgcgaatactaagaattcggccaaaaatagagcatttcagctaaacaaaaagtttgaatcaaaaattatatttattttggagagttgtattgtcaaagccgtggctagattgaagtagatttgacattgtgagtttgtttttaaatatttttgatatgggatttctataccagaaagcttaatgactgcaatgcatactctttagggcctcaactgtttgatattaaatcatcgattacttactgttcgatacagccgcctggttagcacctgtttgaccgctcaccacaccgccattgcctgtgcttccgctgttgctgctcactccgctgctggttgagacactgaaaggtcaataagatcaacattaagtgctacaggcatccgcctctaagtgggatatgaccagggggttgggttagtcggaatatttgaaaaagcggggcatgcagagcgggggtttcgctcttacctgtcgtaatgagcggcgctactggccgtggtcgcatcctttagcttggcgctggcactgaaattggcgtactgcgaggacgcgttgctcgcactgccagagaacctgaacgaacgggcgagaagccgcaattaagcataatggaaccagaaccagtccaaacaagcaaaataaggtacgtgtcatccccagggaactgatcgtattgggattgggatcgtcacatttggtacttacccgctgctgttggacagtccagtgttgccataaacactctggcttgactggtaagcactttgtggtgtcgaatatccggatgtgaggtaggcagagctcgcattgccgctgttaggtgcggagcgcgattgcggtttgggatttttgggacataagcgagcattaaatgtgttaggagagaagaaaaacagtaaacaaaatgaagattagctctctttcgggtggggctaattgttaagcaaaacttgcatacacacaaatatttaaactttgaagtaaaagatatattcgataaggtttgtacccttgctgagtatagttagttgttccttgccaaatcgacttgttgcttagaaataatttttaaatttaagaaatatgtaactacgaatctctgcaagggtacgtaccctttggaattaaatattaaacaatcaatactggatcatgtcatacctcgtgctattttggctgctgctgcctccaaccggaatgttttgcgtcgccgttcctccgcctccgcttaccgcacctgtaccgctttgagccccgctgccagcctgctgctggtaggaactgggctggtatgagccgtatccctgctgctggtaactgttggctactgagctttgcacattcgcgtatgtggagctgctgtagccaccgggcgcggtcgtcggaaagccactggctgtcttactcgctccactgctctggtacgcgttttggtaggcgttaccactgccgcccgtctgtccgtagggatcgctcttggtcagctgatcgattgtggcattcaccgctgagctaacgccctgctgctgctgtgacgtcgaacggcttgtatagcccgctgcatttaaggcatcgctctataaatgaggaatgctattagattctcagtaatatatgcactatgctaaaaactatcgtattaactaaatcatggtgacgatgattacttgggtgattcaaaggatacagtacggtacttacaatctgcgaactctgtagacctgccgctagcgtcacctgctgctgttgctgggacttgctctggtagtcatctggctgctgttgctgctgctgaccatcaatgctaaagcccgaaccaaccttctccggcaatggctcgaagccatcgtccgtgccgaagtccagagcgccgaactgcacgtccaggtagccaatgttgttcagtgcattgtctccgggcatttcgacggcactcgcaggaatcttcgagggtggtggcagcttaacacgtgccctccgtatctgcggttgctgctgcgattgctcggcagtgccagctccagctgccgttccagaagcgaatacgttggcataggtattggggtactggctcacacccacgctagtgctagtttgggagtaggcggccacggggttttgcgcgtaacccgctggcgccgattgcactggaacagaacctgggctgacgccctggctggccaacgagttgaaatactgagattgctcgaccgacaaagtagccgacggcttgataggcgtcgtctgctgctgaagttgctgctgcttttgtgcttgatgcaccagcgtggcagctgccgaggcggcgcttgagaatgtgtcgggagaggcggatacaaaggatgacggtgtgctgcctgctcctccgccggcagctgcgctcgctcctgtacccgctcctgactgtgtgccctgggactgcagctggggcggtggattactgaccgctgcgctgtattgcagcagcggcgtggtcgccgagccgctcagcgttgctggcggtgtgaccgccgctgggccgctgctggagctctcctccagatgagatccctgctgcaccaactgatgttcaaggcccggtggcgccgatatctcggttccagccgccgcaggaacagctgtaacactcgcgccagttccgctaaccacgttggcagcggattgcgttgccaggttgctagtggtgaacaccttgctgtccttgagcgagccctcgtactcctcgttgttccagtcgccccaggcatcgtcatgagcctgttgctgcttctcggcattttgggcaatggtgttgtcccacagctcaacctcgtggtgatcctcgtttgcattgccaccgcgacctgatccataagcaccaccagggcctccgctgccgcgatcgccacgcggtccaccggtgcgtccccccatgcggccgccgccacggccagagcgagagacaaagccaccaccgcgtccaccgccaccgggaccactgcgtccgccgccgttgcgctgcccgcggtagttgtcatttgcccgatcgtcaccgcggtcctgaccagcgttttgcccggaccaaggttcgcgagattcgcgctggttgcgctcattctcacgagtctctcttccgcgccctacaatattagaaatcaaatattaatttatgttcagaggattaggataaatatcatttactaaaattatttcatcaatttaatattttctctaattacagctcgcgcatgaccaacaaatgctgaaccttaaatgtcaatcagcattggaatatttaacgatcttaatttttatatatgttctacataaaaagaaacgttatttttagcagttttacaataactgtaatgcagagcttaaagatccaaaacgtttagtaatgccctaagaaacgttttagtaaatgagcgtggcttatgatacttacatccacgactgtcactggagccacgggtgcctccgcgatttgagctgcggtttcgcgacttttcccgcctgtccgcattgccattgccatcggcccaatcgccatcgccagcagcaccatcagccgtgttatttgcagccttgttcttgcgctttttctcgtacttggcaaaggcgccctaaaacagattcaattgaataactggagcgcgggagattagaatcgaaactaacctgcggtagctcctcgatcaagaagttggccgcggcctccaggtcgtaatcgcactcgttgagggcacagcagacctcctcctcggaacgttgggtcatggtcaaaagaaggagaaccttctcgttgatctgcggatcctctgtggtgctattggtgatctgggcaatgcgcaactgttcggtggtagccttgggctgggccttctctggcttgtctgtcttgctggcatcctggcctcccttcttgccagcggccgcagcatgtgagactccatcgtgatggccggttcctcctccgccggagttgctggcatttgactttttctggttgcgggcatggccgccgcctcccccgccgcctgaacgagtttgtgtgctcatctctatgtacactgtatatacaaattagctgcaatacgaaaaagatgaaggattcgatcttaaaaccagggaatctacaaactgactgataaaaatttaagtctgtgctgactggattctgagtatgggactctctgggtttacttaatgttctataagtaaaatagtaatatctaaagatcaatgcaaataagtagagagtaataagtaatgatttttggtgttgctgatttagaaagttagccgcctggttcgcttctgttagttgatattcaactataatatagcagaaattcaattggaatttacagcgcatttacataaattttttgttggatagagaataatgaatggttaagatctaaatcttgattcgtcggcgtggaaatattaatggtaaactcccacaatccagacagcttttatctgggaatgtgttaaaatggctaaacaagtggccgaaagagagcagcaaaggaaaagttggcaagatgagagttcaatgtacatttaataaaagagaatgaaagaacgtgaacaaacagacacacgccgaagcaaagaagtgcgagaggaagggaagatcgtacgcacaaacaaagcgagcattcagaaataacaaaaataatgaggggggtgaaaagtgtattggcaaaacaggtaacagaatgattgccgagggggtggcggggtacgtgaccacgacgcatccaagccgaaacgtcagttggcatttccagggggggtggttcatgggaaagagagcgggagaggcgaccccgataccaagtgcatatctgaatcactcaatttttgttgtcaaaacagttttatcaacgtttgccgtgaataacgcctttccatgcattattcatacacagacacacgcgcgtactgccgcacacaaacaaaagaccgctgtcgccatcacttttccatcaggtttcgcatttcgcacgtacaccatgatatggaaatttgaccacgggaactggggaactgcgatccgagacccggaaactactcaataccaattgcaatgggaatcgcggtgactgacatacacaaaaattgatttataaactccttggcctcttcgcttcggtttttcgctttcgcttttgtgctcgcttttctgcatctgtcctagcggcatctccctcgcacccgcaccagcgcgggctgaccagtgttgccaggtgcgaacaaagcgcagcggcacttggcaaggccgttaaattaaccaacaatcggagcacaatgattggattcgttaacgaggtagcaggtcctagagagggcaaacagcgttagctacaatatctgcacaaacgcacaaattcacggcaggactcggatggcacacatcactaggtacgctccggcacttggcaacactgaatgcgagggcattgaaaccgaatgaagcgcacaaagtggaatgcaaaaccggacaaagtggcgtacactgcgccgaaataagcgaaatgtacgattcgttgttggcgaaatttgtccaatatgtgacatacccggcaaggataacgcactcccagttgcacattgcggggcaaacgggatatatagccttaatagacccagccatgtgcacatacttcgacgccatttctgcaacgccacactagccgactctttcgctcttatgtaaaccaagggacccagtaattgacgacgaccgccgctccagacagcggccactattgaattttcaaccgagtttttcgctgacaagcccccgggagacatgtcgaaaacacgttgcacaggtggggggacacttaaactaaactttaacacctcagcagggttccggtcacggctttaaattggataaacaaattttcaaaacggagtcacactcaatacctgcaaatgcgccgagaaacgcacttttaatgtgaccgctcgttagtcgatcgatatggctttatctgggcatgcagccctggactcagaaatctagcggtgccacgaatcagttttactaatttttaaattgataacatttctataccattattaaaaggcttcaaaaagctaatttatccaattttccattagctaatataagcagcttacctattagaagctgatttcgatcttaaatatgttgtatgctccttgttaaaaggttttgaactcgtattaaatcaagtggtatatcgataccaaatgaaaagttgttggcatttgcacacctctatcatcaacaaaacatactacttttgaaaaaaaaaacaaacaaaatcagttcatttaccaaactatggacaaaatattgcatttgatgacaaaacattaagtatatttacccaggcgagcaatgagcacacaccaatgccccaaatattcgagtgacgacgacgtcgagatattgaaagatgcaatggaggagctgcaaaaataagcttgaaaagatcctaaaaaaccaaaatgacttttgcaaggtggaactggactattttcccgtgtatgatcccgacgagctttccaatctggatgcgaatctttcaaagccgggcaatagcacaaaacgtaagcctgattattggggtattacaaacttgatctttttgttttccaggctcatattattcaccgcatcctgaggccagaaggtcgaatagaaccgctgaaaaacaatttgtcaaagatgttcaactacgatattctcatggcttacaactgcgacggtgagctctcagtcagcagtcagtcatctcatacaaatatattaacgaaactatttttggtgagttaagtatagctttgtgcagatttaaagcattcatttcgtttactaaattaggtgttgctatttataatttggcgtaaaaaaaactatcctggcttata

SEQ ID NO: 5060 - DNA, 4506 bp, DROSOPHILA
tgactccgttttgaaaatttgtttatccaatttaaagccgtgaccggaaccctgctgagctaatttgtatatacagtgtacatagagatgagcacacaaactcgttcaggcggcgggggaggcggcggccatgcccgcaaccagaaaaagtcaaatgccagcaactccggcggaggaggaaccggccatcacgatggagtctcacatgctgcggccgctggcaagaagggaggccaggatgccagcaagacagacaagccagagaaggcccagcccaaggctaccaccgaacagttgcgcattgcccagatcaccaatagcaccacagaggatccgcagatcaacgagaaggttctccttcttttgaccatgacccaacgttccgaggaggaggtctgctgtgccctcaacgagtgcgattacgacctggaggccgcggccaacttcttgatcgaggagctaccgcagggcgcctttgccaagtacgagaaaaagcgcaagaacaaggctgcaaataacacggctgatggtgctgctggcgatggcgattgggccgatggcaatggcaatgcggacaggcgggaaaagtcgcgaaaccgcagctcaaatcgcggaggcacccgtggctccagtgacagtcgtggatggcgcggaagagagactcgtgagaatgagcgcaaccagcgcgaatctcgcgaaccttggtccgggcaaaacgctggtcaggaccgcggtgacgatcgggcaaatgacaactaccgcgggcagcgcaacggcggcggacgcagtggtcccggtggcggtggacgcggtggtggctttgtctctcgctctggccgtggcggcggccgcatggggggacgcaccggtggaccgcgtggcgatcgcggcagcggaggccctggtggtgcttatggatcaggtcgcggtggcaatgcaaacgaggatcaccacgaggttgagctgtgggacaacaccattgcccaaaatgccgagaagcagcaacaggctcatgacgatgcctggggcgactggaacaacgaggagtacgagggctcgctcaaggacagcaaggtgttcaccactagcaacctggcaacgcaatccgctgccaacgtggttagcggaactggcgcgagtgttacagctgttcctgcggcggctggaaccgagatatcggcgccaccgggccttgaacatcagttggtgcagcagggatctcatctggaggagagctccagcagcggcccagcggcggtcacaccgccagcaacgctgagcggctcggcgaccacgccgctgctgcaatacagcgcagcggtcagtaatccaccgccccagctgcagtcccagggcacacagtcaggagcgggtacaggagcgagcgcagctgccggcggaggagcaggcagcacaccgtcatcctttgtatccgcctctcccgacacattctcaagcgccgcctcggcagctgccacgctggtgcatcaagcacaaaagcagcagcaacttcagcagcagacgacgcctatcaagccgtcggctactttgtcggtcgagcaatctcagtatttcaactcgttggccagccagggcgtcagcccaggttctgttccagtgcaatcggcgccagcgggttacgcgcaaaaccccgtggccgcctactcccaaactagcactagcgtgggtgtgagccagtaccccaatacctatgccaacgtattcgcttctggaacggcagctggagctggcactgccgagcaatcgcagcagcaaccgcagatacggagggcacgtgttaagctgccaccaccctcgaagattcctgcgagtgccgtcgaaatgcccggagacaatgcactgaacaacattggctacctggacgtgcagttcggcgctctggacttcggcacggacgatggcttcgagccattgccggagaaggttggttcgggctttagcattgatggtcagcagcagcaacagcagccagatgactaccagagcaagtcccagcaacagcagcaggtgacgctagcggcaggtctacagagttcgcagattagcgatgccttaaatgcagcgggctatacaagccgttcgacgtcacagcagcagcagggcgttagctcagcggtgaatgccacaatcgatcagctgaccaagagcgatccctacggacagacgggcggcagtggtaacgcctaccaaaacgcgtaccagagcagtggagcgagtaagacagccagtggctttccgacgaccgcgcccggtggctacagcagctccacatacgcgaatgtgcaaagctcagtagccaacagttaccagcagcagggatacggctcataccagcccagttcctaccagcagcaggctggcagcggggctcaaagcggtacaggtgcggtaagcggaggcggaggaacggcgacgcaaaacattccggttggaggcagcagcagccaaaatagcacgagcggcaatgcgagctctgcctacctcacatccggatattcgacaccacaaagtgcttaccagtcaagccagagtgtttatggcaacactggactgtccaacagcagcgggttctctggcagtgcgagcaacgcgtcctcgcagtacgccaatttcagtgccagcgccaagctaaaggatgcgaccacggccagtagcgccgctcattacgacagtgtctcaaccagcagcggagtgagcagcaacagcggaagcacaggcaatggcggtgtggtgagcggtcaaacaggtgctaaccaggcggctgtatcgaacaataacagcgtgagcggcagcagctcggtcagcaatgtgacggcaggcgttgcgagtggcaacgtagctggcgtgggcggaggcgtaagccagagcggcgtaagtagtggagtcggcgtgcccggtggcagcgcgtccagcgtcggtgtgaatgtgaacaacaacagcagcagcgccagctcggtgggagcagcgaccgttgcccagacagccacgggaaccaccgctgcagtgctggcctcgctgaccaacaagaacaccagcagcagcaatagcagcggcagcggtggcagtgctgccacgacgacgggcaacgccagcggacaaggtgcgggagcaagcaccggcggcgtgggcagctcgtcgggtgctggtggtgctggtagtggtggtggcagcggtagcggcttggtgcccaccaacatccaaatggttagtcaatatattcagactggattgccatactatcagcaaccagtgtattcctacgaggaattgcaaatgatgcaacagagagtgccacatgtgcagggatattacgatctgaactatccgccggccagtttaggagctggacgtgacaacctcggctctgtgacgtattctgctatgaatgatggacgctttgcccgcactgacaataactccagtccggtcggcaatgtctccagcacaatgtcgcaacaggctggctcaagtgcgcccatgctaaatgttccttacgcctacttctatggtggcaatgtaatgcccggtagttttcaatatggcacgcccgccatatatccacaaataccggcagcaaacactgcctccggtcaacagttcccgaagccttcgtatagcgcgggctacggctcgaccagctatgacactctgtcgcagaccacgcaggactacagcaagggcggctactcgtcgagcgtgaatcagcagagcaaaactcagactgtgtccaaccagtcgcaggcaggcactggatccgatctgacctcttctatgtacggaaaaggacacgtggcgctgaacaaggttaattcgtacgagaagcagagtttccattcgggcactccgcccccgtttaacatgcccaacactcagacggctggaggcacctctgcccaaccgtacggcatgtacttgccgatgccagcggccggacaccacaatatgatccatcagcccatccaccagatggacggcaggattcatagctcatcccgccgggactcgaacagtgccgggcagcgtcaacagtcgaccagccagtcgaagtctgctggcaagcaaggctactcgccctcccttcgcagcaatagcagcagcaccacaacaataacaacaacaaccaccaccaccacgcccattcaccacatctacagcaagagcagcgccagcaatgcccggacgctgcccatcacactcggaaccaactcaaaagtgaccacaatagcagccagcaactccacaacgagcgtggatgccagcaacacaccaacagcagcaatagttaagacgacaacatcggcgatgccgggcattcccggccagttgctgatgctcgtcaaggagcaacagcagccacaaccacagccgccaccacaacaacaacaacatcaagcactcgccgacaaggtggggagcgagaaatcctcgccagcgtcggagaatgattatctaatatacgatgataagcgatcatactttacttaa

SEQ ID NO: 5061 - protein, 1472 aa, DROSOPHILA
MSTQTRSGGGGGGGHARNQKKSNASNSGGGGTGHHDGVSHAAAAGKKGGQDASKTDKPEKAQPKATTEQLRIAQITNSTTEDPQINEKVLLLLTMTQRSEEEVCCALNECDYDLEAAANFLIEELPQGAFAKYEKKRKNKAANNTADGAAGDGDWADGNGNADRREKSRNRSSNRGGTRGSSDSRGWRGRETRENERNQRESREPWSGQNAGQDRGDDRANDNYRGQRNGGGRSGPGGGGRGGGFVSRSGRGGGRMGGRTGGPRGDRGSGGPGGAYGSGRGGNANEDHHEVELWDNTIAQNAEKQQQAHDDAWGDWNNEEYEGSLKDSKVFTTSNLATQSAANVVSGTGASVTAVPAAAGTEISAPPGLEHQLVQQGSHLEESSSSGPAAVTPPATLSGSATTPLLQYSAAVSNPPPQLQSQGTQSGAGTGASAAAGGGAGSTPSSFVSASPDTFSSAASAAATLVHQAQKQQQLQQQTTPIKPSATLSVEQSQYFNSLASQGVSPGSVPVQSAPAGYAQNPVAAYSQTSTSVGVSQYPNTYANVFASGTAAGAGTAEQSQQQPQIRRARVKLPPPSKIPASAVEMPGDNALNNIGYLDVQFGALDFGTDDGFEPLPEKVGSGFSIDGQQQQQQPDDYQSKSQQQQQVTLAAGLQSSQISDALNAAGYTSRSTSQQQQGVSSAVNATIDQLTKSDPYGQTGGSGNAYQNAYQSSGASKTASGFPTTAPGGYSSSTYANVQSSVANSYQQQGYGSYQPSSYQQQAGSGAQSGTGAVSGGGGTATQNIPVGGSSSQNSTSGNASSAYLTSGYSTPQSAYQSSQSVYGNTGLSNSSGFSGSASNASSQYANFSASAKLKDATTASSAAHYDSVSTSSGVSSNSGSTGNGGVVSGQTGANQAAVSNNNSVSGSSSVSNVTAGVASGNVAGVGGGVSQSGVSSGVGVPGGSASSVGVNVNNNSSSASSVGAATVAQTATGTTAAVLASLTNKNTSSSNSSGSGGSAATTTGNASGQGAGASTGGVGSSSGAGGAGSGGGSGSGLVPTNIQMVSQYIQTGLPYYQQPVYSYEELQMMQQRVPHVQGYYDLNYPPASLGAGRDNLGSVTYSAMNDGRFARTDNNSSPVGNVSSTMSQQAGSSAPMLNVPYAYFYGGNVMPGSFQYGTPAIYPQIPAANTASGQQFPKPSYSAGYGSTSYDTLSQTTQDYSKGGYSSSVNQQSKTQTVSNQSQAGTGSDLTSSMYGKGHVALNKVNSYEKQSFHSGTPPPFNMPNTQTAGGTSAQPYGMYLPMPAAGHHNMIHQPIHQMDGRIHSSSRRDSNSAGQRQQSTSQSKSAGKQGYSPSLRSNSSSTTTITTTTTTTTPIHHIYSKSSASNARTLPITLGTNSKVTTIAASNSTTSVDASNTPTAAIVKTTTSAMPGIPGQLLMLVKEQQQPQPQPPPQQQQHQALADKVGSEKSSPASENDYLIYDDKRSYFT

SEQ ID NO: 5062 - DNA, 4141 bp, DROSOPHILA
aacattgccggacacacaaatgctgtgacagcagtgagatggggtggagcgggccttatttatacatcctccaaagatcgcacagtgaagatgtggcgagcagctgatggaatcttgtgccggacgttctctggccacgctcactgggtaaacaacattgcgctgagcaccgactacgtcctgcgcactggtccattccatccggtgaaggatcgctccaagagccacctcagtttgagcagtaagaattcatatgctctctatatatgctgtatatcctaaaagagattgttttacagctgaggaattgcaggaatctgccttgaagcgctaccaggccgtgtgccctgacgaggtggagtcgctggtttcctgttcggatgacaacaccctctatctgtggcggaacaaccagaacaagtgcgttgagcgcatgacagggcaccagaacgtggtcaacgacgtgaaatattcgccggatgtaaagctaattgcgtctgcttcatttgacaagtcagtgcgtctgtggcgagccagcgatggtcagtacatggccaccttccggggtcatgtgcaggctgtttacacggttgcctggtccgcggactcccgcttgattgtttccggcagcaaagactcaactctaaaaggttagcacgtagtttcagttttctagcgctagctaatacatatcctcttgcttagtatggagtgtgcagacgaagaaactggcacaggagctgcctggacatgcggatgaggtgttcggagtggactgggcgcccgatggctctagagttgcctctggtggcaaggacaaagttataaagctgtaagtttgagtaacgaggttttctataacaatatacagactctaattgtatctttcagatgggcttattaacaaatcattaacttgtacacggtaagaaaatacttaggaataaagtaaaacgtcctgagtaaatgccttcgttctttttggtgttcaaagtaccatctatatgctctgctgttgaatgatccgggcagtatgcttgtagcgactctcaaaagattcttgatttgagaagtacgttgcgggaacggcggactcagactgcagtgccctttcagcggccacaaagccgccggcgatgcactcgtccagagatcgccctcgcagcagggcagtgatgaagcccgcgcagaaactatcgcccgctccggagacattcacaatattgtgaaccatgggagcgggatagaagcgagtgctgtgtggcggcgtgggcttactcacatcgaggagcaatctggcatcgttttcagcgtcccctcgatagctgagtagcaccccgtggtcactcagcgtagctatgatgcaattgaagtggctgtcgatttttttgatcaaggacttcgcttgctgaaccagttccgtttgtggctgtttggtttctggattccatttgacagtttcgcccgttatagcctccgtaatagttttcaactcctgcatattcggtttgatcaggcgtatgttcttggttaactccggcagcagcttgaacggtttaccggctatgaacatatctgtgggctcgaagaagactggaatcttgttgatttgcgcctgctgcagaatgctggccatggcctgctccgatatgttgctgtccatgatgatgagaggagcttctcggaagagttggtggtgcgcttgcagggtctcggctgtaatgctctggtggatttccatgttgcccagaatcagcttgcaatctccaaacttatcgaagattagggagcacaatgaggtgttgtggttgtccgccacaattaggccccgcttcagcgcctttggcatcatttgaagcagcgtttgtcccatctggtcgtttcccacggcggaaattaggtttacatctccgtatagcttgtagatgccctcagctatgttccgacccactcccccagccgcctgtttagctaccgcggaatacgtcgctccatcaagcttcatgtcgcgtttctgatcgtccaccttaaaggaaagatccaggatggaggctcccacaaccagtggctttttatcgattgctttttggaccgggctttccagtttcgtggacacgtcacaaagcgatgcggcgatttgagcagcaaccttggcattgttcttgattagtgctatgttagacttaaggctccttccttcggtgatcttggctatggcggccagcaggaatggagtaacctccttgccggaaattccctgggccctggcttgagcagttgcttccttgatggcctcctcaattttgaatttatctgcggcaaactcctccggaatgggaacaccaattaccaggcctgattccattttcaattcccgccaagatcgcagcagctcagctgcctcctgggcacttttaaggttgtagggcacggtgcagccactgtcccgtgtgtagaaatccggaaagacgccaccaggactgtcgaaactggccacacacacgccctgcgtctccaagaactccagcgtgcggggaatgtctaggatggatttgaccccgctgcatactacggccaccggagtgcgtcccagctcggtgagatctgctgaaacgtccatggattcgtggccatcccgatggaccccaccaattcctccagtggcgaacacgtggatgcctacccgatgggcaatgatcattgtggcggcgacggtggttccaccactctgtctccttgacaccacaaagggcaaatcccgacgggagcacttaatcacctgatcccggggcttttcggcaagcgaagtgagctcctcacgagtcaggccgaccttgatgcgtccgtccagaatgccgatggtggcgggaatggctccattctgacgaacttgctcctccaccgccagcgccgtaacgacattctccggcattggcatcccgtgcgtaatgatcgtggattctagggccaccaccggcttttgcagctgcagcgcttgccggatctcggggtgcagcacaatgtggtcatgcttgcggtgcagactcctgcgcaccaaccgcacggcgggaaacgggaacaggaaacatctccggagcaacatcagaatcaaatcaaaacaaatgaaacgcacgcctgctgatcctacggtgctgcgcaacgtggttgtttttggaggtgaccgatttttatagctagattctaaccaatgcacggagagctctgtacagtatctttcgataacgacactgactttcgatacgtattatcggctttgaattgattgaccgcgaacatttttttctccatactgtatgaaatagttttgatcctagaaaggatccaaaatctatataaggcgacaaagatgaacaaaagtagtagatgttttatttaaatttgtacgtgtaactgcaaaagttaaaaccaagatgttaagttgtcagattatccaattctttactctcttgacttcataatctaaaattaaaatgtagtgtttttatttggtttgcacaaataattctgaaaccatttactaattttattgattggcaaaaatggatataatttgcaatgcattcctgaacttaatattctctcttatcaaacatcccacattgcgagttattctgcgaccgcaactgccaggagaaaagttcgcattctattttggggacccatcccatgtaccatctgcggacccatcccactcccatcccgagaggcgtctgcggttcaacagccgcttgggcatcgcctcatgccgagaattcgcacaaactaaactgaagcaaggcagaccaaaggcatcggcatcggcataggaaatgtgcagctatttttaagcactggggcgacatttttctttttttctgcccgactcgcctgcgaaaacacacaaaaatctgcgaaaaaaagagcaggccgcacgatattaataaaagcagcgctgctgctgcgatggattggttggattcgggtggttccgctggcggtgggcctgtgcactgcattcgtgatttcggccgtggagttgcacatcgtgtgtctgtctgtggctggccaaaagtgaggtgacttcttggccattttatgtaatatatatgcggtagataacgagtccttctccccgaccaga

SEQ ID NO: 5063 - DNA, 2141 bp, DROSOPHILA
cagcaggcgtgcgtttcatttgttttgatttgattctgatgttgctccggagatgtttcctgttcccgtttcccgccgtgcggttggtgcgcaggagtctgcaccgcaagcatgaccacattgtgctgcaccccgagatccggcaagcgctgcagctgcaaaagccggtggtggccctagaatccacgatcattacgcacgggatgccaatgccggagaatgtcgttacggcgctggcggtggaggagcaagttcgtcagaatggagccattcccgccaccatcggcattctggacggacgcatcaaggtcggcctgactcgtgaggagctcacttcgcttgccgaaaagccccgggatcaggtgattaagtgctcccgtcgggatttgccctttgtggtgtcaaggagacagagtggtggaaccaccgtcgccgccacaatgatcattgcccatcgggtaggcatccacgtgttcgccactggaggaattggtggggtccatcgggatggccacgaatccatggacgtttcagcagatctcaccgagctgggacgcactccggtggccgtagtatgcagcggggtcaaatccatcctagacattccccgcacgctggagttcttggagacgcagggcgtgtgtgtggccagtttcgacagtcctggtggcgtctttccggatttctacacacgggacagtggctgcaccgtgccctacaaccttaaaagtgcccaggaggcagctgagctgctgcgatcttggcgggaattgaaaatggaatcaggcctggtaattggtgttcccattccggaggagtttgccgcagataaattcaaaattgaggaggccatcaaggaagcaactgctcaagccagggcccagggaatttccggcaaggaggttactccattcctgctggccgccatagccaagatcaccgaaggaaggagccttaagtctaacatagcactaatcaagaacaatgccaaggttgctgctcaaatcgccgcatcgctttgtgacgtgtccacgaaactggaaagcccggtccaaaaagcaatcgataaaaagccactggttgtgggagcctccatcctggatctttcctttaaggtggacgatcagaaacgcgacatgaagcttgatggagcgacgtattccgcggtagctaaacaggcggctgggggagtgggtcggaacatagctgagggcatctacaagctatacggagatgtaaacctaatttccgccgtgggaaacgaccagatgggacaaacgctgcttcaaatgatgccaaaggcgctgaagcggggcctaattgtggcggacaaccacaacacctcattgtgctccctaatcttcgataagtttggagattgcaagctgattctgggcaacatggaaatccaccagagcattacagccgagaccctgcaagcgcaccaccaactcttccgagaagctcctctcatcatcatggacagcaacatatcggagcaggccatggccagcattctgcagcaggcgcaaatcaacaagattccagtcttcttcgagcccacagatatgttcatagccggtaaaccgttcaagctgctgccggagttaaccaagaacatacgcctgatcaaaccgaatatgcaggagttgaaaactattacggaggctataacgggcgaaactgtcaaatggaatccagaaaccaaacagccacaaacggaactggttcagcaagcgaagtccttgatcaaaaaaatcgacagccacttcaattgcatcatagctacgctgagtgaccacggggtgctactcagctatcgaggggacgctgaaaacgatgccagattgctcctcgatgtgagtaagcccacgccgccacacagcactcgcttctatcccgctcccatggttcacaatattgtgaatgtctccggagcgggcgatagtttctgcgcgggcttcatcactgccctgctgcgagggcgatctctggacgagtgcatcgccggcggctttgtggccgctgaaagggcactgcagtctgagtccgccgttcccgcaacgtacttctcaaatcaagaatcttttgagagtcgctacaagcatactgcccggatcattcaacagcagagcatatag

SEQ ID NO: 5064 - protein, 700 aa, DROSOPHILA
MLLRRCFLFPFPAVRLVRRSLHRKHDHIVLHPEIRQALQLQKPVVALESTIITHGMPMPENVVTALAVEEQVRQNGAIPATIGILDGRIKVGLTREELTSLAEKPRDQVIKCSRRDLPFVVSRRQSGGTTVAATMIIAHRVGIHVFATGGIGGVHRDGHESMDVSADLTELGRTPVAVVCSGVKSILDIPRTLEFLETQGVCVASFDSPGGVFPDFYTRDSGCTVPYNLKSAQEAAELLRSWRELKMESGLVIGVPIPEEFAADKFKIEEAIKEATAQARAQGISGKEVTPFLLAAIAKITEGRSLKSNIALIKNNAKVAAQIAASLCDVSTKLESPVQKAIDKKPLVVGASILDLSFKVDDQKRDMKLDGATYSAVAKQAAGGVGRNIAEGIYKLYGDVNLISAVGNDQMGQTLLQMMPKALKRGLIVADNHNTSLCSLIFDKFGDCKLILGNMEIHQSITAETLQAHHQLFREAPLIIMDSNISEQAMASILQQAQINKIPVFFEPTDMFIAGKPFKLLPELTKNIRLIKPNMQELKTITEAITGETVKWNPETKQPQTELVQQAKSLIKKIDSHFNCIIATLSDHGVLLSYRGDAENDARLLLDVSKPTPPHSTRFYPAPMVHNIVNVSGAGDSFCAGFITALLRGRSLDECIAGGFVAAERALQSESAVPATYFSNQESFESRYKHTARIIQQQSI

SEQ ID NO: 5065 - DNA, 6167 bp, DROSOPHILA
acctgggcgagcaggataccaccagtcacaccgatgcaggtgaacactccgacgctcccactgagctccgatggagcggattccagtagatacatgggctgagctgtgaagatcaaagcggaggcgatgccgcctagaaagcggccagtcatcagcatttccagcgatttggctgctcgacaccaggtgaacaggatgccggaaacgacgaatagtacgctactgataaccagacatcccttactggaacgataagctattaaatataatccaatcaccatattatatttaaaccttaccggccgtatttatcgcaaagcacagcgctgaagcaggatccgcagatgcctccaatcaggtagatggacacaatgctagtccatagaatatcaagctgaccggcagtgacgatagtgtcgtattcgttcgccaatatgtcctggcaccacttcttgatgatctcggccggggcattgagaaccccaaagaaatagcccactggaatggtggtgcccagcgttacggtcaggcagatgagcatcagaagcggggtccatccattgacttttggaggagtcacgtgctgtaaggaaagcagagtgatttacatgattagcacgttgcaaaaagcgcaaacgaaagacttaagcaacaaactcgtcccgggtgaaggggaaagtatcaagaagatgttttgaatcaccattacaacaaccatggcgatggaacgatgctggcaccccaaaagctagaccgaaagtgactcgcatccgacggttcactcagtgccattcgacagcttgttgagtcacccacaccgcttgtatatcaatcacgtaaacacatcttcactttggttgccccggacttggaatacatttacagcatataaccagccatagataaattcagcgtttttgtcttgcgaatacttgttttcttatcgttagatgggagcgtttgtttgctccaactatttcccggcaatataagtcaatagttatatactcttacgaattgatcagagatctttcgtagtggaaaatacaacattttattaacctacccacaggcatatatatatagggagatcaggatatatttgccttccaaatgctaagcacttattgctaaacaattcaagcgttggcacttaattaactaacgcacccgccgtggaagagtatccagtgattccgcgtcgctcttgttcaacaataaatctaattaacagagtattacttggcggtccgtcccaaggcgttttaattgaacttgtgcagtgataagaggacgcagcgctcaaagctttcttacagggtgactcttaaagttagatcaattttcgcatttattggtttgtacaaaagaacttacaggctaggcgggaaattacatttagtaagagtaatttatccctgaacaacgtggatttcggcttattgtcgacacatacaaaaggcacacgacatggacgaatcattaagcgacccactgcacacatgaagttaaaccgtattaccacaaaccaccggctacttatggctaattggaagttgagcccactgggctatgtcctatttgactttggagcggaagcccttcgatacgaggggagccacctctgagggatcgcgtccccgcgtttccggcagatagaatttcgtaagcaagaagagcagcacgcaggtaatggagaagggcaggaagacgaaggcgccccatgcgttctgcagcagggggaacgatatgccaattatgaaattgcacgtccacgaggccaagctgcccatcgacatggccacggagcggggagccacctcgaacagttctgcaaagtggagagtacaaatcgaatcagttagagctcttaaaataaacgagacgcgagtgcgtctgggaacatatctagtggccgtaatcaaatgtgtgctgggcagccattgaacccaattcaattccaattccgccttaattgcagaatcacttcttcgaaacacgagcagctggcccagtaacgattaatggagctattggaatgcgcaaaaacaatggagtcacgcgacaacttacctgcgccaataaagtagggaatggggcccagcccgaattggtagaagaatatgtaacccatgatgcagacgatgcaggcaatggcaaaccagctaacttggtccttttaaaaaagaaaatgtatcaaagcattcaaagacgttgttttacctatataaataatattactcacaatataaaacaacacaaaggctatggtgaacagaaaaacggagcaaagagcacaggagaacatcatcaaggttcgtctattgcacttggccattagccaaggtcccaacaaagagacagctagattcaggcaaccagcgcccaaattggcccattgagcatccactgtggacagtccggccttttcgaagatgctgaccgagtaataaaatatctagaagaccaacaaaattaataggaagggtcgaggaaaaggtgaataatccatttaccgcattaatgcccgacaactgctgaccaccatggaagcagcagacaatgatcaggggcaatgtgagacgaggatcgcgaagcacatcgcaaaagctgctcgtctgcaccttggcattagactctgcctccatctcggccatttcttgggcgataagctcctccgcatccttgccccgcagccgttgaagctcccgcttggcagctgcgcgatttcctttaacaatatacaggaacttgggactctcgggaaagaggtatgatggcaggtagcagaccaggataaggaacatgtaggcagtcagggcgtagtgccagagatcctcagtaccgaagacattggccaaactgcagacctgccccactaccacgccccccgtcacgcccacggcaatgaagactcccagagtgccgcgcagagccattggagccacctcggacaagtacatgggcagggtggcggtcacgaggccggaggcaaggcccacaacaaaccttccgatcaccagcatctccacggagctggctgctcggcagaagaagaatagcaccgctcccacggtgaacagggcgccgcagataagaaagcatgctttcctggaaaagataaggtaattatttatttattacttagggacttgtattttcatttcaatatatatatttagttcaacggaagttaaaacaaaacaaaaatgaatggtttatacagatatgtgaattggcggactagaaacacttgaggaaacccaagtggcttatccttatcgaattgattaatagctacatacctgccaaatttattggctgctccagctccgcccagcgaaccgatggcgcctccgaccaggaacacagaaacgacgcacgaccacaagagatctagaccgcctgcgctgaggttactcccgtaggtgtcgtgcagggtctgattacaccaaactttcatcagctgtaaagatatcgtttgaatcggtattccactcgctgtggttgtccatatctcaccttcgagggggcgttgataacgcctatgcagtagccggtggaaacggcgccgccaaatgtggttgccagggccaccagcagcaggaggttgccccatcgcggtttctgcaaagttttccgatcacgattagttactttggagcaatagttccccctggttgtgcccaaaatgcgaaccctgatagcggtttagtgcgtcattgtgcagggtcatttcggaattcgaatgggggttgcgttatcagcactctctgattaattccagctttgtcataatcgcaataattggcgctaattacggctaaacttgacccacggccaaaactttccatttctcagcaggagcatttgggatcatatgcgattaggtcgcatactatttataaccgaatggaagaccgcagtcggtgtttctgtataactgataagcaatggctgggaactcagccgaagtgtatgtactgggaaatcagtttgtttgccaaaataatgaaaacgatgcggtactaagtacttgtgtaccaaaaaggtcaaagttacagtacaaaacatggttgtaaaatagaaagcttttaagctaacactattaaattatatttacataaaaagtcatgtctccaccttactgttacataatataatctagttgaatagtgagaatcaaacttccttcgtatctagtgacttgtatcttgtcactaacataggcatttgaaattagtaacttcttaattgcgcccaattttatggatatatatgcatataggaaatatttgaaaaatccataaaagtattttttttttctatatacatgtactatatatatgtacttgtttacatatatcgtgtcaacgtaggctccactgtaggtgaatcgaccatatactaatgcgtcggttgtatgtgtgcatgcacataaatattttttcgactttgaaaacaactatgcatgacagaaaataaaattaatacatagaggagacgcatatagccgagtagatttacatataaaaacaaaagaaagagcgaaatattgaaaataaaatgcgtaagataaaagagtgggaaacagcatccggacagagagcgaaaaacaacgggatcgaaagaagaaacaaagaaaatgtgcatgtgcagagatactgtccacaggaaaacaacaacaacaagaaccacaaaacagcggtggtaggtagagggaaaatttggcgatcttcccgctctctctctcacctggaaaagagtctcacctggctgggatccgtctgcgccgagagcagttccactctgttgggctgcgggtacaattgttgagcctccgccggctggcttttggtggccataacagtggactttgcctggtaatcaccactttttgaggaaacacttcccaaggcactcggagcacacagttacgatgtgtgcgtgttaacacggttagaacaattgttagcaattggtggtaaggcaggtaatcgggttccgaaacagtgttgtgcaacggacaccgagtgtggattcttagtttgcgatccccccagcagttcggaattctaaaccacaattgtttgtaaacggcgcaccgccagcagtgcacgcgggattgagttggaatcaaagcggtacggtgcggcagcgttggagtcgggagcgcgactgaatttccccagctgagcgatgttggtggagaaaaagctttcgccaagaacgaatcgccaccacaataacgctttgggtgccggcaacagataaggaataataaataagtcaagccgaagtaataatacccttgtatacaattcaacaagttttcatcaccaactaaacattttccagattgcatagaattttatattttagcatggtatttaacgaaatgtaactataaaagatttccagaactaaaaaaaaacactttaacacgatatttttaaaagtcccaaatatttcccaatagcaacagtttcataatatccaactcattgctagagtgtaaaaagcttcttgccgcttttgttgcaagaaatagccaaattaaactttttggtagcaaagaaatattggctaataaaaagaacacaataacatcaaaacagaaaatgtaataggagagtaaaaccttttatggactaacttgtttccttgttcagattgtaaaaattgggcagcgctccttcccgaataatttgaaaactgcgcgtgctgtatcgatagaaaagcaatcttttagttagtgatgcaaaatcttttgtgacaccgagcgccaaaaagggaaaatgaaatttgatgagattcttgttaaggctaaacaagtaaactgtctactttaatttatttcacagataccaaaaagatttgccggttaacagtatacatttttaaattcgtgaactaagcccttgcgtacgggaccatctctagtcgaaagtgccatctctacgccctcgaccagctgttcagctttttgttgacgttgtagttgaaaccgcagcgtctttaaccaccgtttaggtttagcattagttactaagaagattgatcgctatgtcggcggtggcctacgactcactgctgtcaacgacggcggtgatcagcaccgtcttccagttcctctccggcgcgtaagtcatccataaaccaatgca

SEQ ID NO: 5066 - DNA, 2403 bp, DROSOPHILA
actccaacgctgccgcaccgtaccgctttgattccaactcaatcccgcgtgcactgctggcggtgcgccgtttacaaacaattgtggtttagaattccgaactgctggggggatcgcaaactaagaatccacactcggtgtccgttgcacaacactgtttcggaacccgattacctgccttaccaccaattgctaacaattgttctaaccgtgttaacacgcacacatcgtaactgtgtgctccgagtgccttgggaagtgtttcctcaaaaagtggtgattaccaggcaaagtccactgttatggccaccaaaagccagccggcggaggctcaacaattgtacccgcagcccaacagagtggaactgctctcggcgcagacggatcccagccagaaaccgcgatggggcaacctcctgctgctggtggccctggcaaccacatttggcggcgccgtttccaccggctactgcataggcgttatcaacgccccctcgaagctgatgaaagtttggtgtaatcagaccctgcacgacacctacgggagtaacctcagcgcaggcggtctagatctcttgtggtcgtgcgtcgtttctgtgttcctggtcggaggcgccatcggttcgctgggcggagctggagcagccaataaatttggcaggaaagcatgctttcttatctgcggcgccctgttcaccgtgggagcggtgctattcttcttctgccgagcagccagctccgtggagatgctggtgatcggaaggtttgttgtgggccttgcctccggcctcgtgaccgccaccctgcccatgtacttgtccgaggtggctccaatggctctgcgcggcactctgggagtcttcattgccgtgggcgtgacggggggcgtggtagtggggcaggtctgcagtttggccaatgtcttcggtactgaggatctctggcactacgccctgactgcctacatgttccttatcctggtctgctacctgccatcatacctctttcccgagagtcccaagttcctgtatattgttaaaggaaatcgcgcagctgccaagcgggagcttcaacggctgcggggcaaggatgcggaggagcttatcgcccaagaaatggccgagatggaggcagagtctaatgccaaggtgcagacgagcagcttttgcgatgtgcttcgcgatcctcgtctcacattgcccctgatcattgtctgctgcttccatggtggtcagcagttgtcgggcattaatgcgatattttattactcggtcagcatcttcgaaaaggccggactgtccacagtggatgctcaatgggccaatttgggcgctggttgcctgaatctagctgtctctttgttgggaccttggctaatggccaagtgcaatagacgaaccttgatgatgttctcctgtgctctttgctccgtttttctgttcaccatagcctttgtgttgttttatattgaccaagttagctggtttgccattgcctgcatcgtctgcatcatgggttacatattcttctaccaattcgggctgggccccattccctactttattggcgcagaactgttcgaggtggctccccgctccgtggccatgtcgatgggcagcttggcctcgtggacgtgcaatttcataattggcatatcgttccccctgctgcagaacgcatggggcgccttcgtcttcctgcccttctccattacctgcgtgctgctcttcttgcttacgaaattctatctgccggaaacgcggggacgcgatccctcagaggtggctcccctcgtatcgaagggcttccgctccaaagtcaaataggacatagcccagtgggctcaacttccaattagccataagtagccggtggtttgtggtaatacggtttaacttcatgtgtgcagtgggtcgcttaatgattcgtccatgtcgtgtgccttttgtatgtgtcgacaataagccgaaatccacgttgttcagggataaattactcttactaaatgtaatttcccgcctagcctgtaagttcttttgtacaaaccaataaatgcgaaaattgatctaactttaagagtcaccctgtaagaaagctttgagcgctgcgtcctcttatcactgcacaagttcaattaaaacgccttgggacggaccgccaagtaatactctgttaattagatttattgttgaacaagagcgacgcggaatcactggatactcttccacggcgggtgcgttagttaattaagtgccaacgcttgaattgtttagcaataagtgcttagcatttggaaggcaaatatatcctgatctccctatatatatatgcctgtgggtaggttaataaaatgttgtattttccactacgaaagatctctgatcaattcgtaagagtatataa

SEQ ID NO: 5067 - protein, 507 aa, DROSOPHILA
MATKSQPAEAQQLYPQPNRVELLSAQTDPSQKPRWGNLLLLVALATTFGGAVSTGYCIGVINAPSKLMKVWCNQTLHDTYGSNLSAGGLDLLWSCVVSVFLVGGAIGSLGGAGAANKFGRKACFLICGALFTVGAVLFFFCRAASSVEMLVIGRFVVGLASGLVTATLPMYLSEVAPMALRGTLGVFIAVGVTGGVVVGQVCSLANVFGTEDLWHYALTAYMFLILVCYLPSYLFPESPKFLYIVKGNRAAAKRELQRLRGKDAEELIAQEMAEMEAESNAKVQTSSFCDVLRDPRLTLPLIIVCCFHGGQQLSGINAIFYYSVSIFEKAGLSTVDAQWANLGAGCLNLAVSLLGPWLMAKCNRRTLMMFSCALCSVFLFTIAFVLFYIDQVSWFAIACIVCIMGYIFFYQFGLGPIPYFIGAELFEVAPRSVAMSMGSLASWTCNFIIGISFPLLQNAWGAFVFLPFSITCVLLFLLTKFYLPETRGRDPSEVAPLVSKGFRSKVK

SEQ ID NO: 5068 - DNA, 3614 bp, DROSOPHILA
gtaagaaagatcatctctggctgaaacagtgcgtactgacttttcattgtacggcctctccggcgtgttgtggtacgagatcagcagctccttggccagcatcttgtctgggaagttgcgaatcaggtacagccagcactgaatggttctagacataggggcaatagtgagttattacatctggccatcaccccacaccctcatactcattctgttccattaatatggtttgttgctcgcgatcatagtagtccgggtagtcttctagtatgtccagtttggagagcatggtctcgtccacttcgtagacttcgccttctatgtggttcccctcacccgggcgggcgagcagaaatgggatgttgtagcgggttccgacaaccaggggaaacttcgtttccgttttcccccttccaaggaatcgggcttggccgttctcctttttcgtcagccagtggtgattgggctcaccgcgcttcaacgtgccatacacaaagacccttgccgccattctcagcttttcagccattgcgcttcccgccgccaggcttatcagtttcaagcggtatcgtgctatcaaatccgacctgtagattgcgcagtcgacataacccgtccgctcttcttcttgctgccattcgcaccgaatctagcctccgtacaccgcgagaaactgaagccctcggcactgggctgtggaaaattaccagggactgctgtccagcatctttacttctataatagaacgaggggcattttattttattttaaattgcttcagtttatttgctttgtttgtcgaaaactatcaaattacagactacgtttgctaaaacctaaataatgcgtatggtacatatgtatcagtttatatcgtttgcccatatatacgggtatatatcgatcagtacatctgcgtctgcaagtacggtcttaaaatgcaactacggtaacataagattagtggccaggctatccagagaacatccaaacaaacgggcgacaccacaacccacgttattagttctgggcctcgtaggtgaggtcgtcctgggccggatgcttgtgggtgcggcgatggcgcataatgtatggatgggtggttgagttctcgtagctggacaagtagcgcagactaagtaggttctccgggtacttctgcagcaggtacacccagcatggaacggttctggaaaggaaattgtgacccatcacaccacattgctgaaatgacgtcagatccgactaatgctcacccttctccaacgccaatgttcatatcgtgcatctcgcgagtgtagatctcctcgcaatcctccaggttgtccagggaattcagcattcgatcgtccacctcgtagatctcccctgttacgtaatatcccactccgggcttgttcagcaggaagggaatgttgtagcgggtggcgatcactagcggcagcttttgggtggtggtcgccttgcaccagaacttagcgaagccgttgccagagctggccaggattgagttgctgggctgtccgtacttgagggcgccgtacacgaagagcttgctcaaggcggaggagactttctgtggagtgcgtgagaggtgggtgtggcgtaaagacagataagtagggttaggttagagatctgataaactggtggtatcttgtgagagtttgctctactggtatcaatcgatcgccgtggcttatcagggatcagggatccgaacactttccactggctagcccccgcaagttattgataaggttcacgaaacgtctcggtgtttggcgagattctcagctgaaccgctttttgggcgagaatgggatggctcaaccggtttcgtgcattcacacgtttattcttaaagtctgttattgttgctaatatatgtacgtagctgtttcgtatttttggggctgagtgcgtgcctcacaaactgcgcagcagttacgcctccacaggtacatatgtatggagacactcgctatctgtacacatgtaattggcacattaataattgcttaaatcggtttaatcattgcagtaaatggataacacacgcaagcggccttaaatcaatgtcatcaaacggttgcatcaaagcatcttggcgaatccgcttacataacccagaacaggcatcagctcacactcatacatatgtagatatcttaaaaattccaataaactatctgataaccctccgatggatcggataacttaaaatgccttaaatttagttcccaagctctcaggcttttacacgctttccatttggggctgcccacttgccaaggacgaaggataagggatgcgtatacacaagctaaaagtgtgcatgtgtgcgtgggcttcacattgtgctgcactcttaatcagcttacctttgcttggcccattttcttgtcgaaccgcctgcagataattaaaattgcaaattgctgcactaagcaaaggcgagagagctcttcgggattggataggatagtgtgcacgagctccagcagagatacaaccgcgccgatggccagcaaaactccaactaaatcgtgatggagaacaacgtcggcggacacggtgctgccgcctgccactgttgttgttgttattgcttctggcacagtggagcaaagtcacaacgtgttattggttcaacttatataaatatattgcatatgaaagtattagtcgacactacgtggaaaagcaattcttaaataataattatggtatatatccaatttcatcaaaattggaaaaaggaagaaaatattatttgccctgtttactgactctgcccagtgtgccttgtcgtcaagaccaagaggcccgcctctagtggaacaacaacaagtaaaacaataacacgccacacgcgcaaagctaaaaatgacggttctgccgactggtctttatctaagaaatatcctctgggggggggtgtgggttagttgaaatacccgaaatattataggccccgcaagcacaaacactctaaaattcgggcattatcaatggcctaataacatctgagcacagaagtccctcttgagatccacgctccctctatgatacccccccctagcagcattttagttcgctggcgacgcctctggagaacacgtacgcatgtcttcttcagtttctctgctgatcggtggggatcggaaatcgtatactgtatattgtaatattctgcacttccatgtgtccgatttgttataaacaataacaaagtctctttgtaattgattggttgataggtgggggagggggtgcggcaacaacaacaccaaaaccaaaccagttgacatgcgctctttaaaatcaaaatctcactgcgctctctgaattgtgccctgcgaaaggtaaggcattttagttttcggactcaatacgaactatcaagcgtaactacatattgtatattgttgcccattcattatgaaagggtaagcactcaataaagttagtgcttctcatatttcctcaggttagataaatcgatataatacatatgcataatgcgtttttgaagttggtattttaatatggacaaattataggttactttatgaggcgattaaagctgtttttatattttatgttattcc

SEQ ID NO: 5069 - DNA, 739 bp, DROSOPHILA
aagcaataacaacaacaacagtggcaggcggcagcaccgtgtccgccgacgttgttctccatcacgatttagttggagttttgctggccatcggcgcggttgtatctctgctggagctcgtgcacactatcctatccaatcccgaagagctctctcgcctttgcttagtgcagcaatttgcaattttaattatctgcaggcggttcgacaagaaaatgggccaagcaaagaaagtctcctccgccttgagcaagctcttcgtgtacggcgccctcaagtacggacagcccagcaactcaatcctggccagctctggcaacggcttcgctaagttctggtgcaaggcgaccaccacccaaaagctgccgctagtgatcgccacccgctacaacattcccttcctgctgaacaagcccggagtgggatattacgtaacaggggagatctacgaggtggacgatcgaatgctgaattccctggacaacctggaggattgcgaggagatctacactcgcgagatgcacgatatgaacattggcgttggagaaggaaccgttccatgctgggtgtacctgctgcagaagtacccggagaacctacttagtctgcgctacttgtccagctacgagaactcaaccacccatccatacattatgcgccatcgccgcacccacaagcatccggcccaggacgacctcacctacgaggcccagaactaataacgtgggttgtggtgtcg

SEQ ID NO: 5070 - protein, 167 aa, DROSOPHILA
MGQAKKVSSALSKLFVYGALKYGQPSNSILASSGNGFAKFWCKATTTQKLPLVIATRYNIPFLLNKPGVGYYVTGEIYEVDDRMLNSLDNLEDCEEIYTREMHDMNIGVGEGTVPCWVYLLQKYPENLLSLRYLSSYENSTTHPYIMRHRRTHKHPAQDDLTYEAQN

SEQ ID NO: 5071 - DNA, 2865 bp, DROSOPHILA
tatatatatgtatggaaggatgatgacccaccttcaccgtctccagttgggctccttccaaaacgatgatcagccgcttttcggtggcattcagatggagcaccttgaattgcttcttgtccagatcgaactccggatcgtccgccttgcgaccgacaaacttacgcttcctattgatcgccttgccctgaccgcccatatcgtaaaagtagttgtatatggttaaaaacaattccgaaattattcttaagaaatccgcacgtttttcgaaatgcacaagttcagtatgaccttgttgcgggctcccttaaatacccaacttaaatagtatggcatatgtttttcagtattaaaaacaacgaatgcatttgcttgggtctggtcacacgacggcgagtttgtttattttttgtttgcatttggattaccggatccttgtcgtcctcctggttttgcaatcctacaagatgcgcctgtgcccgctggcgttcgccgtgctgcttggcctttttcacctgatccaggcctgcaatcattgggttcttcgcgaggagcagatcgtgcccaaactggactctccattccacatgcgtgaaccccacaatctggcggcatttctcaagcagatcaggtacagtgagtatgtggagcgctcctatctggatctgctgcgcaagcgggaacagattgtggagcacctacgattttcgatgcgtttcggtgaggatctggccgagcaggccaagtgcgccatggactactacatgctggagaagcgaatgtcttacctgaaaattacgccagagcagttgaaaaggattaatcttccggaccagaggcaattgcacatacagaagagcgcatcctcgatgggaatggagccgatatgcagcgattaccatcgattaagcgtgggtccagccacctatgatcatctggagagttttcggcccgaggtcctggccgctgcctttctggagcgcgagcatgacaccaatgtgggcatggccaccgtggaattgacccggcgatttgcggtggacggattgcagcatcatccggcctcctggaagttccacaccctaagctcgtactattggcgcatgcgaggaaatgcccgggaagccctgccctgtgccagattggctgccttgctggctccgccgatctttaaggatatacccctgctgagtctgggtaccatactctttcgaatgggtcgactggccgatgccgatctgatattgaccgctgcggtggaacatgctcctaatgtggccgagaatcatgtggtcctggcctctgcactggccatgaaacacgactttaatcgatcactgcagcacttcgacgaagccgagcgactggatcccagcacattgccgagaacacagcaggtgcgaaactttataagttgcctagagaacctaacgaagaaaacctccaagatgtatagctatgtgaagtacatgcagaacgaggtgaaggagttcaagaagctgaagcatcacatctctcagaatcacgagagattgatccaacagcagctgccattgggagcgagacgtctgcttggcctggacgccaaaaccaacaacgatgatctccatcgaaggggtcaatactgcagcacgaggacgccgaatggttcagatgaaccggtgttgttttgtgacttctattcggacatgcaaatgcgattggagagcaaggatgtggacattgatgtgctggaacgggatctaaaggccaatacggatgcggtcattcgccaggtgtccaccgaaatccggaaacagttcaatttggagcagcttaaggcggccaaggcccaaatgcctgcgaaggcgacaaaggctacatagtaatgattgccattacaaacagatggactggcacattcccttcacaaagcaaccaaatatttttggtcacaaaatagcttgtacgattaatctgttcttaattagtatttaggtatgtgtgcaagagacgtgtgcgagtgtgtgtgtgtgtgtgtataggataagttttcaggtatagttttatcaggctttatacacggaaatgttcgaaaggaggaggttctttcgatgcataatacagcatcgttatgtcactttaattaataatatcttttaatgaatatttaaacaacgactttttcacattcgataagaaataagctttgaattgtattcaactaagaactcttttgtttatttctgttttcagacagcttatttttatatttgttatattatgttttatatttgtccaaaacctcctacctcgaatttcccaaaaaaatatcattaagatcgcgtatttatatttaccactagttttacattcagttatgttatcttaatgcaaaaaaaaaaggaaatctacaaaaataacaacagccattatccaatcgaagaactgcaggttcccgagaggagtttctttggtggattaccatcggattggttgggtttttaaggcctccaacagactggaaagactggcaaaagaatggggattgtcagcgttgctcacaagcaaaccgctccagccgcaattccgggcaccttcatagtccatatccaacttgttgccaatgtgaagggcctgctccgctggaatttgcaatctctgcagcggaatttcgaagataccgcgttcgggcttcataacaccggcttcgtaggaagtcagaatgaaatcgaatttgccggcaaagcccatggcgtccaggacttgtggcagtgacgaatcgaaattggagatgatgcccacacatttgccggcatttcggacgttctgcaccaactcctgggcaccattcacgtgactccaacaggcgctggtccgaaaaac

SEQ ID NO: 5072 - DNA, 1398 bp, DROSOPHILA
atgcgcctgtgcccgctggcgttcgccgtgctgcttggcctttttcacctgatccaggcctgcaatcattgggttcttcgcgaggagcagatcgtgcccaaactggactctccattccacatgcgtgaaccccacaatctggcggcatttctcaagcagatcaggtacagtgagtatgtggagcgctcctatctggatctgctgcgcaagcgggaacagattgtggagcacctacgattttcgatgcgtttcggtgaggatctggccgagcaggccaagtgcgccatggactactacatgctggagaagcgaatgtcttacctgaaaattacgccagagcagttgaaaaggattaatcttccggaccagaggcaattgcacatacagaagagcgcatcctcgatgggaatggagccgatatgcagcgattaccatcgattaagcgtgggtccagccacctatgatcatctggagagttttcggcccgaggtcctggccgctgcctttctggagcgcgagcatgacaccaatgtgggcatggccaccgtggaattgacccggcgatttgcggtggacggattgcagcatcatccggcctcctggaagttccacaccctaagctcgtactattggcgcatgcgaggaaatgcccgggaagccctgccctgtgccagattggctgccttgctggctccgccgatctttaaggatatacccctgctgagtctgggtaccatactctttcgaatgggtcgactggccgatgccgatctgatattgaccgctgcggtggaacatgctcctaatgtggccgagaatcatgtggtcctggcctctgcactggccatgaaacacgactttaatcgatcactgcagcacttcgacgaagccgagcgactggatcccagcacattgccgagaacacagcaggtgcgaaactttataagttgcctagagaacctaacgaagaaaacctccaagatgtatagctatgtgaagtacatgcagaacgaggtgaaggagttcaagaagctgaagcatcacatctctcagaatcacgagagattgatccaacagcagctgccattgggagcgagacgtctgcttggcctggacgccaaaaccaacaacgatgatctccatcgaaggggtcaatactgcagcacgaggacgccgaatggttcagatgaaccggtgttgttttgtgacttctattcggacatgcaaatgcgattggagagcaaggatgtggacattgatgtgctggaacgggatctaaaggccaatacggatgcggtcattcgccaggtgtccaccgaaatccggaaacagttcaatttggagcagcttaaggcggccaaggcccaaatgcctgcgaaggcgacaaaggctacatag

SEQ ID NO: 5073 - protein, 465 aa, DROSOPHILA
MRLCPLAFAVLLGLFHLIQACNHWVLREEQIVPKLDSPFHMREPHNLAAFLKQIRYSEYVERSYLDLLRKREQIVEHLRFSMRFGEDLAEQAKCAMDYYMLEKRMSYLKITPEQLKRINLPDQRQLHIQKSASSMGMEPICSDYHRLSVGPATYDHLESFRPEVLAAAFLEREHDTNVGMATVELTRRFAVDGLQHHPASWKFHTLSSYYWRMRGNAREALPCARLAALLAPPIFKDIPLLSLGTILFRMGRLADADLILTAAVEHAPNVAENHVVLASALAMKHDFNRSLQHFDEAERLDPSTLPRTQQVRNFISCLENLTKKTSKMYSYVKYMQNEVKEFKKLKHHISQNHERLIQQQLPLGARRLLGLDAKTNNDDLHRRGQYCSTRTPNGSDEPVLFCDFYSDMQMRLESKDVDIDVLERDLKANTDAVIRQVSTEIRKQFNLEQLKAAKAQMPAKATKAT

SEQ ID NO: 5074 - DNA, 3550 bp, DROSOPHILA
aagcaagaacgtctatgccaacgaatcggcccgtaacaacattacgccctcaagcatctatgagactgggatctcaccgccagtcttgccgagagagaatctaaccgagcagaaccaccaagcgatggaactcgccatcaacaagactaagcccaaattgaccgccgtacggacatatactcgtaaacgagtggaaaccgccagcaaagcaaaggccacaccagtgtggtctcctcttcagaagaagaaaaagagctcgtgggtatcatccaccaaggtgccgtctcccaccatgaaggtggaagtgcgtaatcgcaaactgatagttgacaccaaaaagacgctagctgtccatgatcctagaaaattgtcttcggggtccatcacaatgaagaaaataataaggaagcaagtgacgggaaagacacgaaagcaatttgaagccctcaaagtcacagcctttgacttattaaccaatttgtgtgtggccaacatttccgacgatctaaccaagcaattccagaaagcctgtgcgaacagggtgtgcactaccttgcccaattacgcagagatcgcagttgtcccgccgctggaaatggatcgcgaggtgaatgcgctgatggccaggcagaagcggatggaaagggagacccataggcgatggagcgcagtgccaccagaaggcaatccagtttaaagggccaaagacatattttttttttggaagatctcgatgtatttgttctggcatccagtcagtaatccaaatgcatgtatgctcttgtcatttagattaaacatagaataaaacgattaacgggtataatatttctttgatctccatttatgattacaagtattatacatttaccaaaaaggaacacatttgtctagttatatgtacagttctatcttaagctagcctaggagagcctacactaacagcgagtaaaaatatgactttgtacgacgacatctttgtatttggactaattagctcctaggaggtgcggcaccgaaagcaggccttgaatccccgcttgatcgcccgaatgttgtgaacgacctgctcctgcaaagaaaaagtgcattagaaaggataaagaggctattgttgttcaatttacctgcatcaaattgaagcacatggcaatcacggccatgccgagcagcagatatatggcgcagagaatgaagctaacctccaccttatccctgtcggcagttatctagcaaatgcaaaattatttgattactttagccatcttttgcaagccaataaaaataattaatcaaaatccttccgtttaagaatgactatgagtatgcataccacacgatcgcctggcaccagatcgccaaatccaatgctgctgagcgatataaggcagaagtagctcccatccagatagttccagtcctcccaacgaccgaagagcagcgcaccccacaggatatacctttatttataaagtttcattagaagttcgtaattgaggaaaggatggagttcttcatacccgaccataacgaagacgcacacagtgactggcactgtaatttcatccgtgctgccgcgtatttcccgctcgatatccgaatcagactcggtgtactgaatatccacgaggctggaactctggcgggaacttctggtgtattcgctactgctgctgttggaggaggtggtactgctggtgctagtgtagctgctgcttccccgggcattctccatgtcgtgcatctggagctgcagtgagatacccaaaatcagtgatacccaaaaaaccttaagtgtaaggtattttcaacgcaccgctctggccaactgtcgcatttttcgtctctcgcggattatccggcgcttggccacgccggggcagatgcgacataggcacaccttcgagtatatccacttgaaggacttggccaggacgtctccaatgttggacaggtagagcaagaacagcggcatgccaattatcgcatatagaatggtcaccagctttccgcactcggagtgcggcgtaatgttcccgtacccgatggtcgtgatcaccgtcagtgagtagagaaaagctccggagaagctccactgctccacgtcgggtcccttcagctgctttttcactatggccctctgataatccagaagcacatcgttcaccctgccgcagtaacttgaggcttaggtcactcgaaaaccaaaaaggttgctcaagtgtggaacacctggacgacttaccgtctcctgtaggcgtggtggtcgaagaagctgatgttctccgccgtcaactcccatatgcggctgaggcactcgccactgaagttccgtgctataaaccggtgcggcttctccgacttgagccgctcgtactcgaaaatctcgatgctctggaatatgaacgctccgccgataatataaaatgtgaccagtagaatgatgcccacgttgctgaacatgaacgccgtgaagtggcggcagtggtccttaaagcgctcgaaggccggcttctccctccgcctgaaggagctgcgtcgggaggacatgtcttggcggttcgtttccgtttcggtcttagttccggttccggctggccttccacgggcgagcgcctggacatgctcgggtctggtccggcactcgcatcgatgacgtctgaaaggatttccggctacctatcgctgaaattatccacgattagtttaccgaatcgccagtgcagagtggtaaataaacaagttgctacattatcaaagtgtttggcggcataaatcttccaaaataaaatgtatgcgttgcttcagtttgtgtgggtggtttattttcatggtttgggattcatgtgagatatactcttcagatgaagattctgctgtttaacataaatttgaaacagcattacaggccaacttttcaattttatagaagccatatgtttttaaaagaaattgacaaattgttgcgtgaaggaattcaaaatcaataaataaaaatagaactactattcgaaaatatattttttgggccattaacataattgattatattttattttcactaactttcgctgattacttgttgaaaattctgaaattgcatgtaactcatgcgaggtgacagtttgcgggcgtttttgaaagcatcgaatattttgcctggcagcatgaatggctttttatttttaatacagtgttttctatgctctctaataaatggccaacatgaacatgaattattggactacaatcttggcagctggcctatggaacagtcacatcatcccgtctcatcgcgactcatcccgcaccatcgcatcatcccaacggatcgtttgtgtgtggtatttcaaatttctcgcgtggccggaggatgacactcgtctagattcgagaattgatggcgtagccgtggcgtcaaattggaaagtttctaacgatccaatgcggcgtctgcggttgccaaacgcggcctttttgtttgtttttcgtctttttttagggttcaatttagtgggtgtgaaatacgagttcattgcggattattttt

SEQ ID NO: 5075 - DNA, 1188 bp, DROSOPHILA
atgtcctcccgacgcagctccttcaggcggagggagaagccggccttcgagcgctttaaggaccactgccgccacttcacggcgttcatgttcagcaacgtgggcatcattctactggtcacattttatattatcggcggagcgttcatattccagagcatcgagattttcgagtacgagcggctcaagtcggagaagccgcaccggtttatagcacggaacttcagtggcgagtgcctcagccgcatatgggagttgacggcggagaacatcagcttcttcgaccaccacgcctacaggagacgggtgaacgatgtgcttctggattatcagagggccatagtgaaaaagcagctgaagggacccgacgtggagcagtggagcttctccggagcttttctctactcactgacggtgatcacgaccatcgggtacgggaacattacgccgcactccgagtgcggaaagctggtgaccattctatatgcgataattggcatgccgctgttcttgctctacctgtccaacattggagacgtcctggccaagtccttcaagtggatatactcgaaggtgtgcctatgtcgcatctgccccggcgtggccaagcgccggataatccgcgagagacgaaaaatgcgacagttggccagagcgctccagatgcacgacatggagaatgcccggggaagcagcagctacactagcaccagcagtaccacctcctccaacagcagcagtagcgaatacaccagaagttcccgccagagttccagcctcgtggatattcagtacaccgagtctgattcggatatcgagcgggaaatacgcggcagcacggatgaaattacagtgccagtcactgtgtgcgtcttcgttatggtcgggtatatcctgtggggtgcgctgctcttcggtcgttgggaggactggaactatctggatgggagctacttctgccttatatcgctcagcagcattggatttggcgatctggtgccaggcgatcgtgtgataactgccgacagggataaggtggaggttagcttcattctctgcgccatatatctgctgctcggcatggccgtgattgccatgtgcttcaatttgatgcaggagcaggtcgttcacaacattcgggcgatcaagcggggattcaaggcctgctttcggtgccgcacctcctag

SEQ ID NO: 5076 - protein, 395 aa, DROSOPHILA
MSSRRSSFRRREKPAFERFKDHCRHFTAFMFSNVGIILLVTFYIIGGAFIFQSIEIFEYERLKSEKPHRFIARNFSGECLSRIWELTAENISFFDHHAYRRRVNDVLLDYQRAIVKKQLKGPDVEQWSFSGAFLYSLTVITTIGYGNITPHSECGKLVTILYAIIGMPLFLLYLSNIGDVLAKSFKWIYSKVCLCRICPGVAKRRIIRERRKMRQLARALQMHDMENARGSSSYTSTSSTTSSNSSSSEYTRSSRQSSSLVDIQYTESDSDIEREIRGSTDEITVPVTVCVFVMVGYILWGALLFGRWEDWNYLDGSYFCLISLSSIGFGDLVPGDRVITADRDKVEVSFILCAIYLLLGMAVIAMCFNLMQEQVVHNIRAIKRGFKACFRCRTS

SEQ ID NO: 5077 - DNA, 5613 bp, DROSOPHILA
gagctgttttccctgtgcgaggtgggctggatgcccttgagggaggcgaagacctcctggaagcgcgaggcgatatcctgcaccgtttcctgaccgagacgggacagctgcacaatgttaatctccttgtgaggattttgctgcgagatagccagcatattgttgctgcccccggctccaccgggtggaattcctgcgaccggattgagttgctgttgctgttggggaatgttctgctggggcatgttttgttggggctgctgttgctgctgctgtggaaccactccccctccgcccattcccacaccaccgcccattcccactccgacgcccactccttgttggggcaccatcatttgctgctgcatcatctgctgctgctgctgttgctgcatctggtgctgcggagacatgccgggcatcaggccgccaggacctccaggtccttggggattcatctgcatgctacccgggccgcccatcatgcccatttgttgttgctgctgttgatgttgaggcgacatgtgcatttgctgcatattgccgtgctgcatgccaaatccacccatcggcatcatgttggggcccccgcctcctccgccgccgctcgatggtccctgattaccctggttttgaccgtatttccacattttgcaacgttcttataaaataaacaaaatatcacgcagaacgataaactttggcaaatgacactgttgtcgataacataaaacaaaacggatagtgttagataacgctgaaactgtatgctcgcaaacagctgtgaagtcgcgggttttaaattaccaatcctaaatgatagatctagatctagatctagattatcttcactagataaatttgagtgtttttactaagtttttatttggtgattactaaaatttaaattcttagtcaaatccaaaatggtaataatagccccctgcaaaactcgttaggaatgcgtccatgcgaaaagagagttgccacatgcgcgcaaaaataatgaacataggtgtgtcagctgagcggtattggtggaattcaattttggctttttcatgcttttaaacgattaaaaatgacccgcgatgaggataatggttttagtgaatgggtaagatgtagataaaatgctaaaaacattgtacataaaccaaacctgctcttttcagggcggctacttcgaagccaagaaatctaaacttgaggagcagttcgctgccgccagcgatccatttcgcaagtcggacctcttccaaggaatttctatatttgtgaacggccggactgacccttcggcggatgaactgaagcgtattatgatggtgcacggcgggacctttcaccactacgaaaggagccacacgacgtacataatagcctccgttctgcccgatgtgaaggtcaggaacatgaatctcagcaagttcatcagcgccaagtgggtggtggattgtctggagaaaaagaagatagtagactacaaaccctatctgctgtacacgaaccagaagacatcgcagcccatgctcatctttgggaaacccaaagacaacggcgcaaatgagagcaaatcggatgtggagccgccgaaagataaagcggaagtggaagtagactctacaaaagatgaaacgcaaatggagttgggtggcattctcaagaatttgcagcaggctgtggccacttcgccggaaaaggaggccagtgcatcagagagcaagatcacaaacttatccaccacctcgaataactccaccaccgctcgcacagccgcggatccaaatttcttaagtgaattctataagaactcacgactgcatcacatcgccactctaggcgcgggtttcaagcagtatgtctgccggttgcgtcagaagcatggtacccagggctttcccaaaagagagacactgaagtcccttgctaattcacaccacaattgtttggaacgctatgtgatgcacattgacatggactgcttctttgtgtccgtgggcctaagaacccgtcctgagcttcgtgggctgccgattgcggtgacccactcgaagggaggtaacgcagccaccgatgtaccggtgcatccgcaggcggaccgaaaggcagagctggaactctttgcccagcgcttcgagcaccatttccacgatggagacaaggcggaaaaggtgcgctcgggcttcgacaagaaaatgtcgctctcggagatcgcctcctgcagctacgaggcgcgggaaaagggtatccgcaatggcatgtttgtgggccaggccctgaagctgtgcccggagttaaagacgattccgtacgacttcgaaggctacaaggaggtggctttcactctgtacgacacagtggctcagtataccttaaatatcgaggctgtgagttgcgacgagatgtttgtggagctaaccgatctggcacacgaactcaatgtagatgtgatggcttttgtgagtcacctcaggcaggaggtttactccaaaacgggatgtccgtgctcagcaggagtggcaggcaacaagtgagagaccaaataagccttttacaattataatatatattatatatattataggttgctggcgcgtatggccaccaaggaggccaagccgaatggccagttcttgttggattcgagcaatgatattttggcctatatggcgccgatgtctttggatttactgcccggtgtgggcagcagcataagccataagctcaaacaggcgggactgaataattgtggagatgttcagaatacaacgttggagaagatggaaaaagtgctgggcaagaaacttggacagaatttgttccagaactgcagaggaattgatgatcgtcctttggcttacgagcaggttggtgtgcagattttattgcgtcccacatatttgtttctaataccgtacttttcgtttagatccgcaaaacagtttctgccgaaatgaactttggtattcgctttaccaactcggtcgagtgcgaacaatttctgtgtcagctcagcgaagaggttactaagcgtctggttgagataaggcgcaaagctagatcgattaatctgaagataatggtgcgcgccgccgaagcgccagtcgaaacctccaagtacatgggccacggagtttgcgatataatcaacaagtcctctctgatcaaatatgccacggatgatgtaaatgtaatcaccacggtggtcctcgacctgatgaaagacgccgatataccgcccgacgaattgcgtgggctaggcatacatctcactaggctggaggatgccaacgaagttcggaaggagaacaatatcaaggagatgttcggcaaaatgtccgaaatgaggaaaggtatttaatccggccaattttgtataccgattttattaaaatgtcgtacacgtttcctttagataaaccaataccccaaggagcagttggcgataagtccataggcgatgataaaggtatttaagctgaaaaataatttacttcccaacttatttaagacctgtatatcatctatctgcagtcaacaaaccactcgtgtttgaaaataaacctaagccccgtgagcccaggaatgttttgagtatgctcacggcagcagcggtgagcaggaaatcggtaaccgaagacaggagtcaaagaggaacttcaaagccgataactcggccattatcccttgtaccaaaacttgatgaggatgttttggctcagctgccggaggatatacgcctcgaggtgattgccaatagggaggaacacctctgcattgccgagtacgatggatatcgttctccacaatatccgaccctccgctcaccgcctttattaaatccatatgtcaccaccaatgtgagcccgctaaaggccaccgatcttaagccatcgacttcccgggcggctgtggctagattgcaaaagcgcaaggagcgcaaggagcaagagcattacatccgatcggatcagattgtggcagactacattgatgatctgcctgatttcgtgaatccccatattctgaagctcatctcacatcccgtggagatgcccgagctgctgatgggggacaactacaaggacttgctgaacgattgggtcagtcgcgaggaggtgccaaagccgaatgacgtggatcttattctcaagcaggtttctcgtatgattaagaacgaccaattggaccacgtgtgcgatgtgatgaagtattggtgccggtaaatagttccatcaaaacacttttaatttctgctcaacatttttgctacctttcatttgcaggatcatcaatatgaaacgcagcagctcttgctgctggcacgtggcttataagcacattgaggagagtatccagaaccaaatgcttacgattgagggttacagtctgttattcattgagtacattcgttgcataaagtgctcctaagaccctggacatttagaacggatattgggtgtcattgagaatagttattataataatgtaacgccaagctatgaatgcggccagctgataatgttaatgagccattagtttataagccatccattaattcgagccaaaaataaaacattctggtaaagaaaattcaatccataccatataactgacttgttgtaacctacacttctaatacttttccatatcttactaaatcctatatatagatatagagcatgctcctattcatctacaacttcggggacaggtagcaattattattgcaagtgcggtaaataaagtggggctgtggccgctgcgacgatggcgttgataacttcatacgcaaagggcagagctgcatcttagccaccgccgggtggctcaaccaaacgccccagtgtggctctttcccaccaaggctcggccactcaagacaaataggccaggcgggcacaacacctggcggaactggcaagtcataatttgcactttaatgaaagcggcatcgattcgaacaggttagtgttgaacagttctctaaagtcactgcagttaatcgctgcgacggctgtaatatgtaattgattcgcatgcggcatacctacactcaaaaaaattagccttaggtttcataaagcaatctacattataaggatttttgtttagggctagatcaatataaaaaatatattttatgaaagtgtagaacacatttttggtaaattttttattgattttactttatgtgttctcaattcttttcgaatagtcagcgaccacctgccccaatctcaatcccaatcccaatcccagcccatcccatccgcaaccgcatgacaaccataacaattacagtgctcatgccaggaaggcagaggtgggaaaacttgggatcatacgaagatatgtacctatttttagaatccatatgggtagagttagtgaatgagtgtcctatggacttagtaccatatacatgaaatgataggtaaagaattataaataatattattaatccttattagatttttattttgcattagaaatcattacctatttccaaggtacttcagctaagtaattgtttatccgacatgtacaatataactcgtatcccacctggccaataaattctcacaatgtccatcactgaccactggc

SEQ ID NO: 5078 - DNA, 3248 bp, DROSOPHILA
aaataatgaacataggtgtgtcagctgagcggtattggtggaattcaattttggctttttcatgcttttaaacgattaaaaatgacccgcgatgaggataatggttttagtgaatggggcggctacttcgaagccaagaaatctaaacttgaggagcagttcgctgccgccagcgatccatttcgcaagtcggacctcttccaaggaatttctatatttgtgaacggccggactgacccttcggcggatgaactgaagcgtattatgatggtgcacggcgggacctttcaccactacgaaaggagccacacgacgtacataatagcctccgttctgcccgatgtgaaggtcaggaacatgaatctcagcaagttcatcagcgccaagtgggtggtggattgtctggagaaaaagaagatagtagactacaaaccctatctgctgtacacgaaccagaagacatcgcagcccatgctcatctttgggaaacccaaagacaacggcgcaaatgagagcaaatcggatgtggagccgccgaaagataaagcggaagtggaagtagactctacaaaagatgaaacgcaaatggagttgggtggcattctcaagaatttgcagcaggctgtggccacttcgccggaaaaggaggccagtgcatcagagagcaagatcacaaacttatccaccacctcgaataactccaccaccgctcgcacagccgcggatccaaatttcttaagtgaattctataagaactcacgactgcatcacatcgccactctaggcgcgggtttcaagcagtatgtctgccggttgcgtcagaagcatggtacccagggctttcccaaaagagagacactgaagtcccttgctaattcacaccacaattgtttggaacgctatgtgatgcacattgacatggactgcttctttgtgtccgtgggcctaagaacccgtcctgagcttcgtgggctgccgattgcggtgacccactcgaagggaggtaacgcagccaccgatgtaccggtgcatccgcaggcggaccgaaaggcagagctggaactctttgcccagcgcttcgagcaccatttccacgatggagacaaggcggaaaaggtgcgctcgggcttcgacaagaaaatgtcgctctcggagatcgcctcctgcagctacgaggcgcgggaaaagggtatccgcaatggcatgtttgtgggccaggccctgaagctgtgcccggagttaaagacgattccgtacgacttcgaaggctacaaggaggtggctttcactctgtacgacacagtggctcagtataccttaaatatcgaggctgtgagttgcgacgagatgtttgtggagctaaccgatctggcacacgaactcaatgtagatgtgatggcttttgtgagtcacctcaggcaggaggtttactccaaaacgggatgtccgtgctcagcaggagtggcaggcaacaagttgctggcgcgtatggccaccaaggaggccaagccgaatggccagttcttgttggattcgagcaatgatattttggcctatatggcgccgatgtctttggatttactgcccggtgtgggcagcagcataagccataagctcaaacaggcgggactgaataattgtggagatgttcagaatacaacgttggagaagatggaaaaagtgctgggcaagaaacttggacagaatttgttccagaactgcagaggaattgatgatcgtcctttggcttacgagcagatccgcaaaacagtttctgccgaaatgaactttggtattcgctttaccaactcggtcgagtgcgaacaatttctgtgtcagctcagcgaagaggttactaagcgtctggttgagataaggcgcaaagctagatcgattaatctgaagataatggtgcgcgccgccgaagcgccagtcgaaacctccaagtacatgggccacggagtttgcgatataatcaacaagtcctctctgatcaaatatgccacggatgatgtaaatgtaatcaccacggtggtcctcgacctgatgaaagacgccgatataccgcccgacgaattgcgtgggctaggcatacatctcactaggctggaggatgccaacgaagttcggaaggagaacaatatcaaggagatgttcggcaaaatgtccgaaatgaggaaagataaaccaataccccaaggagcagttggcgataagtccataggcgatgataaagtcaacaaaccactcgtgtttgaaaataaacctaagccccgtgagcccaggaatgttttgagtatgctcacggcagcagcggtgagcaggaaatcggtaaccgaagacaggagtcaaagaggaacttcaaagccgataactcggccattatcccttgtaccaaaacttgatgaggatgttttggctcagctgccggaggatatacgcctcgaggtgattgccaatagggaggaacacctctgcattgccgagtacgatggatatcgttctccacaatatccgaccctccgctcaccgcctttattaaatccatatgtcaccaccaatgtgagcccgctaaaggccaccgatcttaagccatcgacttcccgggcggctgtggctagattgcaaaagcgcaaggagcgcaaggagcaagagcattacatccgatcggatcagattgtggcagactacattgatgatctgcctgatttcgtgaatccccatattctgaagctcatctcacatcccgtggagatgcccgagctgctgatgggggacaactacaaggacttgctgaacgattgggtcagtcgcgaggaggtgccaaagccgaatgacgtggatcttattctcaagcaggtttctcgtatgattaagaacgaccaattggaccacgtgtgcgatgtgatgaagtattggtgccggatcatcaatatgaaacgcagcagctcttgctgctggcacgtggcttataagcacattgaggagagtatccagaaccaaatgcttacgattgagggttacagtctgttattcattgagtacattcgttgcataaagtgctcctaagaccctggacatttagaacggatattgggtgtcattgagaatagttattataataatgtaacgccaagctatgaatgcggccagctgataatgttaatgagccattagtttataagccatccattaattcgagccaaaaataaaacattctggtaaagaaaattcaatccataccatat

SEQ ID NO: 5079 - protein, 995 aa, DROSOPHILA
MTRDEDNGFSEWGGYFEAKKSKLEEQFAAASDPFRKSDLFQGISIFVNGRTDPSADELKRIMMVHGGTFHHYERSHTTYIIASVLPDVKVRNMNLSKFISAKWVVDCLEKKKIVDYKPYLLYTNQKTSQPMLIFGKPKDNGANESKSDVEPPKDKAEVEVDSTKDETQMELGGILKNLQQAVATSPEKEASASESKITNLSTTSNNSTTARTAADPNFLSEFYKNSRLHHIATLGAGFKQYVCRLRQKHGTQGFPKRETLKSLANSHHNCLERYVMHIDMDCFFVSVGLRTRPELRGLPIAVTHSKGGNAATDVPVHPQADRKAELELFAQRFEHHFHDGDKAEKVRSGFDKKMSLSEIASCSYEAREKGIRNGMFVGQALKLCPELKTIPYDFEGYKEVAFTLYDTVAQYTLNIEAVSCDEMFVELTDLAHELNVDVMAFVSHLRQEVYSKTGCPCSAGVAGNKLLARMATKEAKPNGQFLLDSSNDILAYMAPMSLDLLPGVGSSISHKLKQAGLNNCGDVQNTTLEKMEKVLGKKLGQNLFQNCRGIDDRPLAYEQIRKTVSAEMNFGIRFTNSVECEQFLCQLSEEVTKRLVEIRRKARSINLKIMVRAAEAPVETSKYMGHGVCDIINKSSLIKYATDDVNVITTVVLDLMKDADIPPDELRGLGIHLTRLEDANEVRKENNIKEMFGKMSEMRKDKPIPQGAVGDKSIGDDKVNKPLVFENKPKPREPRNVLSMLTAAAVSRKSVTEDRSQRGTSKPITRPLSLVPKLDEDVLAQLPEDIRLEVIANREEHLCIAEYDGYRSPQYPTLRSPPLLNPYVTTNVSPLKATDLKPSTSRAAVARLQKRKERKEQEHYIRSDQIVADYIDDLPDFVNPHILKLISHPVEMPELLMGDNYKDLLNDWVSREEVPKPNDVDLILKQVSRMIKNDQLDHVCDVMKYWCRIINMKRSSSCCWHVAYKHIEESIQNQMLTIEGYSLLFIEYIRCIKCS

SEQ ID NO: 5080 - DNA, 4504 bp, DROSOPHILA
tataccagttattcgttgagtaatagggtatactagattcgttgtaaagtttgtaacaggcataaggaagagtctccgaccatataaggtatatatattcttgatcaggatcaatagccgagtcgatctggccatgtccgtatgaacctcgagattttaggaaatataaaagctagaaaagctaaaatatttttcctatttttattaatcttctaaatttctatcgatcccttcctacaaatattctatatctatcaatatctatagatattcaaacaaaaaggattaagtttcaccatatgaggccacatctattgatttagaggcttgaatcgcagaattccaaaaaataatgtcttgctcaagaatgttaacggtgttttacgacatcatttttaatttcattaacgaaaagtacactgatctaatgtcgctggcagaaccacagcagaaaatatgtttgaaatagccagatataactgacttttatttactttcgatttctccgtcgtactgtatcttatagcgggggactggagaatatcttatattggtatttttaataatattgtggcctactgttcgatgtttcttaccagaactcaaacaaaaactatctgtaatcgagaacctccctcaaacatcagatccacgatactcatcctcaggaatgcgctggtgcgatgatggtatgcatacataatattcaaatgagatgtatatttcaaactgtttttgcatagtttaatatttataaccaagaaaattatttgttaattcaacgattaaatatattcaaaatatcgtaatttattaagattttctaatttatagctagtatttgcggaacagaatttctgttttgcgttcatttttcagacgttccattttcttatttaatcaatcgtcgctattttgacgaatataaatgcaacatgagaaaattttacctaaattttgctgctactcgatacatatatatatcgagagcagaaaatttccgatttgattaaatacaaaacgttttaggtgaagatttcgcaaataagtttaagtcgatttcattgatatattaaactaagtatagttttccaaaagtcctaccaaggactatacttcttactacgttaacttacatttgtagtaatcaccgttttaaataattatatataataaaattatttttctaactaaaaaacattacagtaaatgtttgcaagtacagcctatacgtagaattttatgcacaaaaccttagcttggtaagccatcgattttttttattttaaaggatagtgcaaattgagttcttaacctattataatatccttgaaaggttacaagttgtacaatatgggtgcctatttgtcccatccgaaaacggataaaacatccacagatcagtttaatgaattgctagccgttggagctagctctatgcaaggatggcggaacagccaagaggtaaattgagatgtgatccctttcataaaaagactgtattacgatttcgtcatgtttcaggatgcacataattctattttaaattttgacaacaacacatcgttttttgctgtgtatgatggtcacggcggagctgaggtagcgcaatattgtgctgacaagttaccacattttcttaaaaaccttgaaacctacaaaaatggacaatttgaagtggcactcaaggaagcatttttgggatttgacaaaacgctgcttgatccatcgatagtcagcatactaaaaatattggctggggaacacaacttcgtggatgccgaagcggacgattacgaagaagaagatttagctgaattgcaagaggaaagcaatttaccactaaatgaagttctggaaaaatacaaaggtcttccgcaaaaaaaagacttggatcttaagagttctgaccataaagaaaatttcaaaatgcgctctccatattttcgcgggcgccgagctgcagcattagctgctgaagctactaataaagctgtaatggacccctctgcaaagccagatggttcttccacctccgcagcagcggctgcagcagcgctatccgccgatggtgtagctaattcccgtaatccgagcaatgttgtaaatcctatggctggggctgatagcaataccactaccagtatcaacgatttatccaccaagaatgctgcattaaaagatgattctgttaatgaccaaaatgagggctcaaatggaaccgatttcaagcatacgttggtttcttctagtaataaaaaattattcgctactggttctaacgacatgaccgaattaaatcagtcctcgaaaaacgagttcacaaactcatctacaagcaaagagtttgaaaggaatataaacagctcccaagacgatgagttcacagacgatgatgcggactatgaagaaaatgataatgtcaagagtcctgatacttcatccgcagaaagctctgactgcactgaaaatgatgacgacggtgacgaagatgtaagttattaaaacactaaacatatgtagctaacttacttttttacagggtaatgaggatagtgatgaagaagagactgatgaagatcagatggctaatgataatttttgtgcaaatatgattgaggaacctggaaaagatagtggatgtactgcagttgtatgtttgttgcaaggtcgggacctttacgtggcaaacgcaggggactcgcgatgtgttatatcacgcagtggacaagccattgaaatgagcatcgaccacaagcccgaagatgacgaagaagcctcgcgcataataaaggcaggtggtcgggttacacttgatggacgcgtaaatggaggccttaatttgtctcgagcccttggagaccatgcctataaaacgaacgtaaccctaccagctgaggaacaaatgatatctgccctacctgacataaagaagctaattatcacgccagaggacgagtttatggtactggcctgtgatggtatatggaattatatgtctagtgaggaagttgtagaatttgtacgttgcagactaaaagataacaaaaaattgtcaacgatttgtgaagaggtaaagatatctactgataacacaaatatcttaataaccatgaaaaattttagctttttgataactgtttagctccgaatacaatgggtgatgggactggatgcgacaacatgactgccgtaatcgtccagtttaagaaaaagctgcaagagctgcagtccaccattcctccaaatcaaactgaagataagttacttaagacatctgaaaatgtttcacatagtttaaatgatcaaagtgcgtctaagcgatgcgcatcacaaaatgctgatgctgacgacgaaattcttgaaaaaaacaactctaaacgattaaaaactgatctggaacaagaaaacattaaagacagaaccccatcaccgagcaatcagaatgaagaccctacccagaaggccattaaggaagttactataattgtttcttcatcgtaatttacttgacattcggaagtgcactcatcttaattcacatttaatcgtaacatgcattttaattgtagacatttaagcttgtagatcgaagtgcgaaaaactgtgccacttttcaaaatgatattgatgacaggtttatgcaaacaaatattctttaataagaacatatattaactatattttaagaaatatttatatttctttctcgtaaattgctaaataaagtcgcaatgaaataaatcttttatttatagagcaaaaatgttattataaacttcttttattaaaaaaaatatatatacatatgtatatgttttttaccgaatacctttagttgcaaagactcggctcaactcggtcttggatccagcgaccttttttttttttgttttcaactaagctgtaattttgaaacgatggaactaaaaaactaagtttcctgtttctgcgttggcgttaattaggccctaaagccgcaatgtttctgaactaaatgcattaaaaaccttaagctagaagctacaaatctgtttaaccgtgctcttatatttttttttttgtttgacgttatggataattaaggtgcagaataccacctttatgtggagcataatatgtataatatttaatatattctaagaaaatatagtcttgcgttgttttttctgttgtaccgcctaacgaagaaaatttaaaccaagaaaaacatgtaaggtctgtgggcctaccataaaattctttggcaaaccgaaagaaatttaaaagactaaataaaaaaacatttgttaaaagtgtgaccctggcaatttttgacggtttgagtgagtgacaatattttaaaaaacaatcttgagatgcatatactagatacatacatataataaagtgttatgccaatttcgataaacagaattcatgtatttttgaataataaaaaaactacaaaaattttatttatttatgttatgttcagtcaatatgttttgcccttttaagtttt

SEQ ID NO: 5081 - DNA, 2268 bp, DROSOPHILA
ccgatttgattaaatacaaaacgttttaggtgaagatttcgcaaataagtttaagtcgatttcattgatatattaaactaagtatagttttccaaaagtcctaccaaggactatacttcttactacgttaacttacatttgtagtaatcaccgttttaaataattatatataataaaattatttttctaactaaaaaacattacagtaaatgtttgcaagtacagcctatacgtagaattttatgcacaaaaccttagcttggttacaagttgtacaatatgggtgcctatttgtcccatccgaaaacggataaaacatccacagatcagtttaatgaattgctagccgttggagctagctctatgcaaggatggcggaacagccaagaggatgcacataattctattttaaattttgacaacaacacatcgttttttgctgtgtatgatggtcacggcggagctgaggtagcgcaatattgtgctgacaagttaccacattttcttaaaaaccttgaaacctacaaaaatggacaatttgaagtggcactcaaggaagcatttttgggatttgacaaaacgctgcttgatccatcgatagtcagcatactaaaaatattggctggggaacacaacttcgtggatgccgaagcggacgattacgaagaagaagatttagctgaattgcaagaggaaagcaatttaccactaaatgaagttctggaaaaatacaaaggtcttccgcaaaaaaaagacttggatcttaagagttctgaccataaagaaaatttcaaaatgcgctctccatattttcgcgggcgccgagctgcagcattagctgctgaagctactaataaagctgtaatggacccctctgcaaagccagatggttcttccacctccgcagcagcggctgcagcagcgctatccgccgatggtgtagctaattcccgtaatccgagcaatgttgtaaatcctatggctggggctgatagcaataccactaccagtatcaacgatttatccaccaagaatgctgcattaaaagatgattctgttaatgaccaaaatgagggctcaaatggaaccgatttcaagcatacgttggtttcttctagtaataaaaaattattcgctactggttctaacgacatgaccgaattaaatcagtcctcgaaaaacgagttcacaaactcatctacaagcaaagagtttgaaaggaatataaacagctcccaagacgatgagttcacagacgatgatgcggactatgaagaaaatgataatgtcaagagtcctgatacttcatccgcagaaagctctgactgcactgaaaatgatgacgacggtgacgaagatggtaatgaggatagtgatgaagaagagactgatgaagatcagatggctaatgataatttttgtgcaaatatgattgaggaacctggaaaagatagtggatgtactgcagttgtatgtttgttgcaaggtcgggacctttacgtggcaaacgcaggggactcgcgatgtgttatatcacgcagtggacaagccattgaaatgagcatcgaccacaagcccgaagatgacgaagaagcctcgcgcataataaaggcaggtggtcgggttacacttgatggacgcgtaaatggaggccttaatttgtctcgagcccttggagaccatgcctataaaacgaacgtaaccctaccagctgaggaacaaatgatatctgccctacctgacataaagaagctaattatcacgccagaggacgagtttatggtactggcctgtgatggtatatggaattatatgtctagtgaggaagttgtagaatttgtacgttgcagactaaaagataacaaaaaattgtcaacgatttgtgaagagctttttgataactgtttagctccgaatacaatgggtgatgggactggatgcgacaacatgactgccgtaatcgtccagtttaagaaaaagctgcaagagctgcagtccaccattcctccaaatcaaactgaagataagttacttaagacatctgaaaatgtttcacatagtttaaatgatcaaagtgcgtctaagcgatgcgcatcacaaaatgctgatgctgacgacgaaattcttgaaaaaaacaactctaaacgattaaaaactgatctggaacaagaaaacattaaagacagaaccccatcaccgagcaatcagaatgaagaccctacccagaaggccattaaggaagttactataattgtttcttcatcgtaa

SEQ ID NO: 5082 - protein, 662 aa, DROSOPHILA
MGAYLSHPKTDKTSTDQFNELLAVGASSMQGWRNSQEDAHNSILNFDNNTSFFAVYDGHGGAEVAQYCADKLPHFLKNLETYKNGQFEVALKEAFLGFDKTLLDPSIVSILKILAGEHNFVDAEADDYEEEDLAELQEESNLPLNEVLEKYKGLPQKKDLDLKSSDHKENFKMRSPYFRGRRAAALAAEATNKAVMDPSAKPDGSSTSAAAAAAALSADGVANSRNPSNVVNPMAGADSNTTTSINDLSTKNAALKDDSVNDQNEGSNGTDFKHTLVSSSNKKLFATGSNDMTELNQSSKNEFTNSSTSKEFERNINSSQDDEFTDDDADYEENDNVKSPDTSSAESSDCTENDDDGDEDGNEDSDEEETDEDQMANDNFCANMIEEPGKDSGCTAVVCLLQGRDLYVANAGDSRCVISRSGQAIEMSIDHKPEDDEEASRIIKAGGRVTLDGRVNGGLNLSRALGDHAYKTNVTLPAEEQMISALPDIKKLIITPEDEFMVLACDGIWNYMSSEEVVEFVRCRLKDNKKLSTICEELFDNCLAPNTMGDGTGCDNMTAVIVQFKKKLQELQSTIPPNQTEDKLLKTSENVSHSLNDQSASKRCASQNADADDEILEKNNSKRLKTDLEQENIKDRTPSPSNQNEDPTQKAIKEVTIIVSSS

SEQ ID NO: 5083 - DNA, 2532 bp, DROSOPHILA
ccgaccgcctaatccatgagcaggagaaaaggccacttccattgatttactttccatttgaccccgcatattgcgaaaactcgctttctatagctcttcggcccgttccagaactgcccaggaaagttccgagtcgcaagctgctcgagtgccctctgccccggacggcggcaactacaatgaggacgatgaggacagcaatgggtatgacaacgcggacgtaaacaaggagcgcgtcggccacggaccctggaagaaagttgtcccagccgaggaggtaatgcagattccggtgcccgtggaggtggaaaagcactcgtccaagacctacgtttcacccgcgctacgatacagcgtaagtaagaagagcgagacgatccagatcgagtttaatcaacttctctgcagcagcaggccggaagtggactgggaggcggccctactgggggggcattgcgtccacgacgcgccgcccccgacatcaccaataccgagtttttcccaaccttaagtgcggcgcgtccggaggaacagcgcaagaagaaaaacgaacccgccttcgaagaagtccgtcacggaagccgtttccagcgtgttcaggagtccacggctgccccggtggcggcctccaaccgattccagtcgcttgacgacgaagcaagctaggtcagcccacgccaacggtgctgttgctggccacttgaaccgctatctaccacagtgtccgctgccgagctcaagccatccaaaggttctatgccagcacatgcagattttctaggctttttgattcatataaaccaccactgctactcttaccctaaaccacaaactactattgttcatttcgttttgcattttgaaaaatggattaatgtaatacaatacgaataatacccatgcgttgaaatccgtttataaacgttacttttttatacgtttccgtttctcacttttccatggcgaggtcttccgggcagctgtccaagtagctgcaaaatcagtaagaaagatcatctctggctgaaacagtgcgtactgacttttcattgtacggcctctccggcgtgttgtggtacgagatcagcagctccttggccagcatcttgtctgggaagttgcgaatcaggtacagccagcactgaatggttctagacataggggcaatagtgagttattacatctggccatcaccccacaccctcatactcattctgttccattaatatggtttgttgctcgcgatcatagtagtccgggtagtcttctagtatgtccagtttggagagcatggtctcgtccacttcgtagacttcgccttctatgtggttcccctcacccgggcgggcgagcagaaatgggatgttgtagcgggttccgacaaccaggggaaacttcgtttccgttttcccccttccaaggaatcgggcttggccgttctcctttttcgtcagccagtggtgattgggctcaccgcgcttcaacgtgccatacacaaagacccttgccgccattctcagcttttcagccattgcgcttcccgccgccaggcttatcagtttcaagcggtatcgtgctatcaaatccgacctgtagattgcgcagtcgacataacccgtccgctcttcttcttgctgccattcgcaccgaatctagcctccgtacaccgcgagaaactgaagccctcggcactgggctgtggaaaattaccagggactgctgtccagcatctttacttctataatagaacgaggggcattttattttattttaaattgcttcagtttatttgctttgtttgtcgaaaactatcaaattacagactacgtttgctaaaacctaaataatgcgtatggtacatatgtatcagtttatatcgtttgcccatatatacgggtatatatcgatcagtacatctgcgtctgcaagtacggtcttaaaatgcaactacggtaacataagattagtggccaggctatccagagaacatccaaacaaacgggcgacaccacaacccacgttattagttctgggcctcgtaggtgaggtcgtcctgggccggatgcttgtgggtgcggcgatggcgcataatgtatggatgggtggttgagttctcgtagctggacaagtagcgcagactaagtaggttctccgggtacttctgcagcaggtacacccagcatggaacggttctggaaaggaaattgtgacccatcacaccacattgctgaaatgacgtcagatccgactaatgctcacccttctccaacgccaatgttcatatcgtgcatctcgcgagtgtagatctcctcgcaatcctccaggttgtccagggaattcagcattcgatcgtccacctcgtagatctcccctgttacgtaatatcccactccgggcttgttcagcaggaagggaatgttgtagcgggtggcgatcactagcggcagcttttgggtggtggtcgccttgcaccagaacttagcgaagccgttgccagagctggccaggattgagttgctgggctgtccgtac

SEQ ID NO: 5084 - DNA, 489 bp, DROSOPHILA
atggctgaaaagctgagaatggcggcaagggtctttgtgtatggcacgttgaagcgcggtgagcccaatcaccactggctgacgaaaaaggagaacggccaagcccgattccttggaagggggaaaacggaaacgaagtttcccctggttgtcggaacccgctacaacatcccatttctgctcgcccgcccgggtgaggggaaccacatagaaggcgaagtctacgaagtggacgagaccatgctctccaaactggacatactagaagactacccggactactatgatcgcgagcaacaaaccatattaatggaacagaatgagtatgagggtgtgggaaccattcagtgctggctgtacctgattcgcaacttcccagacaagatgctggccaaggagctgctgatctcgtaccacaacacgccggagaggccgtacaatgaaaagtcagtacgcactgtttcagccagagatgatctttcttactga

SEQ ID NO: 5085 - protein, 162 aa, DROSOPHILA
MAEKLRMAARVFVYGTLKRGEPNHHWLTKKENGQARFLGRGKTETKFPLVVGTRYNIPFLLARPGEGNHIEGEVYEVDETMLSKLDILEDYPDYYDREQQTILMEQNEYEGVGTIQCWLYLIRNFPDKMLAKELLISYHNTPERPYNEKSVRTVSARDDLSY

SEQ ID NO: 5086 - DNA, 3963 bp, DROSOPHILA
ttattatgatgaacaaattaggagtacaaaaaatagcctgatgcaaggatggggagaaaaaagaccttgaagttcaaaagaatttgttgtatcaaatcctcaataagaaaactacttaaaattaaaagcgtgtttcaaattaattgtagaatatttcgtaaaatgaaattgcaaacttttttagcacgaaattacatgtatttaattctttggctaatacgtcagttaaaaaaggctacattttgatgatactcacaaatgtaatttttgcattctacacaggtgcaattaaaaaattatggtttttatgagttttagagggaagaaaatatgtcaatatgagaagtaagttaatgagccttcaagtactttagtacataatgtaatttaattttagaaatcctacggctttatattcaattgtaaagtattttaaaattcctgacgatttgtagtaattgttttgttcttagcttttttgcattctcctccgttactccgttactcgtatagtaaaaggtatagtatatacaatagtattgtagattcgttgagaagtatgttacaggcagaaggaagcttttccgaccatataaagtatataattgagtatttagcttaggattattaataaaacatgtattttatttaacaaactggctttacaatattttgtggaagaacaccgatctatttagttgtaggtctcaaactgaaaactcctaattttgacttatttaaagatcatacctcggttttgagccttagaggtttgtatgagtgattttctagaatgatctttgtacttcgttacaataaattgttttcttctactctaatatagttggaatcgagtaatccctagataagagttaggcttaaaatagtaaattacaaatattgaattggacattacaattgcatattctcagcttgctgtattgtaaaaattaattattaactcgaagagattcggcaattaatacgtccctattcgcattgtttttacttggggaaattttattgaaaaactagattctctgttacaatcagatatgagaacaagttattgcaccagcacatctctcggccagctcaattcaattaaatagctaagcacttgttgcgaattcatgcttggagtgtttacgtaagatttgtaaaaataactaaactggattctccacattcttgcgtagctgtgtgattctactgtcacaactctccgtcgacgatttctagagccatcttcttgcggaagtacaacatttccgactgggtaaaggtaattggcacatcacacgttatatactcggcgaacatgcagctgaagataccgcaatcgctgccatctaactgtcgtggtatattctgcacgctctcaataacaaaatcgctggtatcaaactgctttttgggcttgaatattgactcttcgcgtagatatttctctagagcgtccagcactggtcggtttggctttccctttgagtcataataccggattgtcttgttccgcaagtgtatgatggccatgcaccagtggacgccgttgcagtgcactggtaccgggattatgtccttgctgaacaagtccactttgcgagtccagcgcttaatgcctgcatgcccagcttgcaggaggcggggcacgaagaatgtgtttatggcgtaagtggcgggaagtacgccagatctcttctccgaccgttctgtcagcaaggacatgtaaaagttaatgacctcgtcgttaagccatttcccattaataaacgtgcatatgtcttcggtagttatgtgtaggttaaatttaaaaataatttcctaatataagattttaaagcgcaagcaccacaacgttttcaatgggtacgaaagacatcaatatattcgttgccataccgtcgatttatcatcctgtgtaatttcgttaaagcgatcgtggtgctcctctgttaacggaatgagcttggtcactttcttcacatttggcttgtccaagggcccgagtacaaaaatgggcttgtgggcgatacaagactggaatatgttttccactacttttcgttcataggcacggagttcatctatgttctttatagcactgaaattcgaaaaaagcctctgctcttcagctaatctaagacgatgtttggatttctcttcacagtccgccgctcttgctttaaattgctcggcgaagtcatcatttaagttgacgcagctggcaaaacgacggtgcaaggattctgttctggtgagtctggtaggttgaggggttaacggctgtggtgcgtcactaattggtgataaaatcagcattttgcattattgccactgattcggatatggatggatataaaaaatttatttaccttttgttggtttcactgactttcttgacctccgagttatcagtaaccggttcggcgtagtgactgcccacggaattactttgggctgcggtacggataaggtagatatactgctcttggtccatgcgctccatttcctgggatagaatgcttctgtcaactagtgccggtggtctgcgcaccgtatagctggagtgcccacttacgcgggagttggcgaagccattctggcttagacgcacagcatccgagtaagtcaagggcctgaaagatggcccggcgttggcaactctctgtgacgactcctcatcgtctgagaggaggtcaaatgtggtgggtatgtagggggcttcattgcgcacctggtgctgcgtgtatactggcggattaaatattgagatccgctctgagctctgtggctgatcccgctcgcccatggacttcttgtaaatcaggtcctcggcagcctcattcgttatgaagcggggatagctgttgtccacacgccgatacttgttcaaacgtgggttctcttctcggttgctgaaagtagagaaaacataagtggaaatctctacatgcgagtagcaatggatatgtctaatatttgtaattatttcactctactcgtcaagtatgtatttttcctaagcgcttaggcttacttagttcgattcagataaagaattcgtattctaataaataaaatcacctacatttagtagaataattgataaatggttaaacattttaaagtgtttaaaacggtctacaattataatattgtcctctcctctctagtttttgtaaaagctaaattctgattttttgccggaaactatttccttatttgggcataagaatagaatgaaatcgcaaattattcccaatgtattggtattaaaactaaaattttacgctgtgatagcattcaataaaacagcacaaaagagcagttacatgtttaaaagcgcacaaaaaaacatattttcataccaaagtcgtttcctgatttaaaattacatttgtaacggttttgttgaaaaatgttaaaattaaatcccaaaaataaacgcatatgcgcaaataggtattaaacattattattatttggagaaaagattgttcgaattgtattttaactaaatcaatttataatatttaaatattgataaagagtaaaaagtaatttgatctgtagaaatacactttataagtaaaggccatcaatagagatcctatacccggcaacgttcagtcctaattctaccgcgaagaaaatgagcggcaattttaatatattttcacctcttcattccgccgccattttgtattgccaacatttttgtgagagtaaaatttagaccactcctctcgcgtgacctatcatttttgtcccaataaaatctatccctcttcatcattcgtgttttggctttcgagtttgcggtaatataggagagattgaatgagatgaagttattgtatatgcaaccatccttttgcgccgccattttgtgctgcataagacgttgcggtgaaattcgttctgatttccgtcaactaataattaacttttttgaaataa

SEQ ID NO: 5087 - DNA, 1773 bp, DROSOPHILA
ctactcgcatgtagagatttccacttatgttttctctactttcagcaaccgagaagagaacccacgtttgaacaagtatcggcgtgtggacaacagctatccccgcttcataacgaatgaggctgccgaggacctgatttacaagaagtccatgggcgagcgggatcagccacagagctcagagcggatctcaatatttaatccgccagtatacacgcagcaccaggtgcgcaatgaagccccctacatacccaccacatttgacctcctctcagacgatgaggagtcgtcacagagagttgccaacgccgggccatctttcaggcccttgacttactcggatgctgtgcgtctaagccagaatggcttcgccaactcccgcgtaagtgggcactccagctatacggtgcgcagaccaccggcactagttgacagaagcattctatcccaggaaatggagcgcatggaccaagagcagtatatctaccttatccgtaccgcagcccaaagtaattccgtgggcagtcactacgccgaaccggttactgataactcggaggtcaagaaagtcagtgaaaccaacaaaagactcaccagaacagaatccttgcaccgtcgttttgccagctgcgtcaacttaaatgatgacttcgccgagcaatttaaagcaagagcggcggactgtgaagagaaatccaaacatcgtcttagattagctgaagagcagaggcttttttcgaatttcagtgctataaagaacatagatgaactccgtgcctatgaacgaaaagtagtggaaaacatattccagtcttgtatcgcccacaagcccatttttgtactcgggcccttggacaagccaaatgtgaagaaagtgaccaagctcattccgttaacagaggagcaccacgatcgctttaacgaaattacacaggatgataaatcgacggaaattatttttaaatttaacctacacataactaccgaagacatatgcacgtttattaatgggaaatggcttaacgacgaggtcattaacttttacatgtccttgctgacagaacggtcggagaagagatctggcgtacttcccgccacttacgccataaacacattcttcgtgccccgcctcctgcaagctgggcatgcaggcattaagcgctggactcgcaaagtggacttgttcagcaaggacataatcccggtaccagtgcactgcaacggcgtccactggtgcatggccatcatacacttgcggaacaagacaatccggtattatgactcaaagggaaagccaaaccgaccagtgctggacgctctagagaaatatctacgcgaagagtcaatattcaagcccaaaaagcagtttgataccagcgattttgttattgagagcgtgcagaatataccacgacagttagatggcagcgattgcggtatcttcagctgcatgttcgccgagtatataacgtgtgatgtgccaattacctttacccagtcggaaatgttgtacttccgcaagaagatggctctagaaatcgtcgacggagagttgtgacagtagaatcacacagctacgcaagaatgtggagaatccagtttagttatttttacaaatcttacgtaaacactccaagcatgaattcgcaacaagtgcttagctatttaattgaattgagctggccgagagatgtgctggtgcaataacttgttctcatatctgattgtaacagagaatctagtttttcaataaaatttccccaagtaaaaaca

SEQ ID NO: 5088 - protein, 468 aa, DROSOPHILA
MGERDQPQSSERISIFNPPVYTQHQVRNEAPYIPTTFDLLSDDEESSQRVANAGPSFRPLTYSDAVRLSQNGFANSRVSGHSSYTVRRPPALVDRSILSQEMERMDQEQYIYLIRTAAQSNSVGSHYAEPVTDNSEVKKVSETNKRLTRTESLHRRFASCVNLNDDFAEQFKARAADCEEKSKHRLRLAEEQRLFSNFSAIKNIDELRAYERKVVENIFQSCIAHKPIFVLGPLDKPNVKKVTKLIPLTEEHHDRFNEITQDDKSTEIIFKFNLHITTEDICTFINGKWLNDEVINFYMSLLTERSEKRSGVLPATYAINTFFVPRLLQAGHAGIKRWTRKVDLFSKDIIPVPVHCNGVHWCMAIIHLRNKTIRYYDSKGKPNRPVLDALEKYLREESIFKPKKQFDTSDFVIESVQNIPRQLDGSDCGIFSCMFAEYITCDVPITFTQSEMLYFRKKMALEIVDGEL

SEQ ID NO: 5089 - DNA, 6223 bp, DROSOPHILA
ggagcacactcaggagaccacaatcctgcgccacgggaaggactacgggaagagcttgaatgtggagggattcaagcaaactatggccctgtttttcaatgccagcacaagtgattccaagagcaggagagcgggctgtgagttgcttttgaaggaagtactccgccagctgcaggagatcctagcgtggtttcaacggcagcgcctgctgcatttctatgccagttctttgctcatctgctacgactattcaagactggctgatcccccaaagccgttgataaacggctaccaccaaaatgatgatgaccccgccacttgggtgcgggtcaaaatgatcgactttgctcatgtttacccggcagaacagggcttgccggacgagaactacatgttcggtctccagagcctgatagaagtcgtccaatcaatactccaccgatgatgatcaaagcggaccaagaccactcaaagatgtagtagaagttccaatctcattgcaatgagacacttttgtattatcgtctaagccaaatgattagtccacagtagatacccatccgtttaaggaacacgggcggagctactctaaacgtagaataaaaccagattttttagaaattgtgtatgtacttcaaatcgaatttgtgaatgggaatgagaggtgcgagatgggactatgatgatgactcattgcgaggcaattatttcccatgaaatgattccacggatatgagaaatggatgcgcattggcatgattcgtctttctgtaatattacttcatatacaaacaaacaataaatctatcttatctgtttaaagataatagaagtcgtcatgcgattacgattagagattattcatgtaataattgaagatccaatgattttctgtattttacggcaggaaagatcaattaagaacaaatggtttgaatagtttggatttatatattggtatcttagagaatcctaccactagcagataagctattacaatttatagcgtgtagtccaactcgtaccgctcgtactggttcttgggatcattagtaatccgcggatagccggcgatcagagcgtcctgacctccaatgtacagcgaattgtagatcttccagtaaacgtctctcactttgcgagcggggtggaaaagtccctgtagcgtatattgcaggatcttaatgggtcccagggacacccttaaaccgtccacggaatccatgaaggcttgcacgagatggggggacgtctcaaaaatgttgggccacacgtagttgagaagatgggtcaaagcatcctcgcagccgaaaccatacactcccagtgacatatgcttgatggcagagcaggcggtttgccggtggactagatctcggtccatgagggcatcttccagaagtggacagacggcgtatatgtaatccttgcccatttctccgatgtattcaaacaggaaagagagtgacttcaacacaccattctgaacgttgagctcgggcactcggtactcgttcatcagagcagggagcacggtaaaaggtcgacaagactcggccacgatggcaatggccactgtggtgcacacgcggttctgacgctcctgaaccttgagattattcagtagtgtagcaagcacgtcgtggggaccaatggctttggcaatgtagccaaaggtgttcacagtggctctcctaatcgccttcttgtgggccttgagcaactccagtagctcaaaacaaattcgcatccactcgcgagcggacacatactcaggtccgcgatctgcaattcgtcccaccaggtcaatgcagttctcttgcaccttctcgtgacgattctttaggatgggtgtaagacgaggcagcaaatccttgataggaggtgtcatcttggtcattccaatcacgtttacgatggccttcagggcacccaggatgctacccaacacttcgggatactcctcacccaagtactcgtaaagcacaacgcccaagtgtcccatcagcttctcctcctggcacgttttcatcactaccgctattctcgagatcagatccgccgcctgctgacgaactttcgcggatttgttgttcaaccgccatagaatcgttccacaaatctggggcaaatagggcttaactcgcttgcccagctgattcacgatggtgccgaatccattcaacatcaccacatcctcagtggtctgctcttggaaggcatagagaataccatcgataagctgctcctccaagcgcgaatcgatatctgctgctcctaggttgcccatgatcttctccactgtttccatcaccatcttcctgtactgctcgttctcatccttcaggtcatccaccacacgattgataatctcagaggcgcccaccttgttggcaatctccacggtggtgtccaccagctggcggtagttacgcctgtccagggccatgcggtgattccagaagaacttgaaaaagtgcggaagaatctcctctttgatgtactgcggttccacaccatcggtggcgcaacattgcttcaccacctttagtacaatctttttcatttcctcatctggagactggaactcgcggataagaatcaacatcacttcacgcgtatagtaattagcgtactcggcgtccatcaggggaatcaaatagccaatagccttgaggaaggcggccagacctttgccgcgatgcgtgcgaatacccttccaaagcggctttagcacggaatcgaaggattcaatgccgtacggagtggctgcctctgccaaggcagcaatggccaaggctgtaattgtgcgtaccttctgctgctcgtccactagtccgtgctcgataatctccacgagagctttaagatgcggcaatatagcacatcccatcaggatggcaatttgctggacaattttgatgccagtgtgccgcgcttgccaggatttcttcgacttgcaaacggcttttaggaagggcagtaaagagggaattcccaaagctgaagcgaccacggcaaaggcacgcgctgtggtgtttcgtacatactcgtcgatgttgtcaatgtccggtctcatagtagagatcatggtggccaaaccagcggccttggccaggttggatatgatttctctgccttctatgcgagcgtagtgatcttcatcaatcagcagcggttctatgaccaccaaaatcttgtgcacatagggccgcaccaaatcgtccagtttgtataaaacacgatcaattaccttcactaataaatgacgctcttggtcctccaatgtgggcgacataagcaacggaagaatctggttaaacaaaggtcctgctccgaattcccttgctttgtccgtaatctgcctcaaggccgactttctcattggtggcgagccgttcttgatggtcagcagtagcttcattatcttgcgctccttgagttcctcaggcgacagagagtcttcgttcacgtctacaagtagcttgtcaaaatattgcgcatcctctggtttcatgaaggggagattttgcccctttggttggttatccatgaatttggcattcttgtcctccacttggatgaagaaaccggctggggtgccagcaattggcgtaggcgtggccatcagctttctgccgggagtgcgcagtggaacatagccagctggtggcggtagaattttgtaaccaggcggaaagatttggtccaactcttcgtctgtgtatggcctgtttctctcgtcgatttccttttcccagcgataggcttgcaattgctctggtgtcatcgcagccagagctcccgcagagggcgtggccatggccattgccttgactccgataggagtactgcctccgggcgtcagcatgggagtagcatgtcccggagtcacatgtggcgtcatactgggagtcatatttggagtcatggcactcgcatttgtaggagtaatagccggcgtagcattcgagggcgtttcatcccaacgagagcgacgtttggaggccccgggggtggactcgattgatatgctctccgcgccgcctccactgcctgtgcgatctggctttggagtctcggcccatccgctgtgtccgggagtctcacgctctgttttcggggtttcgtcccagcgatttcgacgggccgacttctcgtgtccaggagtctcgtgtcctggggtcacagcgtgggccggagtggcgtcccagatgcgggtgcccagtcccggcgtcgctcctggcgtctcgctgcccttgtgacccggagtctcatcccaacggtggtctccaggagttttctacggagtaaattaatattttattatatcatccattatacttcccagaatactcacatcttcccaagttggggtagctgcgctgcttggcgtggccatcttggccgggatgaagctgtcgctgaccgtctggtcccatctgcctcgctttctgccgccgtcctttggtgcaggcaggtccccatttgaagttgacgacgatgtaacggtctttaccagagttccctccttggttttctccaggattcttcggcggagctcagattcctcgcccttcagcatctgctcccgcatgatgtccgtgtaggtgcgagagcccacatctggggttttcccgccatcggcaaagggatccgctcgctctggggaaatgatgatgtgacgtctcttctgcctgtactcatcctcccgatcggcaatcgttggacgcctgcggtctgccatgggatccacatcctccttgccctgggtcacgtcctttagcacggaggccggcgccgtgtacgtggtgcgtttctggggcacggggaagccgtcgtcctcatcctcatcgacttcctcggcgtcgttggccgcaatggaggtgttgtacccctcgtaacgccccttccccttggcggcatcatcgtcgtacaagtcgctgtcgaagaatcctccgctgtccagcaatcccacgccggctgctgcggcagtggtcttggccaactccgtcttcttctcctggatcacgctgatctgtgcctcgatatctgtgagtaaaaataggtaaagatacttgattttcatagtagaccaccagccagaaaaaccggtcgatccccatttgtgtgtgcggttccttttggtgcgcagatagtatatttacgttttggcaatggcggtggtttgccaccgtgagtgtttatatcgcttaccttcatgtgttcgcggaatattttccatttttataaaaactttaccaagagaagagcgtacatgtaaaaccagtgttaccagatgataatagcgcctggtctaagtgtgaccaaatacatatcatatcgtactagcagctatcgggaaacattcgatttcttaaatcttctcattccacccgatattgatgatgatattttggacaacttttattacaaagttcgatacaaaatataaatgcattatttgtttattattttttaagcaaataataatcgatagctggcaggccagctgagccgtctgccgattgctcatcactaacgaacaagttgcggcacgtgtttacttttgttttgaccgcgagaatgttggccaaaaaacagaaaatgcaggagacggacacggagcaagaggccacgccacatacgatacaggcgcgcctcgtttcggacacgggcgaggaagcgggcccgccaatcgacctgccggcaggaatcactacccagcaattgggtctgatttgcaacgcgctgctgaaaaacgaggaagccactccatatttgtttttcgtgggcgaggatgagatcaagaagagcctggaggacacgttggacttggcgtcagtggacaccgaaaacgtgatcgatattgtgtatcagccacaggcggttttcaaagtgcgcccagtgacaagatgcacgagttccatgccgggacacgccgaggctgtggtttcgctgaatttcagcccggatggtgctcatctcgccagtggaagtggcgacaccacagtgcgattgtgggatcttaacacagagacaccgcacttcacctgcacaggtcataagcagtgggttctgtgcgtatcctgggctccggatggcaaacggttggccagcggttgcaaagcgggctctataatcatctgggacccggagacgggtcagcagaaggggcgacccttgagtgggcacaagaaacacatcaactgcctcgcctggg

SEQ ID NO: 5090 - DNA, 4050 bp, DROSOPHILA
atgaaggtaagcgatataaacactcacggtggcaaaccaccgccattgccaaaacatatcgaggcacagatcagcgtgatccaggagaagaagacggagttggccaagaccactgccgcagcagccggcgtgggattgctggacagcggaggattcttcgacagcgacttgtacgacgatgatgccgccaaggggaaggggcgttacgaggggtacaacacctccattgcggccaacgacgccgaggaagtcgatgaggatgaggacgacggcttccccgtgccccagaaacgcaccacgtacacggcgccggcctccgtgctaaaggacgtgacccagggcaaggaggatgtggatcccatggcagaccgcaggcgtccaacgattgccgatcgggaggatgagtacaggcagaagagacgtcacatcatcatttccccagagcgagcggatccctttgccgatggcgggaaaaccccagatgtgggctctcgcacctacacggacatcatgcgggagcagatgctgaagggcgaggaatctgagctccgccgaagaatcctggagaaaaccaaggagggaactctggtaaagaccgttacatcgtcgtcaacttcaaatggggacctgcctgcaccaaaggacggcggcagaaagcgaggcagatgggaccagacggtcagcgacagcttcatcccggccaagatggccacgccaagcagcgcagctaccccaacttgggaagataaaactcctggagaccaccgttgggatgagactccgggtcacaagggcagcgagacgccaggagcgacgccgggactgggcacccgcatctgggacgccactccggcccacgctgtgaccccaggacacgagactcctggacacgagaagtcggcccgtcgaaatcgctgggacgaaaccccgaaaacagagcgtgagactcccggacacagcggatgggccgagactccaaagccagatcgcacaggcagtggaggcggcgcggagagcatatcaatcgagtccacccccggggcctccaaacgtcgctctcgttgggatgaaacgccctcgaatgctacgccggctattactcctacaaatgcgagtgccatgactccaaatatgactcccagtatgacgccacatgtgactccgggacatgctactcccatgctgacgcccggaggcagtactcctatcggagtcaaggcaatggccatggccacgccctctgcgggagctctggctgcgatgacaccagagcaattgcaagcctatcgctgggaaaaggaaatcgacgagagaaacaggccatacacagacgaagagttggaccaaatctttccgcctggttacaaaattctaccgccaccagctggctatgttccactgcgcactcccggcagaaagctgatggccacgcctacgccaattgctggcaccccagccggtttcttcatccaagtggaggacaagaatgccaaattcatggataaccaaccaaaggggcaaaatctccccttcatgaaaccagaggatgcgcaatattttgacaagctacttgtagacgtgaacgaagactctctgtcgcctgaggaactcaaggagcgcaagataatgaagctactgctgaccatcaagaacggctcgccaccaatgagaaagtcggccttgaggcagattacggacaaagcaagggaattcggagcaggacctttgtttaaccagattcttccgttgcttatgtcgcccacattggaggaccaagagcgtcatttattagtgaaggtaattgatcgtgttttatacaaactggacgatttggtgcggccctatgtgcacaagattttggtggtcatagaaccgctgctgattgatgaagatcactacgctcgcatagaaggcagagaaatcatatccaacctggccaaggccgctggtttggccaccatgatctctactatgagaccggacattgacaacatcgacgagtatgtacgaaacaccacagcgcgtgcctttgccgtggtcgcttcagctttgggaattccctctttactgcccttcctaaaagccgtttgcaagtcgaagaaatcctggcaagcgcggcacactggcatcaaaattgtccagcaaattgccatcctgatgggatgtgctatattgccgcatcttaaagctctcgtggagattatcgagcacggactagtggacgagcagcagaaggtacgcacaattacagccttggccattgctgccttggcagaggcagccactccgtacggcattgaatccttcgattccgtgctaaagccgctttggaagggtattcgcacgcatcgcggcaaaggtctggccgccttcctcaaggctattggctatttgattcccctgatggacgccgagtacgctaattactatacgcgtgaagtgatgttgattcttatccgcgagttccagtctccagatgaggaaatgaaaaagattgtactaaaggtggtgaagcaatgttgcgccaccgatggtgtggaaccgcagtacatcaaagaggagattcttccgcactttttcaagttcttctggaatcaccgcatggccctggacaggcgtaactaccgccagctggtggacaccaccgtggagattgccaacaaggtgggcgcctctgagattatcaatcgtgtggtggatgacctgaaggatgagaacgagcagtacaggaagatggtgatggaaacagtggagaagatcatgggcaacctaggagcagcagatatcgattcgcgcttggaggagcagcttatcgatggtattctctatgccttccaagagcagaccactgaggatgtggtgatgttgaatggattcggcaccatcgtgaatcagctgggcaagcgagttaagccctatttgccccagatttgtggaacgattctatggcggttgaacaacaaatccgcgaaagttcgtcagcaggcggcggatctgatctcgagaatagcggtagtgatgaaaacgtgccaggaggagaagctgatgggacacttgggcgttgtgctttacgagtacttgggtgaggagtatcccgaagtgttgggtagcatcctgggtgccctgaaggccatcgtaaacgtgattggaatgaccaagatgacacctcctatcaaggatttgctgcctcgtcttacacccatcctaaagaatcgtcacgagaaggtgcaagagaactgcattgacctggtgggacgaattgcagatcgcggacctgagtatgtgtccgctcgcgagtggatgcgaatttgttttgagctactggagttgctcaaggcccacaagaaggcgattaggagagccactgtgaacacctttggctacattgccaaagccattggtccccacgacgtgcttgctacactactgaataatctcaaggttcaggagcgtcagaaccgcgtgtgcaccacagtggccattgccatcgtggccgagtcttgtcgaccttttaccgtgctccctgctctgatgaacgagtaccgagtgcccgagctcaacgttcagaatggtgtgttgaagtcactctctttcctgtttgaatacatcggagaaatgggcaaggattacatatacgccgtctgtccacttctggaagatgccctcatggaccgagatctagtccaccggcaaaccgcctgctctgccatcaagcatatgtcactgggagtgtatggtttcggctgcgaggatgctttgacccatcttctcaactacgtgtggcccaacatttttgagacgtccccccatctcgtgcaagccttcatggattccgtggacggtttaagggtgtccctgggacccattaagatcctgcaatatacgctacagggacttttccaccccgctcgcaaagtgagagacgtttactggaagatctacaattcgctgtacattggaggtcaggacgctctgatcgccggctatccgcggattactaatgatcccaagaaccagtacgagcggtacgagttggactacacgctataa

SEQ ID NO: 5091 - protein, 1349 aa, DROSOPHILA
MKVSDINTHGGKPPPLPKHIEAQISVIQEKKTELAKTTAAAAGVGLLDSGGFFDSDLYDDDAAKGKGRYEGYNTSIAANDAEEVDEDEDDGFPVPQKRTTYTAPASVLKDVTQGKEDVDPMADRRRPTIADREDEYRQKRRHIIISPERADPFADGGKTPDVGSRTYTDIMREQMLKGEESELRRRILEKTKEGTLVKTVTSSSTSNGDLPAPKDGGRKRGRWDQTVSDSFIPAKMATPSSAATPTWEDKTPGDHRWDETPGHKGSETPGATPGLGTRIWDATPAHAVTPGHETPGHEKSARRNRWDETPKTERETPGHSGWAETPKPDRTGSGGGAESISIESTPGASKRRSRWDETPSNATPAITPTNASAMTPNMTPSMTPHVTPGHATPMLTPGGSTPIGVKAMAMATPSAGALAAMTPEQLQAYRWEKEIDERNRPYTDEELDQIFPPGYKILPPPAGYVPLRTPGRKLMATPTPIAGTPAGFFIQVEDKNAKFMDNQPKGQNLPFMKPEDAQYFDKLLVDVNEDSLSPEELKERKIMKLLLTIKNGSPPMRKSALRQITDKAREFGAGPLFNQILPLLMSPTLEDQERHLLVKVIDRVLYKLDDLVRPYVHKILVVIEPLLIDEDHYARIEGREIISNLAKAAGLATMISTMRPDIDNIDEYVRNTTARAFAVVASALGIPSLLPFLKAVCKSKKSWQARHTGIKIVQQIAILMGCAILPHLKALVEIIEHGLVDEQQKVRTITALAIAALAEAATPYGIESFDSVLKPLWKGIRTHRGKGLAAFLKAIGYLIPLMDAEYANYYTREVMLILIREFQSPDEEMKKIVLKVVKQCCATDGVEPQYIKEEILPHFFKFFWNHRMALDRRNYRQLVDTTVEIANKVGASEIINRVVDDLKDENEQYRKMVMETVEKIMGNLGAADIDSRLEEQLIDGILYAFQEQTTEDVVMLNGFGTIVNQLGKRVKPYLPQICGTILWRLNNKSAKVRQQAADLISRIAVVMKTCQEEKLMGHLGVVLYEYLGEEYPEVLGSILGALKAIVNVIGMTKMTPPIKDLLPRLTPILKNRHEKVQENCIDLVGRIADRGPEYVSAREWMRICFELLELLKAHKKAIRRATVNTFGYIAKAIGPHDVLATLLNNLKVQERQNRVCTTVAIAIVAESCRPFTVLPALMNEYRVPELNVQNGVLKSLSFLFEYIGEMGKDYIYAVCPLLEDALMDRDLVHRQTACSAIKHMSLGVYGFGCEDALTHLLNYVWPNIFETSPHLVQAFMDSVDGLRVSLGPIKILQYTLQGLFHPARKVRDVYWKIYNSLYIGGQDALIAGYPRITNDPKNQYERYELDYTL

SEQ ID NO: 5092 - DNA, 6015 bp, DROSOPHILA
tgtatttcgggagagcctcgctcttgggttcttaagattaggtagcgttgaaagagggcagtcaaatctgcttaggtcaggctttaggatgtttacaagaacggctgcgctgccaaagataaacgaatgctgcgcagctgggatacgttatggaaaattactagagtgcattactgatttctttgaaataatggaagtggctggtttggaccacccaaatacgtcactatatattagtgggatggacgcagttttaataggcaatttaatatgcgtttttttatgaggtagttatattatatttcttgcctaacttcgtcgttattaaaaaaggtaactaggatagaatagcatttaatgaatcgtctaatgctatgtcttcatctgtgggtctcgtcggaggagtcggctccactcgcaactgctccattttcgtgtagaactttgggcacttttgaagaaccttggagtattccgtgaatatttgaaaggacgccctttggagcagcgtttctcccatatgattggaggccagtatttttgccaagttcttgtagtcccgctgcataaggcaatcccgggccagtcgtagtttctcgtacgcagtggatcgtcgaacgctgaagtaaaactcgttactggccggaggagcacaggatgggttttggttcacccaaaagccatcttcgggactggtggcgatctcaagcgtgcgtttcaaaacatttgcgggtatccttctggctggaaaattctcaccctttattttacgcggtgcagttttcaaaggcgatggcttctcatcttttgttttcattttatatggcgaaagcgaacataaatgcgtcgcgaacacaatgcgtcgtgctaacagtgataggcaatgttaacctgtttcacaccaatatcgataggcagtgctgcccgctgagctatcgattacccgcagccaatcgatgttttgattcgtccgatatcccaaaaagcaatattttccgcatgcaaccaaaagcgaaataataaaatgttgcctgtgtaattgtacttccgaagttttgtcgatttgaatagtctctcaggcgtcgaaggaaccccatttgtccaaaaggacgccgtttgtcggagaaatctacttcgcagccggaaaattcacaggaagtctatttgccttgagttcgcaagttgccaatttcttgacgaccccagtgcaaaagtcgcaaaaatattacgaatatttgctggtaatcatttcaagggtacgtatcgaaatacaaactgcaatcccttcccttaaaggaaaagccagcaatcaataaccgatctccacgcccaggactaagcaaagccggtgcgacgaaagcagggcaggatcaggagagcaggagcggagtggagatcctgctggcagcaggggccctaagctatgagtgcggccaagaagtacaagcccatggacacaactgagctgcacgagaacacagagaatattgccgcctgcctgaagaaggccgagaacgtcgcccccaccgctgctgccgcctcgagcgtgggccgcagtgccttcgctgcccaaaacatgaattctgcgtccaccaacggcgagcgcctgccaaacttctccaagctaggcggcagccatggcgagatccgcacggcttcaactacctcaaatctcctcaatcgcatgggggctattcacaacagcaagcctggcgatgtcaagaagatagtgattaagaactttaagggtaggtcccgtctagatctcaactgtttgtatactgcatgattcaacttccttccttccttccttagataagcctacactgcccgataactattccaaggacacgtacgtgaagcttgaagaagccgttatcgccatccaactctccaagcccattaaatattcgctggaggagctctaccaggcggtggtgaacatgtgtagccacaagatggatgcacaattatacgcgaaactcaaggagctaacagagcaacacgtaaagcgcaatattaagctcaaggagctcaccggcggtagcatggacaaactggtaagttgctgtttaaggagcacatttaaaggtttactcgtcaacttttattgtcttttagattttgctggaaaagatcaaccactggtggctctcgttctgccaacaaatgatcatgattcgcagcatattcttgtatatggatcgaacttatgtgctgcaaaattcgaccgttcactcgatttgggacatggggctggacctttttcgcatccattttgctcaaaacagcgttgtccaaaagcgaaccgtcgacggtttactaacgcttattgaaaaagaacgacaaggctccaccgtggaccgtggtttgctgaagagcttggttcgcatgttatgcgacctgcagatctacaccagctcctttgaggagaagttcctcgacgcaaccaatcaattgtataaggctgagagtcaacgcaagatgcaagaactggaagttcccgagtacttacaacacgtcaacaagcgtttggccgaggagaacgagcgtttgcgtcactatctggactcgagcaccaagtatgctggcgaagtcaataataaaaacaattattaatgcgttttttacagacatccactgatttacaatgtggaaaaagagttacttgccgaacacctaacgtcaatattgcagaagggcttggattcattgttggaagacaacagactgagtgaccttacactgttgtacgggctgcttagtcgagtcaaaaatggaacatccgagctgtgcggcaatttcaacggtttcattaaggtatggatatgttaagtagtataaatttatttaaagatacctttgttttaactgcagtaaaacatattaatagatcgcgctaatatacttactttcagaaaaagggacgcaccattgtcatcgatcccgagaaggataagagcatggtccaagatttgctcgatttcaaggacaaaatggatgtgatagttcgcacctgctttgagcacaatgagaaattcacaaactcgttgcgcgaggcctttgagttctttatcaaccaacgtgccaacaagccggccgagcttattggtaagcgcccactgtcactatatttaaacgagtttgctaaagtttattcttccattagctaaatacgtagatatgaaactgcgatctggcaacaagggaaccacagatgaggagttggaaaagactctagataaaatcatggttctgtttcgttttatacatggcaaagatgtatttgaagcgttttacaaaaaggttgtgtccatctattgtatgtcgagcattatttaataacgaataccatcttaggacttggccaaacgattacttgtgggcaaatcggcatcagtggattccgaaaagagtatgctctccaagcttaagcaggagtgcggtggagggtttacgtccaagctggagggcatgtttaaggacatggaactgagccgagatatcaacattgcgttccgcggacacgcgttaagcaacaaccgcgatgtccacaacttggacttgtgcgtcagcattcttaccatgggctactggcctacatatgcacctacagaggtcacaatgccgccacagttcatcaatcctcagcagattttcaacaaattttatctggaaaagcatagtgggcggaagttgcagtggcagcctacattaggaaattgtatgctgcgtgctcaattcgatgcggtaactactaatggctcctactatgttctatgcgattgcaatgtttacgtatgtttcacagggaccgaaagaattgttggtctcgctgtttcaagcgcttgtgcttctattgtttaacgataagccagttctgagctacgaggagatattggccgccaccctcatcgaggatggagagttgcgtcgaacacttcagtccctggcttgtgggcgcgcccgcgtcataacaaaaacaccgaaaggccgcgaaatcttggatggcgatcagtttgattttaacaatgagttcacaaacaaattgtttagaatcaagatcaaccaaatacagatgaaggagacagtaagtggctttagttttgatgtaatttgcacacacttaatctttccccttttccattagaatgaggagcaaaaggcgacggaggagcgtgtgtttcaggatcgtcagtatcaaattgatgcggctattgtgcgcattatgaaaatgcgaaaaacgctgagccataatcttctcatcaccgagctgttcaaccagcttaccttccctgtcaaggtccgtatactaatcctatttgttctaagtagaaagaagctaatatgttcgttggtattccagcccgctgacctaaagaagcgaatcgagtcgctcatcgaccgcgactacatggagcgagacaaggataatcaaaaccaatacaactatgtggcataaatggccacagattctgtgaaatccgaacaccgattcgattgtaattcgctctataccatacacatacatactagcagtctaatgaagtttttggagtgccctcgtccgatcggcgatgttcagagtttttcagctgtaatttcgtttctataactaaatcgttgaacaatccgccagctaatagtgtagcgacagttctttttgtaagttaccttatcatacaataaattaagcgtttattttacaagccgagtcctttgaaataggtcatcgccctcggaacgtcgatgcctccagcaatttaaaaaagttttcgaaccgaaagcaaactaggtgttcaataaacttatttattggacttattctaatttgtttacttttaattgataattctccttcaattaacaatagaagtgacatttgcaggctaattttctaaaggaaacattaaaataattataactcgtactagtagctctgtatgcaaaaaagagatacgcataacttaatagttttttatttaccataaataaaaaattacttgaaaatataatgcacttcgtgtttcatttgtaaaatattaccagcattactgcttcaaaaaatcagcgtcgagccctttgttaagcagttagcaaaggaatatagtatatatacagttacagataaaattgggaaattaggtagattatatacagatcagaaataaatattgctatcgctttcgcgtgcaggggtcatattaaaaatgacattgaggctggtttaggtatcacaaattgccttgctgttatcctcctgtcattctttcgtatgcaaatcaaagctgccaacttgaaaagttcttagtggcttttgtagatatattacaaaaatatttgtagtgtctcccgacaataataccatttacgcctcaacactgttgacgctgtattgtgagctgtcgtactcggacacgctgtcggagccgtagcccccaaatgctgccgccgaaggtcgcacactgctggtccttatcccattatctttcagcacatcgggcacgtagatgggtgccggaccggcaatttccacaatgcttgggcggcgcgtggccgcacaccgcttaattggtgacataaaggtgaacaaagtcaatgtgatagccaggctgatgataagcagcaggaatcgagccattccgttatcgccacggaagaaacaaatcatggccatgaccagtaccaggatcacgaccgagaactttgtcatcgtaactgcagtggagtggatcttaccacccttgcgtgatatcatgtttgacggaccgtaggcaaagtagaggttgtggcgatccacgaagtgttttaggcagatgtagatcatggcgaacggcataatcagcggacaggcaacgctatacacaatggctatggtgaaaacgagcgttgtccaggcgtagtgcgttccgaaaggaaactcgattagaatagccttacgaatgtacggcgtttcggccttggatttcgcctttagcaatgaccagatatatacaatcagctccgggaagcgta

SEQ ID NO: 5093 - DNA, 3185 bp, DROSOPHILA
tgcaaccaaaagcgaaataataaaatgttgcctgtgtaattgtacttccgaagttttgtcgatttgaatagtctctcaggcgtcgaaggaaccccatttgtccaaaaggacgccgtttgtcggagaaatctacttcgcagccggaaaattcacaggaagtctatttgccttgagttcgcaagttgccaatttcttgacgaccccagtgcaaaagtcgcaaaaatattacgaatatttgctggtaatcatttcaagggactaagcaaagccggtgcgacgaaagcagggcaggatcaggagagcaggagcggagtggagatcctgctggcagcaggggccctaagctatgagtgcggccaagaagtacaagcccatggacacaactgagctgcacgagaacacagagaatattgccgcctgcctgaagaaggccgagaacgtcgcccccaccgctgctgccgcctcgagcgtgggccgcagtgccttcgctgcccaaaacatgaattctgcgtccaccaacggcgagcgcctgccaaacttctccaagctaggcggcagccatggcgagatccgcacggcttcaactacctcaaatctcctcaatcgcatgggggctattcacaacagcaagcctggcgatgtcaagaagatagtgattaagaactttaaggataagcctacactgcccgataactattccaaggacacgtacgtgaagcttgaagaagccgttatcgccatccaactctccaagcccattaaatattcgctggaggagctctaccaggcggtggtgaacatgtgtagccacaagatggatgcacaattatacgcgaaactcaaggagctaacagagcaacacgtaaagcgcaatattaagctcaaggagctcaccggcggtagcatggacaaactgattttgctggaaaagatcaaccactggtggctctcgttctgccaacaaatgatcatgattcgcagcatattcttgtatatggatcgaacttatgtgctgcaaaattcgaccgttcactcgatttgggacatggggctggacctttttcgcatccattttgctcaaaacagcgttgtccaaaagcgaaccgtcgacggtttactaacgcttattgaaaaagaacgacaaggctccaccgtggaccgtggtttgctgaagagcttggttcgcatgttatgcgacctgcagatctacaccagctcctttgaggagaagttcctcgacgcaaccaatcaattgtataaggctgagagtcaacgcaagatgcaagaactggaagttcccgagtacttacaacacgtcaacaagcgtttggccgaggagaacgagcgtttgcgtcactatctggactcgagcaccaaacatccactgatttacaatgtggaaaaagagttacttgccgaacacctaacgtcaatattgcagaagggcttggattcattgttggaagacaacagactgagtgaccttacactgttgtacgggctgcttagtcgagtcaaaaatggaacatccgagctgtgcggcaatttcaacggtttcattaagaaaaagggacgcaccattgtcatcgatcccgagaaggataagagcatggtccaagatttgctcgatttcaaggacaaaatggatgtgatagttcgcacctgctttgagcacaatgagaaattcacaaactcgttgcgcgaggcctttgagttctttatcaaccaacgtgccaacaagccggccgagcttattgctaaatacgtagatatgaaactgcgatctggcaacaagggaaccacagatgaggagttggaaaagactctagataaaatcatggacttggccaaacgattacttgtgggcaaatcggcatcagtggattccgaaaagagtatgctctccaagcttaagcaggagtgcggtggagggtttacgtccaagctggagggcatgtttaaggacatggaactgagccgagatatcaacattgcgttccgcggacacgcgttaagcaacaaccgcgatgtccacaacttggacttgtgcgtcagcattcttaccatgggctactggcctacatatgcacctacagaggtcacaatgccgccacagttcatcaatcctcagcagattttcaacaaattttatctggaaaagcatagtgggcggaagttgcagtggcagcctacattaggaaattgtatgctgcgtgctcaattcgatgcgccagttctgagctacgaggagatattggccgccaccctcatcgaggatggagagttgcgtcgaacacttcagtccctggcttgtgggcgcgcccgcgtcataacaaaaacaccgaaaggccgcgaaatcttggatggcgatcagtttgattttaacaatgagttcacaaacaaattgtttagaatcaagatcaaccaaatacagatgaaggagacaaatgaggagcaaaaggcgacggaggagcgtgtgtttcaggatcgtcagtatcaaattgatgcggctattgtgcgcattatgaaaatgcgaaaaacgctgagccataatcttctcatcaccgagctgttcaaccagcttaccttccctgtcaagcccgctgacctaaagaagcgaatcgagtcgctcatcgaccgcgactacatggagcgagacaaggataatcaaaaccaatacaactatgtggcataaatggccacagattctgtgaaatccgaacaccgattcgattgtaattcgctctataccatacacatacatactagcagtctaatgaagtttttggagtgccctcgtccgatcggcgatgttcagagtttttcagctgtaatttcgtttctataactaaatcgttgaacaatccgccagctaatagtgtagcgacagttctttttgtcatcgccctcggaacgtcgatgcctccagcaatttaaaaaagttttcgaaccgaaagcaaactaggtgttcaataaacttatttattggacttattctaatttgtttacttttaattgataattctccttcaattaacaatagaagtgacatttgcaggctaattttctaaaggaaacattaaaataattataactcgtactagtagctctgtatgcaaaaaagagatacgcataacttaatagttttttatttaccataaataaaaaattacttgaaaatataa

SEQ ID NO: 5094 - protein, 773 aa, DROSOPHILA
MDTTELHENTENIAACLKKAENVAPTAAAASSVGRSAFAAQNMNSASTNGERLPNFSKLGGSHGEIRTASTTSNLLNRMGAIHNSKPGDVKKIVIKNFKDKPTLPDNYSKDTYVKLEEAVIAIQLSKPIKYSLEELYQAVVNMCSHKMDAQLYAKLKELTEQHVKRNIKLKELTGGSMDKLILLEKINHWWLSFCQQMIMIRSIFLYMDRTYVLQNSTVHSIWDMGLDLFRIHFAQNSVVQKRTVDGLLTLIEKERQGSTVDRGLLKSLVRMLCDLQIYTSSFEEKFLDATNQLYKAESQRKMQELEVPEYLQHVNKRLAEENERLRHYLDSSTKHPLIYNVEKELLAEHLTSILQKGLDSLLEDNRLSDLTLLYGLLSRVKNGTSELCGNFNGFIKKKGRTIVIDPEKDKSMVQDLLDFKDKMDVIVRTCFEHNEKFTNSLREAFEFFINQRANKPAELIAKYVDMKLRSGNKGTTDEELEKTLDKIMDLAKRLLVGKSASVDSEKSMLSKLKQECGGGFTSKLEGMFKDMELSRDINIAFRGHALSNNRDVHNLDLCVSILTMGYWPTYAPTEVTMPPQFINPQQIFNKFYLEKHSGRKLQWQPTLGNCMLRAQFDAPVLSYEEILAATLIEDGELRRTLQSLACGRARVITKTPKGREILDGDQFDFNNEFTNKLFRIKINQIQMKETNEEQKATEERVFQDRQYQIDAAIVRIMKMRKTLSHNLLITELFNQLTFPVKPADLKKRIESLIDRDYMERDKDNQNQYNYVA

SEQ ID NO: 5095 - DNA, 10867 bp, DROSOPHILA
agctttctaatatttattgtatatatatagttagttttttttaagataccctatttggtaagtataactatccaaacttattacttggtaagccaactattaagcttctgtagtggcaatagattcaacccctggttatatccgtttcagcacccttactcgatgatccctctccttttcggccaatgtaaacgattataaacccaacgatctgctaattgcctgcgtgtcattaagcctccacttaccgaagaattagacaaacaaacaataaaattgatggcaagtgtcgcgttttgtcatcaagctgcgacaaaaacaactgccagaaaaaaaataaaggagaagtgaaaacaaactgcttttcaacccctggcaaacatttataaaaatccggcaaaacgagaaattgcgacaaaatgtcacccccaagtgggcgatgcccatgcagccatctcgctctctcctttcgcttgcctctctgtctaatccccattggttttcttttggcgacgatgactaaattagcaattgattaagggggtgggcgagtgggtggcttggcgagccagccagacaatgaccgcaatgagagctgtaatgacattagatgcttggccgggtggacaatgcgattcttgactcccgatcccttgtttttcgccactctgcacgacttgcactcagcgaaaagacttactaaaggcaccaaaaaattaataattgtattcaaagcttgaacaaccctcttaaaatggaggaatatttcagaaggctttttaacaagcataactttaagaacccgaatatataacatacaattcatttcgttttgcaacgagtttttcgcccagtgcatttatgctacagactcctgtggcgcttatctctttattctcgactttctgtctttttcccgttggattttcccgactcacgggttattgaacaggcgtgcgcagcggaaggcgttctacttaatgttttggatggaaaacgtttaaattccattggcgcacttccggtcagcggatgtcgtgtgcgccagcggaaacattaagagagcagtctcctcctccgagtgcacccgtcccatggagggaatcccaccccatttggtcgccgaccacccgctaatgatgacggtcatcatcgatatggccgacacgtgcaatcccgagggcgcccagtatctaatcattggcggaactcccgccattgtctcagccatatgtgggatatgctagatggatatcctgatggtatccttcggcataagggcgaatcagaagataaatgacttggatgttagtgcttcgaattgattttcgccggatgctttgattcgtttttattggctgcaattgtgcaattaggcaatctcaatgctaaatgagatttctaagcttgttttactagtatttaaatcagtgcacttaaaaaagtataataatatgcatttagtaaatcgactcacctatcgctggcattgctgccacctccaaagttgccaaagatgtggcttccaaaagcggcagccgcagccgccgaagagtgcggcatctggggggcatgtggggtggtgggcgtgggcgtggatgaggccgaattgttggaggaggccgccatcctggagcccgtagtcagggacattggtccgcccacctcgatgggggagtcggtgttccgcgagtttgaggggctgctcggtccctgaccaccgcctccgaccagaggtgtgtgctcccgttccctgtgcatgcccgatggggagggggatccggcactgatggagcccagcgactgggaggcagagtgcggagtggcggtcaactggttggaggacaacgggcgctcgttgtcgctggagtccaggtgcatgccgccgccaggactgcgggaatgggagtgggaatgcgagtgcgagtgctgctgctccatttgtccgttggccagcggactgtgcgacctctgacgaggcggcaagtcatccatgtcatcgtctatttcacccgttatgtctggcgaggattcacgggagtcgtgcagctgaagtggcagagaagcgataatttaaatatgtaaatattcattgcttaatttaaaggagtccgttgccatcttgtaatgcaatttacttaccttatccagggagctgctgctctctccattttcccgcttccgctgctcgtccttgaggcgctccgccttgcgccacttggccctgcggttctggaaccagacctgcgggttggcaaaattgaaaactcgaatgaaattgagaaagtttcggagcaaattgccatgatatggccacatgtctattattattatttatgccacggggcgagttggctgcctcgttgactgccgtggcagccaatggaaaattgaaaaactttccccgcatacagatgaaattttccacctcagaaactttaacaatttgctatggcagcgccaccccgaaaaatgaaaatgtttgcgtttccctttgtctctccggccaatctaagacgtaaacaaacaaaatcaaattttcaattttccccagaaagacaaaacaaatttggcccgtaatcagcgcctaaattgggcggtggatggcggcgataacggtggagttttcccggtgggcggggcacctcacacacactcacacacatggaacacatggccgacttgctctaatgaggctcaatcaagacaatgccttggcatccttagacacatccttttggattgcttgcttatgcgcgcgtgcttcctttttgtaccccccattttcgcctccctttctcagcaattttccttacttcccgttcgtttcgtttgcttttagttccggtttgcgttgattccccagcttagagcgccctctaatgggatttcctcctgctcgggcgccatcttgaatggaaatcactctctatgtgctgtgtgtgtgtgtgtgtgagtgcaagtaagtttcctaatcaaaattcaaattagacattgtgcaaaagttggcattttggctacattgttgtaatcataacgcagataaaacaatttcagcatactttgccctccaggcgaacaccccatcctctacagctttctctctgccagccgccatgtttccccagacttccccagtgtgctcttgctcctgctcctgctcccgtatttttgctgggcaaacaataaattgcgcacaatccaacccccgaaaagggaggactccaccgacacccatccagcccagaaaaaaaagagagcacccacaaccctccacagcgaggtcggaactttggcagtcttcctcgttttttggtggtgacgcccaccagttacttaatacaatatttatgccataagcacattaccaataaaatatggctgtataaactttttctctctgtactgtgtgggggtaggtggagaaagagacagacacatgcggcgagaaagagagcaaagcgaacgataaaagcggcttctccttctgactgctcctgttattatggcaaaaattgaataatgaataacaattgtgtgcgtctgtctccctccctccggcagttgccatctcactcataatttcatgcacaattttcttttgttttaatacacacaaatttaacgtgtttcttgtttattcaattcgcttggtttagtttcttgattgcttgcttgaaattacttttcaaagtggatgggtcacaggacctgttcaaatatatagaaaatagaattttcaaattgcattgttcttcaaattggccaaaagaaaggcaatccgagattgtgaaatataacaagttgaagtctgtgggaaaagcgggcatacttttagggagcggctatattcattgtcatgtagattttgggcaagtaattcaaagctgtagattttttgagtatgtgtggcaattattaatatttaattcagggaaacaccaattttaagctaatacatgtaattttcccaagatatattgccccactgcacatgtcttctcttattaatcatctcaagaacccctcgacccacttcaagtaatttatttacccaagctaacgcccaaagcgacataaatttctcataatttttgaagaacaacaaacaaaacaattattcatgtactcggcaaacacaatttttgcggttgcaagttacaaaaaccgatttgccatgaaaacgaaaacaaataagcagcaagcgggtagcgtaaacaataccaagttgttacaacagcgaattacacacggaaaacaacaacacacaagctgaaggaaacaatgaaaacacaatggaaaacaggcagcagacgggggaaaatccggaaaaaaggggcgaggatgcaggaggtcgtctgtggggtaattacggacaagtgcgcaccattagcttccgcaaacagtttgtcccgatcccggaacactcaatgcaaacaacacccagggactgagtaccaagtaccagggaccagaaaccaaagaccaaggacctcgatgacgcagctcaagtggaatgaatgaacagatgtgttaatatcaaacgcattttgctgccggctaaaccgaaccctttgcaacaataattgggctaccgcagcagccaacaccctgcacaccaccacccctttcccggcaatcccggaatcctcggttcccttcccccttaaaaccgcccatatcctgaggccaacataaggcggactcgatgcgattcgacggccatcaacttggatcagcattaaaggattactcgagcaaatgcaattatttgacaggcaggccagtacacttggataaataattaatagttatgaactctttctgaaattcttttaagacatgaaaaattgatgatccaaagaggagtagagagcgttttgatttttgttaaactactaccacgaaaacaatttttttccagtgcacttccttacaccccgatccttccacttctcatcatcttttgtggttttttctcacatcgccacttgggagcactgtgattataataaattatcaattattggcattatatgcggtggcagcccgttttgcggtggttcgagtgggtggtgccacatttccgattgggtggctccatggtgggttgggtgtatcccagacgaattgtcatgctgcagcacattaattctaatcgaattagttatgtatgaggtgcgtagttggaaatgtgagaaccggtaatcgcagtgggttaacgacttcattatttatcgcctcagactggaaattgataactaatattttgggggcgcagtgggcttattgaagatattattattattaatgtatggccgtgccccaaggaatttgattgcaagtagctagtcgatagggattttgaaacttaatcattgcattaagttaaagactgacacctactgcagcataataggtaacgaacagtagttatttcatgaagttttcatcaagtaagccacttacacttcatcgcctaatgctatgcaaatctgttcaacagcattttcccgtgagtaaattctattccaccctctgtgtgttttcctccgctttcattccattcaaaaatcaaatttcccactcatttatcaatcaatatcagttattagaaggctctactgcattagctcgacttcaaagtgctttgtccttgtcaggtgggtccgctgaatatacatacatatatatgtatatatccctgatccagctgggtcccgggccttagtcatgagctcgctgggatatacattaagtaaatgatttttgcattgaactcgaaagggaaaatgcgaagagacacggactttatccggggcatcaaaaattgacagatgaaaaaatcccgtggaaaacgtatcaggttacaggcaagtgagcggctaaaccggagagtcagggatgctggtgaatcaagcgaagtacacataataaattttattataaaatttatttccgccacgccgttgtgcgggccacaaaaaaaaaaaaaaacaagaaggaaaaagcaacgaaaaatgtgtcaaaatgcgaatgcggttggaaagtgctcgttgctgtgcacaccctcatcaaaacatttggcattcattccattatcgaaatcccagactaagctgtccagtcgaaatgtttttcggttttttttcacaattttcgccgcaatttcgtttaagatatccggacgctgcaaactcggaccacaaaagttggtaacaaactggcaggttctctcgtgttgcgttggtgggggaaggggtggctttcgaccctattaacttgtaattttgttaggctgacaagtacacgtgtttgcgacaagtgtcccattgccgtatattatattcacaaatatcaaattgccagcaatttattatacgccaaattgaattgaaagtatctggttacgcctgggaaaaaaaagctcgggctaattgtgccggaaatagaaaaatggagaggatgccgtaacgccaccaaagtgttttaatagccaccaaagtgtgcgtgggtttcgcgacaaacgtgtctagttagtgtggcatcctcattaagtttcagcttctgtttcaggttccatttccatgtgcataatttgctttcggcctcagaaacgacgtgctcgagtggccggagatacgccattccacccacccaagatctccggagatctctgcttccacttcccccaaagtagatccgctaattgtcattttaatctgacaaatgcaactgcatgcccatgcaaattgccctggcactcacctctttcgtgaaaactcatgtgcaaagcaaacaatcttttcctgacttaatttcgcatttgaatgcaaacgccttcgctcgagtgtcggaaaagtgattctaattttggcttcaattgcccgaaattaatcatgaataatgtaaaaaggttagaatcattccgtgcaacggaaaaggttggattaaggtggaaataattacactcaagtgtcactgctgacactgatttgatctgcaaagatcacagttttaaagcaataaacttgttgtcttcgacggctcaattggctgtaatgcaaatttcagccaaaggatactctcctctaactacaagatggaaaaatcgatttaatttagctggcgtacgagggctttccaaccagcgaaggatagcgaattgctttccacttttcttcactttattttcgcattttatgtttttatattttcgctgttaacgcttaagaactttgtatattttgccgcttcgcctcgttctggctttctgggtataggaaatattttttgtaaggcacttattgcattaggctggctacatgccaccccacaaacccgaacccgttggtaatcccagaatctgtgggcctgttcagcatgcatatgcattattaatcggtccggggaaagggaagttccagatgggagaagggatatagaagaccgagggctttgatcatgctgcgtgaccgttctagggtagtcctacacttatatacttatgaaatttgatatgaattcgccaacttcttgaatttcgcatctaatattctccacatttctcgcaactcatcatgttttgcataatttggccgaaagaggtcagcaaatcggtggaaaagatgtatacttttgcttacctgaacccgtgcttcggtcaggttgattttcatggccagatcctcgcgagtaaatacatccggatagtgggtctgggcaaaggccgtctccagctcctccagctggacgaaattaaaaattaaagaacattttctttgcgttttatgctctacccgacttacctgttgcagtgtgaaggtggtgcgatttcgacgctgcttccgccggacaaaagtctcatcgtgtatggcaggatgatacgagtagctggtatctggggaatagcagattgcagaaagcaagaggtattagccacgtgaggtgttgcattagccacctaattcaactagttgcaccgaggtgtaggagcatgagtgccactaagctgggatttgtcttctccagcgtcgccgtgcactaagtagtttagcaggattttgtttaggatgttttaaagaattataaacgagatttgtagataaaatgaaggattttaaaaggcgtagaaaaaacacaaggctttgtatttggaaaccgaaaagatataacaaattatatattatattattcaaaatttattcaaatatttatttagttttttcgctatattttcaaatgtattactcttggtttttcaaaccctgagttatttaaagccattacatagaatgccattattattctcaatatcttcagtgaagccgaagttttctctaaattttaaatgacccaactataactgccttggaattcattcatgccaaaagtttttctccgctgccgtgcccttgctgaaaaacccagccccccgtccgaattttccttgtccacttggcttttgctgaaagccagctgttgccaaaaattgcaggctaattgaattttctagcagcagcgccattttgtatgctacgaaatattttataactgccttttgagccagaaagagagagacacagaggaaaaggaaaggcgttgacagccccacttgacctccgccccaaaatgcccggttttgcaaactccccggaaaatggaaaaccaaagtcgaaagtcgaaaggcggaaactttgtcggacctttttacgcaacggactttctgttcgttcgtgttgtaaaattaattttcaatttgattttaaataaataattagctggcaaattgcaaaatttaattttatttttcttcttgccaaagccgagtaagctgtccgtctctttctctccggtcccttccatctctttctgtgtctctctgcctgtgtgttaacttttttgggggctctaatccgattagctgaaatgttgttactttggcattcattttcgccaggccgaaggtcgtcccacaaccacccccatatccttgcgctcagttctctagagactctctgtaatgcgcactaatgctgtttgtcatgttctactctatctctatttctcgacaagtgtcgctatgcctgccatcgattaatatttaattatgaaaataattacaaaatgtttcggcttcttttgccatcacaggctcacaggtaagcaccaggatatgctctatatatcctgctaatgaagcacgtatttcgggcctaaatcaagcaatcaaagaggtacgcaaaagccatagattgcgatgcaggctaatcgaatagtcgatgagttgagctccgggcactcagcataattttcgaaggggggctgggaaaagttaggtgcccattagaggtggcatcgtgaagtgggtgctaaaccttggctctatctaaaattgatgaatttataagaaaccaggtacttactacctaaatttcaggaactaattaatgatcttaagttgatggcttttatttttcccctatatccatctgtataatcacgatcacgacctttcccattccgcccgtcaccagttcattcggctgcactgcaattttcttgctaatcaaattccttgcagccaataattgcctaaaatgcaaatggaaatgccccaggatggccgtaaaatgcttcgggccgaaaaagaagaccagagcatgttccactgacgttcaagcggctggcaattagcacaattaggtttcgagtgcaaatcccagagcgcagagccaaagctgcccaaaaactgggcaataagaatttcatgctgaaagctttggccaaaacccgagccaatggaggatttccaccaccccatttatcccgtatttcccatttcccagctcgaacatcaaacgtcatgcagtagcagcggcagcaacaacaagtcaactaaccgcacttgtcaggaagacaggattaacaaatccttgttgccaaattgattcaaaaagtacgcaaaggggcgcagacaagccagtagtcagtcagccagccaaccatctatgtatatctctacatccctctctgccacacaagcaactcgtctcattgtgcactgaaagaaaagttggcatcttcgtacggcacttgaaaatgtttctgtgtctatgaggtatgaaaataatttaatcgagagtatcaaagtagcttcaacattggctttttcgctttcatatactacgagtcgatttattaacacttgatatagatttctttcagtgcaccgaagctctgctctgcgtctgctcgttagctgcgccggtaatgggagataattcaatttttaaacatttggcataacaagcgaaaccatcattaagggattttcggtctgggagcagtcaagtcaagagtccttgcaatcagctcgaccccgcccacccagctccgcccattacacgaatcgtatccgtaagatacatgtctgcaactttgtctgtcgactcagttgctttatctacacggggccaaaatcaattctcattcgatttcagtttcgcttacttaatctgagagccaagaattagcattcattatagttttcctgggctggcctagtttccagcagcagccaggactcaaggactcaaggattccccctgcataaggtcgaattcccttggaaagtgtcaccgtttcgatttcactacttgaaagtccaggcacgcgttggcaaaaattttaaattagtttagcaattgagaagcattctcggtgtcagctctccttggggtggcttcttctcgaggggaatggcatggagtggagtgtcacgtcaaggaatcacgaattggaatctcgaaaaacagcgagcaaattgaattagctatgcaaatgtgctgtggaatttttattttga

SEQ ID NO: 5096 - DNA, 1461 bp, DROSOPHILA
atgacgtttgatgttcgagctgggaaatgggaaatacgggataaatggggtggtggaaatcctccattggctcgggttttggccaaagctttcagcatgaaattcttattgcccagtttttgggcagctttggctctgcgctctgggatttgcactcgaaacctaattgtgctaattgccagccgcttgaacgtaagtcgggtagagcataaaacgcaaagaaaatgttctttaatttttaatttcgtccagctggaggagctggagacggcctttgcccagacccactatccggatgtatttactcgcgaggatctggccatgaaaatcaacctgaccgaagcacgggttcagcgtccggatatcttaaacgaaattgcggcgaaaattgtgaaaaaaaaccgaaaaacatttcgactggacagcttagtctgggatttcgataatggaatgaatgccaaatgttttgatgaggctgcgtcatcgaggtccttggtctttggtttctggtccctggtacttggtactcagtccctgggtgttgtttgcattgagtgttccgggatcgggacaaactgtttgcggaagctaatggtctggttccagaaccgcagggccaagtggcgcaaggcggagcgcctcaaggacgagcagcggaagcgggaaaatggagagagcagcagctccctggataagctgcacgactcccgtgaatcctcgccagacataacgggtgaaatagacgatgacatggatgacttgccgcctcgtcagaggtcgcacagtccgctggccaacggacaaatggagcagcagcactcgcactcgcattcccactcccattcccgcagtcctggcggcggcatgcacctggactccagcgacaacgagcgcccgttgtcctccaaccagttgaccgccactccgcactctgcctcccagtcgctgggctccatcagtgccggatccccctccccatcgggcatgcacagggaacgggagcacacacctctggtcggaggcggtggtcagggaccgagcagcccctcaaactcgcggaacaccgactcccccatcgaggtgggcggaccaatgtccctgactacgggctccaggatggcggcctcctccaacaattcggcctcatccacgcccacgcccaccaccccacatgccccccagatgccgcactcttcggcggctgcggctgccgcttttggaagccacatctttggcaactttggaggtggcagcaatgccagcgatagatactgggcgccctcgggattgcacgtgtcggccatatcgatgatgaccgtcatcattagcgggtggtcggcgaccaaatggggtgggattccctccatgggacgggtgcactcggaggaggagactgctctcttaatgtttccgctggcgcacacgacatccgctgaccggaagtgcgccaatggaatttaa

SEQ ID NO: 5097 - protein, 486 aa, DROSOPHILA
MTFDVRAGKWEIRDKWGGGNPPLARVLAKAFSMKFLLPSFWAALALRSGICTRNLIVLIASRLNVSRVEHKTQRKCSLIFNFVQLEELETAFAQTHYPDVFTREDLAMKINLTEARVQRPDILNEIAAKIVKKNRKTFRLDSLVWDFDNGMNAKCFDEAASSRSLVFGFWSLVLGTQSLGVVCIECSGIGTNCLRKLMVWFQNRRAKWRKAERLKDEQRKRENGESSSSLDKLHDSRESSPDITGEIDDDMDDLPPRQRSHSPLANGQMEQQHSHSHSHSHSRSPGGGMHLDSSDNERPLSSNQLTATPHSASQSLGSISAGSPSPSGMHREREHTPLVGGGGQGPSSPSNSRNTDSPIEVGGPMSLTTGSRMAASSNNSASSTPTPTTPHAPQMPHSSAAAAAAFGSHIFGNFGGGSNASDRYWAPSGLHVSAISMMTVIISGWSATKWGGIPSMGRVHSEEETALLMFPLAHTTSADRKCANGI

SEQ ID NO: 5098 - DNA, 3126 bp, DROSOPHILA
ggactgcaaggagttggataagtatgttgcagtattctctcaatataatagtttatttacatcatctcaccattttgtagagccgacgagtcagttaaatccttgttcaaactgagcaacaacgctagttacctgaccacaaaattctatcgcgatgagatggtcaaggaggtgcaaagacatgcccaggatttcggctcaatggaggccaaatgtatgtatctttgcaaagtgcacatatagcagttccccccaaatttgcccttcttttagtggcaaaaatgactgcagttatccgccgctaccaggagcacatggacaagcatccgcgcgacaagatgatcaaggtgcgtctcaaggagctcatcgacaaacgcaagaagttcctcaagtacttgagacgttgggattatccccgcttcgagtggattctcgagaaactcgacctggtgtacaagccaccgcccacacatttccactggatcacccgcaaggaatccctccaaaagttgaccgacatatactgcgaaaacctaaaggaagagcggctagaggcttaccataagcagctgcaggcccagcaaatacccttccttgaggaggccatcaagaagatgcagttcgtgcggcaggaacagatttcctgcgatgtccccgtgaccgtgacagaagagaagatcgccgactcaaaaaggcagctggaaatgctgaaggagctgcagcaggcggaggcagccgccagcagcaagaaacaaaacgaggatggcttcaattaggcccgattctttaatgttacggtgtcttacaataaatgtaaatgctggttttcttaaattatatgttttattatactttaagagttaggctggacatcgtaccctatgtcatgatcatctgagcgcatactggcaaataaataagaaggcaagcatgattgccttagaaaaatgtgtaaaaacagacgcaattaaagagaagttcctaaagggtacggttgcagctaacgtctgcccgacgaggaggttttccgcctgccgccgctgctggagctactcgagctgctcgacgaagagtcgctggagctggacgaactggacgacgacgaggaggacacggaagaggtagagtcgcgtgaggtacgcttgcgctccttgtcgccattgccagtgccctctttgctcttgacatccgtggaagtgacttcttcgtcgccccagagatcgtactttgatagatcctcgtcgtctccctcgtcgtcgtcctcatcttcttcctcatcattccgctgctcatctcggctagaccttctgggcctctttgagtcctctctatgctcgccgtgctttcgcttcttgcgacgaccgaactcatcgtactcgctatccgaatcctgacgatccttgtactctaccacgccgcgatcattgtatccaccgccaaagcctttaaagaaactggttaagtgggttttgaagcagatcaggcttctacggactcaccagtccgctcctccacatccgagaacttaggagcgttgcacatattgcaggtttggcgacgggcccagttcacattcgcgcatttgctgcactgccagtcctcggcgctgaacaagccccgcgacttgtcggccgccgccttgccgatctcggtgcccagctttttcttgcttgagctgctgctactgctgctgctcccgttgccgcgttcccgctcccggtctcgatccctgtcgcgctccggcttatcactgccatcgcggtcccggtcgcatttgttgcactgcaaacggcgggcgaagttcagatggcgacagctgcaaaatcgagggaagtgtgagactcgcaggacttctcacttggccgctatcactgcatctttacgggcactcactcgtaatctgggcaaatccaatcgccaggcgaagcgacgccgctgcttcccgcggcccctgatgccacgcctccatttgaactggacatgtctgtgccttggctgcgtcctctgccaaaggataatgctaacgggcgtccaagtgatcctccttaggcctcaggagcagcatttaacagattttttttaccaatattatattctgtatacggtacgaaataaagtggtcaaaacatcgataccgttatcgatagtctggcttccgatgcaacaatcgataggtcattcaaattgtatttggggtactccaaaacttattttggaatttaattgcaattcaattgaaaatatttgggtaggtaggatttccagctttcaacttatttgcgataaatcgcaggtttctaagctgtaaacattttccttgtaaaaataggccaccaaaggagtacaagagatcaacaaaagttattgacaacaatctgtgattatcgccactcttcaaatagttttgcatataaaattggtccagaaacacttcaattaaacaactattgcactcgcgcctttcccagacaatgaaccacaagaacttgtatacttttagagttttatttccttagtttacaaacaaaagccgctccaaaagtaaacactgattttgttttgtcggttgttgattggttggtaaagaagtttgactaacgcataaccagcagcttttgggaatagcaggcgatgcccgcagacgagctttcctccatcaggcttacttcttgccagtgccgatcttggccttggcagtaccgcgcaccttcttcatcctgttgcgacgctccttgcgctgcttgcgggtctgcttcttctgttcgaagaggccgtgacgggccaggcggtacttgggctcgaacttcttggcgaagtccagggtgtcgtagatgagggcaaagccggtggagcggccgccaccgaagttggtgcggaatccgaaggcgaagaccacatcgggggtgaccttgtacatggcggcgagcttctcgcggatctcggtcttgttcaccgacgacaatcctgggtggaggacatcgcagaccatctgtttcctggcgagcaggcggttggtcatgaacttgcgggtgcggatggtagcggttgtaccggacattttgacggagctgcaaaaggatggtagaggtttagcttgggcctttcattcaaacaaaatgctcgcca

SEQ ID NO: 5099 - DNA, 993 bp, DROSOPHILA
ttttgaccactttatttcgtaccgtatacagaatataatattggtaaaaaaaatctgttaaatgctgctcctgaggcctaaggaggatcacttggacgcccgttagcattatcctttggcagaggacgcagccaaggcacagacatgtccagttcaaatggaggcgtggcatcaggggccgcgggaagcagcggcgtcgcttcgcctggcgattggatttgcccagattacgactgtcgccatctgaacttcgcccgccgtttgcagtgcaacaaatgcgaccgggaccgcgatggcagtgataagccggagcgcgacagggatcgagaccgggagcgggaacgcggcaacgggagcagcagcagtagcagcagctcaagcaagaaaaagctgggcaccgagatcggcaaggcggcggccgacaagtcgcggggcttgttcagcgccgaggactggcagtgcagcaaatgcgcgaatgtgaactgggcccgtcgccaaacctgcaatatgtgcaacgctcctaagttctcggatgtggaggagcggactggctttggcggtggatacaatgatcgcggcgtggtagagtacaaggatcgtcaggattcggatagcgagtacgatgagttcggtcgtcgcaagaagcgaaagcacggcgagcatagagaggactcaaagaggcccagaaggtctagccgagatgagcagcggaatgatgaggaagaagatgaggacgacgacgagggagacgacgaggatctatcaaagtacgatctctggggcgacgaagaagtcacttccacggatgtcaagagcaaagagggcactggcaatggcgacaaggagcgcaagcgtacctcacgcgactctacctcttccgtgtcctcctcgtcgtcgtccagttcgtccagctccagcgactcttcgtcgagcagctcgagtagctccagcagcggcggcaggcggaaaacctcctcgtcgggcagacgttag

SEQ ID NO: 5100 - protein, 282 aa, DROSOPHILA
MSSSNGGVASGAAGSSGVASPGDWICPDYDCRHLNFARRLQCNKCDRDRDGSDKPERDRDRDRERERGNGSSSSSSSSSKKKLGTEIGKAAADKSRGLFSAEDWQCSKCANVNWARRQTCNMCNAPKFSDVEERTGFGGGYNDRGVVEYKDRQDSDSEYDEFGRRKKRKHGEHREDSKRPRRSSRDEQRNDEEEDEDDDEGDDEDLSKYDLWGDEEVTSTDVKSKEGTGNGDKERKRTSRDSTSSVSSSSSSSSSSSSDSSSSSSSSSSSGGRRKTSSSGRR

SEQ ID NO: 5101 - DNA, 3388 bp, DROSOPHILA
cttttcgtttgtatattgatatggccgtgggaaaatacagaaatttgattctataaagaacacagtgccagctgatcggtttctagcactcctcccagacagatttatctttttgggtcacttgggcaaaccaaacaaagtccgcagaccacagatggagatgctggtctggaaggcaatgtgcccacagactaacccaattagaactagcagatactgtatctttatgggcgaagccagaaagagcaccaacaaaggcgttataaatcaagctagtcttggaaatgagataatggggaaatcaaacatgtttttgtaggcatgaggcaacctgcaaggggttggttgtttggggggaagtcactacgtcatgttagtccaccacctcacttttgtctttgttttcgcaatgaatcatcgttaatcaatctatttttggcttggcctgtcgcgtggcaaatgcaaaatgcaacaaaagaaacccattcgtcgcattcacttatttaattatttttcactggctaaatggcattgcatttgtatgtttctgattgttatccgctttcatagcactgcgattaacgaactttccacatcataccttaggtgaaatgttttatttccagtaacttattttgcgaagcttcacattaaacatcagcctttaatatcctcaatcgtgttcatcaataaaagcaacctgtgtcgtaaaaggtatatggaataattgcctttcgctactttacttcattttgctggctgttatcgatagctcaatgttaaatatcgatttttagacaccattagaggtagccgtcgaaaaaaatctgaaattatattttattgcttttaataatacaaacaaaaattataaaaggtataagagattatttaaatatgtatgtccgtatgtatatgtgttatttttcaaaatatttttactattttgataggatatatcgtggtgagaaactgtcatcactagcatgtttgaggttcgtatacgatcctgttcctgtacttgcttacattattgcttggtatgtcaaacagacatttaaatacaatttttagttatttttatcgttgccttttacagacaaagaaaattttgttcagacttttataagacttatgccggcacttacccaccaaatcttaaccatgcaacgcgcaccaccactgaatttgagcttcaagattcagctgctgtccggccaaaatgttatcctggtggagtgttctggctacgagagcgagctgttcttgccgcaaatcgttggggagcgaatcaccatgcagaacgttattcaagatcgaaggtgctgtgcagagagcatgttgttgcgggatcccccgatgggcgatttgggctccgaaaccaggactgcgaagagtcctccacggcgcttctttgccgctgccaatcccccaaccccactggccaagagcaccccgacgaatacatcttctttaagagctcgggctggtaaggaaaacgctgttccgcagctaacgccagagggtttgcgatgccgaccctttcacctacctgcaccggtggaaatggacgtagaccaattgtgctgccaggagcagacacctgagagacgggcatcctccaagtctataagttcagctaatacaaataatagtttttttgagaatgaggtatcacagccagtaatttcaagcaagaacgtctatgccaacgaatcggcccgtaacaacattacgccctcaagcatctatgagactgggatctcaccgccagtcttgccgagagagaatctaaccgagcagaaccaccaagcgatggaactcgccatcaacaagactaagcccaaattgaccgccgtacggacatatactcgtaaacgagtggaaaccgccagcaaagcaaaggccacaccagtgtggtctcctcttcagaagaagaaaaagagctcgtgggtatcatccaccaaggtgccgtctcccaccatgaaggtggaagtgcgtaatcgcaaactgatagttgacaccaaaaagacgctagctgtccatgatcctagaaaattgtcttcggggtccatcacaatgaagaaaataataaggaagcaagtgacgggaaagacacgaaagcaatttgaagccctcaaagtcacagcctttgacttattaaccaatttgtgtgtggccaacatttccgacgatctaaccaagcaattccagaaagcctgtgcgaacagggtgtgcactaccttgcccaattacgcagagatcgcagttgtcccgccgctggaaatggatcgcgaggtgaatgcgctgatggccaggcagaagcggatggaaagggagacccataggcgatggagcgcagtgccaccagaaggcaatccagtttaaagggccaaagacatattttttttttggaagatctcgatgtatttgttctggcatccagtcagtaatccaaatgcatgtatgctcttgtcatttagattaaacatagaataaaacgattaacgggtataatatttctttgatctccatttatgattacaagtattatacatttaccaaaaaggaacacatttgtctagttatatgtacagttctatcttaagctagcctaggagagcctacactaacagcgagtaaaaatatgactttgtacgacgacatctttgtatttggactaattagctcctaggaggtgcggcaccgaaagcaggccttgaatccccgcttgatcgcccgaatgttgtgaacgacctgctcctgcaaagaaaaagtgcattagaaaggataaagaggctattgttgttcaatttacctgcatcaaattgaagcacatggcaatcacggccatgccgagcagcagatatatggcgcagagaatgaagctaacctccaccttatccctgtcggcagttatctagcaaatgcaaaattatttgattactttagccatcttttgcaagccaataaaaataattaatcaaaatccttccgtttaagaatgactatgagtatgcataccacacgatcgcctggcaccagatcgccaaatccaatgctgctgagcgatataaggcagaagtagctcccatccagatagttccagtcctcccaacgaccgaagagcagcgcaccccacaggatatacctttatttataaagtttcattagaagttcgtaattgaggaaaggatggagttcttcatacccgaccataacgaagacgcacacagtgactggcactgtaatttcatccgtgctgccgcgtatttcccgctcgatatccgaatcagactcggtgtactgaatatccacgaggctggaactctggcgggaacttctggtgtattcgctactgctgctgttggaggaggtggtactgctg

SEQ ID NO: 5102 - DNA, 1329 bp, DROSOPHILA
tatacgatcctgttcctgtacttgcttacattattgcttgacaaagaaaattttgttcagacttttataagacttatgccggcacttacccaccaaatcttaaccatgcaacgcgcaccaccactgaatttgagcttcaagattcagctgctgtccggccaaaatgttatcctggtggagtgttctggctacgagagcgagctgttcttgccgcaaatcgttggggagcgaatcaccatgcagaacgttattcaagatcgaaggtgctgtgcagagagcatgttgttgcgggatcccccgatgggcgatttgggctccgaaaccaggactgcgaagagtcctccacggcgcttctttgccgctgccaatcccccaaccccactggccaagagcaccccgacgaatacatcttctttaagagctcgggctggtaaggaaaacgctgttccgcagctaacgccagagggtttgcgatgccgaccctttcacctacctgcaccggtggaaatggacgtagaccaattgtgctgccaggagcagacacctgagagacgggcatcctccaagtctataagttcagctaatacaaataatagtttttttgagaatgaggtatcacagccagtaatttcaagcaagaacgtctatgccaacgaatcggcccgtaacaacattacgccctcaagcatctatgagactgggatctcaccgccagtcttgccgagagagaatctaaccgagcagaaccaccaagcgatggaactcgccatcaacaagactaagcccaaattgaccgccgtacggacatatactcgtaaacgagtggaaaccgccagcaaagcaaaggccacaccagtgtggtctcctcttcagaagaagaaaaagagctcgtgggtatcatccaccaaggtgccgtctcccaccatgaaggtggaagtgcgtaatcgcaaactgatagttgacaccaaaaagacgctagctgtccatgatcctagaaaattgtcttcggggtccatcacaatgaagaaaataataaggaagcaagtgacgggaaagacacgaaagcaatttgaagccctcaaagtcacagcctttgacttattaaccaatttgtgtgtggccaacatttccgacgatctaaccaagcaattccagaaagcctgtgcgaacagggtgtgcactaccttgcccaattacgcagagatcgcagttgtcccgccgctggaaatggatcgcgaggtgaatgcgctgatggccaggcagaagcggatggaaagggagacccataggcgatggagcgcagtgccaccagaaggcaatccagtttaa

SEQ ID NO: 5103 - protein, 407 aa, DROSOPHILA
MQRAPPLNLSFKIQLLSGQNVILVECSGYESELFLPQIVGERITMQNVIQDRRCCAESMLLRDPPMGDLGSETRTAKSPPRRFFAAANPPTPLAKSTPTNTSSLRARAGKENAVPQLTPEGLRCRPFHLPAPVEMDVDQLCCQEQTPERRASSKSISSANTNNSFFENEVSQPVISSKNVYANESARNNITPSSIYETGISPPVLPRENLTEQNHQAMELAINKTKPKLTAVRTYTRKRVETASKAKATPVWSPLQKKKKSSWVSSTKVPSPTMKVEVRNRKLIVDTKKTLAVHDPRKLSSGSITMKKIIRKQVTGKTRKQFEALKVTAFDLLTNLCVANISDDLTKQFQKACANRVCTTLPNYAEIAVVPPLEMDREVNALMARQKRMERETHRRWSAVPPEGNPV

SEQ ID NO: 5104 - DNA, 10992 bp, DROSOPHILA
aaaatccgaaatatgcaaaaatgagtgttttacctatgaccaatacatacgtatgtatgtacaccatctacaccaatgactttatttgtgtatgtgcaaatttaatttatcttctcccttaatatatcccaaaacgaatgaaaaaaatagacagagaatgtataaaagtgcccacagccccgcattatttctctgtctcgttttttttttgtccccctctctgtcttgcttcatcacctgtcattggcaaggcaaccgttagcttgcattttgtcggcgaagtaacggcacaagtattgccttctctctttcatttacaatattggcgaaaatactacaaaatgattcgatatttttttttattaaaaagtgtcatcattttcagttttattgttcttatttatttctcctaaaaacgtcgtaaagtttatgtacatacatgaccatacatatctattaatccataaacaatagttttgttgtggctataattgtgattaaacagcactgaaacaaattaatacgagggttttatttgttgcggttgctttcgattacgaaatgtacatacatgtgtatgtatgtgtgtatgtgtatatgcgttttgtatgtgttaacatttgcattcttaacgtgagctgcgcaagttgaacgaaataataaatgcagccatcaaaaaataaaaagtcaaacgaagctaatagatttggatataaaaattatttaaactacatatgtatgtgaaatgatttacagatataccctgaataaaatgctgtggataaggggattaaaaaaatatgtaattgcattgcagttagcgaatgtgcaagctttctaacgccgaagtcagcgtgggcagcgcagtcagcggtcttgccaacaagaacaagcgcgaaacatcgcgaagcaacgagagcatggcagagccgcagagcagcagcgagaggagcaccgctgagagcagagagcagaacgacatttcggctgcagacggcggtggtgtcggtgtcgttttggttttgtcggcggttgctaaacacaatttaagttcactcggttagcagacattacacactgcctgctctcatacatatttacgcacttgtatatacatgcaatgtgcctgtgtgtgcgcaagaaaccagaaaaaacgaaaagtacaacattcgttgagtcgcgttcggcttaatttttttttgtgttaccgtgtgtgtgtttgtgctttggatttgccaattttagccgactggctctcagtgtcgaacttaaacttaaagagcgagcaacgtgacgtgtcgcccagtgtcgcttaaaattcgcgcacacaacttcctactacaaaaaaacgaaagaaagaaggagaaaaaacgttaaaggcgagacttgtttttttttcttgtgcatctctgtgtgtttgtgcatgtgtgaagagaaacaaagagagggagatagacggagagtcgcaaagcgagagagctagagcagctgattcagccggcaagtgtcagctgtttcgtgcctgagcgagatagagctagtttagcgaggcgaacatgttatgtcttgtacgccgtctcctctttgcggttcattcgctctagcaatgctccagcaacaacagcaacaactggaaataagagaagcacagcaaaggcaacaacagaaatcgcgtttacaactaaataattattataaagatataccccgaaatcaacatcatatgcaaaactgtcaggattttctacaagttcagcaaaccgtagaaataaacaagttgcattttgtacaaaaaacacagcaacaagaatgttatatgcaacaaattcaccatcatcaacaacagcaacaaaagcaaatcgttgattatcagcgtgtcaatgaaagggcgcacatgcaacccacacaaatattgcaaagtcagcagaaaatatcagaattgcaacaaatacaacgttcagcaagaaaaccagaactgttgcaaataccagaaatactacaaaaacagcaatttcaaacagctcaacaaaagcaaacgaaaaagcaaggtgcaaatacagcaacgataacatcgtttaacagcaatagcaatagcaacaatagtagcagcagttgcaagaactacaataccactagtaacagcaacaaaaataatatcgacaataatagcagcaatagcagcggccaaataatgttagcctctgccagcgcctctgcctccgctcggaaacgcagtcgcagcacgagtaacggcagcaaaagcaacaacaaaactgccagtggccgcatatttacaaaaagcgtgagtgtgtttggttgtttttcctttcttttctctccgtctctctctttccctctctctgtttacattgagctgttttgtccgtgcacgtgctagacgatgtagagagtgagggagagagcgaatagaataacagctcattgtgctgagcgcccagcctgcgtcgactgcgacaccagcgttaacagcgacgcctgcaaaattgggccacaaaaagcaacaaaaagaaactatgttaatgttaacccgatgggaattaataaataaagcaataaatcgcttgggaaaacaaaaatagaaacgcggataggaaacccataaaatttgaaatttctgattaaatagaaacgctttagagactcgtaataattttaatttaaacccttttcatacgaataatggacagaaaattgaatagatagctcaacctaacgttgatttgtggggaaataaattcgtaatgaggaaatataatacttatttaataaaaccaaaaagtttaacaaataaataataattggtataaaaatcgagcttgaaacgctgagattagtcggaattccataatcaaaaatttcccacaaatttatatcaccccttccttttttaaaatgggtaaattaagtgctttttattgcagcacatattcatttcccccttttagataatgtttatatttaaattgccaacaatttcaatagcctaaatttaaaggaacaacaacgacatttattcattcatttttgtagcggagcagatgttatatcgctctctcgtagcttaatcagccgctctcgtgcaacttcgtttcctcttcggctcgtcattcgggtctaaaaataaaacagcatgtgtgtgtggccgctctttggtgccatttgttgttgtgttttttgtctgtaagcaaaaggcaatgaaaacgaaaatttgcgtgacgtctctcgaccttgactcatcgacgtgaactgttaaactgcgccagcagatgcggcgcgactgagagccgacagcgcagtcgagccgagtccgagttgcggttcgatgtattttttgctgtgctttttctgatgtgtttgtttttgctgttttactgctttttcttttgttttctttggcttgaagtcaacgtctcttgcgggacaacagcaaaccagtttaaaaaaatacacgcttacatcaacattgccttatcaacaatattgccaaaaaacccgaaaagaaactggttcgcttagtattttcttccttaattgcaactttgcaactaggaggtactaattcttgaaatattactcgggaataataaatataactatttgactgtaaataacagcataccagacttttcaagcactattggaatgtatctcttcataatcatatctcatcctagttcgctcgtcccgtcacttctctctctctctctctccgtcatcctctcgcactgagattttctctcaataagaaatgcatatgcgtaatgcatgtgagttccgttggttttcagtgccacacccacgcaacgcccaaccacccacttgtgcccgtcttccggtttccttcccttctttctctgcttcccttctcttttttttcatccttccaggtccatgtagccgtattccctatttgttttgtgtagagagaaaaattggctttataaattattgacataaatagctgatagcttttatacaaaagaaattaaaagtaattagagtgaatcaaattaaatgtataaatttccagttcactttaactttaattttaatttatacaattttacatcgagagacctaattttttggctgtgcaattccattccacctcggtccgcatttccattccacattggctcctctgctcttttcgcatgcacctctctgcctctccctttcgcactgcccctcactctcttctccctttcgcactgcagtagcataatcatcatcatagatttatctcattcgcgcccacgtgaggcaaaggcacggcccaaaaattaagtcgtcgtcgtttgtcgctttgggttttgcgcttctccttctacgtcggaacacacttcttgttctgcttggcccccctcttccgaacccccctcgttttcgttagctcattttatcgtctcgcttctcgttgtgcacgcttattctcggtttttcaatttttctcagtgttgccaatttcgtgtttcactggccgttacaattttcatgcattagccatatttggaaaaacttttttgttagttcgcccaacagcttttccttatgcttccgtttcgcttatgccttaaattgtttgacatttgtgttcttaaaacctctagctagttttccagttatcttgatcctggctgtattacttctttttccgtagtcgaagggcagcactgttgccatgttgtatttgtttgtggtgttgtggcaatggcgccctctgccggcgtcgtcgctcgcgaattgacaaagacgccggctgtctctctgtcactctctctctctctctctctctctctcttggactcctctcttttcactccccacggtgtccccacccctcttctacatcattcggctagcagcagctgctttccgttttggattggaagttcgttggaatggaaggcagcagcaaaagaagaagaagaagctgcaacgccgcgaagctggcagcgcagcttgtatttgtagttgtagttggcggcgtgtgtagtttgctttcgctgttgtttttaatcgaacgcgcgcacggcagatgcgcagaaaaatatttatcacccaaagaccaaataggaaaaaaaagcattcaatatagtgtataaagcaatcgtgataattttaagtgtacttttgtccgttttcgtttcggtttctttttcgttttcgcaaataagcgaatagttacactcgctcttttgctcgttccgtcgcactctccctctcgccgctcttgttcttcctcttcgtttgctaactctctgtgtgtttgcaccttcttctttctttcgctccgctcattaccattttacaaacacacaagcgcacgatgagagcgactgcaaaaaaatcggaataaacacggttataatatataagtacaaataaaccatatatatgtgtttatgttatgtatatatacataaaggaaaataacaaggcaaatgtgaaaattagtgcaaactgaacgaaaagacaaaaataaaacaaaaggaaacccaaatgtgataatattgtaatataatgtgaaaagcaaaacacacacaaatacacaactcacgcacttagccacgtatgtgtgtgcagaaaaatatgcggcgcttaaaaaaggtgaacgggaatttgactgaaaaattgtacccttaaaatacaattttcatactaaaaaaaaatgaaagtttacagaaaattgaaatcgaaaagtaaaccagcgcaaaaaaaaacaaacaggaaagggtcttgagtagccattttcatttccagtaaaattgttcaattttttcattgtctgcgctttgctttttaataaaacattacatacacacatacaaatgccgctgcattctggctctctttcgctgctgttatttccctcgcactctcgagcacgcaacgcatgccgcagccgcgctattttcgtcccgctcgcactcgtgcacttattttgcacattctcctttgatgcctcttctgttgccaccgctcgggttgccacctagtcgcgatttccgaatatcgcgcatgtggcagcactatctcacccaaagcgaaagagagagcgagagcaactgcaaaacgaaagaagcagcggagcaaaacaaaagcggcgtcagtgttgcaaagtgcataaagcagtcagtgagagacggagtgtaaattatatccaaaagctaaacgaatgaaattccatcaaagaagaaaaagaaataaaagaaatcattaatgttggggcaaacatatattcacatcattccatacgataaatgcattgaattgtagaattaaaccattgcagacgtaaaagaaatgtttattttcgaacagttttgagtttacaacaaagaaaatcaattattttaatattttatgtattaacaatgattcgatttgctggcaaacaaagatatttaatattcgaaagttctaatttttttttcgttatcaaagaatgagcgaaaaatgcttttcgaaatggcaacgtcatgtgcacttaaataacggacgtttattttaacagtattattaagtattttaatccaatacttataaaaatatttctttgctttgtattacagatgtcccccggcgcccatttgcagatgtccccgcagaacacttcgtccctaagtcaacaccatccacatcaacagcaacagttacaacccccacagcagcaacaacagcatttccctaaccatcacagcgcccagcaacagtcgcagcagcagcagcaacaggagcaacagaatccccagcagcaggcgcaacagcagcagcagatactcccacatcaacatttgcagcacctgcacaagcatccgcatcagctgcaactgcatcagcagcagcaacaacaactccaccagcaacagcagcaacacttccaccagcagtcgctgcaagggctgcatcagggtagcagcaatccggattcgaatatgagcactggctcctcgcatagcgagaaggatgtcaatgatatgctgagtggcggtgcagcaacgccaggagctgcagcagcagcgattcaacagcaacatcccgcctttgcgcccacactgggaatgcagcaaccaccgccgcccccacctcaacactccaataatggaggcgagatgggctacttgtcggcaggcacgaccacgacgacgtcggtgttaacggtaggcaagcctcggacgccagcggagcggaaacggaagcgaaaaatgcctccatgtgccactagtgcggatgaggcggggagtggcggtggctctggcggagcaggagcaaccgttgttaacaacagcagcctgaagggcaaatcattggcctttcgtgatatgcccaaggtaaacatgagcctgaatctgggcgatcgtctgggaggatctgcaggaagcggagtaggagccggtggcgccggaagcgggggaggtggcgctggttccggttctggaagcggtggcggcaaaagcgcccgcctgatgctgccagtcagcgacaacaagaagatcaacgactatttcaataagcagcaaacgggcgtgggcgtcggtgtgccaggtggtgcgggaggcaataccgctggccttcgaggatcacatacgggaggtggcagcaagtcaccctcatccgcccagcagcagcaaacggcggcacagcagcagggaagcggtgttgcgacgggaggcagtgcaggcggttccgctggcaaccaggtgcaagtgcaaacgagcagcgcttacgccctttacccaccagctagtccccaaacccagacgtcacagcaacagcagcagcagcaaccgggatcagactttcactatgtcaactccagcaaggcgcagcaacaacagcagcgtcaacagcaacagacttccaatcaaatggttcctccacacgtggtcgttggccttggtggtcatccactgagcctcgcgtccattcagcagcagacgcccttatcccagcagcaacagcagcaacaacagcagcagcaacagcagcaactgggaccaccgaccacatcgacggcctccgtcgtgccaacgcatccgcatcaactcggatccctgggagttgttgggatggtcggtgtgggtgttggcgtgggcgttggagtaaatgtgggtgtgggaccaccactgccaccaccaccgccgatggccatgccagcggccattatcacttatagtaaggccactcaaacggaggtgtcgctgcatgaattgcaggagcgcgaagcggagcacgaatcgggcaaggtgaagctagacgagatgacacggctgtccgatgaacaaaagtcccaaattgttggcaaccagaagacgattgaccagcacaagtgccacatagccaagtgtattgatgtggtcaagaagctgttgaaggagaagagcagcatcgagaagaaggaggcgcgacagaagtgcatgcagaatcgcctcaggctcggacagtttgttacccaacgagtgggcgccacattccaggtaagaattaagaaaatatggtattattatatttgttggtggcataatggaggcggctactgtgcttccccgatagaatctaattgttaacgaaaacatttaatcgtaaatttacaggagaactggacggacggctatgcgttccaggagctgagtcggcggcaagaagaaataaccgctgagcgtgaagagatagatcggcagaaaaagcagctgatgaaaaagcgtccggcggagtccggacgcaagcgcaacaacaacagtaaccagaacaaccagcagcagcagcaacagcaacaccagcaacagcagcagcaacaaaattccaactcgaacgattccacgcagctgacgagcggagttgttaccggtccaggcagtgatcgtgtgagcgtaagcgtcgacagcggattgggtggcaataatgcgggcgcgatcggtggcggaaccgttggtggtggcgttggaggtggtggtgttggaggcggtggtgtcggaggcggcggtggacgtggactttctcgcagcaattcgacgcaggccaatcaggctcaattgctgcacaacggcggtggtggttcgggcggcaatgtcggcaactcgggcggcgttggcgaccgcttgtcagatcgaggaggaggaggtggcggcatcggcggaaacgatagcggcagctgctcggactcgggcactttcctgaagccagaccccgtatcgggtgcctacacagcgcaggagtattacgagtacgatgagatcctcaagttgcgacaaaatgccctcaaaaaggaggacgccgacctgcagctggagatggagaagctggagcgggagcgcaatctgcacatccgagagctcaagcggattcttaacgaggatcaggtgcgcctagtttccacattgtgcccatttcctacatgccacatatctaacctttggctatatctatctctctatgtacatttcagtcccgctttaacaatcatcccgtgctgaatgatcgctatcttctgttgatgctcctgggcaagggcggcttctcagaggtccacaaggccttcgacctgaaggagcaacgctatgtcgcatgtaaggtgcaccaattaaacaaggattggaaggaggataagaaagctaattatatcaagtgagtagtaaaacagagcaggaaaagtcaatgggggaatgcaatgccaattggttagacaataaggatatagttttcttaaaggtcacattagctgctgctactgctgtggtgtatttcaaaatatcatggtacttttaggtcagactttttgcgtagatgatatatatttgtggtgcaatacatctttctatcaattataattgtatcgtaaagtgaaataacacacactttagggataaaatgtaaatgctcagctttatatttatataaatatactaaagtcttcctcttttaaaaccctcgctaacaacacaaaattcagacacgctttgcgggaatacaacattcacaaggcactggatcatccgcgggtcgtcaagctatacgatgtcttcgagatcgatgcgaattccttttgcacagtgctcgaatactgtgatggccacgatctggacttctatttgaagcaacataagactatacccgagcgtgaagcgcgctcgataataatgcaggtgagttcgccaaaaatcgcaaaaacaattcaaagaaaataaacaaatcaaatttctttgtccaggttgtatctgcactcaagtatctaaatgagattaagcctccagttatccactacgatctgaagcccggcaacattctgcttaccgagggcaacgtctgcggcgagattaagatcaccgacttcggtctgtcaaaggtgatggacgacgagaattacaatcccgatcacggcatggatctgacctctcagggggcgggaacctactggtgagttattggaccacgttgttgtaccaaataaccaatagatttgaggacccatataattaatgtataaattgtttatatttaaaaaatttgttcaggtatctgccacccgagtgctttgtcgtgggcaaaaatccgccgaaaatctcctccaaagtggacgtatggagtgtgggtgttatcttctaccagtgtctgtacggcaaaaagcccttcggtcacaatcagtcgcaggccacgattctcgaggagaatacgatcctgaaggccaccgaagtgcagttctccaacaagccaaccgtttctaacgaggccaaggtgagttgtctctgacatttaaaacaaaacagagagctgtgttgttaagttcttattatcattataattaattttattattattattattattattattattattattattgttattattattattattattattattattattattattattattattgttattattattattattattattattattattattattattattattattattattattattggtattattattatt

SEQ ID NO: 5105 - DNA, 3847 bp, DROSOPHILA
tggtgtcggtgtcgttttggttttgtcggcggttgctaaacacaatttaagttcactcggttagcagacattacacactgcctgctctcatacatatttacgcacttgtatatacatgcaatgtgcctgtgtgtgcgcaagaaaccagaaaaaacgaaaagtacaacattcgttgagtcgcgttcggcttaatttttttttgtgttaccgtgtgtgtgtttgtgctttggatttgccaattttagccgactggctctcagtgtcgaacttaaacttaaagagcgagcaacgtgacgtgtcgcccagtgtcgcttaaaattcgcgcacacaacttcctactacaaaaaaacgaaagaaagaaggagaaaaaacgttaaagatgtcccccggcgcccatttgcagatgtccccgcagaacacttcgtccctaagtcaacaccatccacatcaacagcaacagttacaacccccacagcagcaacaacagcatttccctaaccatcacagcgcccagcaacagtcgcagcagcagcagcaacaggagcaacagaatccccagcagcaggcgcaacagcagcagcagatactcccacatcaacatttgcagcacctgcacaagcatccgcatcagctgcaactgcatcagcagcagcaacaacaactccaccagcaacagcagcaacacttccaccagcagtcgctgcaagggctgcatcagggtagcagcaatccggattcgaatatgagcactggctcctcgcatagcgagaaggatgtcaatgatatgctgagtggcggtgcagcaacgccaggagctgcagcagcagcgattcaacagcaacatcccgcctttgcgcccacactgggaatgcagcaaccaccgccgcccccacctcaacactccaataatggaggcgagatgggctacttgtcggcaggcacgaccacgacgacgtcggtgttaacggtaggcaagcctcggacgccagcggagcggaaacggaagcgaaaaatgcctccatgtgccactagtgcggatgaggcggggagtggcggtggctctggcggagcaggagcaaccgttgttaacaacagcagcctgaagggcaaatcattggcctttcgtgatatgcccaaggtaaacatgagcctgaatctgggcgatcgtctgggaggatctgcaggaagcggagtaggagccggtggcgccggaagcgggggaggtggcgctggttccggttctggaagcggtggcggcaaaagcgcccgcctgatgctgccagtcagcgacaacaagaagatcaacgactatttcaataagcagcaaacgggcgtgggcgtcggtgtgccaggtggtgcgggaggcaataccgctggccttcgaggatcacatacgggaggtggcagcaagtcaccctcatccgcccagcagcagcaaacggcggcacagcagcagggaagcggtgttgcgacgggaggcagtgcaggcggttccgctggcaaccaggtgcaagtgcaaacgagcagcgcttacgccctttacccaccagctagtccccaaacccagacgtcacagcaacagcagcagcagcaaccgggatcagactttcactatgtcaactccagcaaggcgcagcaacaacagcagcgtcaacagcaacagacttccaatcaaatggttcctccacacgtggtcgttggccttggtggtcatccactgagcctcgcgtccattcagcagcagacgcccttatcccagcagcaacagcagcaacaacagcagcagcaacagcagcaactgggaccaccgaccacatcgacggcctccgtcgtgccaacgcatccgcatcaactcggatccctgggagttgttgggatggtcggtgtgggtgttggcgtgggcgttggagtaaatgtgggtgtgggaccaccactgccaccaccaccgccgatggccatgccagcggccattatcacttatagtaaggccactcaaacggaggtgtcgctgcatgaattgcaggagcgcgaagcggagcacgaatcgggcaaggtgaagctagacgagatgacacggctgtccgatgaacaaaagtcccaaattgttggcaaccagaagacgattgaccagcacaagtgccacatagccaagtgtattgatgtggtcaagaagctgttgaaggagaagagcagcatcgagaagaaggaggcgcgacagaagtgcatgcagaatcgcctcaggctcggacagtttgttacccaacgagtgggcgccacattccaggagaactggacggacggctatgcgttccaggagctgagtcggcggcaagaagaaataaccgctgagcgtgaagagatagatcggcagaaaaagcagctgatgaaaaagcgtccggcggagtccggacgcaagcgcaacaacaacagtaaccagaacaaccagcagcagcagcaacagcaacaccagcaacagcagcagcaacaaaattccaactcgaacgattccacgcagctgacgagcggagttgttaccggtccaggcagtgatcgtgtgagcgtaagcgtcgacagcggattgggtggcaataatgcgggcgcgatcggtggcggaaccgttggtggtggcgttggaggtggtggtgttggaggcggtggtgtcggaggcggcggtggacgtggactttctcgcagcaattcgacgcaggccaatcaggctcaattgctgcacaacggcggtggtggttcgggcggcaatgtcggcaactcgggcggcgttggcgaccgcttgtcagatcgaggaggaggaggtggcggcatcggcggaaacgatagcggcagctgctcggactcgggcactttcctgaagccagaccccgtatcgggtgcctacacagcgcaggagtattacgagtacgatgagatcctcaagttgcgacaaaatgccctcaaaaaggaggacgccgacctgcagctggagatggagaagctggagcgggagcgcaatctgcacatccgagagctcaagcggattcttaacgaggatcagtcccgctttaacaatcatcccgtgctgaatgatcgctatcttctgttgatgctcctgggcaagggcggcttctcagaggtccacaaggccttcgacctgaaggagcaacgctatgtcgcatgtaaggtgcaccaattaaacaaggattggaaggaggataagaaagctaattatatcaaacacgctttgcgggaatacaacattcacaaggcactggatcatccgcgggtcgtcaagctatacgatgtcttcgagatcgatgcgaattccttttgcacagtgctcgaatactgtgatggccacgatctggacttctatttgaagcaacataagactatacccgagcgtgaagcgcgctcgataataatgcaggttgtatctgcactcaagtatctaaatgagattaagcctccagttatccactacgatctgaagcccggcaacattctgcttaccgagggcaacgtctgcggcgagattaagatcaccgacttcggtctgtcaaaggtgatggacgacgagaattacaatcccgatcacggcatggatctgacctctcagggggcgggaacctactggtatctgccacccgagtgctttgtcgtgggcaaaaatccgccgaaaatctcctccaaagtggacgtatggagtgtgggtgttatcttctaccagtgtctgtacggcaaaaagcccttcggtcacaatcagtcgcaggccacgattctcgaggagaatacgatcctgaaggccaccgaagtgcagttctccaacaagccaaccgtttctaacgaggccaag

SEQ ID NO: 5106 - protein, 1156 aa, DROSOPHILA
MSPGAHLQMSPQNTSSLSQHHPHQQQQLQPPQQQQQHFPNHHSAQQQSQQQQQQEQQNPQQQAQQQQQILPHQHLQHLHKHPHQLQLHQQQQQQLHQQQQQHFHQQSLQGLHQGSSNPDSNMSTGSSHSEKDVNDMLSGGAATPGAAAAAIQQQHPAFAPTLGMQQPPPPPPQHSNNGGEMGYLSAGTTTTTSVLTVGKPRTPAERKRKRKMPPCATSADEAGSGGGSGGAGATVVNNSSLKGKSLAFRDMPKVNMSLNLGDRLGGSAGSGVGAGGAGSGGGGAGSGSGSGGGKSARLMLPVSDNKKINDYFNKQQTGVGVGVPGGAGGNTAGLRGSHTGGGSKSPSSAQQQQTAAQQQGSGVATGGSAGGSAGNQVQVQTSSAYALYPPASPQTQTSQQQQQQQPGSDFHYVNSSKAQQQQQRQQQQTSNQMVPPHVVVGLGGHPLSLASIQQQTPLSQQQQQQQQQQQQQQLGPPTTSTASVVPTHPHQLGSLGVVGMVGVGVGVGVGVNVGVGPPLPPPPPMAMPAAIITYSKATQTEVSLHELQEREAEHESGKVKLDEMTRLSDEQKSQIVGNQKTIDQHKCHIAKCIDVVKKLLKEKSSIEKKEARQKCMQNRLRLGQFVTQRVGATFQENWTDGYAFQELSRRQEEITAEREEIDRQKKQLMKKRPAESGRKRNNNSNQNNQQQQQQQHQQQQQQQNSNSNDSTQLTSGVVTGPGSDRVSVSVDSGLGGNNAGAIGGGTVGGGVGGGGVGGGGVGGGGGRGLSRSNSTQANQAQLLHNGGGGSGGNVGNSGGVGDRLSDRGGGGGGIGGNDSGSCSDSGTFLKPDPVSGAYTAQEYYEYDEILKLRQNALKKEDADLQLEMEKLERERNLHIRELKRILNEDQSRFNNHPVLNDRYLLLMLLGKGGFSEVHKAFDLKEQRYVACKVHQLNKDWKEDKKANYIKHALREYNIHKALDHPRVVKLYDVFEIDANSFCTVLEYCDGHDLDFYLKQHKTIPEREARSIIMQVVSALKYLNEIKPPVIHYDLKPGNILLTEGNVCGEIKITDFGLSKVMDDENYNPDHGMDLTSQGAGTYWYLPPECFVVGKNPPKISSKVDVWSVGVIFYQCLYGKKPFGHNQSQATILEENTILKATEVQFSNKPTVSNEAK

SEQ ID NO: 5107 - DNA, 3197 bp, DROSOPHILA
ccacttgagcttggcatggcttgccattgttgtggtgtcaactgtggagtccattgttccatcctgtccaggtgacgaaccgtaatggatgctgctgctctcatctctggcacaaaaggtaatccgagaggcggcttttgtcctaaatggatataaaagtatggcgactccttggccagagctgcagaaggagtacagcgctggtcaggcacagatcgagcatgatgccgtgggtaagtttcatctggatgagagccgaaagatatagaaacgaaattacaaaggagggcgcacaaggatatactccgaactgaattcattttaaaacccttccgttccaagttgcccatttccattatggcaatggcgctgcttagcctgacaaataaaggaatcgccagtcagtacgccagcgatgaaggtttggacgagatggtgggtctaaggagtctggaacaccgcgcggaggagcagcagcccgatcgcagtacatcgaaaatgctcagtgccctattcggattcagtcccagcactccacatcccacagagatggcgatggtcatgccccatcagctgccgcccatgtactataacgatttctatgaggatctggtgaccaccaaacgcaatgatgtccattccgcaggctgcgactgcaaagttacggttcgttgggataccattcagccgcgtcagatgtttataattattttgttattcccagaatgagctcgtggatctgggtggtctgcacttccctcgctttctgatgaatgccgtttgcgaatcgggcgctggtcgggatctggccaagtgctcgcatggatccaattgcaggccactggaatataaggtaaaggtcctggcacagacctctcagtccgatcacccctattcgtggatgaacaaggatcaaccttggcagttcaaaacggtcaccgtaactgccggctgcttctgcacaaagtgattgaaaggatgtgagcaactatcgtgaatgtgaattaattgtatattaaagcgccaaaaagacgtcaaagttgctttattgtgggagagattcgatatgaaacagattgttatttttaaggcattcttttgattcttatatgtagcttaatgttcatgtttgagctttctcttagataatttgtctaggatatgtcgtggatgcaattcgtattcatcagcaaaattcgaaataaagcaataatcaaaatagctcttgttgtcattgatgcacgagtataaaaactgtcccataaacgtaaaaaatctaaaaaacttgaatccagagaaacaattttgttacaaataaaatgtaaagtattagaaaagaaacttcgcttcgcaaggcatcaggatagtaaatggcattacttcccaactgagtcaaggcactttgacggtgtagttttaaatggagtgtggaatctacttagcttatggacggcttcgtttaaataatacaaaaagcgaaatgtgcttggtatagcaaaggctcttgaggctaagagcgtggaatgagccaagatccaagtcctaatagtgcggtgagcagggttaaacagacaccatagccttgtcttgaaggagcgccactctgtaacaattccgattagttggtagtcccagttaaatgtactatctacccacaatgacaaagtagttgcaccgatctcccttgcagcactcgttgcacgcccaatcctcgtaccagatgtgggtgcagtacagctgcatatagcgcttcctcttggactggcactgctccttggtcatgcacctcttggacacgtagtattgcttaagagcaccctccgagaagtacggctgggatccccagcggatctccgttccgcagacgttttcaaagggctcgcaggtcttgatggtgttcaggcacttctccgtgttgcccgtctggttggagcagacatagcactccagaccggccacgaaatttactaaaaatatgttatttattcgagaggttctaaatattttaaaggtgtggcccaaagtcgggcttcaaaaatgaaacttaccttgcgaacacaagtaaacagcggcgactagcaccacagctatctcccacgatttcatcgtatatctggagtaattaacgcaatcggagccgataagctcaaagtaaataaacaagtcaaattaacaaacaaaaccactcccaaaaaaacattagcaacaaattagaagaacgcgcgttctgcaacaccaacttcaaggcgctttgcagcactaaacatggccaagtgctgccacctgtggcgcttgcttattaataacttttaagtggataaataattgagagacacgttgtttgaaatatttataaaccaaaaagaattaataataatttttttaacgtacctagctaatagttcattgtcgccttgaaatgattgcatcttgctaacatgttcccgccaaaaaggccagaccctggcgggtagccagccggttagtcatcactggttcagagcggtaagtgcgcgctacgttttctgtgcgacatttgcaaaggcaatccgattgccgccttcagaggtgctgctcctggaccagactactggactactaccgcgccgtcatggccaagagtgatcaggagcttcccgagggatttcgccagctaaagacacaggttgcgggtcacacattcgaggaaagcaacgcggaggcagtgggtcttctgcaggactcgaaggcgggatgcgtactgaagcctctggggaagccggagtgcggcgaacgggagctgcgcttctatgagtcactcgcagaggcaggtgcttcaggtgataatgacctcctggcgctgctccgcggtcacgtcccccggttttacggccccctaaaactggttgtgaatcggcgcgagcgcacgttcctgcgcctggaagacctcacgcgatcgtacgcaaagccgtgcgtcatggacgtgaagatgggtaaacgaacttgggatccagagtcctcgcccaacaaacgaaaggttgaggaggccaagtacgttatgtgcaagcaaaagctgggcctttgcttgccgggattccaagtgtaccttcccaaggaggagcacactcaggagaccacaatcctgcgccacgggaaggactacgggaagagcttgaatgtggagggattcaagcaaactatggccctgtttttcaatg

SEQ ID NO: 5108 - DNA, 1063 bp, DROSOPHILA
tttttttgggagtggttttgtttgttaatttgacttgtttatttactttgagcttatcggctccgattgcgttaattactccagatatacgatgaaatcgtgggagatagctgtggtgctagtcgccgctgtttacttgtgttcgcaagtaaatttcgtggccggtctggagtgctatgtctgctccaaccagacgggcaacacggagaagtgcctgaacaccatcaagacctgcgagccctttgaaaacgtctgcggaacggagatccgctggggatcccagccgtacttctcggagggtgctcttaagcaatactacgtgtccaagaggtgcatgaccaaggagcagtgccagtccaagaggaagcgctatatgcagctgtactgcacccacatctggtacgaggattgggcgtgcaacgagtgctgcaagggagatcggtgcaactactttgtcattagtggcgctccttcaagacaaggctatggtgtctgtttaaccctgctcaccgcactattaggacttggatcttggctcattccacgctcttagcctcaagagcctttgctataccaagcacatttcgctttttgtattatttaaacgaagccgtccataagctaagtagattccacactccatttaaaactacaccgtcaaagtgccttgactcagttgggaagtaatgccatttactatcctgatgccttgcgaagcgaagtttcttttctaatactttacattttatttgtaacaaaattgtttctctggattcaagttttttagattttttacgtttatgggacagtttttatactcgtgcatcaatgacaacaagagctattttgattattgctttatttcgaattttgctgatgaatacgaattgcatccacgacatatcctagacaaattatctaagagaaagctcaaacatgaacattaagctacatataagaatcaaaagaatgccttaaaaataacaatctgtttcatatcgaatctctcccacaataaagcaactttgacgtctttttggcgctttaatatacaattaattca

SEQ ID NO: 5109 - protein, 153 aa, DROSOPHILA
MKSWEIAVVLVAAVYLCSQVNFVAGLECYVCSNQTGNTEKCLNTIKTCEPFENVCGTEIRWGSQPYFSEGALKQYYVSKRCMTKEQCQSKRKRYMQLYCTHIWYEDWACNECCKGDRCNYFVISGAPSRQGYGVCLTLLTALLGLGSWLIPRS

SEQ ID NO: 5110 - DNA, 2459 bp, DROSOPHILA
gttgaccaacttgagacagaggaaccatctaatccatctagaacactttcggaagtactatcaaaatggccaacttcagtcagctaagaatcaccattggattttgtgtgattttggccgttatcctggaacaaccattcactgcagaggcggttgttcgtaagtattcaaagatttcttaaaatcaatcagaaaaaaatattgtaaaatgttcaacatggtgttgggttatctgctttttgtttttcaacctgtcaatgccgaaattctgagggcaatgacttcggattaacctatcgaatacattttaaatgaaactacctacatgcttacttgaactacttgaaaccacaatatttttcgaaatattagctagaaatgtaatatatataatatgtattccaggagatgcatgccagacggcgccgaataagagtgtgtggctatgtagcccatctaccctgggcatatttttcgatccggagacacaacgttgtcgctacatgggatgcagtaatcgaaagctgttcttaacccttgaagactgcgaaaagatttgcaacaatccgcggcacatcaagcgacgcaaccaagcaaaggccaatgaaacatcacattgaacacaccaaaagggaaagaaaatacccttagttgttaattgtcacgtgccttatttagtcgaatgtaattatattatttcaattttcgatggtgaaatttgttaaacctgagaatagtttctgcaaacttttttttatttttatacgcacatcaaactggtttttatactcgaattaaaatttattttgttatatatttttgttaataagaaacattgaaaatccagttggagtttgaaatactctaaccctaagattgaatgaatatctaggatgttgcctcaataacacaacatagaatatttggaaacataaccaccagtttgtagtttttaatttcaatcgtagttattgtaactgtgacatttcagttgacattctcaaatatcacggcagttgaactcgcactcagctttggtactaaatcgattgtcattaccgccgcatccgccgtagatgaagggttcgcaatggcgcttaatgggattgtaggcatagctctcaacgtatccaaagcaccgaccactgatcatgggctgcaggcatagtttcactacacagattataaagattatatagatatcaccgattagtgggtgtcattacctctcttggaggccgcccctgaatggtgcggaatcaacaggaggaggccaaccaaaagccactgccaataagccggcatcatgacatctagacttgatgatcggaggtcccctcgacttccacttgcagcgatattcaaccgtcacgttcttgggcctacgactcactgaaccaggctctctgtgtttacaaatgccttcaaatgctcagacctcatactcgtttttataacactttttgttgccaatattcaacattgaccaagttaacaagtggcaatggtttaggccaaagcaaaagtggaatgcccttcctattagctgtcttaggtctcgctattctgatttgtgcttatgtataagctaagcaaacatttaatgttcgtaccttgtacatatgaaatataattctgctgacgggatgggtgtgataatcgaaactcctcatcacataccctacagtggctcccataaaaaccaacaatcgcggagatgacgtaaaaagactgggcagaaggcaaaaaaaaaacatgttccgcatttcaattggcagctcaacagcaacaaaagcggctctgccaatactttgcaatcaactacgaattggtaaggtgtttagattgacagcgagaaacgcgctttcaatttcaatataagattcgctttcaacttcaaccagcacagcccatggaatatccatgatattgcaacaaaatcaatcatatatttcagaaacagatttttcttgtaatcgcaattgcaatatcagtgcacaatccgcttatccaaccctttcgagaacaacgatctaaatctaaaatttcgaaaaaaaagaattaaaaataaccaaacaagcattgctatttaattattcgccgtctttattttggagatgctaccaatcaaataagggaaccaatagaaaagtcttgcacttgaaaatacccttctaaatttgagtgtccaacttgttatgcataattcatttgtccaagtaagacatgctgttttggcgtttcttccaactgcacaaatatgtgtataatttagtaattaaacgctgccgacgacgtgggccaattaacgtccggggctcaattatttcaggcaaattaaacagctaactgaattgtcgccccgcacatctgacattttggccactcaatcaggcccgaaatgttcgaccctctcatgtgtgctaatgaataaatagcacggcagtttgacagggccc

SEQ ID NO: 5111 - DNA, 292 bp, DROSOPHILA
tgttataaaaacgagtatgaggtctgagcatttgaaggcatttccggcttattggcagtggcttttggttggcctcctcctgttgattccgcaccattcaggggcggcctccaagagagtgaaactatgcctgcagcccatgatcagtggtcggtgctttggatacgttgagagctatgcctacaatcccattaagcgccattgcgaacccttcatctacggcggatgcggcggtaatgacaatcgatttagtaccaaagctgagtgcgagttcaactgccgtgatatttga

SEQ ID NO: 5112 - protein, 91 aa, DROSOPHILA
MRSEHLKAFPAYWQWLLVGLLLLIPHHSGAASKRVKLCLQPMISGRCFGYVESYAYNPIKRHCEPFIYGGCGGNDNRFSTKAECEFNCRDI

SEQ ID NO: 5113 - DNA, 5439 bp, DROSOPHILA
agaaacgtataaaagcagaaaactcagtccatttatgtagtactacaaagctgttgatattaaacgcatctaaataaataaaatcatgtttagattgtcagtcttagttctgaacttactccttgttagccatgaattctcggcaggaaccgcgaaaattgaaattcagccattacctgccctatgcaacggatactgcttccccaccctgaagccagttatggagtatgttgctatccaccaggacaaatggaatacttgtacggaaatattagcgaacgaagcccgcaaggatcagatccagttgaatatccagctggatgccttgaaagcagacgtttccaacataaaggcatcgcagctgtcaaaggatgagaagctggacaggatggagcgagagcagtttgccatgcatgaatctttggagaccatcaatcggtatcttacagtgaaactggacagaacgaaattgcagcttgaggcgatcaaaaacacaatggattatatgaaggcccaaatggatggctatttctcagccataaatggagttcaatgcctacagccaggatttgagaagataggcgatagatatttttacatcgaagaagatgttgagctaaattggctggatgctcaggccaaatgtcgtcgaatgggaggtcacctagcctctataaaaactaaacaggagtttgacgcaatcgtagagaagctcgatgattcgaaatcatacttcctgggcgtcaacgaaaacacaaaaaccggtgactttgtgtctgcagcctccggaaaaagttgtttgtatcacgagtggggtcctggtgaaccccatcacaataatgaccaagagcgatgcgtttcaatcttgcgaaaactcatgcatgtgggcaattgtacttatgaaaaaagattcatatgccagtatggcatctagccagttaaaaaccaaaaaaaatcaaatcattgtgcattttgaagattttgaaaataaaacaaacactttccattgtttgtaaaagttgtatttttaaagattgctgggaacgtaagtactgaagtacagagcagttttgttgaaataggaaacgataaagagacacttaaaggttcctacgttggtcggacaaattttaagtaacttgtaataagcctatttataaaaatcaaatgcaattagctaagtggcgaaatgaagaaatgataatgaccgatttaataatctgatgagttttggtccaagccgggcggttattttcgtacataaagatgagtataaaatagtcgagcagttccgatattcaaattctatgcctgctgctcctcgtttccgtcggcagaggtgtgccacacatgccccatttccagggcctgcaacttgagcagttccttttggctgtccttggcctgaaggtggaacacactttgctggggggagatacaagtaaatggagtacaaagttaatgatagcatatattaatgctttgtttggcaattaattcaaggactcaccttgacctccttggtggtcaggacatccattttgtcgtagatgatggcgtgcaggccgagttcctttaacagcttgatggtatccttggagttgttatcgtcgccccaacaaaacagcaccaatccacgctccttggccagattcacctaaaagcgtccgtagctgaatgattcacgattcgagagtggatcatgttacctgactgggatctcgcagcaggtcctccgtgtgtgccacaacacccaggaactccatggccaccgcgtgccacacggccagctccatggagttgcccctggggtccatatacttctggtatttcgtcgtcctgccgagagttaggaacatgacagggtatcgattttgcttgaatctcagaatagtgcagatatctggatcaaaacaactcagtactatcctgcgattccctgcctttcgtaggatgacatccaatatgcaatcgatatagagatttctgtccaccacatgctcgaattcctcctccattttgccgtcctctagcctctgagaccacttaatttctatgttgaaacccacatggacatctagggcatccaggacatcgcatagctgcggaaacggctggtgctctaaacaatcatcgttgtgaaacgaacgcgtctccctggacagaccctcagcaatgtgatagactttcaatttcttcaactgctccagggacaactccctcatcggtagagcgaggaaatcgtgctcctgcagactgcacttcgactttagtgaaacatagatcatgaaatcgtgatacaccactggcaccagatccttgctaagttggacatcgaactccaccatgtcggcaccatgctctgcggcattcttcaaagaagtaatggtattctcccgaataacagcgtccttggccttgaaactagttccggaaccacgatggcccacatccagtcccgtccacttgctgttccagtatcgggcatagctgacactcatatccattagagcacacagcgatgagggcttcacgataagataaccaagacgcatcattcccagaggtcgatggcccttggcacaggttatgggcagctccaagttgccttcagaacgtttaaaaagattgggcagcacataatgatagcccaagtggttcggtggaccatcttccttggccacccgggagctgtagctgtacaaatcaatcaggtaggccgtgttctcgaagtctccaacggtcagatggaatataaccaaatcggtgggtccacagccggtgccgaactgctcttgacttctgatttcgcactcgtcggcactcaaggtgacgacctcgctaaaggcaaaggctgtggaggattcaccgccgttctccttggtatcatgagtgtcgttcgacaaggaatcctccatgggagacgagggcagcatggtatcacagccggcactgggaatactcaggttcatgggcgtcactttgacctggatatgcctacgtttcatgcgctgcttaaacgtgaacggagcataaaagaactttagctgcaccagagtctccttggtcagccagccccgatccaccttctcctggccattgaacgagccaaatatgtcactctgattcttggcaggctgctcatccaactccttgactattcggggctgtaaggaaagggaatctcttagcaatgttattgggctagctccaaaccatgaatcccatacgagtgcatacaaatcaaatccgatcccaggtccagctggatttttggactctactcgtatagggtcggtcagtacataatgaatttgtgaacctgtaattgcgtttcccaacggcggacaatcagctgctccgtgccgggatcgacggcacagaccatatagcgatattccgtgtcacagtgacgcggaatatagatctctcctgtccacagattactatactcattgtcctcctcatttttggacaaaatagccgctcccgagtgctgccagttgcccagcgcctcgcaattacccactatggccaactgctcgttgggcgccagatcctggttcatcagcacccgaaaggtccacagtctgttggtggtaatgtcgccaaagatccggcgggactccaatcgactgccgttttccgaggacgcaggacaggatgatggcgcagccatcgcatcctcatcgccgttatgtgaggccagccagttgtgcattctgtggggatggataataattaatatctatatataatccttagctatatacactttgaataatagtagttagcagcaaagaactaaactaattgttgaaactcagtataattgtattgtattgcatgcgcacaagtaatttatgccaactctctctttttttcgagtactactgtgctcgttagcgtatacgcactgtacttcaattattttcagctgcggtcacaagttgtttattgtatcgagcgcaagtaattcgaagatattaacacaacattaatttcacttgcagtccgcaattgtttttggtttcccttatcagtggatgacgtaaataaataacttgtatcacttactttgcgttgttgtgtgctgaaatagaagaataagccgaaatcgctttgtttggattcgatttctcgctctcctccactttctctctctttgattttcctagattttctgtgattttcctacgcgtacacgaaactataacaaacgtgtgcaaattgaggagtcgcccgattttttgatcatagcagctgtttttggtttttgctcacggatttcagctaacaacacatgatgtttttctcttttcgtggcgggggggcttaactctataatgtggatataactttatattatctgaacgatttcagcgccgcaggggcttccgatccccttgaaactgtgagttgcattattttgttatctatatatccactgaccgattctagcgagggatgtgaaaagtatttgaatgtcaagatatcgataggtttttgatgaagtaaatattttcacaatgctaaatgcctaaagcacttaaaaatagtagatgcctttttagatatatactacatactacttacttacacgcacttaaaatacaagttttatatttgatatttgagcgcattctcacaggttggcaacgcgaacagctgatttttagggtgaccgtcttccgcaacagagtatctcacagttttcgaaaagtatctcagcaatttaggcaaagtttctgaactttcagttactacttaataaaaagtttgttggttgtttacctagctcaagagattctttcagatttaatttaataaaaccggtagcttaggattataaaattaactttgactttatttaatgtccctcccgcgcgaatgcagcttagtaaaaatgagtcatagtgttcagatctgcctacattccagaagcttgcagtattcagtagacatcagtcgagcgcagaagctcttcgtgataagacgtcttcaattcaaattttttttatcgaacacaccatggagggggacaaggtagtttttcatagttctgatctaccatacgaatatttatacgacgacgaaaaacacgtttcgcacatgccggattccaaattaagtgtacgaaatattttggattcagcttacgcttctgctgaaggcaaaattataactaggaaactttcgcgcagcattccgccgtatccgcatgctgttcgagtaaaaaatggcattcgtgtttatgaatacagtgagcccagaaaacagagctacaaatcaagtttatggaaggaggcctacaatgtgagtaggaatcgaagaacacatgctggacattttacttgctttatttcagatactccaccagcggttggatattgccgagccaatcgcagcaaaggaacacgtgagaacgcagatacatcc

SEQ ID NO: 5114 - DNA, 2792 bp, DROSOPHILA
tagataacaaaataatgcaactcacagtttcaaggggatcggaagcccctgcggcgctgaaatcgttcagataatataaagttatatccacattatagagttaagcccccccgccacgaaaagagaaaaacatcatgtgttgttagctgaaatccgtgagcaaaaaccaaaaacagctgctatgatcaaaaaatcgggcgactcctcaatttgcacacgtttgttatagtttcgtgtacgcgtaggaaaatcacagaaaatctaggaaaatcaaagagagagaaagtggaggagagcgagaaatcgaatccaaacaaagcgatttcggcttattcttctatttcagcacacaacaacgcaaaaatgcacaactggctggcctcacataacggcgatgaggatgcgatggctgcgccatcatcctgtcctgcgtcctcggaaaacggcagtcgattggagtcccgccggatctttggcgacattaccaccaacagactgtggacctttcgggtgctgatgaaccaggatctggcgcccaacgagcagttggccatagtgggtaattgcgaggcgctgggcaactggcagcactcgggagcggctattttgtccaaaaatgaggaggacaatgagtatagtaatctgtggacaggagagatctatattccgcgtcactgtgacacggaatatcgctatatggtctgtgccgtcgatcccggcacggagcagctgattgtccgccgttgggaaacgcaattacagccccgaatagtcaaggagttggatgagcagcctgccaagaatcagagtgacatatttggctcgttcaatggccaggagaaggtggatcggggctggctgaccaaggagactctggtgcagctaaagttcttttatgctccgttcacgtttaagcagcgcatgaaacgtaggcatatccaggtcaaagtgacgcccatgaacctgagtattcccagtgccggctgtgataccatgctgccctcgtctcccatggaggattccttgtcgaacgacactcatgataccaaggagaacggcggtgaatcctccacagcctttgcctttagcgaggtcgtcaccttgagtgccgacgagtgcgaaatcagaagtcaagagcagttcggcaccggctgtggacccaccgatttggttatattccatctgaccgttggagacttcgagaacacggcctacctgattgatttgtacagctacagctcccgggtggccaaggaagatggtccaccgaaccacttgggctatcattatgtgctgcccaatctttttaaacgttctgaaggcaacttggagctgcccataacctgtgccaagggccatcgacctctgggaatgatgcgtcttggttatcttatcgtgaagccctcatcgctgtgtgctctaatggatatgagtgtcagctatgcccgatactggaacagcaagtggacgggactggatgtgggccatcgtggttccggaactagtttcaaggccaaggacgctgttattcgggagaataccattacttctttgaagaatgccgcagagcatggtgccgacatggtggagttcgatgtccaacttagcaaggatctggtgccagtggtgtatcacgatttcatgatctatgtttcactaaagtcgaagtgcagtctgcaggagcacgatttcctcgctctaccgatgagggagttgtccctggagcagttgaagaaattgaaagtctatcacattgctgagggtctgtccagggagacgcgttcgtttcacaacgatgattgtttagagcaccagccgtttccgcagctatgcgatgtcctggatgccctagatgtccatgtgggtttcaacatagaaattaagtggtctcagaggctagaggacggcaaaatggaggaggaattcgagcatgtggtggacagaaatctctatatcgattgcatattggatgtcatcctacgaaaggcagggaatcgcaggatagtactgagttgttttgatccagatatctgcactattctgagattcaagcaaaatcgataccctgtcatgttcctaactctcggcaggacgacgaaataccagaagtatatggaccccaggggcaactccatggagctggccgtgtggcacgcggtggccatggagttcctgggtgttgtggcacacacggaggacctgctgcgagatcccagtcaggtgaatctggccaaggagcgtggattggtgctgttttgttggggcgacgataacaactccaaggataccatcaagctgttaaaggaactcggcctgcacgccatcatctacgacaaaatggatgtcctgaccaccaaggaggtcaagcaaagtgtgttccaccttcaggccaaggacagccaaaaggaactgctcaagttgcaggccctggaaatggggcatgtgtggcacacctctgccgacggaaacgaggagcagcaggcatagaatttgaatatcggaactgctcgactattttatactcatctttatgtacgaaaataaccgcccggcttggaccaaaactcatcagattattaaatcggtcattatcatttcttcatttcgccacttagctaattgcatttgatttttataaataggcttattacaagttacttaaaatttgtccgaccaacgtaggaacctttaagtgtctctttatcgtttcctatttcaacaaaactgctctgtacttcagtacttacgttcccagcaatctttaaaaatacaacttttacaaacaatggaaa

SEQ ID NO: 5115 - protein, 693 aa, DROSOPHILA
MAAPSSCPASSENGSRLESRRIFGDITTNRLWTFRVLMNQDLAPNEQLAIVGNCEALGNWQHSGAAILSKNEEDNEYSNLWTGEIYIPRHCDTEYRYMVCAVDPGTEQLIVRRWETQLQPRIVKELDEQPAKNQSDIFGSFNGQEKVDRGWLTKETLVQLKFFYAPFTFKQRMKRRHIQVKVTPMNLSIPSAGCDTMLPSSPMEDSLSNDTHDTKENGGESSTAFAFSEVVTLSADECEIRSQEQFGTGCGPTDLVIFHLTVGDFENTAYLIDLYSYSSRVAKEDGPPNHLGYHYVLPNLFKRSEGNLELPITCAKGHRPLGMMRLGYLIVKPSSLCALMDMSVSYARYWNSKWTGLDVGHRGSGTSFKAKDAVIRENTITSLKNAAEHGADMVEFDVQLSKDLVPVVYHDFMIYVSLKSKCSLQEHDFLALPMRELSLEQLKKLKVYHIAEGLSRETRSFHNDDCLEHQPFPQLCDVLDALDVHVGFNIEIKWSQRLEDGKMEEEFEHVVDRNLYIDCILDVILRKAGNRRIVLSCFDPDICTILRFKQNRYPVMFLTLGRTTKYQKYMDPRGNSMELAVWHAVAMEFLGVVAHTEDLLRDPSQVNLAKERGLVLFCWGDDNNSKDTIKLLKELGLHAIIYDKMDVLTTKEVKQSVFHLQAKDSQKELLKLQALEMGHVWHTSADGNEEQQA

SEQ ID NO: 5116 - DNA, 3506 bp, DROSOPHILA
agcaaatgaaagtctaatgagctttaaaaatattttgagagtaggtttcgaccaatcttgttccatttttacttcaaagaatatgattgatatgattcagtatttctagctggtgcttttgacctctcctggccacactgcagattgactttgtttttgtttcaagtgagtccaagaaaatcgaaattatttacgtttaatatatttctgggttttcccggcagcatggcaaagtttttgggcatcaaccggctgacaaagctgttccagatggtccgcgaagccggaggactgaagcaagcgtacctgaagctctataggtgagtctcgatcttatataagattgctccaatcctgaaaaccgcatatgcgctattttccaggaacgatgatctgaagatcggaaccctggtgggcatcgacaagtacggcaacaagtacttcgagaacccgtactacttctacggccgcaatcgctggatcgagttcgccccccacgtcaacatggactacgatggatccatgattcccgccgagtggtacggctggatgcactacaaggtgggtttagactacatcttgtcgcacatgttattacctttttccttatagaccgatctgcctcccattcgcgatggatgccgccccaagtacaagtggatagcggaccacagcgagaatctttccggaactaagggtaactatgcactattcccattaagtaagccccctaattcaatcctgctcttgcagaggcctactacccctactccacaacacccaacaaagtggaggcctgggaacccaaggcgaagaagcagtagtgtggcatagcttataattatttttaaattcaagtgcaaatggctgcgattgatgagaacacccgatcgagttaataaacccaattttgttgactctgcactcgaagaacaattttagcaatggacagaaaagtgaagtaactctgcctattcccatattattcaggttttgaattggtttcatcttgtctttattcaatcacagctagattatataactttacttttacttttagcaggacctactacgaatatatacaatgtctttctgcgcctttcgtggcgcgtcgttgagaagagcttgatcatagctggattatatctagccaatagttgtccactccatgctaatactcctccttgatggcgaccttctgggccttcttggcccgcctcttgtacttcttggcggtatccgcacacttggtagtgatggtggcccgaatcacccgttccttgccgcccgtccggtttctcacacagaccacgatgtcgtccaccttgcgttggtctaactggagctttgggggtctttcgcggccgtagaatgcgggcgacggcttcccggtcagcgtgtgggtagccaactcatcgctgctgaagacaacgcaaagaagacacctcgtggccaccggggcgttggtccagaagacctcaccgtactgatgggctgtgatctgggtgccattgggtcccagtacgtacaccgcactgccgtcctccttttgcactcggtgcgggtactgcacaagagtgtctttctcgtccttttcagaggcagtatctgggatgtgcgattccgacgaactggtggacatgtggcgcggtctcttggagggcggcgcgggcacatcctcggcatcgttgtcgtaccgctgattcagggtctttagcatggaagtgagacgaccaaagagttgttcgtagtggtgctgactcttctggattttggccacttgctgcttaaaggattcctccaggcgaggcagtggctccacccgcggttcgatgttcttaatgcccccggaagcggtggctaccgctaccaactgggcattgatgacgcgtcgcttgggcggagagcttcggcggactggcactgccttaacgggaactggcttaactggctggttgactattatgggaggcggcatttggatctgcagctgacccaggggcttcagggtccgctggcgcatcatggtctgctgggcggccacctcgtagttgatgtagttctcgatgtccatctcctcctgcttcattatgggccgcgagagcaggcggtagtagtagggcacgaagttcggggcgaactggctcagatagtggtgatatgggtgggagtactggacgctgggcaggatagcagtctgcggatgaaagtagtgcggctccgttttgcaaacgactgacatgctgaattccggagcctcgctatttgtaaggttaggacacgagtcctgatcgtacggtcgaaatccgccggccatttgcacgcggattttggcaacaggtaaaggcaaaaaggtttatttctggcaaaaaacgcagctgcgtcggctttcttggcttattttgcgtattattcgttggaaaaattggtgttttatggcccggcttaacagttattgttccttgcgccagatacctgagaatccgaaaatcttaatcttgcagggctgccaaggtcgccgaataaagataatttgcattcgataattggaagtagagtctaaaatattcgcctttaggctttacttaaattcttatggaaatataggagtaacatgattaaaaaaccgtttgcttctgaaggctagtcttaaatacgaaatactcgtacatgttttaactcaaaaagttatgccttgaaattttaaaggcagtaccatatatccttgagtgtattttccgctcattcaaaatgcattacaatggacggaattccagtagacttacccttaaataggtatcccttctaaaatggaatttaagggtgttttttttccgatcagagagcatttgagcgaagaattatattccaaaaggatctcatgtattggaagggttcccaatacattcaaattgcaatggataatatgcagtccgggtcctgaaaaccggttttttttttacaaaacccaactattgtcctttttggttcttggaactgtggaaagaattcttacacattcctttgttacatttacttttttctcttattttctgaccttcgccaaagtgcagaatacagaattttaaccaaacggatattctgaaaagaaaaagaaaaaaactttatagagagaacttaaaaatttaaaaccctcgtgacttgcaaccgatagttttatttcatagccctaggtgtcaaccctgtcgatgaaagagagagcaaaagcagctttattcgcaattatttataataataattataatacatatactggttcccgcgcaaacaacaaatcccatgcgaagaaaggaaaagacagctggacttggactagttgggaaatagacggggtcctgaaacagaaacaggaataggatatcagctacctggagggcacactcacacacacgcagaggcaggcgctctcttccccgtatatgcgtgcgcatgtgtgcgtgcaggtaggaatgcaaccacttttcgcattctgccgccaattttca

SEQ ID NO: 5117 - DNA, 1506 bp, DROSOPHILA
ccctgcaagattaagattttcggattctcaggtatctggcgcaaggaacaataactgttaagccgggccataaaacaccaatttttccaacgaataatacgcaaaataagccaagaaagccgacgcagctgcgttttttgccagaaataaacctttttgcctttacctgttgccaaaatccgcgtgcaaatggccggcggatttcgaccgtacgatcaggactcgtgtcctaaccttacaaatagcgaggctccggaattcagcatgtcagtcgtttgcaaaacggagccgcactactttcatccgcagactgctatcctgcccagcgtccagtactcccacccatatcaccactatctgagccagttcgccccgaacttcgtgccctactactaccgcctgctctcgcggcccataatgaagcaggaggagatggacatcgagaactacatcaactacgaggtggccgcccagcagaccatgatgcgccagcggaccctgaagcccctgggtcagctgcagatccaaatgccgcctcccataatagtcaaccagccagttaagccagttcccgttaaggcagtgccagtccgccgaagctctccgcccaagcgacgcgtcatcaatgcccagttggtagcggtagccaccgcttccgggggcattaagaacatcgaaccgcgggtggagccactgcctcgcctggaggaatcctttaagcagcaagtggccaaaatccagaagagtcagcaccactacgaacaactctttggtcgtctcacttccatgctaaagaccctgaatcagcggtacgacaacgatgccgaggatgtgcccgcgccgccctccaagagaccgcgccacatgtccaccagttcgtcggaatcgcacatcccagatactgcctctgaaaaggacgagaaagacactcttgtgcagtacccgcaccgagtgcaaaaggaggacggcagtgcggtgtacgtactgggacccaatggcacccagatcacagcccatcagtacggtgaggtcttctggaccaacgccccggtggccacgaggtgtcttctttgcgttgtcttcagcagcgatgagttggctacccacacgctgaccgggaagccgtcgcccgcattctacggccgcgaaagacccccaaagctccagttagaccaacgcaaggtggacgacatcgtggtctgtgtgagaaaccggacgggcggcaaggaacgggtgattcgggccaccatcactaccaagtgtgcggataccgccaagaagtacaagaggcgggccaagaaggcccagaaggtcgccatcaaggaggagtattagcatggagtggacaactattggctagatataatccagctatgatcaagctcttctcaacgacgcgccacgaaaggcgcagaaagacattgtatatattcgtagtaggtcctgctaaaagtaaaagtaaagttatataatctagctgtgattgaataaagacaagatgaaacc

SEQ ID NO: 5118 - protein, 381 aa, DROSOPHILA
MAGGFRPYDQDSCPNLTNSEAPEFSMSVVCKTEPHYFHPQTAILPSVQYSHPYHHYLSQFAPNFVPYYYRLLSRPIMKQEEMDIENYINYEVAAQQTMMRQRTLKPLGQLQIQMPPPIIVNQPVKPVPVKAVPVRRSSPPKRRVINAQLVAVATASGGIKNIEPRVEPLPRLEESFKQQVAKIQKSQHHYEQLFGRLTSMLKTLNQRYDNDAEDVPAPPSKRPRHMSTSSSESHIPDTASEKDEKDTLVQYPHRVQKEDGSAVYVLGPNGTQITAHQYGEVFWTNAPVATRCLLCVVFSSDELATHTLTGKPSPAFYGRERPPKLQLDQRKVDDIVVCVRNRTGGKERVIRATITTKCADTAKKYKRRAKKAQKVAIKEEY

SEQ ID NO: 5119 - DNA, 8737 bp, DROSOPHILA
tcataaaatcgtttagagcgagcggaacaaattgatgaaaattgtatcgggttacggcttaaaatagaatttataattggaactatatcaagtgagctacattttcgagagtgtttgtctttttcattaataataatattatacttatacttaatcactatttaatttcggtcttactacttttagggatattaaattgattaaatttattgaaattatagaaaatgttatactaccgaagttttccatggatcctaagtccccaaagaactatgcgtagcgcagcgcaagatcaaaagcatcgcagagcaactgtcaaatgtgataaatcaagtgtaattgaaagaagtgcaaataagccaacgccagtaacaacaacaacaataacggaagagagcggaagagtaaacactgagcgaaagagagggcactcgcgaagccgaaaatgaaaacagaacccccatgctggggttgggcagggggatggggagtggaggttaaagggagcctatgctcgggttaagctgcactcaaaaaaatatattaagatgtttacttataatttaacaatttttatcccatatatcatttctattccctctgtttttgactttgtatatattaagattcgtatttacatttttttaatttctctcgttatgatggaactcagacattgaactacgatttattactcctttccacttatttatttatatattattatatttacatttaatgccttgcatttttctgagtgtacgaacggtgatcggtcgagttgactgttggttttcgagtgcacttgcagtggccgccgggaaagcataaatgcgaataatgagcgctggtgcttaccttcttctttgtcgcgctgcttcgcctgaaattcgaacgaatgcgctgcgctgcgactgcgacgcgactgcgcagcgacagccagtgcattaaaacctacaaaatagggtaaaaaacgacggacagcagttagtaccgcttgagctttcgaacgcatataccgcatatagacgcccgatccgaaacacgatcggcggcaaagagcaaagcaaagcaaagcaccgcaaagggcacgcgacaatcaagagcgcagagtgcagcagctgcaacaagtggtggtcggtcaaggcaacgcgatcccgctattcaattgaacaagatcggcgctgctccccgatatcgcccactatccattatccatacgatatgcgattaacgagggaaatttcacaatttccccggctttcgcgagtgtagatttacgtaataataatacgctatatattccgcaaataaatacgaaaatatacttgttgagtgtcacgtttcgcgaagcgttcgaactttaacaatttcccctgccaaggatggcctacaatcccaacagcagcgccgaggataacgcatacgaggatgagtatgtgtcccagggcggggagggtggcatgaaaataaattgtgttctagtattaagcagcttgtcagcggttcaccttccctacagagcaaaaaaaaaaactatagctaatgatatagtagtgtgtttttgtcaaaccccataaggtgctaaaagtttagaccatatttcagttagtttattgactgtaaagccttttatttatttgtatgcatttacaaaagtataaattctattttttaatgtgtagccgacaaattgccgggaacttcggtggagcgtaaaactcgtttggctccgactaatgataacgcttgtctgctttgcacacaggatatcctgctgctcgtcggtttcctttcggtttgttggctgaatccatctttggcatggacacttgtacccacttcagcggattgaagccgtgacataaagtagctgttcacagtattaagtgccatcaacaaaatcatttaatcattgcgttgagcaggcggcaacggcttgacaaattctttcatgtttgagcaggttcgcacatgctccccttaaatttctactcattttgtgtggattaaagtgaagctaacgatttgattagctacaattggcattagcaagttaagaaggccaaaaagattaaagtaaactgctaatgagattttttactgcccagaaaagtgatttaatatatgattttcccagtaatccatagatcccactgttatccaattaggttctcttgtgaatccttgccatcgacacatcctttcatttcgcctcatcacggttggcaataaaagaacttatgagttatgaacgagctgtgaaagccacagctgtctaagctgataattgcaattgaggcaagttcaagctaaaatgtctgactcgctatatagctacatactagtatacatatatatacatatgtgaaaaatcagtgtcagcattactttggcggtcttgtctttgtttctgtttttcttttcttttttttttgtatttatgacatgaccacatcgcgtccgtccatcaagacggctaattgaaagttaagtaaatataatttatgacttatttcgagcactttttatcgttctaaggcaggcctaagtaaatttagtcaagacgactgaattaagatttgtgtgcccacttgagccaagtgcacaaattgcatttatttagcctgcgcacacgtgatgcgattcccaagccactcgaagtgtgttcctaccccaggaaccttcttcatccaatcaagttggtggacctcagctggctagatggcagtcattatggcaaagagtcattaaagtcgcatttgaaatggaaaacaatattttacgaccagtataaatagacatctcggtttggtccgatgcgtttttccactgataacgacctttaagcgctccgacttatagagcttgtcacatctggcattgcgctttaattgagctcggcttctcagattcttggcagtgatttacaaatctgtattgaagatggcatgactttcgtctggtttgtgtgcattattagaataagaattgccatcattcttagttatctgtgggactacgtgacgtgggcaacgttgctttggattatattcttgggtgattcatctttaattcagaagcatatcaaaagtttaaccattcttaagaactgacttctattcacgaaagtagcttcaatcttcttatagcatttactttttggcaatcgttaaccaaatggccaaatatatttatcaaaatccgattttattgccagctgcctaagagccctttccgatttgttgtcaatccagaatcctttcgagctaagcagattttcattcggcgaggcgaccacaagtgggttttccacttcatgtagcacgtggctgagaccctcgagaaatcccttttagggtaaacaacttcgatttaaagtcttcatataagtcaaatcaaataaatacaaattgttgcacgcgcgagctggggaaaaaatcaatatggatgtgcttaaaaatttattgaatgtttttggcgggtgggcggcgaaatgagccacgcccacgcagttccacgcccactacctgagcaaacaaattccaaacacaagccgggtaatcttattaaatcccatttcttttctctttctcttttcattgctccccgatgtgtaacaaaacccggctccatctcggactcctgcttctcctttggaatcctgctgtatccacacacacacacacacacacacatgcagcgaagtaacagaaggtgccttacaggtctggcggaccctgccggagcgcattcgtcaggatcccagtctagcctcctttcgccaggagcacgaacgtctgcatggcggtaagtcctgcgtcctgcccagtatcacacaattcctttactttttatgtctggctgtttggccaccatttttattgccgcaattgcattgacattgggtttttttctacgctttttgcctgatttgcataccaaaaacttaagtccaagcttatcttcaattgttttgatagacccactatttggggcttaggaaattataataatgccagggttgcagtctttttccagcatacgtatgttgtcagttcgcaagtggacataatcttgactgggttcctcaaattagaggccaaattacccagtaaatttgatttaaattgaatattgtagacagccaaaaggaatcattatagaatcatatacatatatgttaggaaaagtaacttcaagcataaggcttgtagaagttcgttattcccaagggccgaatgaaatgtgtcatgaaccttcgagttcctcatgtgcccttttccgcatcctcgtctccaaccatcagtgtgttggccaatgtcccccccgctcgcccatggccatttctgggtatttatagccacgactcgattaccgcgcgctgctgggctaataaaataatacaaacacgtcacagaaggcagctggactaaaccgattcctggccaaagtgacagggtcacagttaaccgccagttgtccttttgcgagcagcgaatgagtgaatttccgcacaaatatttgccaattccgtggcagggttaggtcaatcagccggcaaggaccttcatggataactatttttaagtgaatctattttgtacatcgcagatgtggaccagctgcacgcggaggagtcggaattgcgtgtgcagaatggacaccacgaggagacggcgctggccaaccagccattcacacagatcgggatcaatgtgacgaacgaggcgggtcaggtgcgggtgctcgatggcaggttcgtagttctgtgcgcctcgattgtcagttacgtaattagtgcaaccagttttctgtgattccccgtgcccatttgcagggatctggagaataacaacgatgatcaacacgacgaggccgagccgcatgccaagagtttggtaggtggtgtacatgattggcttgcgcatgatcatataatcagatattgtatctatttattttgcagatacgaaagtatctcatctggtttaagatagccatactcctggtggtctggtgcgtcttcaccgccttcctgatgtccaacaacgagcatgtggaccaactgagcctcattagtgttcctaggaatagctcacccagagtatttcccattgccaccgccagtctgcagaggattggcctgggcctgcgcggacccttccgcctgcaggagaacgaactggccattaacgcgagtgttccactgcccctgctccaggtgcaggtgatgcgcagctatttcgatggcgagggcatggagatctacatcgagaacgccagccaggtgtggcaactggacgtggtctatcccgatctgatagacgccaccagggatacgaagaagcagcgtaccttcgagctgagtcccactgatcccttatggttggcccaggccaatcgcacggagctgagcttcgagttcaccagctccattgagggcgaattgccgctccaactgaatgtggatgagtcgcccatctataagcgggatggagtcatctatgctgcggctgtgctctgcggcttgtacgtgatgatcatctgggagattgtgaatcgaacctttgctgccatcatcgcatccaccttgtcggttggtatactggctgcactgaactccaggccctcgatggccaccatcatgggttggattgatgtggagacactgctgctgctcttcggcatgatgattctggtggccattctctccgagacgggagtctttgactatctggctgtgtatgcctacaagataaccaacggacatgtttggccactcatcaattgcctctgcctgttcaccgctgtcctgtcgtccttcctggacaatgtgaccaccgtgctgctgatgaccccggtgacgatacgactctgcgaggtcatgtgcctcaatccggtgcccatactcatgtgcatggtcatctactcgaacattggcggtgcactgactccagtgggggatccgcccaatgtcatcatagcctcgaatagctacatatccaaaaatgtaagttcggatataggattgtatatctatatattaatgtatataatatttggcagggcgtcaattttgctgtcttcaccttgcacatgctgcccggagttctgctggtgatggtgcagacctatatccagttgcgtttcaagtttcgcaacatcagtgatctgcagttcaaggactcgccggaggtggaggaactgcgtcacgagatacacgtatggaagcgggcagccgccagtctatctgcctattccaaggatgaggaactggtgcggcagacactgatgaagaaggtgaatcgcttgaagagaagcctcaagaaacgcatgacggcggtcatagaaccggcacccaattaccaacaaactctggccaatcttcaggcaaaggtgggatatatcatatactttttaatatacatatttatatattttgatcatttacagtaccccattcgcaacaaaccgctgctgatcaagtgttcggccgccttggtctttgtgatcagtttgtttttcctgcactcggtacccgaactccagagactgtctttaggatggaccgctctgctgggtgccatattcctcatcattctggcggacatcgaggacatggaggccatactggcacgcgtggaatggtccacgctgctcttcttcgcagctctgtttattctcatggaagccctgacggaactgggactgattgagtggatcggcaacatgacagagggcattatcctgggagttggcgaggatcggcgactgatggtggccattttgatcattctatgggtgagttttgcagtataaactcaatttcatattattaaccactattctcggcaggtttccgctgtggcttccgcttttgtggacaacataccgctgaccacgatgatggtcaagatcaccatatcactggcgcagaatagcaccttgaatctgccactacagcctctggtttgggccctggccttgggcgcctgtttgggaggtaagtcctttgatcttatatatttcaaatattattttatataactatatgttaccatttcctccaggcaatggcactctgatcggagcctctgccaatgtggtttgtgccggcgtggcggagcagcacggctacaagttcaccttcctgcagttcttcaagtaagtgctcattatccttggaagaggacactatgctaatttcatctcttcaccccacagagttggatttcccatcatgatcggcagcatcattgtcaccacgggctatctgctcgtttcgcattcgctgttcgcgtggcattgatgaagggcccccatggatgaaggagttgactgtgtcgattcgcaacaaggcgcactgtacctcgttacctaacggacagaaactgttccggatgccacagacatccggtttccgatgccggaagcagctccaagctggatgggaatcaactccttatgcgattgtcataagtgttggttccgggtaagcagagggaaacggaaacgaagaatattacatgaaaatacatttatttttacacgtcgttgttagtgtagtgtgtagcataaataacataacaaacaacaacaattaagagaattaaaataaatataaattaattatttacaattaatactgtcgctgaactgtgaaacaattgttaaatgttaaatgtatgaatacgaatcaaatataaacgaaacaaataaactaatttaaacagcaacatttttgctatttgagttgtttataacttctttttatggaatgtaaaaatttattggcgacaaacatgtttttatttcttttgctaagtaaaggcttttccgtttttatggttgagtaataaaaaaataatgttgtttccttaactctacaaaaatgtaatatacatacatgttttttatttgtggaaaaaatgtaagggaaacagcaaaaaagtatgctatcaaaaatatttcaaatttaaatttaactcagatgcattggtaaaaagctcattcgtttattttggggttttctttttgtaaagttccagtagcgtattcattttcaatttctgtttgtttatttttatgaattttagcagtctaacaattgcaaggcaaacaattgaaaagcgaagaggagcccagacaaatccactgcaatggcaattatgcagatgcagcctcccaaactatttgcactatttgcacttcatgcattgaccgctcagcttgtttgtttttgactggcgaatgcactgtaagaaaaagtgtatttttaaataagtaaatgtatattttattttattaaagtcgttctcataggtcaaataataataataatgctcatattagatattttataaggttttataaggtataaacacattacatatctcagtttctttcagtgcatgtgtgtgtgtgcctgccaacgcctattacataaatgttttgactggtttttttttgtcacatctgcatatgcgtagcttgggtaattaaacaaaatgtacgtcataaagttacaacgtgcgtcttagttaattagacgaagggtcgttaatgggggcatgtggacttagtctatatgtcaactggacctgagttatgcaaagtatgcatacaatacaatataatccatattgttaccaggcgaaacgatcgtcggggttcactggttacttatctatatgcatattagactctttcatgttggggcattcgtcaaagaggc

SEQ ID NO: 5120 - DNA, 3222 bp, DROSOPHILA
agctttcgaacgcatataccgcatatagacgcccgatccgaaacacgatcggcggcaaagagcaaagcaaagcaaagcaccgcaaagggcacgcgacaatcaagagcgcagagtgcagcagctgcaacaagtggtggtcggtcaaggcaacgcgatcccgctattcaattgaacaagatcggcgctgctccccgatatcgcccactatccattatccatacgatatgcgattaacgagggaaatttcacaatttccccggctttcgcgagtgtagatttacgtaataataatacgctatatattccgcaaataaatacgaaaatatacttgttgagtgtcacgtttcgcgaagcgttcgaactttaacaatttcccctgccaaggatggcctacaatcccaacagcagcgccgaggataacgcatacgaggatgacgaagtaacagaaggtgccttacaggtctggcggaccctgccggagcgcattcgtcaggatcccagtctagcctcctttcgccaggagcacgaacgtctgcatggcgatgtggaccagctgcacgcggaggagtcggaattgcgtgtgcagaatggacaccacgaggagacggcgctggccaaccagccattcacacagatcgggatcaatgtgacgaacgaggcgggtcaggtgcgggtgctcgatggcagggatctggagaataacaacgatgatcaacacgacgaggccgagccgcatgccaagagtttgatacgaaagtatctcatctggtttaagatagccatactcctggtggtctggtgcgtcttcaccgccttcctgatgtccaacaacgagcatgtggaccaactgagcctcattagtgttcctaggaatagctcacccagagtatttcccattgccaccgccagtctgcagaggattggcctgggcctgcgcggacccttccgcctgcaggagaacgaactggccattaacgcgagtgttccactgcccctgctccaggtgcaggtgatgcgcagctatttcgatggcgagggcatggagatctacatcgagaacgccagccaggtgtggcaactggacgtggtctatcccgatctgatagacgccaccagggatacgaagaagcagcgtaccttcgagctgagtcccactgatcccttatggttggcccaggccaatcgcacggagctgagcttcgagttcaccagctccattgagggcgaattgccgctccaactgaatgtggatgagtcgcccatctataagcgggatggagtcatctatgctgcggctgtgctctgcggcttgtacgtgatgatcatctgggagattgtgaatcgaacctttgctgccatcatcgcatccaccttgtcggttggtatactggctgcactgaactccaggccctcgatggccaccatcatgggttggattgatgtggagacactgctgctgctcttcggcatgatgattctggtggccattctctccgagacgggagtctttgactatctggctgtgtatgcctacaagataaccaacggacatgtttggccactcatcaattgcctctgcctgttcaccgctgtcctgtcgtccttcctggacaatgtgaccaccgtgctgctgatgaccccggtgacgatacgactctgcgaggtcatgtgcctcaatccggtgcccatactcatgtgcatggtcatctactcgaacattggcggtgcactgactccagtgggggatccgcccaatgtcatcatagcctcgaatagctacatatccaaaaatggcgtcaattttgctgtcttcaccttgcacatgctgcccggagttctgctggtgatggtgcagacctatatccagttgcgtttcaagtttcgcaacatcagtgatctgcagttcaaggactcgccggaggtggaggaactgcgtcacgagatacacgtatggaagcgggcagccgccagtctatctgcctattccaaggatgaggaactggtgcggcagacactgatgaagaaggtgaatcgcttgaagagaagcctcaagaaacgcatgacggcggtcatagaaccggcacccaattaccaacaaactctggccaatcttcaggcaaagtaccccattcgcaacaaaccgctgctgatcaagtgttcggccgccttggtctttgtgatcagtttgtttttcctgcactcggtacccgaactccagagactgtctttaggatggaccgctctgctgggtgccatattcctcatcattctggcggacatcgaggacatggaggccatactggcacgcgtggaatggtccacgctgctcttcttcgcagctctgtttattctcatggaagccctgacggaactgggactgattgagtggatcggcaacatgacagagggcattatcctgggagttggcgaggatcggcgactgatggtggccattttgatcattctatgggtttccgctgtggcttccgcttttgtggacaacataccgctgaccacgatgatggtcaagatcaccatatcactggcgcagaatagcaccttgaatctgccactacagcctctggtttgggccctggccttgggcgcctgtttgggaggcaatggcactctgatcggagcctctgccaatgtggtttgtgccggcgtggcggagcagcacggctacaagttcaccttcctgcagttcttcaaagttggatttcccatcatgatcggcagcatcattgtcaccacgggctatctgctcgtttcgcattcgctgttcgcgtggcattgatgaagggcccccatggatgaaggagttgactgtgtcgattcgcaacaaggcgcactgtacctcgttacctaacggacagaaactgttccggatgccacagacatccggtttccgatgccggaagcagctccaagctggatgggaatcaactccttatgcgattgtcataagtgttggttccgggtaagcagagggaaacggaaacgaagaatattacatgaaaatacatttatttttacacgtcgttgttagtgtagtgtgtagcataaataacataacaaacaacaacaattaagagaattaaaataaatataaattaattatttacaattaatactgtcgctgaactgtgaaacaattgttaaatgttaaatgtatgaatacgaatcaaatataaacgaaacaaataaactaatttaaacagc

SEQ ID NO: 5121 - protein, 803 aa, DROSOPHILA
MAYNPNSSAEDNAYEDDEVTEGALQVWRTLPERIRQDPSLASFRQEHERLHGDVDQLHAEESELRVQNGHHEETALANQPFTQIGINVTNEAGQVRVLDGRDLENNNDDQHDEAEPHAKSLIRKYLIWFKIAILLVVWCVFTAFLMSNNEHVDQLSLISVPRNSSPRVFPIATASLQRIGLGLRGPFRLQENELAINASVPLPLLQVQVMRSYFDGEGMEIYIENASQVWQLDVVYPDLIDATRDTKKQRTFELSPTDPLWLAQANRTELSFEFTSSIEGELPLQLNVDESPIYKRDGVIYAAAVLCGLYVMIIWEIVNRTFAAIIASTLSVGILAALNSRPSMATIMGWIDVETLLLLFGMMILVAILSETGVFDYLAVYAYKITNGHVWPLINCLCLFTAVLSSFLDNVTTVLLMTPVTIRLCEVMCLNPVPILMCMVIYSNIGGALTPVGDPPNVIIASNSYISKNGVNFAVFTLHMLPGVLLVMVQTYIQLRFKFRNISDLQFKDSPEVEELRHEIHVWKRAAASLSAYSKDEELVRQTLMKKVNRLKRSLKKRMTAVIEPAPNYQQTLANLQAKYPIRNKPLLIKCSAALVFVISLFFLHSVPELQRLSLGWTALLGAIFLIILADIEDMEAILARVEWSTLLFFAALFILMEALTELGLIEWIGNMTEGIILGVGEDRRLMVAILIILWVSAVASAFVDNIPLTTMMVKITISLAQNSTLNLPLQPLVWALALGACLGGNGTLIGASANVVCAGVAEQHGYKFTFLQFFKVGFPIMIGSIIVTTGYLLVSHSLFAWH

SEQ ID NO: 5122 - DNA, 4045 bp, DROSOPHILA
agggccatccgccatgtcaccctcggctggggataatgaacttttttggccagccgagcgtgccgttgggtttttgagtctgcggcctgtccgcccgttgccgcatccacatccacatccacatccccatctccatacacagccacctcagcctcaattagcttattgtccttgtcattgtcagctggaaaatggcatccgagcaggggcggtgtggaggacggggtggccactggatgtctctgggtggcccttggcctcgcaaaatccacaaggagctcgccaaggtgttaagccagctgagccgggtgcccccagcatcgaatccttacctctgtcgggcctttcgccgctccattcccctcaagcctctggcttaattccagccagcttttctggccaaaccggacgagtcttaatcaagcgagatgccctcatgtgatctggatctcgccgtgtaatgagaatagcatatctattgtagtactttagaactaactgacaatttcattaaatttcaccatatttatcatctctgctgtgagcttttcacttaatggagcgtaggagttgttcgttgaggatgcttaggatcaggagctacagaaatcctcgttaataggagtaaatggaaattacagccaaccagtgggcaggtcagggaggagcgtggagcggtctttggtaattgttaaaaagcaaagcaaatgttattgccgaacaaacagcactggaagccgaaatccattcaaatcgcacaactagcttgcctctaatccgagccacaaataaggcgtgtgcagagggtaggggacgtggcaggggcgtagggggggggggttcctttgtttggcacacacatgcggaatccatagaagctatggctgagcctggccagaaaaggtacccgtgctcgtagtcaaggacccgttccgttccgtttcgtttcgattcgattcgaatgtttcgaaattcacaaatgtacactacgaaaaatattctttttcaacaattctcgttgttttcaaatgttataaacttacaggttctctttatgtaaaccactttgctatttatcaagacacatttccaggactaaagtaatacaacttcagataaactagtatttagtactaaaatttttgtaagttaaccatccaaatatttgtagtcaagtgtggcgaccttgttgggtcttgaacttagacattaacattgactagaaaacaagaatataactagagcaggtttcgcacttcagtttaccgctgagaaactgagaattcgcctaagttggattcacatgacatcgccagtgatgacaccaccgcccactgggccgccctcatgctggtgatgatgcagttgctccacgagatcagcgattccttccacgcctatgctcaaagagggcagcgacttgtccagcaccaaaagagagggaggcgacttgggctcaccctcttccatgccaaaggaggacatgccaatcccgtccaggcacagttcattggatgatccgaccagctgggagtgaccgccgtaggcctgcatctgggactgctccatgctcagaatgcagtccgccttgaagctgtcgatcgtgaactggtccacgtccacgctgagaaacttcatctcgtcgtaggcggaggagccatcggtcatgtccaaactcaatgaggcggcaaactcaagccccggatgaagctggggattgtgctgctcctgctggtgctgctgctgctgctgctggtgatgactcgaactcccggcgtgaatcggatcggatgcatgctgttgaggcgggtgctgctggagctgattgtcggagtccatctgcgggtgtgtctgcgcttgcgtttgcggaggatatgtggaccactccatggagaggccactgccaccccgctccagtcccaagtggtcaatgttgaggttgagaaatatattcggtgacagcctagagggcgacatggcccccgtgccgtaggaggccttaagttcgttatcaagggagttcgaggattgcggtggggtgtccggcaatagagttccaccgccgcctgaaatcaatatgggtcattactagcgatgggttgataggtaacagagatatcctttcttacccagcgcactatccagttggcccaggacggcgctgtcgtcgtaggacacgtcgagatccaacgcaccctccttataatctccgccaagcccaccgatcttctcctgcttgcgccacttggcccgccggttctggaaccacacctgcaccctcgcctccgtcaaatcgatcctcacggccagctcctctcggaaaaacacgtccggatagtgtgtccgctggaacgccctttccagctcctgcagttgcagtgtgttaaatgtggttctgcggatcattaggaaaactagtgttagtgcacctatagctttagtagatacttatgaaactagtccagtttttggatttataccgcgatatatgtacatttcgaatgtatctgctatacctgtatctccgctgcttgcgcttcattgtgcctttgtccatgcgaatcctgagcttcctgttggtgaacgttgacgttggcggagtgggtggcgagtagtggccactgaggtgtggatcccgctcaatctcaatatctccctcagcgaggatggggctcttcaagcgcgtcgtgacatagtcgccgtgtgtttttctattttttaacgattttcgtcgacacttcgagggcttcgcgtcgctgcttcttctcgcttttccgcttcgacaaattccacggcggaaaaactgcacaacaacaacggcgaaagcacggatgaagtctttggagacaggcagctgcggagctcagcataagtcgcccaccagcggaatctgcatctcctccgctcctggttttttattctgattccgattccaagtcccgacttcccttgctcgaacctatgtagctgctgatggctaagcgatgtcagattgtccagctgtgcatgtccaaccttgtggcacgggcactgttcttgcctcgacgacgcgaattcgactgaggaggattttggatttccacggggaacagtgacagtgcgtgctgtccgtcgacagaagccgtagaagtcgaccacagtccactggcactcgcacactcgcgggctccctacgaacaggggtatatactatgtgcctaagaggtctgacccggtctagcctcttggacagtcgttctagccgggcttgttatgccagtggcggtgctcctcacccaaactggcccaagtgggagacatagtgagctcataatttatggcaactcatggtgccttcggaggatgtgcatagctggaaaatgtttaagaattctacataagactataaaccactatttttaccattcatctgcctttgcacattataaaaacaatattctttaaacaagaccatgaaacggaaatgtcatccatttgggggaaatccgacaagtaaaatacaatcggaattgcatttcccacagctcctcactcaaaagtatgctatggaaaaagtttcggagccgtttcggaaaccaaaaatccagaaacccaccctggtcaacgttatcgatgggaggagatcggattgccctttgcctctgcacacatgtctgggtcagtgggcttcttttggctactcccaccgcccaaagttctccacctctgccggcacttgaggccttaaagccatttcccccattgaagcattgaaagcagcagaggagtataaatagccgagggactcaaccccatcagccgggccacttgagcttggcatggcttgccattgttgtggtgtcaactgtggagtccattgttccatcctgtccaggtgacgaaccgtaatggatgctgctgctctcatctctggcacaaaaggtaatccgagaggcggcttttgtcctaaatggatataaaagtatggcgactccttggccagagctgcagaaggagtacagcgctggtcaggcacagatcgagcatgatgccgtgggtaagtttc

SEQ ID NO: 5123 - DNA, 1861 bp, DROSOPHILA
tcgaggcaagaacagtgcccgtgccacaaggttggacatgcacagctggacaatctgacatcgcttagccatcagcagctacataggttcgagcaagggaagtcgggacttggaatcggaatcagaataaaaaaccaggagcggaggagatgcagattccgctggtgggcgacttatgctgagctccgcagctgcctgtctccaaagacttcatccgtgctttcgccgttgttgttgtgcagtttttccgccgtggaatttgtcgaagcggaaaagcgagaagaagcagcgacgcgaagccctcgaagtgtcgacgaaaatcgttaaaaaatagaaaaacacacggcgactatgtcacgacgcgcttgaagagccccatcctcgctgagggagatattgagattgagcgggatccacacctcagtggccactactcgccacccactccgccaacgtcaacgttcaccaacaggaagctcaggattcgcatggacaaaggcacaatgaagcgcaagcagcggagatacagaaccacatttaacacactgcaactgcaggagctggaaagggcgttccagcggacacactatccggacgtgtttttccgagaggagctggccgtgaggatcgatttgacggaggcgagggtgcaggtgtggttccagaaccggcgggccaagtggcgcaagcaggagaagatcggtgggcttggcggagattataaggagggtgcgttggatctcgacgtgtcctacgacgacagcgccgtcctgggccaactggatagtgcgctgggcggcggtggaactctattgccggacaccccaccgcaatcctcgaactcccttgataacgaacttaaggcctcctacggcacgggggccatgtcgccctctaggctgtcaccgaatatatttctcaacctcaacattgaccacttgggactggagcggggtggcagtggcctctccatggagtggtccacatatcctccgcaaacgcaagcgcagacacacccgcagatggactccgacaatcagctccagcagcacccgcctcaacagcatgcatccgatccgattcacgccgggagttcgagtcatcaccagcagcagcagcagcagcaccagcaggagcagcacaatccccagcttcatccggggcttgagtttgccgcctcattgagtttggacatgaccgatggctcctccgcctacgacgagatgaagtttctcagcgtggacgtggaccagttcacgatcgacagcttcaaggcggactgcattctgagcatggagcagtcccagatgcaggcctacggcggtcactcccagctggtcggatcatccaatgaactgtgcctggacgggattggcatgtcctcctttggcatggaagagggtgagcccaagtcgcctccctctcttttggtgctggacaagtcgctgccctctttgagcataggcgtggaaggaatcgctgatctcgtggagcaactgcatcatcaccagcatgagggcggcccagtgggcggtggtgtcatcactggcgatgtcatgtgaatccaacttaggcgaattctcagtttctcagcggtaaactgaagtgcgaaacctgctctagttatattcttgttttctagtcaatgttaatgtctaagttcaagacccaacaaggtcgccacacttgactacaaatatttggatggttaacttacaaaaattttagtactaaatactagtttatctgaagttgtattactttagtcctggaaatgtgtcttgataaatagcaaagtggtttacataaagagaacctgtaagtttataacatttgaaaacaacgagaattgttgaaaaag

SEQ ID NO: 5124 - protein, 357 aa, DROSOPHILA
MDKGTMKRKQRRYRTTFNTLQLQELERAFQRTHYPDVFFREELAVRIDLTEARVQVWFQNRRAKWRKQEKIGGLGGDYKEGALDLDVSYDDSAVLGQLDSALGGGGTLLPDTPPQSSNSLDNELKASYGTGAMSPSRLSPNIFLNLNIDHLGLERGGSGLSMEWSTYPPQTQAQTHPQMDSDNQLQQHPPQQHASDPIHAGSSSHHQQQQQQHQQEQHNPQLHPGLEFAASLSLDMTDGSSAYDEMKFLSVDVDQFTIDSFKADCILSMEQSQMQAYGGHSQLVGSSNELCLDGIGMSSFGMEEGEPKSPPSLLVLDKSLPSLSIGVEGIADLVEQLHHHQHEGGPVGGGVITGDVM

SEQ ID NO: 5125 - DNA, 2812 bp, DROSOPHILA
tttagaacacctgatcaaatcgtatttctacattgtgcgcaaatccatacaagactcggttccaaaggccatcatgcatttcttggttaactacgttaaggacaacttgcagagcgaattggttacacatctgtataagtcggataaggctgaaaccctgctcaacgagtccgatcacattgcagtgcgccgaaaagaggcggcagatatgctgaaggtgcgcttggctagcttatacttagcttgacatcgttttaaacttacttttgatttcaggcactgacgcgagcgaatcacatcatcagcgaaatccgcgagacccacatgtggtaggctggtcagcgattggagcaacccgtttcgacttaataatccccgcatataagcaacataaaaactatttattgaagacgcgttcaaagagaacgaactcctttgttaaatgttccccctaccgagcactgaaatatcatcaaattgcatgcgacccccaaattctgggcctttcatttagccaactcgcatttctattcgcctggcatttgtctatcatcgagcctctccgctttttaaattaataagaagttgtagacgccgtgattggtttgattaggttactcaaagcacttattacacattgaatagtcaaataaagcagaaaaggttgattcaaacatagtagatgtgttttctgtcacggcagctaaaagtttacgaaggcaacgtcatcatgttgaatgatacacctggaatttcgattagataagccattatgttcgtaaagttgctaggctcagtctgaagattaataagtgtttaaatctgataggagttgaatcttcctgagttttgagatgcgtagcaattgcttagccttactaaaaacaaaatttttcttacaaattatgttacatgtaggtgtggcttgagtgaactagaagtacgttcgttcccctgattgaaatcactgccactcacctttcgtaataaaaactttaatacttggataccagttaaaatctaatttggaaaacgtcatttgtattgcggcgaagaaacagaagtgggttccagctggggcgtggcaaatcccgaagataaggatgtggtgtccagtgctccaatcctgtgttgattaaatgctccgcgatgcgtatgaatcggtttatggggcagggaacagttggggtagtgactctatgaccgcctttggctgtgctgatctcctctaggcgcgatttgtgtcggacagcacgcggacaatgcagcccactcctcccttggcgaaggccttctcatgccactgcagcaggtggccactggagccctccgaggggatctcgaatccccgatatatgtacttcatcagcacgtctattaggtcgttctggtccaaggtgtcgatggcctggtccatttgcgtcgacttgatggacagcagcacccgcagcgtgatgttcagggcgtggtcctgcaatgcaaggaaggattagctttatagggttctcgatacgaataggtgtggctacccaccttcacattctggttcttgcagcgcagcggggcattctgcagcgcactcaggagcgcctccacggattttccctgcgtcagcagcgtcgtaatctcgctctcatccggaccggctgccgcgctctccaccccatcatcctcccggaagttgtcctcattgtactggtccacatcgatcttgcggaacgcgttgctggacgtgtttttggccatgttttcgctaaattcccaccacttttctctacaaaaatatgaatcacaaaatccggcaaggcaaaacagatgagtggcagtgtggccgaacctcagaaaatactagctgcagtattattaccaaagcgccaataatgcacaggatacatccaagcaacaaaaaacatgagtttcacaatcacttatctcagcaaatgaaagtctaatgagctttaaaaatattttgagagtaggtttcgaccaatcttgttccatttttacttcaaagaatatgattgatatgattcagtatttctagctggtgcttttgacctctcctggccacactgcagattgactttgtttttgtttcaagtgagtccaagaaaatcgaaattatttacgtttaatatatttctgggttttcccggcagcatggcaaagtttttgggcatcaaccggctgacaaagctgttccagatggtccgcgaagccggaggactgaagcaagcgtacctgaagctctataggtgagtctcgatcttatataagattgctccaatcctgaaaaccgcatatgcgctattttccaggaacgatgatctgaagatcggaaccctggtgggcatcgacaagtacggcaacaagtacttcgagaacccgtactacttctacggccgcaatcgctggatcgagttcgccccccacgtcaacatggactacgatggatccatgattcccgccgagtggtacggctggatgcactacaaggtgggtttagactacatcttgtcgcacatgttattacctttttccttatagaccgatctgcctcccattcgcgatggatgccgccccaagtacaagtggatagcggaccacagcgagaatctttccggaactaagggtaactatgcactattcccattaagtaagccccctaattcaatcctgctcttgcagaggcctactacccctactccacaacacccaacaaagtggaggcctgggaacccaaggcgaagaagcagtagtgtggcatagcttataattatttttaaattcaagtgcaaatggctgcgattga

SEQ ID NO: 5126 - DNA, 750 bp, DROSOPHILA
ttttgccttgccggattttgtgattcatatttttgtagagaaaagtggtgggaatttagcgaaaacatggccaaaaacacgtccagcaacgcgttccgcaagatcgatgtggaccagtacaatgaggacaacttccgggaggatgatggggtggagagcgcggcagccggtccggatgagagcgagattacgacgctgctgacgcagggaaaatccgtggaggcgctcctgagtgcgctgcagaatgccccgctgcgctgcaagaaccagaatgtgaaggaccacgccctgaacatcacgctgcgggtgctgctgtccatcaagtcgacgcaaatggaccaggccatcgacaccttggaccagaacgacctaatagacgtgctgatgaagtacatatatcggggattcgagatcccctcggagggctccagtggccacctgctgcagtggcatgagaaggccttcgccaagggaggagtgggctgcattgtccgcgtgctgtccgacacaaatcgcgcctagaggagatcagcacagccaaaggcggtcatagagtcactaccccaactgttccctgccccataaaccgattcatacgcatcgcggagcatttaatcaacacaggattggagcactggacaccacatccttatcttcgggatttgccacgccccagctggaacccacttctgtttcttcgccgcaatacaaatgacgttttccaaattagattttaactggtatccaagt

SEQ ID NO: 5127 - protein, 151 aa, DROSOPHILA
MAKNTSSNAFRKIDVDQYNEDNFREDDGVESAAAGPDESEITTLLTQGKSVEALLSALQNAPLRCKNQNVKDHALNITLRVLLSIKSTQMDQAIDTLDQNDLIDVLMKYIYRGFEIPSEGSSGHLLQWHEKAFAKGGVGCIVRVLSDTNRA

SEQ ID NO: 5128 - DNA, 6298 bp, DROSOPHILA
ctttttgttttaaccccgccacagaaaggattatcagtttcggtttcgggtggataggaagtaggtggagtaggtggagttatatagccggaaacaatagatagatatagcagtgggaagtccgggaagagtaagagaaaaacagagaaagaaaaagagagagagaaataaatattattttcattaagtcggttagtcaagctggagtttccaaatctggtaaactttgattttcatatggcaggtgggaggcaactttgttttcttatttttttttattttttttcaaaattgctgatggtatattactgggtgcacttggttactacgatatacgagggttggtggtggtggtattcttgggaggggtaagtgtaacacgaacatgattacaaacatcacacacaactatggaaacactaatcacactccaagactcaggtcaaaatcgggtcacatgcagcatgctcggcaaataaacacacacataaggctagatacaatatctgcaaattacgttcggccaagatttccgctcggttggataagttggactcaggcagagtggggggggggtaaaactttgtagaatcaaatgctgggaaatcggatttgtgaaggtggctctaaactctagagtttctgcttgctacgaactagtttccaagtttttcaactatttgacacttttagttggggatttttcgggttggaagagagcaagaaagttggaggttgttaggggtagttaataaaggtttcttaaccaacacacacccgcccagcagagtccgagttttggttagctgatagttagatgatagatgaacgaaccggggatttcttatttcgtatataactgaggtttcgttttgatttggtttcgattttttttttcgattttgttgccgagtttttcttgttttttttttttatactgtgttttgagctggcttatcaaattacaaaatatctttctggttctgttctgttttctgttttagtcgaaactgaaggccatatctgaaatacaaaagttcgagataatacaaagtatattccaagtttttcgatcaattacatagctaggggatctctgattcggggcaattagactagaacgaaaggtcacaaagttacacacgcacacatagagaatgacagaggatacgtttacatatctgattaaagtagtatagtatcttatacactgctaacgaagaaacgaacgagccagaactgaagaacaacacgtacacgatatatatagaatataatataacttatgtaaagataggtggagaaatagagagagagaggaaaacacgtagaaaattacatattgtagttatatatacgattatatagcagtttgaagtggtagtagtaacagtagatatcagtagcagacgtcgtccatattcaaagtaaccatacgaataatcatatatctatggctatttggcatccagatccacgtaccacaatccgatttggtctatatccgctatatgatctttatccagtccctgggttgcgttttcttttactctcaacttttccttcgtttactcatagatcagtttgccaaattcttatacagaaagtatcatcatcatcgcattgcaatttctagcttggaagtaatggtatggggagttcttgggttcttcatctggttctgttgtggttgttgtcgtatcgtggttcatgttgttgctgttgtgtttgttggcttagagcagcctgctctttttgccatcgcgcggtttgccaatcattgttgtatattcatctatttacacaagatttttggggtttggattggatcgtttatcaattaaatgaaattatattaaagtaaacgaaagtgtttcggagcatagatatcaaaaatcaatggttgaaataggtacatatataaaatagagtctcgtatctgggtataaaaatgattgaagaaagggaaaatatatatattgcgatacatattcttgtattttgctgactcaatggaataaagtacatcccaaactgattgaaaggcgatgactttcaatatacaagtatgccttcgatggatgaagaaaaagtaaaggtctgcttagtacatatatgatatggaaatgactcgagtctttggctttacgcttggagttcaagtaatttgtagatcgataagtatgttaaaagaattaagagaaggtaaacaatatttgtagaaatttctatttgactagtaataattcttccttaacattcccatcgattttccacttgaactccatgagacaccattaaatttcctttgaatgatttgcgtaaaattaaagctaagcttgaaattgtaaaactggagtatgaataaagaagccttaaatgcatggtaattacatagagtacatatatacacgtacacgacgattgatatgttatataatggatatagtttagccaaaaggggaagcgcacccaaaatcaggggtcgttatgggcaaagattcgcatttcgtggcagcatttactgggctcttaaattaatatcttttactattaatattcatttgccaggagaaactgcgagacggcacaaaggataacgagtatttataactgggttgtgtattgcaaagttaatccattgaactcgattacttttgaacttcagggtgcagctgtgcgagctttttaagacaggttaagaacttgtattagctggtttgctcgtcctcagtacttttagtggaagacattaggttttggcggtgcctttttgaagctatgttcgattccaataggttttattttactttttattttgtactttgttggtggctttagctttggcttgcattttgcttggattgcgggaatcagtgtgatgtaactccattaaggacactcagagactcacctgacttggggctgaccaggtcctttgttttattgttcatgcgacgtggtccagtaccgccggatcccatgggaccggagtggggacccgagcccggggtaccgcaaccactgacaccaccaggggcacctgaaggatacaataatcccaattagtaagtaaacaaaattctagctagtatttatgaatatatagtaataatcagctcgtctattcccactatttctctaactacaataatttacgccatattgtaaacacgcctcattgcttaatttattatacacgattctatttgcattatattcgcattaatcgtaatttacgatatattcgaacgtctcggatagtaaatgcaatttcaataaatcagcaaatgaaagctggatgcttgtgcattttctagaaaatattcgtattgaatagattatatattctgagtttggattgaaatttccttatcttttgtttatgctgtatgactaactatgaaggtagatccactcacctggcagtctgggctggcgcggctgctcgacgggaagcactcgtctccgcttctttggcagtttggccctggcctgcgtgtgcgagtagtacatggcgaagttgctgacgatgacgggcactggcagtgcgatggttagtacgccggccagggcgcagagggcgcccacgaacatgccgatgtaggttttgggggccatgtcgccgtagccgacggtggtcattgtgaccagggcccaccacaggcccagcggtatgctgttgaagtcgttgtgcggattgggctggatgcgctccgcgtagtagacaaggctggcgaagatcacgatgcccaggacgaggaagaacaccagcagggtcagctccttggccgaggcccggaacgtctggatcaggatcttcagtccggacgagtggcgcgtcagcttgaacagacgcatgatgcggatgatcgagaagaactcgaggatgtcagcgttctccaggtgcgatgcgaaccgctgaagcactagatcgatataaaaactaagcgtcgctatgtagtctatgatgttaacagatgacttgatgaactcccacttgttcggcgatgagataaagcgcacctggataaaaggatataatatttattaaaggtctttactaggagtttctaagcagttatgatctctgatttgatctcttaccaatatttcaaaggtaaaccaggcattgcacacgcattcgatatagaagaaggctatgtgcgcattggtctgcgttttgtccaaaaaccagccattacttccattcgcagttttcactgtaatgttccggacgatgggtacccgcatatcgggatgggtcttcaggcagaacgacaggatcgaaatgcagatgaagaacaccgaaaccacgccaatagtctagaagttagacgagaattggtaaaaatattataattaaataaatctagtatctatagaaatttgttggaatgattaatgtgcttatatgctttgatatgcattcacttgaaataaaaatagatgtctagccgtttgtgtatataataatataattacttattacaatgcttttaaagtggatttttcactcattcggaaaattgttcagcatgcatatatcttaattgaaaaatgaattaaagtgtttcctctgacacatgcaattttgcatggaaatgatgaaagactttgataaatatagaatgcaataaacatctatagatttgacttaccttggctgcattggaactgtagggctcatcgaacaaggaccaaatgcgcggcttcatttcctgccaccaggatattgtgcctttgtagtagtcctcctcgaagccgaatttgcgtgccaattcctcttcggacggtttttccgtatccagatcgagacgatcgagtacggctagggtttcctgggtgtcgcgatgctgcaatagataaaataaggctttaattttacgaatttttaaatataatatggcactaacctgtgtgtaggtcatccaacagcagggctccacttggttcgagtctaggccccagaactccaattcctcctcaaacagcggaccgcacacatccgtgggataatgcagctttccagttctgtacgattgtgaaaagttaataatatataacaatcggattctaggacacccacctgtaatagttgagcacttgtgcgaagacgcccggatgccgatcaaagaagtactcattcagtatcggatcatagttggccagcgcctctgttaatcgcgataatcgcgtagccggaatcttcttcagcgtggccttgtaggtttcgtgcctaatgccacccacattgagcaccaccctgttttccgagtccatgttgatcagattcatggctgcatgcgcatagtgttgcatttttttaggtatataagtcattgtctggatcaagagctcaaaagccaaccaaacggtgtgaggctgaacggtttctttttgtataatttgttaaattaaattaagattaaacaaataaggtaataggtaaagtaaaacttctgtttgtggtttttgcttgaggtgcttttaaaaccttaatgtttcttgcgtgagtgtgttttgtgtgggcttatgttttctatggtttttgggacttcattgttctgattttacgctatccaacctgaatgcttttcgttgtccttgcccacgatttatgcagttatgcctaccactccgtcaaggcaccacttcgatccactcttcggcacccaatggggatcaggcctcaggacctagtaccaccactggaaaatatttgcccagatgttagaaacacctccattgatccttgcaatctagctactcactacgttggggctgagttggacaacatgccgctgcaatagaaaggtttacaaatattatctcaccactttaaattctttcttttactttggttgaagtcatatttagtatagaaagttttcggggcattcgtgaagtaattacacattcattttaaggagacgtatggatcccttcaatttaatggttcataattatgagtttaatggcctagacacatgtgctgcatatccaaaacgacttttatatacgcacgcacaactatttttaggaacaactaatttagaggttgcccatggaaaatgtaatatattttggggaaatatttctacacttactactttaaaaatttttaataataattaattgctgatcaaatctcttgacctcgcctcgctaagtaaggcatacaaattattgattctaaatcaatatttgggatatacaaatcattgggaaactcaaatatttcatatcatttcagatgcgtggccaaatttcgcacatcttcggattatggaagaat

SEQ ID NO: 5129 - DNA, 1497 bp, DROSOPHILA
atgaatctgatcaacatggactcggaaaacagggtggtgctcaatgtgggtggcattaggcacgaaacctacaaggccacgctgaagaagattccggctacgcgattatcgcgattaacagaggcgctggccaactatgatccgatactgaatgagtacttctttgatcggcatccgggcgtcttcgcacaagtgctcaactattacagaactggaaagctgcattatcccacggatgtgtgcggtccgctgtttgaggaggaattggagttctggggcctagactcgaaccaagtggagccctgctgttggatgacctacacacagcatcgcgacacccaggaaaccctagccgtactcgatcgtctcgatctggatacggaaaaaccgtccgaagaggaattggcacgcaaattcggcttcgaggaggactactacaaaggcacaatatcctggtggcaggaaatgaagccgcgcatttggtccttgttcgatgagccctacagttccaatgcagccaagactattggcgtggtttcggtgttcttcatctgcatttcgatcctgtcgttctgcctgaagacccatcccgatatgcgggtacccatcgtccggaacattacagtgaaaactgcgaatggaagtaatggctggtttttggacaaaacgcagaccaatgcgcacatagccttcttctatatcgaatgcgtgtgcaatgcctggtttacctttgaaatattggtgcgctttatctcatcgccgaacaagtgggagttcatcaagtcatctgttaacatcatagactacatagcgacgcttagtttttatatcgatctagtgcttcagcggttcgcatcgcacctggagaacgctgacatcctcgagttcttctcgatcatccgcatcatgcgtctgttcaagctgacgcgccactcgtccggactgaagatcctgatccagacgttccgggcctcggccaaggagctgaccctgctggtgttcttcctcgtcctgggcatcgtgatcttcgccagccttgtctactacgcggagcgcatccagcccaatccgcacaacgacttcaacagcataccgctgggcctgtggtgggccctggtcacaatgaccaccgtcggctacggcgacatggcccccaaaacctacatcggcatgttcgtgggcgccctctgcgccctggccggcgtactaaccatcgcactgccagtgcccgtcatcgtcagcaacttcgccatgtactactcgcacacgcaggccagggccaaactgccaaagaagcggagacgagtgcttcccgtcgagcagccgcgccagcccagactgccaggtgcccctggtggtgtcagtggttgcggtaccccgggctcgggtccccactccggtcccatgggatccggcggtactggaccacgtcgcatgaacaataaaacaaaggacctggtcagccccaagtcagatatggccttcagtttcgactaa

SEQ ID NO: 5130 - protein, 498 aa, DROSOPHILA [sequence omitted]

SEQ ID NO: 5131 - DNA, 3526 bp, DROSOPHILA
gcacgacacgccggagcgaatgctagagaaggagtgtatcagtgagattgtgccttggcgcgattcccgccgctggctgtactggcgtctgcgacgtctcctgttggaggacgcatatattaagaagatcctgcgcgctcaggacaacctctccgtgggtcaggccaagcagatgctgcgtcgatggctggtagaggagaagggtgccacagaggtgagacattttgagcttccactccaggagaccactaaattattctcttatgtataattaggcttatctgtgggacaaaaacgaggagatggtgtcttggtatgaggagcagatcaatgccgaatctattgtttcccgcaacgtgaactccgtgagacgggatgccattatttctaccatttcgaaaatgctcgaggtaagagcagcccaaatcttaatacctataaattgggaactaactcctctatttatatatcttttcaggactgtcccgacgtagcgctggacgctgttgtgggtctttgccaaggtctgacgccagtgaatcgaggcgtggtcgtacgcacattagcccagatgcagctgaatgaggagacctctaacagcaaccagggatgattctacgctatgttctaagttctttttaggccctctatttcatccttcccgttcccgcccttcaccacatttctcagtcccgctttgcgcttgtaagatatcgcaaggcgtgcatgatgtgcattttgtttagttaaatttgtttaaaagtaattagcgtaaatctagttatgtattggagttgtaggcatgggttaatttgttgcctaagtggcccgataaactagttgtatcgtgtacatatttgattatgtatatcccctgaatacaaatcattccattagttgtataagaactaaagtcctttgtacacagagccttttgaataatacgagttactgaaaaaataaatgtatggtacactacattaacaaaactcgctggattgcaaaaggggtttttcgtcttgttctgtttttcttttcttttggttccacaggatcgataatgtacataatttcatttatttttataattttaaaatgaaatctatcgcagtcgggggttatatcctccgattcactgcgttcctatatgccgttttttaattaagatgagtggggggagatgggatggcgagagcctgcttcagttcaggttatccatccaatcgggctcggcgacacttatcttctctataatggaattaacctgatagcatagcgactggatctgcctatcccactgaggcagtagttcccgattctcgaagtgcacaatggccgagatctggtcgatgtgtccgttcatgcgaccttcggtaatcatctgagaggcaatcttctctgctttcaccgcgggtatgtccagcagagcgcctagctcctcaaaagttatgttgttgtacagcttactagccgacaacagattgtgctcgaaaacagcccgatccaagatcgaggatccatcggaggtggcagccttttggtggtcctgcagcagggcctcgaactcctgtagctcggagcgccgaatgatgcgctccaagtacatcttttccaaaattccataggccggcaagtgctgacagcgttcatccttgaacagagtggccagcatgcgggaacgctgctgtccggcagaggcgaggactgtgcagatgagcgctttcttcagtgccgtcatcctctcgccttggtccacgatcttgcggtaggagagctcgttatatcgctgggcggcctcgataaacttgcgcctgtaatccaggacacgagcataacagactttatatagaacctaaaaggtgcgatttttaacagattacccatctaaaatagcgctaggaagccatttacctgcaactcctcggaattagtttcggcctgcagcaatgatgcccggttgatgaacagctccgcctgcaccgaatcgttgtcctccagatagagtcgagcgatctttaagtaggtgcccaacttgcactccacggagtactgtttctgacccgtctccagaggaatgccaactagcactgtggccgcatcgcgccactgctggttgcgctcatagatgttggccaggtggaaacgtatgccagccacttgctcttcgaacgagatgacgcgcggattgaccttttccagggtgaagtgagaaagcatcttggacagatcgtcaggcaacttgctcagctcgctgcccacgtcgttaaggatctgccgcgagatcaccaggctgacgtgctcgtttacaatggcctccacaaagagccggagcccatcgatcagctcttggccggtgttcgtcagcacagtcttcagcagctggcggtacttgtccgcctggtccttgtgcgtgccagtgaagttgatcaggcccatcagctggctacgcagagctgccgtcgagatgccgtagtttgcggccatattcacttctatacccaattacttcgcactagctaaaaacaacaacgcaagctcatccctgttatcgatagctcgcaaatccggccgggacagtgcaggacgcctagcttttatctagctggtgttggaaaatgttcgatggtgatactcagcttacaaatttagttcgcaatttatattttatttattattacctatctatctatgacttctttccatagataggttttgagtaaagaccaaaccacatgaaaatgttgacataaaaaaatgtatatctgaggataaaatttaaatattacataacataatataacatatttaaaatactatctgcaaagcgcaagactcttaccaaggcttacatttgttctactcgtattatcttccaataaaatatttatggaataaaatatgccaataaaatattggcagtatttcctttcagcattcgatttttaaaggaaggcctataatgattcggtaaggtttaaaattcacttaatgcttacacttgtacatactttcccaataaattatttaaaattggcgcttcaatccaagctgcagtctatcggtgactgcattcttgaaatatcgatacaaaaatgacagtcggtgcgctgcagtaaacagtgaaaaaatatacttgtgtcgagtccaattggactgcgaaaactgcattaaacaaagaggtcaaagacaatctgcaagtggtagtagctagagaattactagaaactcgagatattcagtgcaaagaccaatccattcggatccttgtggaaaagggtggaggccaggcccacacatacatacactttcagcagcagcgcagctcgccgagtgaagtggaaaatgtatccaaaggagtccaatggccgtttttgcgagcagatatgaacggaaattgccaattgacgacacccaggcgctgagctgcgagataaccgccgtccaggaggtcgccggacatacggtagctagatcgcgagggggcagagctgctgaccccagcgaaaaatcaataattgttgatgat

SEQ ID NO: 5132 - DNA, 1467 bp, DROSOPHILA
ttgtttttagctagtgcgaagtaattgggtatagaagtgaatatggccgcaaactacggcatctcgacggcagctctgcgtagccagctgatgggcctgatcaacttcactggcacgcacaaggaccaggcggacaagtaccgccagctgctgaagactgtgctgacgaacaccggccaagagctgatcgatgggctccggctctttgtggaggccattgtaaacgagcacgtcagcctggtgatctcgcggcagatccttaacgacgtgggcagcgagctgagcaagttgcctgacgatctgtccaagatgctttctcacttcaccctggaaaaggtcaatccgcgcgtcatctcgttcgaagagcaagtggctggcatacgtttccacctggccaacatctatgagcgcaaccagcagtggcgcgatgcggccacagtgctagttggcattcctctggagacgggtcagaaacagtactccgtggagtgcaagttgggcacctacttaaagatcgctcgactctatctggaggacaacgattcggtgcaggcggagctgttcatcaaccgggcatcattgctgcaggccgaaactaattccgaggagttgcaggttctatataaagtctgttatgctcgtgtcctggattacaggcgcaagtttatcgaggccgcccagcgatataacgagctctcctaccgcaagatcgtggaccaaggcgagaggatgacggcactgaagaaagcgctcatctgcacagtcctcgcctctgccggacagcagcgttcccgcatgctggccactctgttcaaggatgaacgctgtcagcacttgccggcctatggaattttggaaaagatgtacttggagcgcatcattcggcgctccgagctacaggagttcgaggccctgctgcaggaccaccaaaaggctgccacctccgatggatcctcgatcttggatcgggctgttttcgagcacaatctgttgtcggctagtaagctgtacaacaacataacttttgaggagctaggcgctctgctggacatacccgcggtgaaagcagagaagattgcctctcagatgattaccgaaggtcgcatgaacggacacatcgaccagatctcggccattgtgcacttcgagaatcgggaactactgcctcagtgggataggcagatccagtcgctatgctatcaggttaattccattatagagaagataagtgtcgccgagcccgattggatggataacctgaactgaagcaggctctcgccatcccatctccccccactcatcttaattaaaaaacggcatataggaacgcagtgaatcggaggatataacccccgactgcgatagatttcattttaaaattataaaaataaatgaaattatgtacattatcgatcctgtggaaccaaaagaaaagaaaaacagaacaagacgaaaaaccccttttgc

SEQ ID NO: 5133 - protein, 407 aa, DROSOPHILA
MAANYGISTAALRSQLMGLINFTGTHKDQADKYRQLLKTVLTNTGQELIDGLRLFVEAIVNEHVSLVISRQILNDVGSELSKLPDDLSKMLSHFTLEKVNPRVISFEEQVAGIRFHLANIYERNQQWRDAATVLVGIPLETGQKQYSVECKLGTYLKIARLYLEDNDSVQAELFINRASLLQAETNSEELQVLYKVCYARVLDYRRKFIEAAQRYNELSYRKIVDQGERMTALKKALICTVLASAGQQRSRMLATLFKDERCQHLPAYGILEKMYLERIIRRSELQEFEALLQDHQKAATSDGSSILDRAVFEHNLLSASKLYNNITFEELGALLDIPAVKAEKIASQMITEGRMNGHIDQISAIVHFENRELLPQWDRQIQSLCYQVNSIIEKISVAEPDWMDNLN

SEQ ID NO: 5134 - DNA, 3974 bp, DROSOPHILA
aaccagaataaaagtggagatctcaagcaaaaacaaacctgatcgcgccgaagaccccttcttctgccggcaaatatacatatgtatctcgacgaagtgctttgaaagttaaacttttgtcaggcgctattcgtgcgattcaagccggttggcattgaccgcaaactatcaaagcgaaatatcttgtcagctaatcaatggggattcggatttgattttggattcccattcgaatggcggctaccgcttttggtggcacacaggtgtcataactagcttgccattacacctcgtcgcgaagtggcgcaagattgcggcaccgatttggcgactgctgccaaaagtaagtgcaaaaacttctcgtactaattgattgctaaagacagtcgaaaccgagcatctgtgtagtaggggggtgggggggaggtggaagggggcaagtcaaatggaaatcggtccaaatatggacttggttatgacagagcggcatgtgtaaatgtcttaatgcagctggaagcgttgacttcagaagttgagttcctcctatctctggatgttttcgatgaaaaccacttaaacttcccaaaaccatagaaaatatataaaacttacagtagcaataactcacctggagaaccgtccgtaatcggggataccgtcatgcacatctattgaaacttcacagtcagatgggagggtacaaactgtgacccagctctgaactgaacactgcagctcagtaacaaacactttcgaaaccacaacggatcactcgaactgggtcacccaaccgcagtcgccactcgacacaaactgtcggccacgcccacacgcccctccgaaaggtgtctggtcggttttggttttgttgtgctttttacccactttttttttcaaaatacctcacacaaaataactgtttttctgtcggccattttgagagattttgctttatgtgagccccgaaaaaaacctgttggataaagctgaaagccgagtctcttaataataaatatatttataatgaaatgatcatatatatatataaaaaaaaaacaggtgtaaacaagacaaagctccaataattaattgcctagcgttaattgaaatgcataaattatacaggtaactttgccatatccgaagtcgatggcccttgggctccgccggcagagggcgagccattgcgtcgaaggtgcaagagtggtgaatcaatcgtatccagaccactgagctccggataacggttcttagcgggcgtgggcggtgcctctcgataggcattgacatcgttatcgtgatcgggattggggaactcactagccaaatgatagataaccttcttgaataggaactccgaaaggttggagcgcaggaagaaaaggaacatccagttggaaaagttacacttatcaattaccgccaataattcgttttcgtccagttggccaggcttggcccaatagagagaccagcgggtaaatgtgacactaattaaagtgggttagaagggttatcacattatgaaaacatatttcacacctatatccatccactcactttctgtagaagcacagggttaaaattctccaaagcagtcccagaacagtaacaatcaaaaggaaggcgtaccagaaccacagaataatgtagatcttctcgttcatgatgttcagcgccatcacgcaaagggcatcgtgcatttgaatggagccagagtcaccaaatttgtggaacttgcacttggtaatcttcgggaatactagatccaaaacgctcagctcgtcggaccaccgatttttcagggcatgtggtcccagtgtgaggaattgaccgcccaaaaaacggttggtccatgtgatctgcagcagaagattaatcagattgagcacctccgcgaagaccaagtgggcaccccacgattgattcagccgcatccggtcgatcattgtgcgacgaatgtccttgacccgctcctccgcctccgccatcgagggaatgttcagcttgccgatacgcagactatcgttcttcaggtacctcgttagacccaccattcgaaggccaaagaccagggccttgatccggccgccctcccaactcttccacagggcatggggaatgtagaagcagagagcctggaagaacaggacaaagggcacccactggtagtatgcatgccgcttgatcgtgtccttttcgggatcgaatgcccctataccaggtggctcacttcccggcctgtaggcagtttggttctggtcacgtacctatttggggtgcaagctatgttaataaatgatctactgccgccaaggcacataaataaaatctattctatcatttgatcatttcaggaatgggtatgtggcaacatatatcaaccaactaatagcaataaaacgactctaaatcgattaaccctatttaagttttaaccaataatcaaatagagtattgataacagttgctctcaatagatacttctgtgtaccccgtacatagatattttttttaattccctggtgacctcttataattttccctttgtgaccccgctgacttaccactgtgaaggtgggcgtgaagaagcagaaggtgttgatgaccggagacacaacaccgtcggataggcactggatgtgctccccgatgtactggcgcgacgtgatcaggagggtggccactaggagtattacgaaggtccatcgatagtgcagcttgaacactatattgtcgatgaccacacgcgtgagatcgaacttgaggtactgcctcaccgaactgaaggtgttcagcattgtaacgccttcgttatcttcggttttgggttaggttctggccccgatccgatccgatccgatcccacttctacttcgttcactttcttacgatgattacgacaactatggctgggtggcaattggaaacgggctggcttctgggttcggatggatttgtgcgctccgcttgccgcggctagctcctcgtaactgcaaggctcgagactctgcacttggtctccgggtctcggaaccttcggtctccggtctccggtccccgttcgccgatcttcatcaccattccacattcgtcggagagggctttctggcgccttatcgaccgctcatttttggccaggagagtcgcccgggcccgataagataacttcgtcgggcagaaatacacggaaatgccgaatcagcaatggtattgtgtttagttcagagttgtccaagaaaagagtaagggaaatatgagaacctactggagtgcgctacacttagcaggacttacgtagactattggactatgagaaaaaaaaaagaaatttttttcagcttctgactcgcagtataagctgagagaggggcacaatctttgtcacttaggtttcagtctaaaatgttagcaatttaattctttcagtgtagggctctcttgatacccaagaaaactccgaagtttttcggtcatatttcaaatttcgcccaaacatgagtacttcggcatgtattcggctcgtggcttcataagaatccgaaaatgataagacgaaagtcacagaaagagcgaaagaaattatgaaaataatactcattttctcagggtttacctcatcggtaagttggctaaatctcgccctggtgggtgggtgagtaacttcccacccatcgaaattcatccaagatccaagagcaaagaggccaagataaccaagcaaacaatcataggaaatatgaatcagtgcgggaaaatatatatgtacatatatgactcaagagattcaggatatcagcaaattagttacacttccaaaaacatagcaaaaatcccttagtgatgcaagaaatgatcacttggttttaagaataaccatagagacttgcattgaaatcattcaagtgtggaattgcaaattccgccgtaatctggaactctccgggtcttaaagcgtgccgctatcgccaccc

SEQ ID NO: 5135 - DNA, 1607 bp, DROSOPHILA
gcaagcggagcgcacaaatccatccgaacccagaagccagcccgtttccaattgccacccagccatagttgtcgtaatcatcgtaagaaagtgaacgaagtagaagtgggatcggatcggatcggatcggggccagaacctaacccaaaaccgaagataacgaaggcgttacaatgctgaacaccttcagttcggtgaggcagtacctcaagttcgatctcacgcgtgtggtcatcgacaatatagtgttcaagctgcactatcgatggaccttcgtaatactcctagtggccaccctcctgatcacgtcgcgccagtacatcggggagcacatccagtgcctatccgacggtgttgtgtctccggtcatcaacaccttctgcttcttcacgcccaccttcacagtggtacgtgaccagaaccaaactgcctacaggccgggaagtgagccacctggtataggggcattcgatcccgaaaaggacacgatcaagcggcatgcatactaccagtgggtgccctttgtcctgttcttccaggctctctgcttctacattccccatgccctgtggaagagttgggagggcggccggatcaaggccctggtctttggccttcgaatggtgggtctaacgaggtacctgaagaacgatagtctgcgtatcggcaagctgaacattccctcgatggcggaggcggaggagcgggtcaaggacattcgtcgcacaatgatcgaccggatgcggctgaatcaatcgtggggtgcccacttggtcttcgcggaggtgctcaatctgattaatcttctgctgcagatcacatggaccaaccgttttttgggcggtcaattcctcacactgggaccacatgccctgaaaaatcggtggtccgacgagctgagcgttttggatctagtattcccgaagattaccaagtgcaagttccacaaatttggtgactctggctccattcaaatgcacgatgccctttgcgtgatggcgctgaacatcatgaacgagaagatctacattattctgtggttctggtacgccttccttttgattgttactgttctgggactgctttggagaattttaaccctgtgcttctacagaaatgtcacatttacccgctggtctctctattgggccaagcctggccaactggacgaaaacgaattattggcggtaattgataagtgtaacttttccaactggatgttccttttcttcctgcgctccaacctttcggagttcctattcaagaaggttatctatcatttggctagtgagttccccaatcccgatcacgataacgatgtcaatgcctatcgagaggcaccgcccacgcccgctaagaaccgttatccggagctcagtggtctggatacgattgattcaccactcttgcaccttcgacgcaatggctcgccctctgccggcggagcccaagggccatcgacttcggatatggcaaagttacctgtataatttatgcatttcaattaacgctaggcaattaattattggagctttgtcttgtttacacctgttttttttttatatatatatatgatcatttcattataaatatatttattattaaga

SEQ ID NO: 5136 - protein, 438 aa, DROSOPHILA
MLNTFSSVRQYLKFDLTRVVIDNIVFKLHYRWTFVILLVATLLITSRQYIGEHIQCLSDGVVSPVINTFCFFTPTFTVVRDQNQTAYRPGSEPPGIGAFDPEKDTIKRHAYYQWVPFVLFFQALCFYIPHALWKSWEGGRIKALVFGLRMVGLTRYLKNDSLRIGKLNIPSMAEAEERVKDIRRTMIDRMRLNQSWGAHLVFAEVLNLINLLLQITWTNRFLGGQFLTLGPHALKNRWSDELSVLDLVFPKITKCKFHKFGDSGSIQMHDALCVMALNIMNEKIYIILWFWYAFLLIVTVLGLLWRILTLCFYRNVTFTRWSLYWAKPGQLDENELLAVIDKCNFSNWMFLFFLRSNLSEFLFKKVIYHLASEFPNPDHDNDVNAYREAPPTPAKNRYPELSGLDTIDSPLLHLRRNGSPSAGGAQGPSTSDMAKLPV

SEQ ID NO: 5137 - DNA, 14422 bp, DROSOPHILA
ttcccaattccttcgaggtgatggcaccttcgttatccttatccaataagctatagatattcttgagcaggtcctgctcttcaacagacaattcatccattatgctttatattatgggaaggagaatattattattatgctagtagatatactttttcgataggattgatactcagttgaggtctgataagctttgaaggagttctacgattgaaaattgttattcaaaacattcaatataaatatttttgaaaaaagccaactaagagttagccttcggtctttaacagatattaaacaatctgcgtgctccatgaagttcataaacttttactgaagataaaggcattaaaagagcattctcacgcacagtttggcaaacaaatcacgtgctttcctggacccaaatgatatcatctggcggagaaactctttggctttacgcgtattattttatagttgaaccagaaattgatgtcatcggtggcggtaaaaaatgggcgcccaatccgcccaatgaggaaattccaggaagccgggcaactccaactgtcggtgatgacaatttgcgtggcattttaattgaactttctacgtgttcgagtggtgtactttgatttgatccccatccaccgatttttcgtcgatttgagtcaatgttaaaggcgttgccacaaaccgcaaactgtcgtgtctaggaggttggggaggggcttggtggctggggcctcgaaacgtgcctgaagtattattaccgccgtctgtgattgatggcctcatgcgagtgagtcagtggatttttataactctacgcagatcccttcctttcaatcaagcggcaaaaaatctggacatcgatctcgccgatattagctaacttcatttcaacttaactgcccggagtgctttgaataaagtggatttgaggcgatgccttgggattcttggccagattaagtcgattttttttttttacttcaatgaaaaaaatggcacgcaattgtttttcattattaatgcatactttatttgaaatcaactaactcgctatggtttgaataaaatcatttaaaattgaaggaagaccatggaattctatgggttgcttatattaactactgcaaaactcttaaaatttaagcctaattacataaggttctactggaatgttgcttgtagttggatttttgtttatgctctgctttacactaacttttactttcaaccatttttttccctacagcaaaatcgattaacgattttgtttactcattaagattagcttaccggataaggaaacataaataaaaaattggaattcactcagcaaacagcaacacttagtgttgggccacacattaaaaactaatcgatagactctcgtactaaaggcttaaacatttaaatcggtagatttaagctaaaatcctaacgcataagagctctataaaatgcaacaacggagtttgtttcgcttacaattatcgcttaactgattttattacttagtttaggtctattgccttgcctagacattgtactaaaaagtattaaattgtagatctaaatttattttaatgtacttgtgggtctaaaacgataaatcctcgtttaaccattgggaacaataactgtttgtcattatgatattcaactgttcataagaccttctaaatgaaataccagaaaaaacaaccgagatatatatttattaggaatactactactttttgatatttcaaattcgtaagagctttgataaatagttttccaaattgtgttgtttttctattccgattttacctccattaatggattgttttctagttctttctcggtttacttctaacgcctcattatgtcctcaatgctgaaccctgttcttctcggtggtgcaggcggtggtgctatgggcggtgctgccactggtggtcccttttcggtggtggctccacttgtttccgtactcggtggttttcccagaagctgtctggggggatgtcgcgacatattcaaagcatatatgctgggactatccacaaaggtcctttgacccaatccaggatggtggtgcggatccatcaagtccaaggtcggtgccggaagaatcctctttcgcatgggtatcgatcccaggaagctgggcatagcttcatgcggtgaatgcaaaggttgattgggtggtttacccgactccggctgggttattatagtgggtggtgtatgtggtggcggtggaacaccagccttcgaaaggttcaagctcttgtggtgcaagtcgcgtcgaacgtgcagaatgggcaaatagggatccccgttgggtgggagtaagtgtggatgtcctgggtgctggtgggttggcggaggagctccaggtggtgcaggcggcggtccagctgccccaggtggtacagaatatcgcacaaaggaaggtggaacgggtaggctggcaatgccagagttcccgggttcctcctgatgtttctcgccatgtggccgcattgtgtaggtttcaccaccctcatgatgacagtgggtgactccctggcgttccggcttggtgcccactgacgacgatgattgcgatgtggcggcagccttactcgcctggaaacgcgccactagtgccacttctgcctgctcctcgtcctcgggatcaaagtcgtcgtcctcttccctgggcaaatcgtgtactcttggcagatcctgcagttcctcttcctcgtcgaagtcatcgaactcctcttcgctttcctcatgatcgatggctgccttgcgcttgagtctcattctttcggactcagatttctcacccgatcctccagactcgcccaaattgtgaactggcgactggcgaggcgagtccacttccagcaacgaatcctcctcgtcgccacttaaatttctggcctcatcctcttcgcccacatccacatagtccccggagttgacctcacccactgcatgggtcaaggcatggcgtcgtagatcgcagttacggcggaaaactttgccgcatgaagagcactcgtagggcttgtgatccgtgtgggtgagcagatgggtcttcaggttggagcgctgattgaatgatcgactgcagacggggcacttgtggggtgattcctccatgtgcaggatcttgtggacagccaaggttctcgattggcagaatcccttgccgcattccgtgcatttgaagggtttctccttggagtgaatatacctgggcgaatacaagtggagaaacaattagactttattgttatagcgtgggcgttttcctggtagctgcaattggtagcccaggttgacagttatctctgctcaaatgcagccttaacttgaaccgataaagctcactgatatacagctttacaatactctaactaaggatataactggctagagcagacaatagaataaataatataatactatagcatataatacctatctttctctttcaaaatgaaacctaacctggatttgttttaaccttaaacccaattctttaaagtttttcattaaagaaatcctatgattttgtatcctcttaactgatagggtatttaactttcgtgtatgcgatctggctgcattaattttttatgtttatggcggccatcttggcaatggcgtccacttgctgttggatagcagcagccacagttaaaagttaaagtccccatcttcgacggagccacagattcagcatcgcatcggaggcagcagctgctggtggaaaaaaaaaaataaatgtataaaaacccaaaacaggttctgcctccgaagcaccgagattcttctcccatgctccgtgcgtttctggtaaaaaaaaaatacaaaaaacttaagaagaattagccccgcggcaaagcaaacaaacgacaaatggaccgataccgaacgatcaaaagacagaacgctcggacaggccgacacattgaagccgggatgctggacctgctgcctggcatcggcatgggcatcggcaccgggatacacagacccgatatatagcccccaaccccttggccatccctcaattttaatgctggtggaggagccccaaaggaaaaccaacagagttaattaactttgtgttgtactctgcggccgagttgaagttttactggccgtcagaggagctctgattttgggtccgctttatggggacttacttatttgagttgaggtaggaaaattcgtcgtaaagtttaaacatttcctggaaaattccttatggtaaaaggggtcttttgaagcgattgtctgatatatctaaaatcaataaaactccatctacgagtagtggtcgcctttcccttttggccgagattactgtcacacctgttcagaatgtgtgtataaactgcctagtaagcaataaattacattgatctaattatcctttgcctttacagggtattccattattcgccattcgttcacactttgagcacaaagaataactccaggcctgatggcaattacccgagcagacactgcccccttttgtgattacttgtaccccaacctcgactcacctgtgatccctcaggtgatcctgtcgccggaacgccttgccgcagatatcacaggaatagggccgctcgtccgtgtgtgtcctctcgtggatgagcagattgtacgacttggtgaattgtcgattgcagaacttgcagatgaactgttttttaggccgcgatgcccgaccaggagcacgtagcaggcgcctatcgagtccggcatgcattccaggacccaggccaggtggaaatagagctgcggcggcggctcctggtggaaatggaaaacttccggctcccgtgggcgatggacccggtccggtgagatatggcggaggtggcacgccagctggtccgtacaacactccaggcggtggcacaccaggaccgccgggtcctccaggacctcgtcctaacattgccgccgccgcagccgcctcccttagggccaactcctttcgcttgtccgccatcatggcaatgatttcgtaattggaattactacccgggcgcacctttccggtgggcagaaccggcacaaaggcagagatctcgcgatgatgcgatggtggtggcggtggcggcggaccatgcagtccggccaaatgctgctgataggccagctgtgtttcatacgctgagatccggctggccgatgagttgcgcgaatcgccgttgccattctgggagccaccatccgatcctccggatccgccgttcctatccgccgcaccaggaagaccgccaccacccaccgccgccgctgccgccgccatcgagttcatgaactgatccatccgggaaggtcgcagcatgggtatcgcaccgcctcctccgccggagatctcgctggatgagctttccgtgggcattatattggaggggctcttcacattccgttggaactgccggagatagggatagaacagaaaaagccgaaaataaaataagggtagtggtaaataacaattagtacacgattgtgctgggttaattgggctctcgtttttttttcgaggcttatcttaattgcgaaccgagtgcaataaacagatatttccacgttgtattctttattgctcctagggtagtactgggtatgataaaaactgacgcaaactggtttaaaatagatatattactattaacttagtttcttcttggtgggaagtttccttgtaattgaaatattcatgatcttggtttggcaaggcacaggaatatatacaatatatactatagaatatttactctttttatctcaaccggttgtaactcactttttagatgtgaaattcttcaaatttgctttttgcacttcttatcacaaaattaaacagctttatgggcaattaacttgcaaatagccaaggattatcacattagctgatctttcagaatttatccacgtgaacgtgatttagtagtcacaaaaaaaaaaataatgaagaaaatatttttctcgaaaataacccatacgattctgagaacgttttggtatcacagtacgtatattttcacagggtaactaagcagtttatcacattatggccctcgtctatgggtttgttgctgtgttttttccataggaattttattattattgttggtttattattatcagcggcggactgccgacgacggcgagtgaaactaaactgaaaacgagtcgcagtttggcaccgcgatcggttgcttccagtgcgcaggttagataagattgtgcgtctaaaaaaacctgcctccgaacctctgagactgagtaagcagcacagtagtaacgatataaacacacacacacacacacagttatattatatatgtgcctgtgatatatggcatatcggcagataccccggcacactcagatacagatacaaagatacagatacagaggcaggcagccaagttgccgtcggttttggtaaatgactcgaaccgaactcgaccgactgcttactggatttacgcaacaggagcctcgacttctgagtgcctcgaaagaagaaggggcagaggcaggggcaggggcaggggatcgggtcccggaacgtgatcatcacgataataacaaaataatgcacataataatgatcacaatgatggccggaccataaagtttgtggccccatattgcaaacgcttctggctgccatcttcccaacgccttgcacagcaaaaaaaatggcaccaattttgtacccaattctatggaattctattttaagatctatcttttacgataagattatatttgttataatattaaagaatttatagtaatatgctttaaaatttgtggctcgcaaagagtgcgccccagagagcaaagtttcctcagtaagtcaaccttttttttcggtgtactatcctcatttaaatgtacaaccagttgaaaaaaaaaatgctttaaaaataacccagctgtcggtgcaatgacagttttgcttatcattttgctagaatcgttctcgctgtctcggttgattttaatgcaaaatgctgcaacgtcattaagaccaacattaacattcggctaacaacaagtgaagtgatcgtcatagttggttaaaaatgagcttagccaagttttttggagaggcgcccattgttgaagttaccgttctttccgtacggatgactagtcattgtggtggtctcttatctatggaaattattttggcattgtctggctggagagtgcgctgtcagattagctctataaagtagctgaaatcatgacttgatcatgagtgtatcattgttatgggggaatgactctacggaccacgtatagttcaagtggatgagatataagcaggtcccaattattaattcaaatagctgttagatgtgggtaggtcttatcgtgctatcatatcagcgagtctttagtagacaacggagcacgcagttaagatattaggcaaatagatgatctaattgtaatatttacactagaaatgcttacgaaagccatatcgaagcgtttttgtttccctaatacgactagcacatgccaaactaatctccacgtttattagatagtaattggataattctttcagttcaataccttttaactctcacccatgcgagttctcgtgccctcactgataatctgtcgcagtctatctatattcgattcaataaagaacttatctgatctaataagtcccccaacttagggaacctttgctgtagatgagcgatggccccgccatgcctcattcgattacgatcccgataatcccattccaatttgggctcacgtatttctggtagcctcgaaaaaaaaaaaaaactgaagtgtaacccgttttgggtatttatatatatttttttcgatttcagtactttttctagggattgtttccacacttttgcatttacgaccgctttggacccacgtttcaccccataccctgtgcacatacaatgtacaattcagcgttcattatcttttttgaaacatcggcacttttgaaaacgtcaagccaaataagaaaaacaaataaaattcatgtaaataatggacatcatcagcaaaagcgacggcacgtagactgccgtagaaatattgagagagagttgtgcgcacagatacagatacagatgcggagatacaaagatactcgtactcaaagatccacagatacgtttgcgcaaacggttgcccagtaaatgaagccaaaggcttaaagtttccaatatgtgtgcgtctgaaggtgcactggaaaaattattgtgcactcttgtgaattatttaatattaaaaaaaagagtatatcaaataattctgaatatatagggaaatgaacaaaaaataattagtacgtacttttttatgtaatattgaaatgtgcatatttaattagagaggtaatattaatatcttttctttctctgtatcgtacatataataaaaagagccagaagaccaactactgctgggaggaaaataaaagatatcgaggagcaatttggctgccacttttttccctcctcttctttttgagccgtcttgcttcttttccttggatttctgggtccgggatcggttcgtttgctgggtttttgtgtgtaaacaactgaggccagcagaaacccagggcccagcagagtgaaaaggttttagttgataaaaaaaaaaaacagaaaaatatacaaacacacacagacacacactgagcaaacggatttagtatttgtatagaaaacgcagagagctgaggaggcgagtttgtccctctgatgatggcctacgatggctggaaatgtccatgcgtcttactgcccagtgattatgtattgaaaggggtatatcaggatttcccgaccaagccattatataacctttaatatcttagaaggatctgtgtatttacagaaaacagaatgttgctcaatgacaagaaaaaaataattttgaattaaattatcatttaacgttatatgaatcagtaagatcaatcccatgttacctactaaccggagctcaactattttaaaggttcttagcaatggtttttgaaatagggaccgttagctagaaatacctaccacaattttaaggccgaggtacacccgcggtctatcagtaaaccttttatttcggaccttatcttctgggccgagtgcttaccgggcccccatatgcacttcagtttgcttacaaaacaccggccaacaacaacaaacaagccagaagatgacgacgaagaaaagtggagtggtgggaggagttccccggaggaggagaatgggtatgggtatgggtatgggtattacgggtgaaggaatggaaaaagggtcgccgagatccgctgtgcagtgcggaatgctcttggccaggctgtgtgttttaatcccttcgggatactttttcttccaccgagtgtgcatatgtttgtgtgaaggtagctaataatcaagacagcgatggagaggaggaaaaaccgacgcagacttataattatagtcgaagaggagaaccaaagagacctgcacttcacatgcgttaatctgaaaaccctttcgggcccaagcagcatctgagattatagtcaaagctattaaaaatctagcataatcattgccctcggtggaaagcaagttgcgttgttgtttttctcttttttttttttttttgctcccgaggtaggcaggcgatcttcctgcgcagccttgtctataattttcttgattaatatccatgagatttacacatttggagtgctggccagaaccctgcacctcaaccctccgccaccccccgcgttcctgtgtgtgctggccattaatttaaaaagctttgctaatttcgcggggaaatctggaaacgaacaactgctaatgaagttttatgggttcgggaatgcagctgcagcaggattgataatgtcgttagcataaattgaaaatgctttcaagttacgaccaaagatttgttatgattaaagtatggagcacgcggagtgagcaagaatatccaccaatggatttttattaaatgataaatggcgagctgcagataaccagattcctctggttgctgaaataaatatttttttttgaattgaaaccttcttaggattaactgaagttcagacagttagttcctaaaattgaattatttcggcttaactttgactctttctaatccctcttgaagtaatccactttgaatgctaagccgatcttcgtataaattctattgtcatattgtgctgctcctttcattcgaactaaatccattcaaaaatttcacccttgaatagaactcttaagatcttttgttggtcggattgctactttttcaggcaatctattgtgttataatttcaatgggtcaattcttatttattggaagagtttatgctaataagtgtagaagcactaagactatgatttattaattcaaatgcaattggattatgctaattgcacacaaatcttggtacaaattatttatatatttttttcttcgacaacttttggaacccagcccaaaactaaacatgtaaactgataatcacctttccgctgtctgatttcattgatagcattaaaaattcatattccctagacaacatctaatttccccatcaaaattgatgagttcccgttccagaacaacaataaatgaactggtctatcaggtgaattatacacacgtgccaaaacgaggcgtgtccatatagccatttcaatttaaaacccgaatatggcgatccctaacgagccattgttctgcggttttatggtaaatctaaattcatcaagtattttgtcacgattttaattaatttcgatttcaattttcctgccacaaggcaattaccagcaacattttcccctgctgctggtgcaaccgaaaaatgatagttggtggcccaagatggagaggaaaacccacccaaagaggtaaagcgtaataaacttttatggtactccctttcttatgctaaaactctttttggacacaaaaccaaatggcccataaagcaagacaatgaatatccaaaatagatctccactgaggcgaaacaaaagccaataactttatagaaccgcaaccaaaaaatacaaaaaaaaaataataataactcagactgtgagagcgcgggaggcgttctacaaaaaaaaagcttaaaaatgaaggaaaaagtaaagcatttaaaagaaatcaagagatgtagatgacgatgatgatgatggtctgaggttgaggctgaatccgaatccgaatcggtatctgaacccaacagaagcttgcggcaattgcgtttcctctttggccacacgttctggacaattaaagccccagccgagctccgaatctgaatcgagccaagttaagacagcgaccacgaccgaaaaccgaaaacagaaaaccaaaaaaaccggattccaagccgagaaggagcgaaaaagacggcgagagcgaccactggccactggcactggctacaagtgaactggtttacaaagaaaagaaacagaaatgaaagaaacatgtgaaaaatcacgatctataaagccgatgcacttaataccctaggcaaaataagtaaataatactatagatcaaactagagtagacttgttgaaaaaaaaacactggaataaataagaagcttataaactatcagcttattaaactaagtttgcctaaatttcgtaaaatatatttttaaaacctaacgcgatgctttgaaattctgtaaaattaaagtttttcagaaatgtaacgttattaacaccgattaatatttttaaataatattttacaaattgtgtacaccattttcaaacgaagtacccttaccaagagcacccataagagacccccagaattccaagcgaaggtttttcgagtccggctcgaaccgaccaactcgaactgagcgccacagcaacaacaatggggcaagcgggtggttcaggatggtggggaagtttgcggggggatgggggacgtactccaccgtggactgtgcggcaccacactgagttcagtggcaatgacagtggcacatgcagttgtagtggaagccgcttgtcggtcgacagtccgccaaccgccaacgttgttgcgctctctttcctgttttttcgccccgtctcattctatttgtggagcaggttttgagatatatcttgggtctttctctctctctccttctctgtctgcgtactcgttatatttttgtactcgctgcctttttggccaacgcaaaaaataccaaaataaaaaaataataaacgtaattagctagccctacgccacaaacagaaaacaaaaaaaaaaacaacaaaaaataaaacaagtaaaaataagtggtgtggaatttttgtgttcatctgggaaggcagggcctgttctcggcggaatcttacctgtgggttaaacagaagaaagccccaggctctttgggctttatctttgcgtcctaaagtatccaagtagttgtttcaatatgattttgctggttttttgtcagtttgtaagctttgaaatgcttggcattgtttttggtttttaaagtagtaatttatatcatttaagtggcacttgaattgtatgttgttttttcttgttgtatttgtttgaagacttctgttaatacgattctgtgaatttaaaagtaaataattttattaaaattttcaaaatatttgtcggaaattttttgttatattttcaggtttgattttaattttaacaagtatttcaccgaatcattctcaagtaaatgtatttaaaaaaacacgcacactaagggacaattttgagattcaaatcacggcacgatcgccccagggggtggggctgagggggcggcaggggggcggttacgggagcagcagcagcatcaacggcagtcagctaccacaaaccacgtagtttttttccttccaaaatccacgtacaactcgcgcacaaacacacgatgtatttgtatctcacagatatgaaaaccgaacgaagaaaaacccgaaccgaaacctcaacctcaacgaactgaaaaccgaacgagaacgagagatacacggcagctgaaatgtgtttttctacattttgtttgaaataggagctgaagccagtgcagctaccaattcgctcctcaagtagtcccaaactcttcccacacacagagtcagttgcagttgaaaagcgcttttctcgaggcaactggcgatgcaacaagttcactcacacacacacacacactagcgctctgggcccgctcaataagatacatcggcggcgaaagatacagatagatatagagcgagaggcactcacaatgcagttcacttttccaacagctattaccagcgatccgcgcgcaggtgcgttggccacgatcaactctcgaagactgagccacgaacccaagaaacagggcccgaatggaaaaagagagaatcgagagaatcgcgggctgagaaatgcgtagaaagagacaagcgacgagtagcgagcagtggcactaaaaccagcttagtgcactgtggaaaaagttttaacaattcttaaatatctgaagagtaaggctctaattttctgtaaataacaacagtataaatctatctgcttaaatatactagataaataatggatgcatttacatatttttctgaattaactagtaacttatattcagtttgaatatagtacgacatttctttcagtggaggagaggaattaaaccgaactcaacccaaacccaaccggccgccagtcgcacgctgctaaatggacggatgggcccgtggacggacttatatggagactggcactggcggagcgtggaacgtgcattcgtacgacgagttattgtcagttagagcgctacctgtttaccgaccgactaccgactaccaccgactgcttttttttttttggcccagtcgagagggtagggtacaattggcccgggtgttgccagattgccgttgctgctgctgcccatggatcgttatggtggcttcacccgaaaaggaggaggagggtgtaactctggtagttccctgtttattgttatgcctttttagtgggggtgtattttgttcttcggcttttgttgcggtttcatttaggggaatgactaatcagaaagcatttttagggaggcaaggtgataaggtttcttcgaagaaggggttgccaagtcgaaagttggggtgaaataaagtgcattactcacacgactatatatctatattatgacaagttccaatgttctactgataagtaaatatttatttggaataattagttggtagctttagggaaaaatatttatacatatgtatttaaatatacactgatgattaatcggcagccgagttatacaattcatttatggaaataggtcgta

SEQ ID NO: 5138 - DNA, 3425 bp, DROSOPHILA
agtcttcgagagttgatcgtggccaacgcacctgcgcgcggatcgctggtaatagctgttggaaaagtgaactgcattaatcgtattaacagaagtcttcaaacaaatacaacaagaaaaaacaacatacaattcaagtgccacttaaatgatataaattactactttaaaaaccaaaaacaatgccaagcatttcaaagcttacaaactgacaaaaaaccagcaaaatcatattgaaacaactacttggatactttaggacgcaaagataaagcccaaagagcctggggctttcttctgtttaacccacagttccaacggaatgtgaagagcccctccaatataatgcccacggaaagctcatccagcgagatctccggcggaggaggcggtgcgatacccatgctgcgaccttcccggatggatcagttcatgaactcgatggcggcggcagcggcggcggtgggtggtggcggtcttcctggtgcggcggataggaacggcggatccggaggatcggatggtggctcccagaatggcaacggcgattcgcgcaactcatcggccagccggatctcagcgtatgaaacacagctggcctatcagcagcatttggccggactgcatggtccgccgccaccgccaccaccatcgcatcatcgcgagatctctgcctttgtgccggttctgcccaccggaaaggtgcgcccgggtagtaattccaattacgaaatcattgccatgatggcggacaagcgaaaggagttggccctaagggaggcggctgcggcggcggcaatgttaggacgaggtcctggaggacccggcggtcctggtgtgccaccgcctggagtgttgtacggaccagctggcgtgccacctccgccatatctcaccggaccgggtccatcgcccacgggagccggaagttttccatttccaccaggagccgccgccgcagctctatttccacctggcctgggtcctggaatgcatgccggactcgataggcgcctgctacgtgctcctggtcgggcatcgcggcctaaaaaacagttcatctgcaagttctgcaatcgacaattcaccaagtcgtacaatctgctcatccacgagaggacacacacggacgagcggccctattcctgtgatatctgcggcaaggcgttccggcgacaggatcacctgagggatcacaggtatattcactccaaggagaaacccttcaaatgcacggaatgcggcaagggattctgccaatcgagaaccttggctgtccacaagatcctgcacatggaggaatcaccccacaagtgccccgtctgcagtcgatcattcaatcagcgctccaacctgaagacccatctgctcacccacacggatcacaagccctacgagtgctcttcatgcggcaaagttttccgccgtaactgcgatctacgacgccatgccttgacccatgcagtgggtgaggtcaactccggggactatgtggatgtgggcgaagaggatgaggccagaaatttaagtggcgacgaggaggattcgttgctggaagtggactcgcctcgccagtcgccagttcacaatttgggcgagtctggaggatcgggtgagaaatctgagtccgaaagaatgagactcaagcgcaaggcagccatcgatcatgaggaaagcgaagaggagttcgatgacttcgacgaggaagaggaactgcaggatctgccaagagtacacgatttgcccagggaagaggacgacgactttgatcccgaggacgaggagcaggcagaagtggcactagtggcgcgtttccaggcgagtaaggctgccgccacatcgcaatcatcgtcgtcagtgggcaccaagccggaacgccagggagtcacccactgtcatcatgagggtggtgaaacctacacaatgcggccacatggcgagaaacatcaggaggaacccgggaactctggcattgccagcctacccgttccaccttcctttgtgcgatattctgtaccacctggggcagctggaccgccgcctgcaccacctggagctcctccgccaacccaccagcacccaggacatccacacttactcccacccaacggggatccctatttgcccattctgcacgttcgacgcgacttgcaccacaagagcttgaacctttcgaaggctggtgttccaccgccaccacatacaccacccactataataacccagccggagtcgggtaaaccacccaatcaacctttgcattcaccgcatgaagctatgcccagcttcctgggatcgatacccatgcgaaagaggattcttccggcaccgaccttggacttgatggatccgcaccaccatcctggattgggtcaaaggacctttgtggatagtcccagcatatatgctttgaatatgtcgcgacatccccccagacagcttctgggaaaaccaccgagtacggaaacaagtggagccaccaccgaaaagggaccaccagtggcagcaccgcccatagcaccaccgcctgcaccaccgagaagaacagggttcagcattgaggacataatgaggcgttagaagtaaaccgagaaagaactagaaaacaatccattaatggaggtaaaatcggaatagaaaaacaacacaatttggaaaactatttatcaaagctcttacgaatttgaaatatcaaaaagtagtagtattcctaataaatatatatctcggttgttttttctggtatttcatttagaaggtcttatgaacagttgaatatcataatgacaaacagttattgttcccaatggttaaacgaggatttatcgttttagacccacaagtacattaaaataaatttagatctacaatttaatactttttagtacaatgtctaggcaaggcaatagacctaaactaagtaataaaatcagttaagcgataattgtaagcgaaacaaactccgttgttgcattttatagagctcttatgcgttaggattttagcttaaatctaccgatttaaatgtttaagcctttagtacgagagtctatcgattagtttttaatgtgtggcccaacactaagtgttgctgtttgctgagtgaattccaattttttatttatgtttccttatccggtaagctaatcttaatgagtaaacaaaatcgttaatcgattttgctgtagggaaaaaaatggttgaaagtaaaagttagtgtaaagcagagcataaacaaaaatccaactacaagcaacattccagtagaaccttatgtaattaggcttaaattttaagagttttgcagtagttaatataagcaacccatagaattccatggtcttccttcaattttaaatgattttattcaaaccatagcgagttagttgatttcaaataaagtatgcattaataatgaaaaacaa

SEQ ID NO: 5139 - protein, 744 aa, DROSOPHILA
MPTESSSSEISGGGGGAIPMLRPSRMDQFMNSMAAAAAAVGGGGLPGAADRNGGSGGSDGGSQNGNGDSRNSSASRISAYETQLAYQQHLAGLHGPPPPPPPSHHREISAFVPVLPTGKVRPGSNSNYEIIAMMADKRKELALREAAAAAAMLGRGPGGPGGPGVPPPGVLYGPAGVPPPPYLTGPGPSPTGAGSFPFPPGAAAAALFPPGLGPGMHAGLDRRLLRAPGRASRPKKQFICKFCNRQFTKSYNLLIHERTHTDERPYSCDICGKAFRRQDHLRDHRYIHSKEKPFKCTECGKGFCQSRTLAVHKILHMEESPHKCPVCSRSFNQRSNLKTHLLTHTDHKPYECSSCGKVFRRNCDLRRHALTHAVGEVNSGDYVDVGEEDEARNLSGDEEDSLLEVDSPRQSPVHNLGESGGSGEKSESERMRLKRKAAIDHEESEEEFDDFDEEEELQDLPRVHDLPREEDDDFDPEDEEQAEVALVARFQASKAAATSQSSSSVGTKPERQGVTHCHHEGGETYTMRPHGEKHQEEPGNSGIASLPVPPSFVRYSVPPGAAGPPPAPPGAPPPTHQHPGHPHLLPPNGDPYLPILHVRRDLHHKSLNLSKAGVPPPPHTPPTIITQPESGKPPNQPLHSPHEAMPSFLGSIPMRKRILPAPTLDLMDPHHHPGLGQRTFVDSPSIYALNMSRHPPRQLLGKPPSTETSGATTEKGPPVAAPPIAPPPAPPRRTGFSIEDIMRR

SEQ ID NO: 5140 - DNA, 4043 bp, DROSOPHILA
aaatattttttgtttagtagacgttcaagaaaagtcgacgacaagaggggttcccaggcaaagtgcccatgattcgctcattgttgtcattgttcgcagtctcacacgcagtcaaaaagaaggaaaaacaaaaacaagacttgcctgcacatgcagattggccaagagcgatagcgatagcctttttatttgcctttcgtctgtttttggtttttggctcagagttttccgacttgccgaatggagttgttgctgtgccttggcgatggtgcccaatatgtttgccagatgaacaatttccttttcgacgcgaaacgaccagaccaagccacctgactaggaccgattcgcgaggtccaagaggctgtggcttttccctggcccacgctcgatgctcgatgggtccgtccaccattttcggttcgtttgcgggcctcgatgaaaaatttgcaaattggaattacttatttattgatgcatgtttgatgtgacgctcttgtggaggctcccagcctcaggccccccttcttgcgcactcactctcatgtaacgaatcgcttttttagctgcgggccacaaatgaaatctgcaaacacaaaccatgcaaagtacgggggaaaaaaccgagggtcggctcacatgtgtgagaaattgctgtttgttttatgcaaatgatcatcgcattgcagctggattcgctctgccggtcgccgttccaaattttcggctgcaattaaaaaccgaaagtgtgaaggaagtgtagctttttgcagaccagcataatgaaccggttgaaagatatttggccagaaaactgctggtgtagggaaaaggccaataattcactttctcaagtcatttggaagggttcccgactgttttatacaattcgttttcgattgtcaatttatattttagatgaacacataaaatttagacactcaacagatatttgaactatagaaacgatttgagctggagcggataacggaagcgggttctacatcatcccactgtcaatgtcacgcacctctacttgctccatgccgggaatagccttgaccatttcattcatctcctcggcagtgggaccgtcattgctggcagaagcgctcattccgccaccagcgcccattccgccgaatccacctcccattcctcccatacctcccataccacccatgcctcccataccacccatgccacccaatccacttaaggctgccagctcctctaagccacccatgttcatgtccagtccatcatccattccgccgccagctcctgacaacttggacaaaagatcatcgttccgggagtcggtgataaccacctcggtggtgctcagaagagaggccactccagctgcatccgtgatggcggtccgcagcacctttgtgggatcaataatgcccttctcgaccagccgacagtactcatcgcccatggcatcgtagccgtagtcttccgagccattcaacaccttggccaccaccattgggccatcaactccggcgttttgagctatggtctggcaaggcatcctcagggcattgcagacgatatcgacgcccttctggagatctgcactctccgttttgagttcctggaggtagggaatgcagcgcaaaaaggccgtaccgccacctgggacaattccctcttcgatggccgctcgagtggcattcaaggcgtccaccacacggtcctttttctcattcacctcaacttcactgcctccaccaatgtgcagcactgccacgcccttcgtgagggcggagaggcgttggcgcagacgatcccgctgctctggcttgatttgcttttccgccagttcatcttgaatttgctggatgcgcatttccaaaagtcctgtcttgggtttgccctgcaggagcatggtgctgtccttgctaatcacagcctcgccaacctgacccagatcctccagcttagcctcctccattttggaatagttgatgtcatcgccgaaaatagttgctcccgtggcagcggatatatcgcctataagctccttgcggtggtgtccatagctgggcgatttgacggcgcacacctggaggcccaacctgagcttgttcaggaccaaagcattgagggcttccccgctgatgtcctcggctatgatgatcaggggacgacgctgcctcagggattgctccagacctttaactatttgcgagagtccagtgatcttcttcagggatatcattacaagggcgttggcaaactccaccttggaccccttggagctgtttacgaaaaagggcgacacatagccgttgtcgaagcgcaggccctggataatatttagctcgtccttcaggcgcttgccatcctttacagtaatagttcctcttggacccactttgtcggtggcctcaccaatgagccgcccaatttcagtatccccgttcgcggagagggtggctacttgttggatctcctcacgcgtttccactgccttggacatttccttcagcttgtcctttacgacgtcaacagctaacatgacacctcgacgaatctccacgggattagcccccatggtaatctgattgaatccttccttggcaatcgctcgagccaaaactgttgctgtggtcgtgccgtcacccgccgactcattcgtattatcggccacatcctggaccaacttggcgcccagattcatgtgctggtcctttagggcaatcgagcgcgcgaccgtgaagccgtccttggtgatcttcggcgaggtccatggtcgctccacgatcacactgcgacccttgggccccatggtcacagcaacggcatcagccagaatatcaacgccccggatcatcattgcccgtactccggagccaaagcgcacgtccttcgagtacatccgcgcgaaacagcgactagaggtaatcgccttgggcacacacgaccgaaacattttgcacttaagtttgaaactataataaaaaaaaaactttcaaaacttttggttctaatattttttcgtttgatctcagacacgaagtgagtgcaactaatatgtaggttgttgactcgatactgacggactagacggactcgttcaaggcctactcccatattcaaatccaaattttgtttccattatctttaagcttctcgttttatgtaacatgtgcaagccattcttctttatttatattgcttttccttgagcacttttctcttttttcttttttctctttgcggacaagtttccaggcaatcgccagatttcacaacattcatttgtctggcgcctgcccgtctgcgatctgcggctctgaaatcttcgacaacagaagccgtgccttctgtttgccggaataaattagcgtgcagctaataagccccgacattctgggtggagtctgcccatttgcagttctattcgcctccatcggctgaggctgacccacaaacaagaccagcgtgtgcagatttcccagaactgcggtgcgactgttctgcaccggaggatggatgcattttcctcggctgaccgttcccatttcgaaggcagctgtcaaaaattgtgtgctgcctactgcaaactaaagaaattcacacattttgctgcaagccaaacggcaaatggaaatggaaatggggagtttgaggcggagatggaaatggagatgggatgaaaatgttgggtgcacagcgcgcaagaaggcattactttcgcacgatgaattgcacttaggtatgaatgtttagaaataggtttgcatataaattcaatgcgatttatatgagctatctctcgtattctatacgtataaaataatgtcacatttagttcagtaggtataacttttttctgtgtgccgcagacgggaattggaactggggtcggaatcgggatccgtttcctggccgcttgacgcgttgattgccatgtgcaagcggtagcacagtagccgggttttgtgtcaaaagcacgtcaccgatttgaaggggaagggcggaggagctgattgatgaggcatttgcatgttcgacgactcttcttc

SEQ ID NO: 5141 - DNA, 2043 bp, DROSOPHILA
ttgcactcacttcgtgtctgagatcaaacgaaaaaatattagaaccaaaagttttgaaagttttttttttattatagtttcaaacttaagtgcaaaatgtttcggtcgtgtgtgcccaaggcgattacctctagtcgctgtttcgcgcggatgtactcgaaggacgtgcgctttggctccggagtacgggcaatgatgatccggggcgttgatattctggctgatgccgttgctgtgaccatggggcccaagggtcgcagtgtgatcgtggagcgaccatggacctcgccgaagatcaccaaggacggcttcacggtcgcgcgctcgattgccctaaaggaccagcacatgaatctgggcgccaagttggtccaggatgtggccgataatacgaatgagtcggcgggtgacggcacgaccacagcaacagttttggctcgagcgattgccaaggaaggattcaatcagattaccatgggggctaatcccgtggagattcgtcgaggtgtcatgttagctgttgacgtcgtaaaggacaagctgaaggaaatgtccaaggcagtggaaacgcgtgaggagatccaacaagtagccaccctctccgcgaacggggatactgaaattgggcggctcattggtgaggccaccgacaaagtgggtccaagaggaactattactgtaaaggatggcaagcgcctgaaggacgagctaaatattatccagggcctgcgcttcgacaacggctatgtgtcgccctttttcgtaaacagctccaaggggtccaaggtggagtttgccaacgcccttgtaatgatatccctgaagaagatcactggactctcgcaaatagttaaaggtctggagcaatccctgaggcagcgtcgtcccctgatcatcatagccgaggacatcagcggggaagccctcaatgctttggtcctgaacaagctcaggttgggcctccaggtgtgcgccgtcaaatcgcccagctatggacaccaccgcaaggagcttataggcgatatatccgctgccacgggagcaactattttcggcgatgacatcaactattccaaaatggaggaggctaagctggaggatctgggtcaggttggcgaggctgtgattagcaaggacagcaccatgctcctgcagggcaaacccaagacaggacttttggaaatgcgcatccagcaaattcaagatgaactggcggaaaagcaaatcaagccagagcagcgggatcgtctgcgccaacgcctctccgccctcacgaagggcgtggcagtgctgcacattggtggaggcagtgaagttgaggtgaatgagaaaaaggaccgtgtggtggacgccttgaatgccactcgagcggccatcgaagagggaattgtcccaggtggcggtacggcctttttgcgctgcattccctacctccaggaactcaaaacggagagtgcagatctccagaagggcgtcgatatcgtctgcaatgccctgaggatgccttgccagaccatagctcaaaacgccggagttgatggcccaatggtggtggccaaggtgttgaatggctcggaagactacggctacgatgccatgggcgatgagtactgtcggctggtcgagaagggcattattgatcccacaaaggtgctgcggaccgccatcacggatgcagctggagtggcctctcttctgagcaccaccgaggtggttatcaccgactcccggaacgatgatcttttgtccaagttgtcaggagctggcggcggaatggatgatggactggacatgaacatgggtggcttagaggagctggcagccttaagtggattgggtggcatgggtggtatgggaggcatgggtggtatgggaggtatgggaggaatgggaggtggattcggcggaatgggcgctggtggcggaatgagcgcttctgccagcaatgacggtcccactgccgaggagatgaatgaaatggtcaaggctattcccggcatggagcaagtagaggtgcgtgacattgacagtgggatgatgtag

SEQ ID NO: 5142 - protein, 648 aa, DROSOPHILA
MFRSCVPKAITSSRCFARMYSKDVRFGSGVRAMMIRGVDILADAVAVTMGPKGRSVIVERPWTSPKITKDGFTVARSIALKDQHMNLGAKLVQDVADNTNESAGDGTTTATVLARAIAKEGFNQITMGANPVEIRRGVMLAVDVVKDKLKEMSKAVETREEIQQVATLSANGDTEIGRLIGEATDKVGPRGTITVKDGKRLKDELNIIQGLRFDNGYVSPFFVNSSKGSKVEFANALVMISLKKITGLSQIVKGLEQSLRQRRPLIIIAEDISGEALNALVLNKLRLGLQVCAVKSPSYGHHRKELIGDISAATGATIFGDDINYSKMEEAKLEDLGQVGEAVISKDSTMLLQGKPKTGLLEMRIQQIQDELAEKQIKPEQRDRLRQRLSALTKGVAVLHIGGGSEVEVNEKKDRVVDALNATRAAIEEGIVPGGGTAFLRCIPYLQELKTESADLQKGVDIVCNALRMPCQTIAQNAGVDGPMVVAKVLNGSEDYGYDAMGDEYCRLVEKGIIDPTKVLRTAITDAAGVASLLSTTEVVITDSRNDDLLSKLSGAGGGMDDGLDMNMGGLEELAALSGLGGMGGMGGMGGMGGMGGMGGGFGGMGAGGGMSASASNDGPTAEEMNEMVKAIPGMEQVEVRDIDSGMM

SEQ ID NO: 5143 - DNA, 3768 bp, DROSOPHILA
atgatccatttatgtactcccgtgtgaggagttaatcgagaatacatagcccataaataaatctcaataaaatcgatttgaatgcaaccactgaacccgaaaatgccttttcctcctcacctctgctggtcccgacccactcgaatgggatggatctatctcggatttggcctgtgccatggggttttttaaaatagctagcacatcagatctgccgctctccctcaaacacacacatgtgaccgtatggagagtgcttgccattatagtcactatctctagtgctcgctctttctcgttgtgtgaactttaattctgttttgattcttcgcctttcgggaagttgtccaaaatcaatagttgctctagtttgccagccggcaggcagaagttgaagtaacatcccattgtttttttattagtttctggcactttggagcattgagagctccacgttttgtgatgtaacgcgaaaatgccctaggaaaagcgatctgaggaacactgaactggggaaatgtggaccagaaagctattcattggattcgcaagaatgccggcttctaatccgagatgtaagtggtggtatcaaaacacacaggccttccgaatattcgtttagacccatttcgtatgggaagtatccacgaattacgcaaatgatgcgattccaactttatagcaaaacgtacaatccgacaataaccgagtagatttattgattcatgattcgggactactaagattcgttgtgtcttctggtgcgcgacgaacactacgtggactattccgcacagtgatataagtttggttcatggtggcaccaagataaagtttaatcaaaaatatttttctagaaaattatcgttccacggaatctttaaaacgattgaataatgcgtaaacccattgatagttcacttcattaataacattaacattaataccgtgaactctaaacataactaaagaaaaccactcatattgaaaggcaagcggctgaggtttaacttaggaatttattcggaactcttacaattaagaacaagatcagtgccacggcacctggttgccgatggtgccctttttgtagaacttggccgtggccgaggcggtagtggccagtgtcggagtgggcggagcaggctcgtaggtgggtccgctgccctctgccttcaagacggcggcacagcgccactgccggttgtagttcattcgccacagacgcacacaaccgtcgtcgcccgtggagatcagcatcgtggccagcatattccaacagacgcgccacactgggcaattgtgctcgctaaacttaatggtctggatgtccaacttggagatgtccgtggcgtccctttaattataaaaattattattattaaatgattttgggtctttaaattgtcgatcttacgttacaccccgcaagttcacaatataaagatccttgctggccactgccagcatgtgaaaggtgcgtccggcatttggagcaaaggccacatccgtgaccggatcggttatatcattgacagtatcgattttaacgcactttcgggaattctcgctgtaggcgaataagaagaccttgccagtaggcgtggctgcctcgtcgctgcccgcctgcaaaataatttatgaaaattaggcttattcttactccacagataatagaattaatccttaatagactaagacttggaatttaaatatactcaccgccagcagctgggtgaccatgtaagtggaagtgttccaggacaaacagctcagcggcaatttgttgctaatctcgtgctgcacgggccactgcgagaggttcataatgtccggggcctcatagatgcgaataatgccgtcggcggaggcggtggccagcaggagtcccaggtacttgggtgcaaactccacatccgtgacactggtccgcgagtctacaagggtggtgcggcgcacccagcggcgagtgggggtattggtggaggataccttttcgccaatcacctcctcccaaacggaggcggtgcgatcaaatgagcatgtggccacaacctggccaaattccgggtgcgcccaggaaacgcgccaaatggagccggagtgcgctttccagctgctcgtgacattccacttgccctgcccatcctcgtcccaaatctgcaagcagaaaatccggatcacctaggctgtttatcgtaggaataattcgagtcctcaccttgacggtctgatcgctggaacaggttgccatcctgcggccgtagtagtcgaagaccacgtcgtgtatcacatccttgtggtcggcaataatgggttccacgtcgaacatgataaaaactcaacttatttaccgaaatgttgtttataaaatgcacgcgccgaaaaatctgcgccggtaatgcagccctacaaggagagacagggttggcttgcaaacagccgccgaacagctgttgtttaccttgctcagtattttttcagtacgcccaggcgaacggtcacaccgagttagtggtccgaattacgcgtgaaatacgaataaaaaatcgagcgaaaaataacaaaacacagtactctagtcgatcacaagctgataacgtatcagccgtgccacacgcccatccgggattcgcgagaaccacactagtcggagagtcaggactccaatagccgccaagaggccgttttgcacccggaaaagaacagttacacacaacaaaattgccaaccgaaagaaacgtgcgaagcgcagtgcgatggagaagagtaagtgcggtaatctaagcactaaacgggtaattacggcccgatcctatacgatacgatccgagcgaaatgtatgcgcatatgtgtatgcaaatgagtggggtgaacaaccccacagcatagtcgtatgtagatcgggacccgcgtttgtttagcatttgaattcgctggctaaagtgcggatttcaatcaaagtgcaatgggcagcataaattccaattgcttccatctgcaatatgctcaatatgtcttgccttgctcgccctctctcgctcgcgcactcgctgctgaccttgattcctattggattttacacatcgcgcgatgcccgtgacgtatgtgtgtgtgtgtgtatgggcgagagagcagcatagctgccaacgtgtgtgtatgtcggccggcatcaattacctaataagaactaaattggagactgcatttcttgttggtattgtattgcataaatacgatataagtatatttatgaaatatgagcatatcacaaggactcgaatcggaaattcaatccaacgcagtcactacaaattcgtagtattttgctaagaaattaaaaaacaatttaactgtaaaccgtgcactttacagtgtctacaagatttcaagtgtgttatcacgcacaaatcggttgtttgttgctctgtagaaatcctagagataagcacatcgaaatcaggcgtttcacacgcgaccgactttcggttctattattatttggctgtgatatcagtagacggtttttttctggccacgcgccaaacatgaataattcgaacagaatcgaacaccgaaatacaaaaatttccgtgcgataagatgccgggaaagatttggaattgagcccgagccgaaaccatgaagacccgtcaccgttaagtattaatcataatcggtcgccaaggccaatgccgaaatcggaagatttttcaggcactcgccgcctatctgagattaaagcgggcgtcgcgtcgggaatttctt

SEQ ID NO: 5144 - DNA, 1551 bp, DROSOPHILA
cttctccatcgcactgcgcttcgcacgtttctttcggttggcaattttgttgtgtgtaactgttcttttccgggtgcaaaacggcctcttggcggctattggagtcctgactctccgactagtgtggttctcgcgaatcccggatgggcgtgtggcacggctgatacgttatcagcttgtgatcgactagagtactgtgttttgttatttttcgctcgattttttattcgtatttcacgcgtaattcggaccactaactcggtgtgaccgttcgcctgggcgtactgaaaaaatactgagcaaggtaaacaacagctgttcggcggctgtttgcaagccaaccctgtctctccttgtagggctgcattaccggcgcagatttttcggcgcgtgcattttataaacaacatttcggtaaataagttgagtttttatcatgttcgacgtggaacccattattgccgaccacaaggatgtgatacacgacgtggtcttcgactactacggccgcaggatggcaacctgttccagcgatcagaccgtcaagatttgggacgaggatgggcagggcaagtggaatgtcacgagcagctggaaagcgcactccggctccatttggcgcgtttcctgggcgcacccggaatttggccaggttgtggccacatgctcatttgatcgcaccgcctccgtttgggaggaggtgattggcgaaaaggtatcctccaccaatacccccactcgccgctgggtgcgccgcaccacccttgtagactcgcggaccagtgtcacggatgtggagtttgcacccaagtacctgggactcctgctggccaccgcctccgccgacggcattattcgcatctatgaggccccggacattatgaacctctcgcagtggcccgtgcagcacgagattagcaacaaattgccgctgagctgtttgtcctggaacacttccacttacatggtcacccagctgctggcggcgggcagcgacgaggcagccacgcctactggcaaggtcttcttattcgcctacagcgagaattcccgaaagtgcgttaaaatcgatactgtcaatgatataaccgatccggtcacggatgtggcctttgctccaaatgccggacgcacctttcacatgctggcagtggccagcaaggatctttatattgtgaacttgcggggtgtaacggacgccacggacatctccaagttggacatccagaccattaagtttagcgagcacaattgcccagtgtggcgcgtctgttggaatatgctggccacgatgctgatctccacgggcgacgacggttgtgtgcgtctgtggcgaatgaactacaaccggcagtggcgctgtgccgccgtcttgaaggcagagggcagcggacccacctacgagcctgctccgcccactccgacactggccactaccgcctcggccacggccaagttctacaaaaagggcaccatcggcaaccaggtgccgtggcactgatcttgttcttaattgtaagagttccgaataaattcctaagttaaacctca

SEQ ID NO: 5145 - protein, 354 aa, DROSOPHILA
MFDVEPIIADHKDVIHDVVFDYYGRRMATCSSDQTVKIWDEDGQGKWNVTSSWKAHSGSIWRVSWAHPEFGQVVATCSFDRTASVWEEVIGEKVSSTNTPTRRWVRRTTLVDSRTSVTDVEFAPKYLGLLLATASADGIIRIYEAPDIMNLSQWPVQHEISNKLPLSCLSWNTSTYMVTQLLAAGSDEAATPTGKVFLFAYSENSRKCVKIDTVNDITDPVTDVAFAPNAGRTFHMLAVASKDLYIVNLRGVTDATDISKLDIQTIKFSEHNCPVWRVCWNMLATMLISTGDDGCVRLWRMNYNRQWRCAAVLKAEGSGPTYEPAPPTPTLATTASATAKFYKKGTIGNQVPWH

SEQ ID NO: 5146 - DNA, 6642 bp, DROSOPHILA
acgtcggaacacacttcttgttctgcttggcccccctcttccgaacccccctcgttttcgttagctcattttatcgtctcgcttctcgttgtgcacgcttattctcggtttttcaatttttctcagtgttgccaatttcgtgtttcactggccgttacaattttcatgcattagccatatttggaaaaacttttttgttagttcgcccaacagcttttccttatgcttccgtttcgcttatgccttaaattgtttgacatttgtgttcttaaaacctctagctagttttccagttatcttgatcctggctgtattacttctttttccgtagtcgaagggcagcactgttgccatgttgtatttgtttgtggtgttgtggcaatggcgccctctgccggcgtcgtcgctcgcgaattgacaaagacgccggctgtctctctgtcactctctctctctctctctctctctctcttggactcctctcttttcactccccacggtgtccccacccctcttctacatcattcggctagcagcagctgctttccgttttggattggaagttcgttggaatggaaggcagcagcaaaagaagaagaagaagctgcaacgccgcgaagctggcagcgcagcttgtatttgtagttgtagttggcggcgtgtgtagtttgctttcgctgttgtttttaatcgaacgcgcgcacggcagatgcgcagaaaaatatttatcacccaaagaccaaataggaaaaaaaagcattcaatatagtgtataaagcaatcgtgataattttaagtgtacttttgtccgttttcgtttcggtttctttttcgttttcgcaaataagcgaatagttacactcgctcttttgctcgttccgtcgcactctccctctcgccgctcttgttcttcctcttcgtttgctaactctctgtgtgtttgcaccttcttctttctttcgctccgctcattaccattttacaaacacacaagcgcacgatgagagcgactgcaaaaaaatcggaataaacacggttataatatataagtacaaataaaccatatatatgtgtttatgttatgtatatatacataaaggaaaataacaaggcaaatgtgaaaattagtgcaaactgaacgaaaagacaaaaataaaacaaaaggaaacccaaatgtgataatattgtaatataatgtgaaaagcaaaacacacacaaatacacaactcacgcacttagccacgtatgtgtgtgcagaaaaatatgcggcgcttaaaaaaggtgaacgggaatttgactgaaaaattgtacccttaaaatacaattttcatactaaaaaaaaatgaaagtttacagaaaattgaaatcgaaaagtaaaccagcgcaaaaaaaaacaaacaggaaagggtcttgagtagccattttcatttccagtaaaattgttcaattttttcattgtctgcgctttgctttttaataaaacattacatacacacatacaaatgccgctgcattctggctctctttcgctgctgttatttccctcgcactctcgagcacgcaacgcatgccgcagccgcgctattttcgtcccgctcgcactcgtgcacttattttgcacattctcctttgatgcctcttctgttgccaccgctcgggttgccacctagtcgcgatttccgaatatcgcgcatgtggcagcactatctcacccaaagcgaaagagagagcgagagcaactgcaaaacgaaagaagcagcggagcaaaacaaaagcggcgtcagtgttgcaaagtgcataaagcagtcagtgagagacggagtgtaaattatatccaaaagctaaacgaatgaaattccatcaaagaagaaaaagaaataaaagaaatcattaatgttggggcaaacatatattcacatcattccatacgataaatgcattgaattgtagaattaaaccattgcagacgtaaaagaaatgtttattttcgaacagttttgagtttacaacaaagaaaatcaattattttaatattttatgtattaacaatgattcgatttgctggcaaacaaagatatttaatattcgaaagttctaatttttttttcgttatcaaagaatgagcgaaaaatgcttttcgaaatggcaacgtcatgtgcacttaaataacggacgtttattttaacagtattattaagtattttaatccaatacttataaaaatatttctttgctttgtattacagatgtcccccggcgcccatttgcagatgtccccgcagaacacttcgtccctaagtcaacaccatccacatcaacagcaacagttacaacccccacagcagcaacaacagcatttccctaaccatcacagcgcccagcaacagtcgcagcagcagcagcaacaggagcaacagaatccccagcagcaggcgcaacagcagcagcagatactcccacatcaacatttgcagcacctgcacaagcatccgcatcagctgcaactgcatcagcagcagcaacaacaactccaccagcaacagcagcaacacttccaccagcagtcgctgcaagggctgcatcagggtagcagcaatccggattcgaatatgagcactggctcctcgcatagcgagaaggatgtcaatgatatgctgagtggcggtgcagcaacgccaggagctgcagcagcagcgattcaacagcaacatcccgcctttgcgcccacactgggaatgcagcaaccaccgccgcccccacctcaacactccaataatggaggcgagatgggctacttgtcggcaggcacgaccacgacgacgtcggtgttaacggtaggcaagcctcggacgccagcggagcggaaacggaagcgaaaaatgcctccatgtgccactagtgcggatgaggcggggagtggcggtggctctggcggagcaggagcaaccgttgttaacaacagcagcctgaagggcaaatcattggcctttcgtgatatgcccaaggtaaacatgagcctgaatctgggcgatcgtctgggaggatctgcaggaagcggagtaggagccggtggcgccggaagcgggggaggtggcgctggttccggttctggaagcggtggcggcaaaagcgcccgcctgatgctgccagtcagcgacaacaagaagatcaacgactatttcaataagcagcaaacgggcgtgggcgtcggtgtgccaggtggtgcgggaggcaataccgctggccttcgaggatcacatacgggaggtggcagcaagtcaccctcatccgcccagcagcagcaaacggcggcacagcagcagggaagcggtgttgcgacgggaggcagtgcaggcggttccgctggcaaccaggtgcaagtgcaaacgagcagcgcttacgccctttacccaccagctagtccccaaacccagacgtcacagcaacagcagcagcagcaaccgggatcagactttcactatgtcaactccagcaaggcgcagcaacaacagcagcgtcaacagcaacagacttccaatcaaatggttcctccacacgtggtcgttggccttggtggtcatccactgagcctcgcgtccattcagcagcagacgcccttatcccagcagcaacagcagcaacaacagcagcagcaacagcagcaactgggaccaccgaccacatcgacggcctccgtcgtgccaacgcatccgcatcaactcggatccctgggagttgttgggatggtcggtgtgggtgttggcgtgggcgttggagtaaatgtgggtgtgggaccaccactgccaccaccaccgccgatggccatgccagcggccattatcacttatagtaaggccactcaaacggaggtgtcgctgcatgaattgcaggagcgcgaagcggagcacgaatcgggcaaggtgaagctagacgagatgacacggctgtccgatgaacaaaagtcccaaattgttggcaaccagaagacgattgaccagcacaagtgccacatagccaagtgtattgatgtggtcaagaagctgttgaaggagaagagcagcatcgagaagaaggaggcgcgacagaagtgcatgcagaatcgcctcaggctcggacagtttgttacccaacgagtgggcgccacattccaggtaagaattaagaaaatatggtattattatatttgttggtggcataatggaggcggctactgtgcttccccgatagaatctaattgttaacgaaaacatttaatcgtaaatttacaggagaactggacggacggctatgcgttccaggagctgagtcggcggcaagaagaaataaccgctgagcgtgaagagatagatcggcagaaaaagcagctgatgaaaaagcgtccggcggagtccggacgcaagcgcaacaacaacagtaaccagaacaaccagcagcagcagcaacagcaacaccagcaacagcagcagcaacaaaattccaactcgaacgattccacgcagctgacgagcggagttgttaccggtccaggcagtgatcgtgtgagcgtaagcgtcgacagcggattgggtggcaataatgcgggcgcgatcggtggcggaaccgttggtggtggcgttggaggtggtggtgttggaggcggtggtgtcggaggcggcggtggacgtggactttctcgcagcaattcgacgcaggccaatcaggctcaattgctgcacaacggcggtggtggttcgggcggcaatgtcggcaactcgggcggcgttggcgaccgcttgtcagatcgaggaggaggaggtggcggcatcggcggaaacgatagcggcagctgctcggactcgggcactttcctgaagccagaccccgtatcgggtgcctacacagcgcaggagtattacgagtacgatgagatcctcaagttgcgacaaaatgccctcaaaaaggaggacgccgacctgcagctggagatggagaagctggagcgggagcgcaatctgcacatccgagagctcaagcggattcttaacgaggatcaggtgcgcctagtttccacattgtgcccatttcctacatgccacatatctaacctttggctatatctatctctctatgtacatttcagtcccgctttaacaatcatcccgtgctgaatgatcgctatcttctgttgatgctcctgggcaagggcggcttctcagaggtccacaaggccttcgacctgaaggagcaacgctatgtcgcatgtaaggtgcaccaattaaacaaggattggaaggaggataagaaagctaattatatcaagtgagtagtaaaacagagcaggaaaagtcaatgggggaatgcaatgccaattggttagacaataaggatatagttttcttaaaggtcacattagctgctgctactgctgtggtgtatttcaaaatatcatggtacttttaggtcagactttttgcgtagatgatatatatttgtggtgcaatacatctttctatcaattataattgtatcgtaaagtgaaataacacacactttagggataaaatgtaaatgctcagctttatatttatataaatatactaaagtcttcctcttttaaaaccctcgctaacaacacaaaattcagacacgctttgcgggaatacaacattcacaaggcactggatcatccgcgggtcgtcaagctatacgatgtcttcgagatcgatgcgaattccttttgcacagtgctcgaatactgtgatggccacgatctggacttctatttgaagcaacataagactatacccgagcgtgaagcgcgctcgataataatgcaggtgagttcgccaaaaatcgcaaaaacaattcaaagaaaataaacaaatcaaatttctttgtccaggttgtatctgcactcaagtatctaaatgagattaagcctccagttatccactacgatctgaagcccggcaacattctgcttaccgagggcaacgtctgcggcgagattaagatcaccgacttcggtctgtcaaaggtgatggacgacgagaattacaatcccgatcacggcatggatctgacctctcagggggcgggaacctactggtgagttattggaccacgttgttgtaccaaataaccaatagatttgaggacccatataattaatgtataaattgtttatatttaaaaaatttgttcaggtatctgccacccgagtgctttgtcgtgggcaaaaatccgccgaaaatctcctccaaagtggacgtatggagtgtgggtgttatcttctaccagtgtctgtacggcaaaaagcccttcggtcacaatcagtcgcaggccacgattctcgaggagaatacgatcctgaaggccaccgaagtgcagttctccaacaagccaaccgtttctaacgaggccaaggtgagttgtctctgacatttaaaacaaaacagagagctgtgttgttaagttcttattatcattataattaattttattattattattattattattattattattattattgttattattattattattattattattattattattattattattattgttattattattattattattattattattattattattattattattattattattattattggtattattattatt

SEQ ID NO: 5147 - DNA, 3749 bp, DROSOPHILA
atgagagcgactgcaaaaaaatcggaataaacacggttataatatataagtacaaataaaccatatatatgtgtttatgttatgtatatatacataaaggaaaataacaaggcaaatgtgaaaattagtgcaaactgaacgaaaagacaaaaataaaacaaaaggaaacccaaatgtgataatattgtaatataatgtgaaaagcaaaacacacacaaatacacaactcacgcacttagccacgtatgtgtgtgcagaaaaatatgcggcgcttaaaaaagatgtcccccggcgcccatttgcagatgtccccgcagaacacttcgtccctaagtcaacaccatccacatcaacagcaacagttacaacccccacagcagcaacaacagcatttccctaaccatcacagcgcccagcaacagtcgcagcagcagcagcaacaggagcaacagaatccccagcagcaggcgcaacagcagcagcagatactcccacatcaacatttgcagcacctgcacaagcatccgcatcagctgcaactgcatcagcagcagcaacaacaactccaccagcaacagcagcaacacttccaccagcagtcgctgcaagggctgcatcagggtagcagcaatccggattcgaatatgagcactggctcctcgcatagcgagaaggatgtcaatgatatgctgagtggcggtgcagcaacgccaggagctgcagcagcagcgattcaacagcaacatcccgcctttgcgcccacactgggaatgcagcaaccaccgccgcccccacctcaacactccaataatggaggcgagatgggctacttgtcggcaggcacgaccacgacgacgtcggtgttaacggtaggcaagcctcggacgccagcggagcggaaacggaagcgaaaaatgcctccatgtgccactagtgcggatgaggcggggagtggcggtggctctggcggagcaggagcaaccgttgttaacaacagcagcctgaagggcaaatcattggcctttcgtgatatgcccaaggtaaacatgagcctgaatctgggcgatcgtctgggaggatctgcaggaagcggagtaggagccggtggcgccggaagcgggggaggtggcgctggttccggttctggaagcggtggcggcaaaagcgcccgcctgatgctgccagtcagcgacaacaagaagatcaacgactatttcaataagcagcaaacgggcgtgggcgtcggtgtgccaggtggtgcgggaggcaataccgctggccttcgaggatcacatacgggaggtggcagcaagtcaccctcatccgcccagcagcagcaaacggcggcacagcagcagggaagcggtgttgcgacgggaggcagtgcaggcggttccgctggcaaccaggtgcaagtgcaaacgagcagcgcttacgccctttacccaccagctagtccccaaacccagacgtcacagcaacagcagcagcagcaaccgggatcagactttcactatgtcaactccagcaaggcgcagcaacaacagcagcgtcaacagcaacagacttccaatcaaatggttcctccacacgtggtcgttggccttggtggtcatccactgagcctcgcgtccattcagcagcagacgcccttatcccagcagcaacagcagcaacaacagcagcagcaacagcagcaactgggaccaccgaccacatcgacggcctccgtcgtgccaacgcatccgcatcaactcggatccctgggagttgttgggatggtcggtgtgggtgttggcgtgggcgttggagtaaatgtgggtgtgggaccaccactgccaccaccaccgccgatggccatgccagcggccattatcacttatagtaaggccactcaaacggaggtgtcgctgcatgaattgcaggagcgcgaagcggagcacgaatcgggcaaggtgaagctagacgagatgacacggctgtccgatgaacaaaagtcccaaattgttggcaaccagaagacgattgaccagcacaagtgccacatagccaagtgtattgatgtggtcaagaagctgttgaaggagaagagcagcatcgagaagaaggaggcgcgacagaagtgcatgcagaatcgcctcaggctcggacagtttgttacccaacgagtgggcgccacattccaggagaactggacggacggctatgcgttccaggagctgagtcggcggcaagaagaaataaccgctgagcgtgaagagatagatcggcagaaaaagcagctgatgaaaaagcgtccggcggagtccggacgcaagcgcaacaacaacagtaaccagaacaaccagcagcagcagcaacagcaacaccagcaacagcagcagcaacaaaattccaactcgaacgattccacgcagctgacgagcggagttgttaccggtccaggcagtgatcgtgtgagcgtaagcgtcgacagcggattgggtggcaataatgcgggcgcgatcggtggcggaaccgttggtggtggcgttggaggtggtggtgttggaggcggtggtgtcggaggcggcggtggacgtggactttctcgcagcaattcgacgcaggccaatcaggctcaattgctgcacaacggcggtggtggttcgggcggcaatgtcggcaactcgggcggcgttggcgaccgcttgtcagatcgaggaggaggaggtggcggcatcggcggaaacgatagcggcagctgctcggactcgggcactttcctgaagccagaccccgtatcgggtgcctacacagcgcaggagtattacgagtacgatgagatcctcaagttgcgacaaaatgccctcaaaaaggaggacgccgacctgcagctggagatggagaagctggagcgggagcgcaatctgcacatccgagagctcaagcggattcttaacgaggatcagtcccgctttaacaatcatcccgtgctgaatgatcgctatcttctgttgatgctcctgggcaagggcggcttctcagaggtccacaaggccttcgacctgaaggagcaacgctatgtcgcatgtaaggtgcaccaattaaacaaggattggaaggaggataagaaagctaattatatcaaacacgctttgcgggaatacaacattcacaaggcactggatcatccgcgggtcgtcaagctatacgatgtcttcgagatcgatgcgaattccttttgcacagtgctcgaatactgtgatggccacgatctggacttctatttgaagcaacataagactatacccgagcgtgaagcgcgctcgataataatgcaggttgtatctgcactcaagtatctaaatgagattaagcctccagttatccactacgatctgaagcccggcaacattctgcttaccgagggcaacgtctgcggcgagattaagatcaccgacttcggtctgtcaaaggtgatggacgacgagaattacaatcccgatcacggcatggatctgacctctcagggggcgggaacctactggtatctgccacccgagtgctttgtcgtgggcaaaaatccgccgaaaatctcctccaaagtggacgtatggagtgtgggtgttatcttctaccagtgtctgtacggcaaaaagcccttcggtcacaatcagtcgcaggccacgattctcgaggagaatacgatcctgaaggccaccgaagtgcagttctccaacaagccaaccgtttctaacgaggccaag

SEQ ID NO: 5148 - protein, 1168 aa, DROSOPHILA
MCVQKNMRRLKKMSPGAHLQMSPQNTSSLSQHHPHQQQQLQPPQQQQQHFPNHHSAQQQSQQQQQQEQQNPQQQAQQQQQILPHQHLQHLHKHPHQLQLHQQQQQQLHQQQQQHFHQQSLQGLHQGSSNPDSNMSTGSSHSEKDVNDMLSGGAATPGAAAAAIQQQHPAFAPTLGMQQPPPPPPQHSNNGGEMGYLSAGTTTTTSVLTVGKPRTPAERKRKRKMPPCATSADEAGSGGGSGGAGATVVNNSSLKGKSLAFRDMPKVNMSLNLGDRLGGSAGSGVGAGGAGSGGGGAGSGSGSGGGKSARLMLPVSDNKKINDYFNKQQTGVGVGVPGGAGGNTAGLRGSHTGGGSKSPSSAQQQQTAAQQQGSGVATGGSAGGSAGNQVQVQTSSAYALYPPASPQTQTSQQQQQQQPGSDFHYVNSSKAQQQQQRQQQQTSNQMVPPHVVVGLGGHPLSLASIQQQTPLSQQQQQQQQQQQQQQLGPPTTSTASVVPTHPHQLGSLGVVGMVGVGVGVGVGVNVGVGPPLPPPPPMAMPAAIITYSKATQTEVSLHELQEREAEHESGKVKLDEMTRLSDEQKSQIVGNQKTIDQHKCHIAKCIDVVKKLLKEKSSIEKKEARQKCMQNRLRLGQFVTQRVGATFQENWTDGYAFQELSRRQEEITAEREEIDRQKKQLMKKRPAESGRKRNNNSNQNNQQQQQQQHQQQQQQQNSNSNDSTQLTSGVVTGPGSDRVSVSVDSGLGGNNAGAIGGGTVGGGVGGGGVGGGGVGGGGGRGLSRSNSTQANQAQLLHNGGGGSGGNVGNSGGVGDRLSDRGGGGGGIGGNDSGSCSDSGTFLKPDPVSGAYTAQEYYEYDEILKLRQNALKKEDADLQLEMEKLERERNLHIRELKRILNEDQSRFNNHPVLNDRYLLLMLLGKGGFSEVHKAFDLKEQRYVACKVHQLNKDWKEDKKANYIKHALREYNIHKALDHPRVVKLYDVFEIDANSFCTVLEYCDGHDLDFYLKQHKTIPEREARSIIMQVVSALKYLNEIKPPVIHYDLKPGNILLTEGNVCGEIKITDFGLSKVMDDENYNPDHGMDLTSQGAGTYWYLPPECFVVGKNPPKISSKVDVWSVGVIFYQCLYGKKPFGHNQSQATILEENTILKATEVQFSNKPTVSNEAK

SEQ ID NO: 5149 - DNA, 2774 bp, DROSOPHILA
gcttggcaaatgaacaaaactcggtggtcacattgaaaagtctgatatagtccgccttttacacgaacgcattgcgcattttccctgtttggctggcctttgttccatttcaaaaatggagctttgctcccggaaaccaacgaaatgtattggccgtgatcggttagatcggataaatcgagccaatacgactcggtatcaagtttttgactgataaggtgcaattcctcctcgttttgtggcgacgccaagtgaccgcccatctcgcgacattttgtcattgcatcaaaccaattttgcttaacgtgcctctcgatgtaaaagaaccgtgaacctactttctcaaattctggatggagtgatacctttgacgaaacatttctggtatccagtgaacattggagagcattcagtgccttccgtaaggatttctctaaagataattttttgacctttatctccatcttcgcatgcaggtccatgaaatggccttccattttaacctttaatgctttcaattgcttatcattgacttcttggtgtccttctatcctgtctagaattccctgcgtttcgttgaaaattcggaaattggcagtgtacccttccttttgctgctctgaaatgttctcaaggattggtaatatgtcgataagacacatttcaccaagttttttaagtctgtcgtacgatgaaattaggggatcctgaagaatatcgttttcagcaaacacgttgcaagaaccgtaggaaaagaacacgaacaagaaataggtcgcgcattcgaacatgttgagtgagtataacgaactgattccaaaattatttataatttttctttttctcatcaacaaattttgcacacctcgtacacaggtaacacaccggaacgatcgtattttatgtagaaaaatttaagtatttactacacatcttataatagtaagagatcatttcgcttttaagaaatctgcaataattttgtacattgtaaaatcttttaatttactgcaagctggcaaataaaaagaaactgttcgctgcactttccatccatcatttctcctccacgtaagtgaacacagcgctgatgaatttgcacctgaggcctatgtttatgccatttcaaaaagggtggattcattcccgttgctaaagaaatgaattcgccccacttagcaatgtcattgatgtccagccagaagtcgtgacttccgtcattgatgtccttaagttccgtacggatagcatccaattcgtcttcgctctggattgtcaacagatgagcacccattttatggcacatgcttgtcgctttaaaccaatccactttgtgtttcttctcgatgaaaaaatgcctccagccaatcttctgaaattgggatgggatttcggttttcggcatcacttttttcgcttccacggatagatttagggcttttttcgtttcttgcaattgtaactccagacttgctaagtgacgttggatatttttcacattcttaatcttcgcacttagagcattaaattcgttatccacattgtcgtgaattacttttattttgtcgtttgtttccttctcctgaccttcaatcttagccagttgtttcctggtttcattcacttggacttcgttagcagagttccagtggctcttatggttgttggaaatatacttaagtactggcgccagttctacgagacacacttccttatccgttgacattcgaggacacacatcctttgcacggattccatagagcccacaggccatgaagacgtgcagaaaaaagtttgcgtgctggaacattcagtgctataacttgagggaataaatgctacttaagaactaaatctcgatttattttttttttaagagtatcgtacgacaaattcgtcacactccttaaaatggtaataggcactaaccgattttgtacaaaacaaaattgtgaggtaggttaacagttttatgcattttttaagatttattaacctcataccagctgctttgcagacgtggtgttgttagtacatttgatcttgttttcccagcgattcatattgcattggagagacacaagccgttttaatcccatttggagatccacaaataaatcagtcgctggcaaattgctcaattataaattgcacaactccgcgagcccggctccttttccattttccgagcttttccgcgtctcagcggttgcccaatgtggaaattagcattttggcaatgccttggcagcaaactgctgtcatgtaagcgactaattaacatgtcactcagttgcagcagcaactgcaccacagcaacacattgccactgcgatggccacatcaccaacatcggggttttcctctttcgtctccacttattgaccattcactaaatttacgcattaggctgaagttgaatggaactagaagcagtggcttccagacccctcaaccccacaaaaaaaaaccccgtttcttagcaacctgttgcttcgtttgctacgaaaatctctcacgaagttgccaaagcgaagcaaaaataaaatcgccgaaaaaaaaggtttaacattttgaatttattagccaaaaattgttgctgaggagccgaaggggttaggttgtgtctctggttttgcacagagaacaaatgattatgatttgtataatattgaacatcattttggtgtaagaaaagaatgattatgctgtacttcaacatggttctccaatcttagttaaatatatttaagtaccgaatcagagccattttt

SEQ ID NO: 5150 - DNA, 774 bp, DROSOPHILA
atggcctgtgggctctatggaatccgtgcaaaggatgtgtgtcctcgaatgtcaacggataaggaagtgtgtctcgtagaactggcgccagtacttaagtatatttccaacaaccataagagccactggaactctgctaacgaagtccaagtgaatgaaaccaggaaacaactggctaagattgaaggtcaggagaaggaaacaaacgacaaaataaaagtaattcacgacaatgtggataacgaatttaatgctctaagtgcgaagattaagaatgtgaaaaatatccaacgtcacttagcaagtctggagttacaattgcaagaaacgaaaaaagccctaaatctatccgtggaagcgaaaaaagtgatgccgaaaaccgaaatcccatcccaatttcagaagattggctggaggcattttttcatcgagaagaaacacaaagtggattggtttaaagcgacaagcatgtgccataaaatgggtgctcatctgttgacaatccagagcgaagacgaattggatgctatccgtacggaacttaaggacatcaatgacggaagtcacgacttctggctggacatcaatgacattgctaagtggggcgaattcatttctttagcaacgggaatgaatccaccctttttgaaatggcataaacataggcctcaggtgcaaattcatcagcgctgtgttcacttacgtggaggagaaatgatggatggaaagtgcagcgaacagtttctttttatttgccagcttgcagtaaattaa

SEQ ID NO: 5151 - protein, 257 aa, DROSOPHILA
MACGLYGIRAKDVCPRMSTDKEVCLVELAPVLKYISNNHKSHWNSANEVQVNETRKQLAKIEGQEKETNDKIKVIHDNVDNEFNALSAKIKNVKNIQRHLASLELQLQETKKALNLSVEAKKVMPKTEIPSQFQKIGWRHFFIEKKHKVDWFKATSMCHKMGAHLLTIQSEDELDAIRTELKDINDGSHDFWLDINDIAKWGEFISLATGMNPPFLKWHKHRPQVQIHQRCVHLRGGEMMDGKCSEQFLFICQLAVN

SEQ ID NO: 5152 - DNA, 3662 bp, DROSOPHILA
aaatagtcgcaatgttgatgatgtatctgcgttccttgattacccagttattccactatctgtgtgggcggtgcagctggaaggcttcgcacacaggaaatacaaaataataatagaagatgtatgcacaacaaatacacttattgagttttttattacttatacgaaattacgtaattttgtttaatttctaattgaaacatttcgcattgcacattttatactaatacaattattcgaaagaccataaagaaattataaaaattgtcatattctactttggccgtttatatataaataataataaacttgttataggatatccttattcataccaccaatacaaataataccaacccaaactccatttaagttctgttccataacttttgtaattgtaagaagtattatcgtcatagcttggttttttctttttcttagattttttacattttttctccccgtctttacgtatccaacatacttcacacttttttttacccttctcgtttgtcgaacatgttttacatttatttgtgccttttttagtaacccaacacttttcctgcatattcttttccttttcctctgtctctttcttctttctttcctcttcttttctttcctcctcctttcttttttcctcttcttttcttttttcctcttctctttttctctcatcttcttttcttttttcctcttctctttttctctcctctttttttcttttttcctcttctctttttctcttctcttcttttcttttttcctcttctctttttctctcctcttcttttcttcgttcctcttcctttcttttttcctcttctcttcttctttcctcttctctttttctctcctcttcttttcttttttcctcttctctttttctctcctcttcttttcttcgttcctcttcctttcttttttcctcttctcttcttctttcctcttctcttcttctttcctcttctcttcttcgttcctcgtctcttctttccttttctcttctttcttcttcctttcttttttcctcttctcttcttctttccttttctcttctttcttcttcctttctttttccctcttctcttcttctttccttttctcttctttcttcttcctttcttttttcctcttctcttcttctttcctcatctttccttctttcctcttcttttcttttttcctcctcttctcttctttcctcttctttccttctttcctcttcttcccttcttcttttctcttcccttcttcttttctcttctcttcttctttcctctttctttcttctttcctctgctttcctttcctcttctttcctttccgcttcctctcttctttcttcttctttcctttcctcttcctttctcttttcctcttctcttcttctcttctcatctcttcttcttttctcttttcttctttcctcttcctttcttctttcctcctctttcctttcctcttcctttcttctttcctcttctttcctttcctcttcctttcttctttcctcttcctttcgtttttcctcttcttttcttcttttctcttctctttttctttcctcttcttttttcctattatgttctctctttctttcctcttctctttctctttcctcttctttttttctttcctcttcctttcttctttcctcttctctttttctttcctcttctctttttctttcctcttctctttttctttcctcttctctttttctttcctcttctctttttctttcctcttctcttcttctttcctcttcttttcttttttcctcttctttacttctttccttttccattattcgtggtttcccttgattcttgtttatttcatcttctttttttcgattctggttggcttggcaaatgaacaaaactcggtggtcacattgaaaagtctgatatagtccgccttttacacgaacgcattgcgcattttccctgtttggctggcctttgttccatttcaaaaatggagctttgctcccggaaaccaacgaaatgtattggccgtgatcggttagatcggataaatcgagccaatacgactcggtatcaagtttttgactgataaggtgcaattcctcctcgttttgtggcgacgccaagtgaccgcccatctcgcgacattttgtcattgcatcaaaccaattttgcttaacgtgcctctcgatgtaaaagaaccgtgaacctactttctcaaattctggatggagtgatacctttgacgaaacatttctggtatccagtgaacattggagagcattcagtgccttccgtaaggatttctctaaagataattttttgacctttatctccatcttcgcatgcaggtccatgaaatggccttccattttaacctttaatgctttcaattgcttatcattgacttcttggtgtccttctatcctgtctagaattccctgcgtttcgttgaaaattcggaaattggcagtgtacccttccttttgctgctctgaaatgttctcaaggattggtaatatgtcgataagacacatttcaccaagttttttaagtctgtcgtacgatgaaattaggggatcctgaagaatatcgttttcagcaaacacgttgcaagaaccgtaggaaaagaacacgaacaagaaataggtcgcgcattcgaacatgttgagtgagtataacgaactgattccaaaattatttataatttttctttttctcatcaacaaattttgcacacctcgtacacaggtaacacaccggaacgatcgtattttatgtagaaaaatttaagtatttactacacatcttataatagtaagagatcatttcgcttttaagaaatctgcaataattttgtacattgtaaaatcttttaatttactgcaagctggcaaataaaaagaaactgttcgctgcactttccatccatcatttctcctccacgtaagtgaacacagcgctgatgaatttgcacctgaggcctatgtttatgccatttcaaaaagggtggattcattcccgttgctaaagaaatgaattcgccccacttagcaatgtcattgatgtccagccagaagtcgtgacttccgtcattgatgtccttaagttccgtacggatagcatccaattcgtcttcgctctggattgtcaacagatgagcacccattttatggcacatgcttgtcgctttaaaccaatccactttgtgtttcttctcgatgaaaaaatgcctccagccaatcttctgaaattgggatgggatttcggttttcggcatcacttttttcgcttccacggatagatttagggcttttttcgtttcttgcaattgtaactccagacttgctaagtgacgttggatatttttcacattcttaatcttcgcacttagagcattaaattcgttatccacattgtcgtgaattacttttattttgtcgtttgtttccttctcctgaccttcaatcttagccagttgtttcctggtttcattcacttggacttcgttagcagagttccagtggctcttatggttgttggaaatatacttaagtactggcgccagttctacgagacacacttccttatccgttgacattcgaggacacacatcctttgcacggattccatagagcccacaggccatgaagacgtgcagaaaaa

SEQ ID NO: 5153 - DNA, 1662 bp, DROSOPHILA
atgttcgaatgcgcgacctatttcttgttcgtgttcttttcctacggttcttgcaacgtgtttgctgaaaacgatattcttcaggatcccctaatttcatcgtacgacagacttaaaaaacttggtgaaatgtgtcttatcgacatattaccaatccttgagaacatttcagagcagcaaaaggaagggtacactgccaatttccgaattttcaacgaaacgcagggaattctagacaggatagaaggacaccaagaagtcaatgataagcaattgaaagcattaaaggttaaaatggaaggccatttcatggacctgcatgcgaagatggagataaaggtcaaaaaattatctttagagaaatccttacggaaggcactgaatgctctccaatgttcactggataccagaaatgtttcgtcaaaggtatcactccatccagaatttgagaaagtaggttcacggttcttttacatcgagaggcacgttaagcaaaattggtttgatgcaatgacaaaatgtcgcgagatgggcggtcacttggcgtcgccacaaaacgaggaggaattgcaccttatcagtcaaaaacttgataccgagtcgtattggctcgatttatccgatctaaccgatcacggccaatacatttcgttggtttccgggagcaaagctccatttttgaaatggaacaaaggccagccaaacagggaaaatgcgcaatgcgttcgtgtaaaaggcggactatatcagacttttcaatgtgaccaccgagttttgttcatttgccaagccaaccagaatcgaaaaaaagaagatgaaataaacaagaatcaagggaaaccacgaataatggaaaaggaaagaagtaaagaagaggaaaaaagaaaagaagaggaaagaagaagagaagaggaaagaaaaagagaagaggaaagaaaaagagaagaggaaagaaaaagagaagaggaaagaaaaagagaagaggaaagaaaaagagaagaggaaagaagaaaggaagaggaaagaaaaaaagaagaggaaagagaaagagaagaggaaagaaagagagaacataataggaaaaaagaagaggaaagaaaaagagaagagaaaagaagaaaagaagaggaaaaacgaaaggaagaggaaagaagaaaggaagaggaaaggaaagaagaggaaagaagaaaggaagaggaaaggaaagaggaggaaagaagaaaggaagaggaaagaagaaaagagaaaagaagaagagatgagaagagaagaagagaagaggaaaagagaaaggaagaggaaaggaaagaagaagaaagaagagaggaagcggaaaggaaagaagaggaaaggaaagcagaggaaagaagaaagaaagaggaaagaagaagagaagagaaaagaagaagggaagagaaaagaagaagggaagaagaggaaagaaggaaagaagaggaaagaagagaagaggaggaaaaaagaaaagaagaggaaagaaggaaagatgaggaaagaagaagagaagaggaaaaaagaaaggaagaagaaagaagagaaaaggaaagaagaagagaagagggaaaaagaaaggaagaagaaagaagagaaaaggaaagaagaagagaagaggaaaaaagaaaggaagaagaaagaagagaaaag

SEQ ID NO: 5154 - protein, 554 aa, DROSOPHILA
MFECATYFLFVFFSYGSCNVFAENDILQDPLISSYDRLKKLGEMCLIDILPILENISEQQKEGYTANFRIFNETQGILDRIEGHQEVNDKQLKALKVKMEGHFMDLHAKMEIKVKKLSLEKSLRKALNALQCSLDTRNVSSKVSLHPEFEKVGSRFFYIERHVKQNWFDAMTKCREMGGHLASPQNEEELHLISQKLDTESYWLDLSDLTDHGQYISLVSGSKAPFLKWNKGQPNRENAQCVRVKGGLYQTFQCDHRVLFICQANQNRKKEDEINKNQGKPRIMEKERSKEEEKRKEEERRREEERKREEERKREEERKREEERKREEERKREEERRKEEERKKEEEREREEERKREHNRKKEEERKREEKRRKEEEKRKEEERRKEEERKEEERRKEEERKEEERRKEEERRKEKRRRDEKRRREEEKRKEEERKEEERREEAERKEEERKAEERRKKEERRREEKRRREEKRRREEEERRKEEERREEEEKRKEEERRKDEERRREEEKRKEEERREKERRREEGKRKEEERREKERRREEEKRKEEERREK

SEQ ID NO: 5155 - DNA, 3682 bp, DROSOPHILA
tattaacaccagttatgagctttttatagaactcagtctcgtccacatcatcctggatctccggcaacagctccgccacgggctcatattcctgtttcggtgctgtgggcattcgttccctgcggtgggactcctccatttgcttgctcctctggatgaaactgtagttcttcgagaatctctcatttcgccgggcgggcgttggtttcttgtagggcttcgccctgttcttcgagtgtttttgtttcattttaaactgtttgttaccgagtatctttcgcacacacgtgtggatcaacaaacatctggattggtgaaggaatccgatacacagacatatcgatagctcctagagatggcgtgtggtgaatttaaagccggtaaagctaattcatttgaaatttataatctaagccatgtttttttaggaaatcacataaatttgctatgaaaccccagtaggtgaccaacgatgaattgatttctggcatataaatatcaaaaaattgtctaagatatgacttttgaagcggtcaaatatggtgattttccgatttgaagtactgggcgaactgaaatctcagtaggtgaccagcctagtccaagtaaaatcaatatcattgcactagaaaaatcatctaaaaaaaatgcatacttttaaaattatcgttagtttacgaaaattttcttccgacccaaaatgttcagcgctttctgtacaagaacgaaagtatgcacttatttattcgtccaattacaagtagatggttatttatatttaacaagctattcacctaagattagcttgaataccttatcatcacagttaaagattaatgttagggagctagtttaagtctgcttaattgtcaggaatccccctgatggccccttatatcgattcctaaacccaagttggggctgttcagtatttttccagagccgggcggtataaattgccgctccagtggcggtcttattgcattgaagttgggcaatgggaagtgatcgcacgttaaaaaagcaaaagatgtcggtattacaggaactcaagaaaatcaccacaattgtggctgacaccggcgactttgaaggtaagtacgcacgcaaggtatttttcttaacaagatgagtccgatttcaaagctagcgtaagtttgcctcaaaagtgggaatccagaaatgcaactaaagcgaaatgcgagtctgagctcgaacatccatacatatatagagcatacatagaatccgagtccaaagatacataggatacatggatttatccaaaagataaacattaacgacgggccatcggatccgtcgtgtctgccgcagtgaagatcaaataaaagtgaaaagcaaatccgagctgactttagtttgacctttggtgcttacgtgtgttagaaatgtgaccgctatagtaaagtgtactatagaatgccaccagagataaggtttcggagcagagtgccaaacctgctcagacatttgaaaagttcaaagatattttcggtcgggcgattgaaaaatgaaagtcgctcaacaggtttcgaggtctttctaaaattcgcaatgtaatttggccccgcacttatgcaaatactttacacattgcttccagccatcaacatctataagcccacggatgccaccactaatccctccctcatcttgtccgcttcgtccatggagcggtaccagccgctggtccaaaaggcggtggaatacgccaagggcaagaaggggtaagcagttcacttgggtgtttgccacacaaagctacatagaataccatcgtttgcagctccgtgagtgagcaggtggccgaggccatggactacctgtgcgtgctgttcggaacggaaatcctgaaggttgtgcccggtcgcgtttccaccgagatcgatgcccgcttgtccttcgacaccaagaagagcgtggagaaggccctgaagctgatcgccctgtacaaatccctgggcgtcgacaaggagcgaattctgatcaagctggcgtccacctgggagggcatcaaggcggccgagatcctggagaacgagcacggtgtgcactgcaacctgacgctccttttctcgttcgcacaggccgtggcttgcgccgaggccggcgtgaccctcatctccccgttcgtgggccgcatcctggactggtacgtggccaacacggataccaagaagttcgaggcgctcaaggacccgggcgtgatctccgtgacgaacatctacaactactacaagaagttcggctacaagaccctggtcatgggcgcctccttccgtaacgtgggcgaaatcaaggccctggctggctgcgatctgcttaccatcagcccagcgctgcttaaggagctggagaacgagaccgagtcggtggtcacctacctgtccgtaagcaacgccaagctgcaggacatcgagaagatcaccgtcgatgagagccggttccgctggctgctcaacgaggacgccatggccaccgacaaactttccgagggcatcaggaagttcgccgtggatactgttaagctggagaatttgattaagacctatcttaagtagatgttcctctgggtccgctagcaggtggaggatgaatacattcgtttttgaaaaagacaatgattttatactttaataaacactacaattaaaagagatgacaagattcagttgggagttatggaaattattaaatgggtgaataggtttggcatgcaaatagcatgattactcgttgcagatatggatacgaataataaatactaaaagtttacaaaataaataaaatttgcaaattatatcacagataaagatactttttttttgataccttatcataacaacttcaaacatgttttctacacgcccgtgtagaatatctatgtaagcctgtagagacggctgcttatgtaaagtatcggacgggtgtttctggatttcgctattctacatagctcgggatactttattttattattaatattcgctaaaatagcacatcgtcatttggcatagatgtttttggcccagtaacatatctatctacatcaccgcccgcactatccgataggcagactgactatcgataaaagtatctacttcgttgcatccctaggttgatacataaaataaaaaatatataaaaagtgagttagtactggtattaaaagtaatttttaagctacaaattgatgaattgcgagcacacagagactaagaacattgggaatccggaaaacagtggctggcgcgtcgggtgcgatagaattgcctgtttttcagaccccaaaagtcgctcccaaccgagtcgtgcacctatagtcttggcccgaagttgctcccatgaataaaaatgttcggtaatttcacggtaaacaataaccattgtcgaacgcagggaatagtcgcgttcgcacacgtaattgccatcgcgcagagatgtgattcgcccctgcagcccctcgatctcgaccgacctcccgattttcggacgtcctgcgtcctgcgacctgcgacctgcgtcccatgtccttaaacctgaaatcagtgaaaaatcgttcgcgcatgaatatccaaaatacaatcccatccatcgaattcaatccattcgaatccaaaccaatccaagcagatgcgttgcgatgcgattccattccatt

SEQ ID NO: 5156 - DNA, 1093 bp, DROSOPHILA
ggaagtgatcgcacgttaaaaaagcaaaagatgtcggtattacaggaactcaagaaaatcaccacaattgtggctgacaccggcgactttgaagccatcaacatctataagcccacggatgccaccactaatccctccctcatcttgtccgcttcgtccatggagcggtaccagccgctggtccaaaaggcggtggaatacgccaagggcaagaagggctccgtgagtgagcaggtggccgaggccatggactacctgtgcgtgctgttcggaacggaaatcctgaaggttgtgcccggtcgcgtttccaccgagatcgatgcccgcttgtccttcgacaccaagaagagcgtggagaaggccctgaagctgatcgccctgtacaaatccctgggcgtcgacaaggagcgaattctgatcaagctggcgtccacctgggagggcatcaaggcggccgagatcctggagaacgagcacggtgtgcactgcaacctgacgctccttttctcgttcgcacaggccgtggcttgcgccgaggccggcgtgaccctcatctccccgttcgtgggccgcatcctggactggtacgtggccaacacggataccaagaagttcgaggcgctcaaggacccgggcgtgatctccgtgacgaacatctacaactactacaagaagttcggctacaagaccctggtcatgggcgcctccttccgtaacgtgggcgaaatcaaggccctggctggctgcgatctgcttaccatcagcccagcgctgcttaaggagctggagaacgagaccgagtcggtggtcacctacctgtccgtaagcaacgccaagctgcaggacatcgagaagatcaccgtcgatgagagccggttccgctggctgctcaacgaggacgccatggccaccgacaaactttccgagggcatcaggaagttcgccgtggatactgttaagctggagaatttgattaagacctatcttaagtagatgttcctctgggtccgctagcaggtggaggatgaatacattcgtttttgaaaaagacaatgattttatactttaataaacactacaattaaaagagatg

SEQ ID NO: 5157 - protein, 320 aa, DROSOPHILA
MSVLQELKKITTIVADTGDFEAINIYKPTDATTNPSLILSASSMERYQPLVQKAVEYAKGKKGSVSEQVAEAMDYLCVLFGTEILKVVPGRVSTEIDARLSFDTKKSVEKALKLIALYKSLGVDKERILIKLASTWEGIKAAEILENEHGVHCNLTLLFSFAQAVACAEAGVTLISPFVGRILDWYVANTDTKKFEALKDPGVISVTNIYNYYKKFGYKTLVMGASFRNVGEIKALAGCDLLTISPALLKELENETESVVTYLSVSNAKLQDIEKITVDESRFRWLLNEDAMATDKLSEGIRKFAVDTVKLENLIKTYLK

SEQ ID NO: 5158 - DNA, 3870 bp, DROSOPHILA
gtcgttttgaatcttatgacatttagatttgatttgtttccatattgttattattcgccatttaatccatcgattcaaggtcgatctcaaatttggaagcttggaatacccaatactcggaaagcgcatccgtacttaccaacttaagttcgtttttggaggcgcagtcgaatccagttccgagatccgccagaaacttgaccaccaccggatcgtcgttgcacttgacggcatagtggggctcaatcctgggcataagcttgtgccagagacggagcttccgctccaggctggacaagtcacagatgttgagggcctggtccagatgttctaggtctgcctgctcgataaccttgcgaatgttgagctcttcatcgtagtattgtattcttaggtctccgttcaccatctcgattagactgatactgatacaaatgtggtctgcctgcccacagagagtcccagctttgggattatctattaggaagtgacaaaaacattatttatacataaacgatgtcgactttggacatgagatggattgcttttcggtttttttttttcaaggtctacgcatccgtaaattatgctacgagtcaagtcaacaaatttattaaactagaactggtggcaattaaagttccagttcatttgcatgattgatttctaggcaaattataagaaactgatacttaagatatatttgatggatgacaattttgggcttttatcgcttactgccttttaaatagatgatttgtgtgacttagaactattagcgaaaagtatgacagatctactgactttcatagtaacattaccgtaagttgtgagatccaaaattgtttacgcatgaattcccagctacgaaatacacatctcaaatgctccttttacatacatgaagatatttatgggcctaacaatccaccagccaggtatttttataaacccaagtctactacatataaaagttgtaagcaagtaaacaatagagagtccacaaaatgttggttttattggattgagtaagtgatttagtcatatagcttggaagtacagggtcttggggacttcgaatccattgaatgcactggcaatgggcatggtgtaggcgcccatgtttcggaatcccaaaagatcgcctcggtttaggttgggcaagtgcaggtcctccgaaatctgaagaagaaataaaacattacttggtattgctaagtttcaagcaacatttgacttaccttatctagggcgtcacaacttggcccccaaatcaaggactttaggtgtggcaaagattctgcattgtcctgtgggaaaatgaagtgaattgggtcttaaaaacatgtagaggtctgagctattcaaggggaacccctcttctttttaacaatgttcaatgacaactaaaataatgcatatgataatggacaatcttaccagataatgctctgcaatcaccacttgatggtcgtacagaatgcagttgaaggacccatagacgccgtcattcagatagtacattacggtgtccagtttgccagcttcgttcctgatctcccgcttggcgtggatcttgcaaaccaaggtgcaggctgccgccacaaagaagcgtcctggttcggcgattatgtgaacgcgttcgtcgggaaaatgacgctgcaccgaggtattcacactttcggctatctgtaaaaagtttcctctgagcaattgcttcaaaatcctctgcttactgcattacaccttctcaaactttacgtcatcgctgccagggaacccaccgccaatgtccagaaagtccatgtcatagcccagtagtgcgccgaacttgaagaggttcttggccttcttgatggcccgatcgtaggcctgcagctcgctgcatccggagccgacgtggaaactggtgccggtcaccttcagctccaaggatttggccagcagcattagggccgctgcatccacatccgcatcacagccaaatttgtcgcccagtgggcactgtgcctccttggcctcgctcttgaatctcacgatcaggctggataacaacgtatagatatactaatgatcgcatccgacggtagtgcacctacttggagttgggatagtgcgtgtgcagcttgtatacctcgaactcattgtccaccgttccgttggacacctggtgctccttggcgtactccagatggctgacagggcggcagggattggcgaagatgatacgctccggcgagacatcgaagcccaagacctttgaattgaattcatgaaaagaataataaagttattaaattatacgaaattccgacaagtaatcaaataccaatgtctgggctctagaacaacacgtgttaatcgcttgaaaaatgaaaacctacattcagaaattgataaggcccagaattacgttccattacttggaacatgactatatagtactttgtactaaagtatttataaaaacatattagtgtggcaccaaaaactatgagatgcactaccaggacttaaggcacttgtatatgtagtaactattcccaacccaccagcttgacttcgtttttggaggcgcagtcgaatccggctcccagctgggccagcagcctgaccaccattggatcgtcattgcacttgacggcgtagaagggcttgatcctgggcaggagcttctgccagaggcgcagcttacgctccacgctagacaggtcgcagatgttgagggcctggtccaggcgctgcaggtcgcactcctcgatcacccggcggatgttgagctcgcgttcgtagaactggatttcaggggtagcggccgccatctcggaaagatctcaactgagtgagtgagtggggcgctcgagacgcggctaatcccatactagaggtgttatcagtcaacgacttgtgctcgaatcgcaacagacttgcgaaacatttggaaacacgctccgtaaacgttcctcgctcggcgggaaacaatgaggctctaattagcggcaaaggtcaagcgattggccgttaccctcccctcctcactcctatccagcccagtgatatttgccagaatgcattatttacaaccaacaatatttggcatcgtaaataattttaatgcctgcgcgcggctgcacgggcatgtaaaagtaataaaatgtaaatttcgaacgccaactgtgtgtcaaccgagtggccatcgagtcgcgcataatcgacacttgccccgcggacacggggcacttcaaatcggaatggcatcaaacccaaacccctagacacccctagcaaattccacggcaatgacaatggtaataataatagcaatagaagtggaaaggagggttgttgtggtctgtggcacggccaatttagcaaccctcgactgggtccgaacggcaattaaaaattaaaatctaactttcgtaatcgatattggcaattgcagttgccgacttgccggcttgccggattgtcctatcaatcaacctttaattggccaaacccatcaatatttttttccgcacaccctttggccttcggcgaagatgttgccggcgaaaggagttaggatccccagaatgataactgtcagaaagcgcggacaaaagtattgactattgagcgatggccgcgaaacgtatatcttgtcatgctcaaaaatcgaggcgagccgctttcatccgaatcattgcgattcgattgcaatttgctgcgagtgtcatcattcactcgaattcagttttccagctccgatgcgatttcaaaactaacccgaaccgcagcgagcactccccactttgagtgatgtgtcaaatcgacgacaggccgaaaagtgctcacaaaaaaattcgaaatctaaatcggaatggg

SEQ ID NO: 5159 - DNA, 1274 bp, DROSOPHILA
ccgcgtctcgagcgccccactcactcactcagttgagatctttccgagatggcggccgctacccctgaaatccagttctacgaacgcgagctcaacatccgccgggtgatcgaggagtgcgacctgcagcgcctggaccaggccctcaacatctgcgacctgtctagcgtggagcgtaagctgcgcctctggcagaagctcctgcccaggatcaagcccttctacgccgtcaagtgcaatgacgatccaatggtggtcaggctgctggcccagctgggagccggattcgactgcgcctccaaaaacgaagtcaagctggtcttgggcttcgatgtctcgccggagcgtatcatcttcgccaatccctgccgccctgtcagccatctggagtacgccaaggagcaccaggtgtccaacggaacggtggacaatgagttcgaggtatacaagctgcacacgcactatcccaactccaacctgatcgtgagattcaagagcgaggccaaggaggcacagtgcccactgggcgacaaatttggctgtgatgcggatgtggatgcagcggccctaatgctgctggccaaatccttggagctgaaggtgaccggcaccagtttccacgtcggctccggatgcagcgagctgcaggcctacgatcgggccatcaagaaggccaagaacctcttcaagttcggcgcactactgggctatgacatggactttctggacattggcggtgggttccctggcagcgatgacgtaaagtttgagaagatagccgaaagtgtgaatacctcggtgcagcgtcattttcccgacgaacgcgttcacataatcgccgaaccaggacgcttctttgtggcggcagcctgcaccttggtttgcaagatccacgccaagcgggagatcaggaacgaagctggcaaactggacaccgtaatgtactatctgaatgacggcgtctatgggtccttcaactgcattctgtacgaccatcaagtggtgattgcagagcattatctggacaatgcagaatctttgccacacctaaagtccttgatttgggggccaagttgtgacgccctagataagatttcggaggacctgcacttgcccaacctaaaccgaggcgatcttttgggattccgaaacatgggcgcctacaccatgcccattgccagtgcattcaatggattcgaagtccccaagaccctgtacttccaagctatatgactaaatcacttactcaatccaataaaaccaacattttgtgg

SEQ ID NO: 5160 - protein, 394 aa, DROSOPHILA
MAAATPEIQFYERELNIRRVIEECDLQRLDQALNICDLSSVERKLRLWQKLLPRIKPFYAVKCNDDPMVVRLLAQLGAGFDCASKNEVKLVLGFDVSPERIIFANPCRPVSHLEYAKEHQVSNGTVDNEFEVYKLHTHYPNSNLIVRFKSEAKEAQCPLGDKFGCDADVDAAALMLLAKSLELKVTGTSFHVGSGCSELQAYDRAIKKAKNLFKFGALLGYDMDFLDIGGGFPGSDDVKFEKIAESVNTSVQRHFPDERVHIIAEPGRFFVAAACTLVCKIHAKREIRNEAGKLDTVMYYLNDGVYGSFNCILYDHQVVIAEHYLDNAESLPHLKSLIWGPSCDALDKISEDLHLPNLNRGDLLGFRNMGAYTMPIASAFNGFEVPKTLYFQAI

SEQ ID NO: 5161 - DNA, 9470 bp, DROSOPHILA
gcgcggtatgtgtgctccgctatcctcgttgtgcttgcgttttacagcaaacaaaacactttaactagccaatttaatttttatttatttatttctctcctgagaaatataccagatgtgcagaaaatgtgcctaaaaatgccattgattcgatgacaaaatggattagaactcagatagatatctagtgatgacgcaaccctaaagatttagccgagacaactatttcaaacactgaaaacaatttcatactctttggcttaggtagttacgataagtaagctttttatgcccaaaacaaaatacaaaaagtttattgtaaaatcgaacataaacatgtcatatttttgccagttgtaaaaagttttttatttcatattatattttagttttatataaaaccttagcaattctcgcctaaaactacacaataaacttaacatagcgcatttaattctcatttgtatccccaaaaaaactgtatgtgtaatgcaagcaatattatgttatgaaagactcaaagcaatatttatttgttattatattttcggttggttccgaagcgttcaaacattactccatattatgcaaaaatagtatctcttcatatttttctgggggtctactatcttttttttagcgatgtttcctatttatacataagaactaggtattaaattagattttataattaggaaaaaaaagattttgtctgcagaaaaaaacacaaggaaaatctcatcattttttttttttttgttttgtttgtttgtcttgttatcattgatggaaaatcaaaaataaaaaaaaaattaaaataaaagaattgtcttttctgccaagcgattcgagttgtgatcattgattaatccatgtgtatgatagcttttggcttgggtcaggggatgggaattgggttcgtttttggaaggggttaaaaggtcagggcttaatcacagaactaccaacggggcgttgggggcgtggccctgtcctggtctcgagtttcaactaagtagtatgatttgtgctaaataaaaataaaaaatccaaaacagaattcggaatttcgggtttcggacaaaatgatggggactaataggcagggtgattgatatatcgaacggcatatcggggggcatcatctcgtacatctggtctacttggcacggtcgtgcttggagggctccacctgcttggcaaactcgctcatcacgtccttgtagatgaccggatcaagattgcgacccagcatatagattagccaccagtcaccgatgtccagtttgcgggacagcgagcgacagatctccatcggaatcatgcgattgctggcgttcaggaggcggggtcggaatttcggcataaagataatgcagccactgcaacaaataaataaaaaaaagtgaataaaaaactatatattcgcttttagaaatttgcaaactttcgaaactaaccggaacactatcagtccgatgagcaggacgagcaggatccagaaccagaaccagatgaacacgtacgtcttctcgttcacaatgttcagcggcaggatgcagagtgagtcgtgcttctgcagcgaaccagagggaccatacttgtggaaggtgcacttggtcacccgggggaacacatagaccatgggatccaccctttgctcctgcggcacatccgaaagcttcatgatattcgtaccgtacgagaggaactcgccatcgaaaaagcgattcatcagatacatctgcacgataatgttgatgcagcagagaaattcgcaggcccagtaccgaatggcgtacagcttgtggcgctattatagagtatcgaagttcgatcagtcgtggtatcaaagttattagcactggtccttcactcaccttcacgtgcttgatcagatagtccagcagggcatcgcgtttggcctccttctcctcgcgggtgcagatcgtgatattcagacccatcacaatcatgcgcatcagtccgccctcgaatttattccacaggaatttgggcgtataacaggccatggcctaaaagcattaggaaataggattaggaaaaattacttatgcgaagtttttgcttcaaaatgacgatacaaaaaaaaaacacttgattcattcgtggaggcagatatatccatatggcaatagttcaagacaaacatttttattgaaatctgtcgaagcaattgacacgttacagctgaatttgttgcttttgtatgtgccactgttcatgtttcccaaactatttagcaagtaattaatcatatttggtatttcgcaagttcggagcacatttgttgcgcttttcccatttgtttatatcgcttgagcaatacgttgacccatagcccattccgaacccaagacgcttagtaagaccccagcatttcaagcagctacacacatttttatcagtgcatatagcactcccctatatctccatatatgtatatccacgcatgccacgcactcaattgaacttaattggagcgattgcgtctgcgtcgaagaatcgagaccacgagaatacaatagtgcacagagaaaaaaaaaaccgaggattacctagaatcttctcatgctacatcttgatatctcaatcttggaaggttaaccgagataggtgtaaatttgaaatttactcacaccatagagatatgataattgtatgtgcaattgaaacatgtgattatcaagtttcagaatctagaagtaaaatcttatgctacgaaactcacctggaagaaaagcacgaagcacacccactggtagtaggtgtagtacttcttggcatcctcgtcgccaaaatcattggccacaccgggatgagccacctctcggccaacctgaaaaaggtaacaaaaatgtgctataaataaatggagttaagaaaatgaagctggtaatctacaccccccaatcaatgtcatctccaccaaatagccacaatggaacacactaagcggacacttgagttcccagacatcgaattctcctcatggtttccctgattcaattcgcccatgtgctctgtgtgcacttagttagtgcgacttgactggtaatttgatcggctaaactgccaaaaacaaaacatatttccacgaaatcgtggcttaaggagctatcaaactgtttcctgccatgcatgaaatatgagcccaatccccggaggagctgtgcacagcaagaaatggattttaagctttcagttctctattggattagtcatacctttctggggatatttctaggtacgaagttactaatccaagagacctaagtagtagtatctgaatgcaaatctaagcaattttaatttatctgaatgtgtggttttttttcacagtgctagggggacactggagttccaatcgtgagggaattcaatttcggttttttttttttgttgttcttgatttggctcttttatccactacaaccgattgtagaaatcgcggcccgcagcagaaaggaggcagcagcagacaacgcccagtttataattgctttataggccggccatgaattatgagtgttgtactacacatatcgtatatgtgcatatggataccttggatgatgtccaaagggtcggacgtgtcccgcgtacagaaaacttgacaggcgggcaaaaaataaaaacaaaacttagccagacaagcgaatggcattgaaagcgatctgcaggagatgggaacacatttttaattgtgctggatctggaatgaagcggaagtgccacaaaggctctctcaacgaacggatgcagttcaaataggtttaaagatagccactccaaaagagctgttcaaaagtatgctacgatataattatattgaacattcaattcccatccgaatccccaactcacctgtctgcgaaaagcgtccggcatggtgaaagtgctgtggatccagcagaacgtgttgaccacgtgcggcggtacgccattgacgatgcagctaatcggctggcccacgtactgggtggcggtgatgatcaggctgcaggttagcaggagcaccgtggtaaaggagttgtgcagccggaagacggcgttgtccgtctggatgtcctgccacttgaggtagctcttcaggctacccagcaacttatacatcttggcacagtttggatctcagtgggcaaggatcaggatctttcgggagcttctcctccgggcagtgtgtttgatcttcccaaacggaaacgttgttatgctagacgcgactttaactttctcttgccggttcttgtcttgtttcgaattctcttcgccttcagctttcgatgcatatcaactgtaagcggataaaggatacaaatctatgaaaagtcttgaatagttatttataccttcatcctattcaatacgagtacaatcaaattgattcaattagacttaatttaatttctgtgtaggtaaacttagcaaatagaatgctgctatcttgctatctgtgaagtacatatcgctgattggaatactacgagatacacctcgcaattgaagttcgccgaaatgtgtacaatttcgtggtgaactgtgagcttctgattgataaatgcgcagagcgtgagtattttggcataaatcaacatcaactaatagaatcttgagacggtttcaatttcaattaaagatacatctcacagccacgacgtcgagcagccccagagatccctccatgtcggctgggaaaattgatgcgccatttaagtaaccaattgccatttgctccacttgcctgtgtggcccgctgccaactgagacggatttttgctcccgcttcggctttggtttctcttctctttttgtccgcccgagaagacacccaactgggggcaatgcacctccagtggcactggttcctctcgcgatctttgcgcaacgcatttgacccaagcgccactggaagaccccgtctcaattatgttaaatcgtttcgttttctttgtcatgcggtatttggctctttgggaatctgctcgatcagcactacattacttttccacatcattggtatattacgtgtactgtactgtcaatatatatcccttgacggcatcttaataaatccttatcatttgcaaccagaagaagaaactcgatggcatataggctcccaaaaccaactgcaactcagccatttcgcacataaattgcctccttgcgttggcccaaaagcccgccccttttttccccattcccctcaacgcttcgctgactttgccatttaggtttttaagttgcagccacatgaacaatggccaacatcctcccaccttccacctcccgtttgtacactcgcacacacatgcaactgccacttgttgttgatttttctttgcttttcctaggcattttcattgtcaaggccgtggggcccatggactgcagcaagtgttgccagttgatagacgcgtatatggtggaattttcgctgtgcaaattgcaatttgtttcggtttctaaaatggggagaaatagcgaaaagtgggcgctagttttaggtgtcagctctgccaattgttttgcgaaaaggtcgtcgcaactgcattaatgttatttacgtgatgtcgctggacaatcgtctatttcgaaataccctaaaatacccattgaaatggggggaatgctggctaagtaatttgatactaaattggagaactactcgtacatctataccaaataaataataataaataacttttagttaaaattaaaaaaggtacaccatgttcatacttcaccttttctaatttttagtgactattttacttgaaaatttatttagtgattgtaatttttcattttcctagtgtccgtacactttgttgtcgggtcttttgaaagctttaacatgcttaaccttaacatgaatacaaacacgagaactgcaatggcaattgcatttggaatctgagttttttttttttctagtctctttgttttgtttcaatttgttgcgggagtctgtctcttaaagttgtgacgtcaactcaaatgcattcgactgtacagcgagttgctattgagtcgagcgaagttgaatcattttcattagggtttggttgctgttttactggattcggttttggttagcagctggtctccagagcggaagttgcccttcgggtgtgcgtgtgtgagaaatacaaggggtggcatcaataaacacataccactcacgcacatatctacatataggttaacattatgatatttctaaagtaagatatgtacctaaatgcaaccccgtagccaaaaccaagtaaagtattgcaaccagctaattcattttgcgctgcaaaacttcaaaatgacagtcagtcattacgatattcaatgctctgtagaaagtggcaaaaactaaacttatccagagattaaacaacctgtttcacaagacccaatatttgttgtccaatcaatatggttttaagggtaaccagtttttcaacttacgtggaattcgatgataaatgaatggttttacaaatatatataacaaatacctatcggctagcgatctatttacgcggcagctggtccagaacaaacctttttggtcatccacttctgtggctagttacttgcatgcagctcgggtgggatcgtatcggatcggtttaaatagcatgggatgggatagtatggtatggtatggtatggtttcggatcgttagaatgcagaaaccgcaacgtagcgtgctcataatagggataccgggaatgggaaagagcgaaggtggctggctaggtatagtagtggccactacgtgctcctccccctatttgattccgtcattggagacacatgctcggaaacaatgagtcgccactgttctgcgtcacttaaattgaccatttccgtttggtgggggcaagaatttgttgtttaggggaaggggggcgatgttggtagggagcatctttgggatggcagagatgccatagatgtcgccgaaaccgtacccgtcagacggcgtacttctaaagcggacttctaatgtcgggaagattcatgggaaattataaggaaacgaaagaagagtagagactctgatgaggggcagatggaagtgggggacgctaataggagaaatagaaaaaaaggaaatgagaagaatggtggaaaaacaagattcatgagactttgggaaaacttagagtcaagaccaacgtttgaagtgataaaacactgtaaacacaatcgtaaatcatgacaataaaaactcatatttaaaatatcataataaaatctggtaaacttccagttgagcaaaattacatttgcaaacaaatctttgtatcgtggcaagataaattattgctaactataactgacgtagtgacccaaaacaacgactacgattgttgccccatcgtaaagagtagtttcagttttaagtaaagctgtcatttaacaatgctgatgatatacctactattattacgaacagtagcataatagtttcggttttagagttctggtagaaccgacaatatcatcaagaaccctgaatttaaagcgctcggtagagactcaaaacgtccttgatatcacctgactttcgacgactgtcgatcaattccaattggctccaaggggctttaatcaaaatgatgcctcggggctgacatctcgcttaatctcgggggatcgtattatagttatacaactaatcccactgtctctatctctatccctgtcgcccaggtgggctttctcgttcttcagaagtcatcggtgttattcgaaagctcggctcgaaagcttcttctctcgattaggcagctttcgttggcaagatgaagaatgcattcccccgcatttccccatatcccccagatttgtttttggatatttttgattacgtttttgtgatagacttacgcagaattccgttgtcttgtcaggctcttcttctggctttttgttttgctgctcttctttatatttttgattttttgtcagagcatggcgcgtgtgtgtgtttgttttgggactgcttcctcttctttaaatttttttgttttattttttgaatcagctgccaggtggccgtagaatttgcatgaaacaggttctcgaatgcagcccacagggcctcaaacaatatattttcgaaaaatgactgtcaaaagaaaaaaccgcgcacacacactcactgcaaaaaataccaacgcaaaatggaaatttccaaaaaaaaaatgtatactttagtttctttaagcaattcggtcgtattccgtttgtcgtgtacaaggggttttcacgattttcgctgtgtttcgaaattttcttataattttcctgtgttttcgagcgccgcgtagacgctcgcaatggcttttgtagcacgctgtcgccgtcgccgtcgactgccgcttggttttcaaatttcacagcaaaactcaaaacccattccattctcattccatttcccattccgcgccattccgctctccgttccaagccgtgctctctcgctgcgctcgcagcgaaacagctggctatgaaacttcaattactagcatgcgtaagcatttttgattttacgtttttaatgaaaaatgagctgagagagtttctgttttttaattcgctctttttttccaactctctcttgtgctctcgctctcactctctctcccgctctccacatttgtttatttaaacgaattaaggcttaaattaaactgatcgctagcaatgaactaaaattggagcagcatttgcccaggagatatgtttttccaaccccccttgataagtctttgagccgcctattttacagatagctcggcttcttttcctgcttggctaactccaatttcgttttttgttcacttattttcgggtttctcttgttttggcctacgaaaaggtacggaataacttgaaattcttaatatctacactgcgagaaattttaccttgcataagaaaacgataaaacatttctggttatgaaaattatcaaataagttgaattcaccaaaaacagtagatgcattattctcaataaacctgattttggatacaaagtatggttatacatatcatttgagaataaaagagaaatcttcgttagcaatgtgtggtaagaacattccaaaacgtcaaagactatagcccatgagttattattaaacaattataactgattgatggataggtattcatatacagtatttcatacatttggtaatgatttcaaaagcacaaaataagccagattctctttgattgccaataatgttaggggcactgtaggtacataacatggcaagatactgcctcaatataccatgtgtttgttctatttcattgatattcgccgatcccccacattttaatgttttgtttatataatcttggatggaccatgcattttccctgtcacagcataggtttctcgggacgccgacggatggatcccgtt

SEQ ID NO: 5162 - DNA, 1981 bp, DROSOPHILA
ggaaatggaatgagaatggaatgggttttgagttttgctgtgaaatttgaaaaccaagcggcagtcgacggcgacggcgacagcgtgctacaaaagccattgcgagcgtctacgcggcgctcgaaaacacaggaaaattataagaaaatttcgaaacacagcgaaaatcgtgaaaaccccttgtacacgacaaacggaatacgaccgaattgcttaaagaaactaaagtatacattttttttttggaaatttccattttgcgttggtattttttgcagtgagtgtgtgtgcgcggttttttcttttgacagtcatttttcgaaaatatattgtttgaggccctgtgggctgcattcgagaacctgtttcatgcaaattctacggccacctggcagctgattcaaaaaataaaacaaaaaaatttaaagaagaggaagcagtcccaaaacaaacacacacacgcgccatgctctgacaaaaaatcaaaaatataaagaagagcagcaaaacaaaaagccagaagaagagcctgacaagacaacggaattctgcttgatatgcatcgaaagctgaaggcgaagagaattcgaaacaagacaagaaccggcaagagaaagttaaagtcgcgtctagcataacaacgtttccgtttgggaagatcaaacacactgcccggaggagaagctcccgaaagatcctgatccttgcccactgagatccaaactgtgccaagatgtataagttgctgggtagcctgaagagctacctcaagtggcaggacatccagacggacaacgccgtcttccggctgcacaactcctttaccacggtgctcctgctaacctgcagcctgatcatcaccgccacccagtacgtgggccagccgattagctgcatcgtcaatggcgtaccgccgcacgtggtcaacacgttctgctggatccacagcactttcaccatgccggacgcttttcgcagacaggttggccgagaggtggctcatcccggtgtggccaatgattttggcgacgaggatgccaagaagtactacacctactaccagtgggtgtgcttcgtgcttttcttccaggccatggcctgttatacgcccaaattcctgtggaataaattcgagggcggactgatgcgcatgattgtgatgggtctgaatatcacgatctgcacccgcgaggagaaggaggccaaacgcgatgccctgctggactatctgatcaagcacgtgaagcgccacaagctgtacgccattcggtactgggcctgcgaatttctctgctgcatcaacattatcgtgcagatgtatctgatgaatcgctttttcgatggcgagttcctctcgtacggtacgaatatcatgaagctttcggatgtgccgcaggagcaaagggtggatcccatggtctatgtgttcccccgggtgaccaagtgcaccttccacaagtatggtccctctggttcgctgcagaagcacgactcactctgcatcctgccgctgaacattgtgaacgagaagacgtacgtgttcatctggttctggttctggatcctgctcgtcctgctcatcggactgatagtgttccgtggctgcattatctttatgccgaaattccgaccccgcctcctgaacgccagcaatcgcatgattccgatggagatctgtcgctcgctgtcccgcaaactggacatcggtgactggtggctaatctatatgctgggtcgcaatcttgatccggtcatctacaaggacgtgatgagcgagtttgccaagcaggtggagccctccaagcacgaccgtgccaagtagaccagatgtacgagatgatgccccccgatatgccgttcgatatatcaatcaccctgcctattagtccccatcattttgtccgaaacccgaaattccgaattctgttttggattttttatttttatttagcacaaatcatactacttagttgaaactcga

SEQ ID NO: 5163 - protein, 362 aa, DROSOPHILA
MYKLLGSLKSYLKWQDIQTDNAVFRLHNSFTTVLLLTCSLIITATQYVGQPISCIVNGVPPHVVNTFCWIHSTFTMPDAFRRQVGREVAHPGVANDFGDEDAKKYYTYYQWVCFVLFFQAMACYTPKFLWNKFEGGLMRMIVMGLNITICTREEKEAKRDALLDYLIKHVKRHKLYAIRYWACEFLCCINIIVQMYLMNRFFDGEFLSYGTNIMKLSDVPQEQRVDPMVYVFPRVTKCTFHKYGPSGSLQKHDSLCILPLNIVNEKTYVFIWFWFWILLVLLIGLIVFRGCIIFMPKFRPRLLNASNRMIPMEICRSLSRKLDIGDWWLIYMLGRNLDPVIYKDVMSEFAKQVEPSKHDRAK

SEQ ID NO: 5164 - DNA, 4998 bp, DROSOPHILA
ccagcaatcgccccagcacgaccaccgccagtggttgtcgtggagcagccagccccacaaccacccacagtggttccaacaggtgtgtagtttgcacatagttatagttcggctgtgaagctctactgacgtcactccctgctgttgcagatactctacacttgggtccaaatcgaagtagggttctctgcccagcctgtggagccaacaaaactacgaggatgacacacacggctaactccaggacccatatggtggcaggtctcctctgtttggtcgggtaagttgagtttcttataaaaaggagtagagtttatctgcttattgatttatcttaaatttatatatttcatgtctcatcctctttaaagattctgctgctgtgcctgttttgttccctattgcatgaacagttgccgcactggaaaccactattgtcgcaagtgtaacaccttcctgggagcctacaatccaaaggggatgaaccgatgataagactgccaagataaaacgtgatctgggggctagacagacagaacagatacaagttataagtaaacacaacgcagctgatgcttgccagcggctaaattaaggttgtatgtacataggccattggctagagcgcaaggcgtcaaaaagaatcatcattggtcatttaagcatatgtgaggtagcttaaaaacaatttaataagtttcccaaattcttctttacccataagcaccactatagtaaacataagcaaaaccgcttaccttcccattgttgctgaagcagctggcctttggctggctagaaaaataaaagcgtgggcgtaagcttcacaataaaatgcaaacacaaaacaatgacaagccacatttcaaaataaacgtagtttggcgcccaatcgaaaagtgagttgccagatcagcaccatacgctagccaacactggctgcgcgctactatcgaaatatcgatagcctggcattgagcacttctacgatatggcaatgttgccgcagccaaaaagacaattgcagaaagtttttttcacaacaaaaagccaccgaaaacgctccaattaagcaacaaatgcgtgccaaaagcgcagcgaatctccactgaggccaccgtgtgtgcgtgagcgtggcaaaggtgcgagcagagcaaccaaacatcacaggaacacggccagcagcagcagcggatcagcagaggggcgggcagaggcagaggcggtggcagagggaaaagtcgggcattttcattggattcgttttggtccgattcgattggattgcggttactccagcggcgcccaggcgttcctcctctcctcctgtattatggacaagaaatcctcgccggtgcgacgacaaaagcggcaggcgaaggtgatcgaggagaacttctgggactgcagcgtctgcacatatagaaactcggcggaggccttcaagtgtcgcatgtgcgacgtgcggaaaggtaagtgaccccgattttgcttcgttttcgcttccgagttccaagattgagcagattgccagccatgttccgattttcgctttcttgatcatgtgtcatggatcggtttgtttatccttctacaaggatacacacacatcggtattaacaatattggaatatatctggttgaactgtagatagtaatagtcaaaaaaagactgttgactgttgattagatggccaacgatggtatcgatttgcttacgtagaataaataaattcacactgcgcagaaaccgggaatacttctcgaaacgataaacatgctaattgaaacaattttaaactatttatatactatttttggtgcgctcaataagactatacacccttgttttttaggaacctccacgcgaaagccacgcctgaactcagcgctagtcgcccagcaggccgccactttgccaggagccagtgtcaacatgcccaacgggaagtccgcctccggatcacggcatggcagtgggcacgaccggcagaggcacaagcggtatccggcacggttgaaaaacgtggaccgatcgacggcacagacgcgagaggtgacggtcaactcggtgaccgtgttcatcacagagtacaaggccaagccggtgagcagccgacgcgaatccagtgagcagagcttcagcgagagcaacgacagccggagttagaggagggatacaaggcctcctcgcccccagctccccaatattctacgccacggttcccgctcccctgttacaagttgtaaattctaagtgttaggcccctggcgataacaattgtaaatcgaaatccatttaagttaccaagtattaggccacgtttaaagccccgaaagccaagcccccactagttcatgacttccagcccaggccaagatggcaaagcaaagcgaagcgacggcgagtcgattgcatttacacgacgctctccaaatcccattttaaaatgcgctagaccctgtaaatagcgatgcatgagttccctgaatatctctgtctcgtatcgtaattttagttgtaatttaattctgctactctaattcctaatttattgatgcaaaggtaactatgtataaccgccgtgtacatgttcaacaaagatatcatttgttttgtaagtgtcgaattaaaatatggtttaactaagtgcaagttaatctcaatgttccactagcagcgcccatcccccatggtttgtgtaactattataaactgcccttttttttttgactagaaaatgctgcttgacaacgaagtgtagcgagaagagagccacgtagcttggttgtagacaatttgctaattttaatttgtttgtatacaagactgattaagcgttaccaaccagatatagagaggtccgcacacgcacccagcccgaatccgattttccttttggtttacacccgagatagcctcacagccagcaaacaatagacgaatactcgaactcgcaaaaagagaattttgtacttagcagagcttaaacgctcttccaccatagcaataattacttagcaaacaatgaaaaacatgaattttgatatgaacgattgtatttaatattggataacagatataatggtttataaagtgcttgatatttgtattttgagatagattatttagccacacatgaacactaacacacacccactcgaaactgccgactgtagtcaagaaacaacttccaatagacaaacttcaatttggattatcgtaaacatgtacaattaatatgaacagtttgtattccaaatgcttggccagttgagcattaatcaacagcaacgacaaagacaaagacaaaacttaagcaaacgcaattaaagccgcactcacacgacaacacggatagttaaaacttgaattccaattgtaaagcgtaaacttttaaagcattataaaatacattaaataaatttcgaaaatgctattccaaggagtcgttgtcttctctcccgccctaagatgagttcaatttaatattttttatttgggcttatccaacttgctaaacttttgttgccaagttttatttttgattctttttatggctgacattcggcttaaactttaaaggtctttaaagagcaaggcagcagcgagaaccaccccggctggatgccagtacatccaccgtttccccaggacccaggaccacccacgcatcgcctttcccccatcctcccttctgtgtgtgagtgtgttccgaaaggggggggggggggggcgcagcccgagcaccatctgtatctgtatcagagtatctgcttacgcgtgctcccggcctccagtttttgggcctcagatcagagcagcgcttctgccagagtttcggtttcagatgcacggaaaacgggaacaggagatggtgctcgagctggagctggagccggagctggagccactgtctctggtcgatggctacgcctttggcagctgcctcaacttttcgcacagagccggagcacatcgcacgcttcgcaaataaattacaaattgtttcgttccagctatgctggcacagtcaaactatactaacatcaacccgctttgtgtaatgtatgcttggatacctattaagcatgttcgatgttcgctaattgtaaaacttgtgtttatgttttgatttcttctcagttctttactgtttaccaacaaattaaaatgttgtaaatataaatttatttcccttgaattagctcacaagaatgcactgaacgaggcttgactgtacttacatacatacacacccgatttcatccacatccacatcccacacccgtagttcgcgcaattcgcttcagacttctagctcgtcgctcgaagctctcgtcgttcgtattttctctaaaatgttaaaattcacaggacctcccggcatgtcaccccccgatttccatccctctagttgcggcccacaggcggcagcaggacctgcgttatcagcgccacactctgtgcgcttatcttccatgtgcgcttcgttcttgggctccagctacaactacagcaactcctcgtccttcgtccttcgtggccctacgccttcttatccgtttgtttgtccgtgcttccgcctcatctgtgcgaccgtccgcacatcctgtgccacccaaccggtccagggtccttcgtcctggctccctccgccttcgtcctgcgtccttgtgtgtagtgggaaattctcgttcgttggtcgaaggagcgagaaaaaaataggcaaaatcaacgttgcagcatttggaaaatgttaaaaactccttgctgctgccgggcattgctttcgcatgacgcatacgccgcgttgtccagcttgaggatcgcctggcaagtaggaatgggcggcgccttctggggtgcgactggtaatcctcgcaagtaacttgagcactttatggcacaacgcgcacgtgtgtgtctaaatctgtacgtgtgtgtgtgtgctagataaccaatgccgcgtgggggaatccccttaaagctgcgat

SEQ ID NO: 5165 - DNA, 978 bp, DROSOPHILA
ttgccgcagccaaaaagacaattgcagaaagtttttttcacaacaaaaagccaccgaaaacgctccaattaagcaacaaatgcgtgccaaaagcgcagcgaatctccactgaggccaccgtgtgtgcgtgagcgtggcaaaggtgcgagcagagcaaccaaacatcacaggaacacggccagcagcagcagcggatcagcagaggggcgggcagaggcagaggcggtggcagagggaaaagtcgggcattttcattggattcgttttggtccgattcgattggattgcggttactccagcggcgcccaggcgttcctcctctcctcctgtattatggacaagaaatcctcgccggtgcgacgacaaaagcggcaggcgaaggtgatcgaggagaacttctgggactgcagcgtctgcacatatagaaactcggcggaggccttcaagtgtcgcatgtgcgacgtgcggaaaggaacctccacgcgaaagccacgcctgaactcagcgctagtcgcccagcaggccgccactttgccaggagccagtgtcaacatgcccaacgggaagtccgcctccggatcacggcatggcagtgggcacgaccggcagaggcacaagcggtatccggcacggttgaaaaacgtggaccgatcgacggcacagacgcgagaggtgacggtcaactcggtgaccgtgttcatcacagagtacaaggccaagccggtgagcagccgacgcgaatccagtgagcagagcttcagcgagagcaacgacagccggatttttgggcctcagatcagagcagcgcttctgccagagtttcggtttcagatgcacggaaaacgggaacaggagatggtgctcgagctggagctggagccggagctggagccactgtctctggtcgatggctacgcctttggcagctgcctcaacttttcgcacagagccggagcacatcgcacgcttcgcaaataa

SEQ ID NO: 5166 - protein, 214 aa, DROSOPHILA
MDKKSSPVRRQKRQAKVIEENFWDCSVCTYRNSAEAFKCRMCDVRKGTSTRKPRLNSALVAQQAATLPGASVNMPNGKSASGSRHGSGHDRQRHKRYPARLKNVDRSTAQTREVTVNSVTVFITEYKAKPVSSRRESSEQSFSESNDSRIFGPQIRAALLPEFRFQMHGKREQEMVLELELEPELEPLSLVDGYAFGSCLNFSHRAGAHRTLRK

SEQ ID NO: 5167 - DNA, 6189 bp, DROSOPHILA
aaggccctggctggctgcgatctgcttaccatcagcccagcgctgcttaaggagctggagaacgagaccgagtcggtggtcacctacctgtccgtaagcaacgccaagctgcaggacatcgagaagatcaccgtcgatgagagccggttccgctggctgctcaacgaggacgccatggccaccgacaaactttccgagggcatcaggaagttcgccgtggatactgttaagctggagaatttgattaagacctatcttaagtagatgttcctctgggtccgctagcaggtggaggatgaatacattcgtttttgaaaaagacaatgattttatactttaataaacactacaattaaaagagatgacaagattcagttgggagttatggaaattattaaatgggtgaataggtttggcatgcaaatagcatgattactcgttgcagatatggatacgaataataaatactaaaagtttacaaaataaataaaatttgcaaattatatcacagataaagatactttttttttgataccttatcataacaacttcaaacatgttttctacacgcccgtgtagaatatctatgtaagcctgtagagacggctgcttatgtaaagtatcggacgggtgtttctggatttcgctattctacatagctcgggatactttattttattattaatattcgctaaaatagcacatcgtcatttggcatagatgtttttggcccagtaacatatctatctacatcaccgcccgcactatccgataggcagactgactatcgataaaagtatctacttcgttgcatccctaggttgatacataaaataaaaaatatataaaaagtgagttagtactggtattaaaagtaatttttaagctacaaattgatgaattgcgagcacacagagactaagaacattgggaatccggaaaacagtggctggcgcgtcgggtgcgatagaattgcctgtttttcagaccccaaaagtcgctcccaaccgagtcgtgcacctatagtcttggcccgaagttgctcccatgaataaaaatgttcggtaatttcacggtaaacaataaccattgtcgaacgcagggaatagtcgcgttcgcacacgtaattgccatcgcgcagagatgtgattcgcccctgcagcccctcgatctcgaccgacctcccgattttcggacgtcctgcgtcctgcgacctgcgacctgcgtcccatgtccttaaacctgaaatcagtgaaaaatcgttcgcgcatgaatatccaaaatacaatcccatccatcgaattcaatccattcgaatccaaaccaatccaagcagatgcgttgcgatgcgattccattccattcgattcgattcgatccgattcgcgatggtataggtataatatagtttttctaaccaagtgtcaaagaaatggcaaatatttcggattcggaggcacggagcactacgtattgatatatgtacatacatttatttatgtacatccatccattcacacatgcgaaccgagaacttgtgtatatatctaaatacatacgcacgtatatacgagtagatacacaacggtgtgtactcatatctgtgagatatatatgtgcccgtgtccgtgtccgtgcccgcttagatcccgattccgatgccgatgaatttatgtacatatatttacattaaaatctgcatatctgccatatctggcatatctgccaccaccccctccgcctatataggtatatgtgtagggtatagtacgttcatcttcctgcgactcccgtcggtcggcaataattgctagattaaatactcttaatattcgcgtgcctacactcatccgtaaacccacatacgagctaatcgaatccgaatccgcgtatcggacccatccattccattcgagcctcaactgcagatggaattatgttgggttggtatctctatatacatgcgtacctgctgcccagtatgcgcgagagtgccaccctctccgcccccttcttcacctgttacactacgccgatgttgtggatgtcgatgtgaatgagaatgtgaatatggctgtgaatatggatgtgaatatgaatgtgatgaattccaatcgtccgacgcgaatgtccaacgcgaatgaacgcgcgttgcgtggagtaatttttgattttgattttcattccgattccgatgctatgcgagcgcttttgggacccgaaacccagtgactcacgggactttcgtgggcggcaatgtcagcggcgtcgccttggcttagtaggcacccattttggtcgctacactcgcgcgtacgcggatgatatgggggcactgaagtggattcgggattctatgcaatcgaaatgggtttctgctggagaatctcagttagtgggaatagaaagctcgaggatcgttagttctgaaagttctgttactcatttttccatctactataccattgtacgaatgcagcctgctgcagagatccactgaagcgctgagccaacgccaacggtggtgccactgagatcggagatcggagatcgcagaccggagaccgacgagcacacaagggattgtggtttgatccgaggaacccaagcactcagctatactggagcagaacggagaaagcacaaggggtgccgagtcgcccgacgcgaaccaggaaaaccgagcgacgtgttggtggaccccgtgggctgcgatgggttgctttgggtcgcccacctccaagcagtcggacgtgaactcggaggactcgaagagccagaagcgccggagcgatgcaatatctagacagttgcagaaggacaaacagctctacagggccacacacaggctgctcctcctgggggcgggcgagtccggcaaatcaaccatagtcaagcaaatgcgaatattgcatgtcgacggattttctgactcggaaaagaaacagaaaattgatgatattaaaaagaatattcgagacgctatcttggtgagttccatcccgccggccatctaagcccaaacacttgcttaactccttgccaatcccttacagactattacaggagccatgagcacacttaatccacctgtagctttagaaaagaaggaaaatgaacccagagtggagtacattcaggattatgcatctagtaagagcctctgccgccccaacttaagttgttatcaaccattatctgccccgcaggtccggactttaattatcctcctgaattttatgaacatacagaagaactatggaaagacaagggcgttcttcaaacctatgagaggtcgaatgagtatcaattaatcgattgtgcgaaatagtaagtaatgcccacccacatttaacatcctgccatcgatgtgttgagccaaacgaatagttcttgtagcactacaaacagatttaattgtttaatttaattcatctcggagtgcatgccaattgttctgaaagcttaactatgtgtttcacttggaagtgcagaaattcaatgcgttggatcgaaagtatgcaacttttaattctaacaagtaatccgcttgatgaagtaaactttaaatatcgtcgctttgctgcagtatgactatctgaaagtagaaccacaacctaaacctactttcgcattccatatctgtctgtctgtacaataattactacaatatatgggttttagaatgagtccaattcttaaaaggagctagtagtcgaagtagtaccaactacgccatgcacatagaagtatcgtaacgatcatacttttccaagttgagaaggctttttgtttaattccccgaagaaacaagttgctaaacaccaagtcccaattttccgtagtttatgccagctaatccgcatttgtacttgtatctaagcttgattaaggcactgaaaccgaatttgtacttacttctacacttgatattctgctttgaagcttcctggaccgagtgagcacaatcaagaatccaaactacacccctaatgagcaggatattcttcggtgccgtgttttgacttctggaatatttgaaacaagatttcaagtggacaaagtaaactttcagtaagtgtaatcccaagtgatatcgcaatattttagtttctattccattctaatgatgtgcattcgcgtgcagcatgttcgatgtcggtggccagcgggacgagcgtaggaaatggattcagtgtttcaatgatgtaactgctatcatattcgtaactgcgtgctcaagttataacatggttttgcgggaagatcccacccagaaccgacttcgagaatctttggatttgttcaagagtatttggaacaacaggtgaaccgagcaatttggcgccatctcgacaaatggaaactaacgagttgttctttcagatggcttcgcacgatttctattatactatttttaaataagcaagatttgttagcagagaaaattaaggctggaaaaagtaaattgtcggaatatttctccgagtttaacaaataccaaacgccaagtaagtaaaatagtataacccatagtagaggccaattgagggcgagggagtcatcagatcaaccgactcagatctggccaagaaattcgcaattccttttcaaatttgcaaaccgtgcccaagttaacttaagaaatttaatggataatgtattttgtctaatttcaaatgtgctgtcgacacaggtgacgcaataatggaatccaatgatgacccagaagtaatacgagcaaaatatttcatacgagacgagtttctggtgggttatatcacatctccgtttcttcctccacctatctaactagccttaatccttaatgggatctctttcttatatagcgtatatctaccgctagcggagacggaaaacactactgctatccacatttcacatgcgccgttgacacagaaaacattaaacgtgtgtttaatgattgcagagacattattcaaaggatgcaccttcgtcaatatgaattgttataggttatccccatcgccgtaatgcaagtaaataaaaatattaatgacttactgttttaaatataattatcaaatgtaatttgtatttaaatagtcccttgattaaaacaaaaaattcgctgcatttagatctggtatgacctttcacaaaactcaacattaaagaataataaataaacatgttaataacagacacgcttgtttcgattattttggctattctaccaggatgcacctgctttattttctatagtcccttgacatgaagcattttagagtatttccgctatcagagtccgtatccatatccatgggcatttacattcacgcgctgtcgaaggtatcactagacgagctggttgaggatgctgaagctggcggaggccttgtcgatctcgtcgaagttccgcttgagcttactgctccaggtgtccttgtacagggggtccatcctcaccaggtagggcaccaggtcccggtgatggccagacccgatcttgccggccgcgcactgcttcaccgagtacttcgtcttgaactccgactggctgcactcgtagcagacgaccgtttgtccattggcagccgaaatcaatctggggatcagggcatatgtttcagtgattgggaaggggattagtgagttcagtgagtaatggcaaataggcgggcaagcaggcactttggctgccggtatagccacgtattattcggatctgttatctgcatatttacatacattatatatagagcctatttcgataacatccggataagacctgatagcagcagccgagtctcagatatctgatagtactacatataaacctgtcgcacgatgggcatattcacgtgccaccatatcactcacctcactataaacggtccatcgtacttcttcgagccagctttttggggcagcatgtgttagcggtggtaagggattagtgtaagtctagatttttggaatttacatgaatgactctcctctggagggcgaaagtaaaactctttacaaatgcaataatttattaacaattaggagctacatcattttatatgcacatataaaataaagaccaggctgcttatttacatttcagtttcatttcggtcctcgatattgtcaaagtcaatggagtggtgcggaagcggaagcggaagttgggaatgtggcggtttctagtcgcttagg

SEQ ID NO: 5168 - DNA, 1649 bp, DROSOPHILA
ctcccaaccgagtcgtgcacctatagtcttggcccgaagttgctcccatgaataaaaatgttcgcctgctgcagagatccactgaagcgctgagccaacgccaacggtggtgccactgagatcggagatcggagatcgcagaccggagaccgacgagcacacaagggattgtggtttgatccgaggaacccaagcactcagctatactggagcagaacggagaaagcacaaggggtgccgagtcgcccgacgcgaaccaggaaaaccgagcgacgtgttggtggaccccgtgggctgcgatgggttgctttgggtcgcccacctccaagcagtcggacgtgaactcggaggactcgaagagccagaagcgccggagcgatgcaatatctagacagttgcagaaggacaaacagctctacagggccacacacaggctgctcctcctgggggcgggcgagtccggcaaatcaaccatagtcaagcaaatgcgaatattgcatgtcgacggattttctgactcggaaaagaaacagaaaattgatgatattaaaaagaatattcgagacgctatcttgactattacaggagccatgagcacacttaatccacctgtagctttagaaaagaaggaaaatgaacccagagtggagtacattcaggattatgcatctagtccggactttaattatcctcctgaattttatgaacatacagaagaactatggaaagacaagggcgttcttcaaacctatgagaggtcgaatgagtatcaattaatcgattgtgcgaaatacttcctggaccgagtgagcacaatcaagaatccaaactacacccctaatgagcaggatattcttcggtgccgtgttttgacttctggaatatttgaaacaagatttcaagtggacaaagtaaactttcacatgttcgatgtcggtggccagcgggacgagcgtaggaaatggattcagtgtttcaatgatgtaactgctatcatattcgtaactgcgtgctcaagttataacatggttttgcgggaagatcccacccagaaccgacttcgagaatctttggatttgttcaagagtatttggaacaacagatggcttcgcacgatttctattatactatttttaaataagcaagatttgttagcagagaaaattaaggctggaaaaagtaaattgtcggaatatttctccgagtttaacaaataccaaacgccaatcgacacaggtgacgcaataatggaatccaatgatgacccagaagtaatacgagcaaaatatttcatacgagacgagtttctgcgtatatctaccgctagcggagacggaaaacactactgctatccacatttcacatgcgccgttgacacagaaaacattaaacgtgtgtttaatgattgcagagacattattcaaaggatgcaccttcgtcaatatgaattgttataggttatccccatcgccgtaatgcaagtaaataaaaatattaatgacttactgttttaaatataattatcaaatgtaatttgtatttaaatagtcccttgattaaaacaaaaaattcgctgcatttagatctggtatgacctttcacaaaactcaacattaaagaataataaataaacatgttaataacagaca

SEQ ID NO: 5169 - protein, 385 aa, DROSOPHILA
MGCFGSPTSKQSDVNSEDSKSQKRRSDAISRQLQKDKQLYRATHRLLLLGAGESGKSTIVKQMRILHVDGFSDSEKKQKIDDIKKNIRDAILTITGAMSTLNPPVALEKKENEPRVEYIQDYASSPDFNYPPEFYEHTEELWKDKGVLQTYERSNEYQLIDCAKYFLDRVSTIKNPNYTPNEQDILRCRVLTSGIFETRFQVDKVNFHMFDVGGQRDERRKWIQCFNDVTAIIFVTACSSYNMVLREDPTQNRLRESLDLFKSIWNNRWLRTISIILFLNKQDLLAEKIKAGKSKLSEYFSEFNKYQTPIDTGDAIMESNDDPEVIRAKYFIRDEFLRISTASGDGKHYCYPHFTCAVDTENIKRVFNDCRDIIQRMHLRQYELL

SEQ ID NO: 5170 - DNA, 5148 bp, DROSOPHILA
atggcaaacggccgcgggcggcaaataaaacacggctcactgattgatgactttgacttttggccataatttatcatagataccagccagccaggcagccagccagcgggccattgtttggctcttgtcaatgacagcgagaaaaacagcagattcagcaactgcacttgaagaaaaataaaattgtatgaaaagttaacctccctcctaaggcacctctattcaatacgtggtcctccaagtcgaacaatagatttttcgttcgtttagtttgtttcattgttagtatttctctgagtgcacactacaaaacattgccggcggcaacagatgacgctcattccgttgaaaaatgtggagaaaatgtcataagagaacggagctgagcagtagaggccgaaaaactaattgcagcaaataataaaaactaataggctgtcgaaaaaggcaactaacccaagccactgcccccgaggccatgaaaaatgacagggaagaagaaaactgcaaggatcatcatcatgaatcatcatcagagtcgtcacacgcaaacagcaaacagaaagcagcgagacagtcggatggagccacgactgcgaagatgcgagaaagttaatgtcctgtcaggaagtcgctgcctcgttgcgcccttaaacgtcacaaattgccggtcggaacggtggtggattggtgggggggggtcgacaatgggggagtgactcggggttacatgcacattatcaaccagcccccaaagttgctcccctacagcattgtgaatatatttcacagcttcaggtggaaaaaagggagacaggtgtcctgagacaggcgcgttcatttgagacgctcacatgtcaaaagttttctgcggaaaagttctctgtgcgacagggaaacttaaagtaaaatgagaagcaagccatgaaaataattgatattcgacttttttacattagttttcgcataaaattatattgcatgacgagatagataaatgttttttttttgtcccatgcataaatgctaattaatttgtaatggcattcgttttacgtgctaagcttgataagtgctgttccaaaaaaatgtaattaaaacaaacatttaaagtatatggatggtatttacttttcgaaattgattctccattaaagcagcgagtaatttaaattgtagtttagatacatttcggagccagttagttactgcaccgaaaccggtacctttgaggtaaacgcgttcgctaccttttctttgtcactgttgacatttcatggttccgatcaccgcaagtgggcgatccactcaattggcgatactttgtcatgtgcggccaattagcaatggcaactgccacgctggcggacaaacaaaacccgctgactagcatagaaatccggaaaaatgcaggcatcacagctcggaaaaccctcacactcagacctctgccaagcagcgaacaattcagtgcatttttgcagcaatctgtgctcatttttatgagtttcgctggcgactacgctcactcctccaaaccaacgacattctgacggactgctgttcaaatgggaaatagagacatgttggcttttctgcttccgattcgcagccgtatgcgtttcctgtctgtgaggcatgcacttggaaaaatcaagatgcatacgttttaaaaaaaatatttcataccaacatctgacgatcttttgccggcagacgggaccatttgagtggaatgtgcctatatgactatgcctatgcaacagagcagacttattaatgtataaattctttttgagtgcagcttcactcattgttgcacaaacaaatacagtgccacacacattcagacagatggctcacatggagaacaagagcaggccacatatgctaatacacggaggcagtcgaccatggcatgtagcatacccactcacccacctcctcctcttccgactgaccactcaaatccaaccggtcacgtcaactaatccctgggaagttgttcgagcatcgcagtgaaagttagccaaaaaccaactgcacaattattaggcattaaaggatgctttatgaagcaaaggagttgcaccgagcatggctttaatgttttccgctttaccaactcaggcttatcgactccttgtttagggatcctggattgatggcctccatcttgcgcattcccttgctgtccactacatacacctcaaagttccgctggttgatgatcagtcgcctttggatctccaggacgcacttcttcatcagcgagtaggcatcctcttggctgagcttcgagttccaatatctctgcagaatgctgccacagaacatgctgccccaaccatgacctgcatgattgattgactgagcagcgccataggagtcgatgtagtggaggtcaggtccctcaaccgcatcgtatcctgccaggagcattgccacctggtatctggtgttggtccttatataatccgccagtgttttcctggtaaaatgggcagctgacttcgcacttagatggtatccgtgggaaatcttgtacagatgcaaatttttggatatgaagtcggtgaactgaatggtatcgccaccatcacccaccgtggccatcatattgaagtctgatagtcggtggatttttgattggtctaaaaatttattggcattatataagttcccaatatcagataaacaaaaagggcgtgattaccatctttcatgaagaccagcgatttggcctgcattgtatctgatgctagcatcacaaagtctggtcccttgatccccaaaatagtttccatcgccatggtaaccaaaaattttattaaagtgatacactattgtgaatattatgtgtttacttttgaaatattcgtgttcgtgttcagtggtagtactacttgatgtagaatgtgagtgaaatgactgggctactaagaacccaggccatctcgatcggccatcagggtgaagaaggagtaggctcccttccaacaggccacgtaggtgctcaggtggatgggcaccaggttgccggcgaggagaagctgcatccgcttagtgcgctccgccaggatgagcatgtgcccacgatagctggcactttgatccacccagttgctgcagaataccgcatagtgaagctcagcaaaactctcctgcaccatggttccatagtagcacaatggatatgtctgcacggtgatgcccaagagaaagcaaagataatagatgcgatcgtacaaggtctccacgtaaaatatcaggacaaatagggtgatggcgatgttgatgccaataaccataaactgcaccatcatgggatacgaaacgagactcttggtcacatcgagtaatctaaaggaagattgagtattagaactggaaacatagagatagtaggattacctatacagcgcgttttgatccctgatgcagttgaccagatcctgttcgttctcctccagagtcttgtaaccatatccgatttcagagattctcaggatcagcaattgacattgctcggagatcaggtacagtacgagcgggggaaacgagtcagctgcaaagcattgcataatttgaaagacatagccaatctcctggaaaaccagagctccgatgtaggccaccatcgagttcttccagtcgaagggaaaccacatgggcatgggtaagcttagctcagtttcgaaaacgaagggaactgcagcaatgatgaagactacagcgtaggtgatctggaacagcttggacatccttagcaggtgctcggtcatatttctatgacgctcagactggctctcgccagaaacccgggcatccagctgaccaataagactctggacctcgaccatctttgttagttgggccacgtacatgcagaacttcatgagattggacagcgaagtgaccgtcaggctcaagctgaaattattttccaccggatcttcgaaactgtatactcctctcagtagcatgggtgtcggcaggtacaccaagatgcacaatagcatcgaccaactccagtacctaccctcgctgagatccaaggcaccacaaattcgccaggcattcaactggactcgaaaatagtcgatttttagggtttcgctgagcttcattttgaattcttggtgtctttctttttcactggcatactttcaaaaggacctcgaccatttatatcacctttctgtgtcagttgcgccattagtcaggggttattaaatcgcaaattaaatcattatcgaggggtcgcatataattttcccaaaacttgggaaaatgcacaccctttgagtgccattcagcaaaggagtatctatatatcacttaatacagagctttatattaaattattttcattcaaattttatgaatctttgataagctacaaaaaatataaagggcttcgattattattttgtgtttaatatccttcgcttgggaccagctaagatatcccctctaagggactccaggttgatgctattcatctttgttatgccatttttgcttatcaggaacaaatctatgttgcgcaagttgataacgaatcgtttatacagctcaatcacacactttttgataacatcataggctgcctgcgtatccatgtccggtttgtagaactcctcgagaatgggagtgcagaagttcatggcggctccgtggccaccgtaccgaacgggaaccgagttacccaaataatcgatgtagtgcaactcgggaccgctggtcaaatcgtatccgcccaccaacagcgacacctggaacgtgcaatcgctcttcaaataggcggacaaatgcctccggatgaagtgcaccgctccgcgaacggttaagtcgtatccgttggttatcttgtaaagatccatgttccggaggatgaaatccgagaacttcaggcagtctccaccgtccccagcggtcgacatcatgcagtagtccgagatgcggtgagtctttctgacctctacactcatttataaattattactatcctccttatcaaaggcctacttaccgtcatccagccacatcgccgacttgttcctcatggtatccgaggccagtatgatgaaatcagttcctttaacacccaaaatggtttccattttaggtaatgtttgattcagt

SEQ ID NO: 5171 - DNA, 1297 bp, DROSOPHILA
agacaccaagaattcaaaatgaagctcagcgaaaccctaaaaatcgactattttcgagtccagttgaatgcctggcgaatttgtggtgccttggatctcagcgagggtaggtactggagttggtcgatgctattgtgcatcttggtgtacctgccgacacccatgctactgagaggagtatacagtttcgaagatccggtggaaaataatttcagcttgagcctgacggtcacttcgctgtccaatctcatgaagttctgcatgtacgtggcccaactaacaaagatggtcgaggtccagagtcttattggtcagctggatgcccgggtttctggcgagagccagtctgagcgtcatagaaatatgaccgagcacctgctaaggatgtccaagctgttccagatcacctacgctgtagtcttcatcattgctgcagttcccttcgttttcgaaactgagctaagcttacccatgcccatgtggtttcccttcgactggaagaactcgatggtggcctacatcggagctctggttttccaggagattggctatgtctttcaaattatgcaatgctttgcagctgactcgtttcccccgctcgtactgtacctgatctccgagcaatgtcaattgctgatcctgagaatctctgaaatcggatatggttacaagactctggaggagaacgaacaggatctggtcaactgcatcagggatcaaaacgcgctgtatagattactcgatgtgaccaagagtctcgtttcgtatcccatgatggtgcagtttatggttattggcatcaacatcgccatcaccctatttgtcctgatattttacgtggagaccttgtacgatcgcatctattatctttgctttctcttgggcatcaccgtgcagacatatccattgtgctactatggaaccatggtgcaggagagttttgctgagcttcactatgcggtattctgcagcaactgggtggatcaaagtgccagctatcgtgggcacatgctcatcctggcggagcgcactaagcggatgcagcttctcctcgccggcaacctggtgcccatccacctgagcacctacgtggcctgttggaagggagcctactccttcttcaccctgatggccgatcgagatggcctgggttcttagtagcccagtcatttcactcacattctacatcaagtagtactaccactgaacacgaacacgaatatttcaaaagtaaacacataatattcacaatagtgtatcactttaataaaatttttggttaccatgaaaaaaaaaa

SEQ ID NO: 5172 - protein, 379 aa, DROSOPHILA
MKLSETLKIDYFRVQLNAWRICGALDLSEGRYWSWSMLLCILVYLPTPMLLRGVYSFEDPVENNFSLSLTVTSLSNLMKFCMYVAQLTKMVEVQSLIGQLDARVSGESQSERHRNMTEHLLRMSKLFQITYAVVFIIAAVPFVFETELSLPMPMWFPFDWKNSMVAYIGALVFQEIGYVFQIMQCFAADSFPPLVLYLISEQCQLLILRISEIGYGYKTLEENEQDLVNCIRDQNALYRLLDVTKSLVSYPMMVQFMVIGINIAITLFVLIFYVETLYDRIYYLCFLLGITVQTYPLCYYGTMVQESFAELHYAVFCSNWVDQSASYRGHMLILAERTKRMQLLLAGNLVPIHLSTYVACWKGAYSFFTLMADRDGLGS

SEQ ID NO: 5173 - DNA, 4092 bp, DROSOPHILA
gttgtccaggagtccaccggcacctcctccactcttggccaccatgctggacaccaggggcggcacatacacctcgttatcgttggcatttccattgccattgctcgcattgctgttatccttgtgatcgccttttgagtccgataagtccatctggttgccaccgctggccgtttcgctgttcctgatccccgtcagcacgaagatcatgatcaggacaatggccgatcgcatgttgaccacaatgcactgtcgttggagcctcattttggtcagatagagcggggaatacgccggaaatgttattgtttttccctttaagaaaatgagtggggtgggagagtgtgaccgtatacgcgtggcatgaaaatatcaaccgcgaatgctcaggagaaatttctttaaaaagcgtatcgaatagtttatagatatgttttggctcaattaaattggctaaacagataagtatacctctcccctcatcgtaacaaattagtaatatctaatcctaatatcctttccatttaagttgtgaccattggccgctttagtcgtaggagtgtattaacggtatttggtaatcgcgacatctggccataccgcaccgtctgcgaaaaaaacccaaaagtcgccgattttggctgattattgcaaaaataatattaactatccgtttgctgttcgtgtgctcggttcgggtgtgttaaagttaagcgcaacgcgaggaattggtgcaaatttaccagcggctggacacacaaaacgaaacattcgcacttggcctcccttcgcacgccccctcgccgacgcccctcgcccctcacacccttcagccgttcgtcggacgccgctgttcgtagtgcgttttgttgttgtttccactggaacactctctatttgtattgtttcatttattagtttttttttgttgttgttattgttgtgtgctttaacttatcggtaacggataacggtatcgagagatatatattatatatagtaagatgtcgaagaacaagctgaatctggtgctgccgccggtaaatacggaggcaactgttgccgccgccacagtggcgccgacgccgccattcaaaaccccctcgggcacagagtaaatattatacataatatccttaataactgactggtttttaggccacccattccaataacaccgcatcccccctccctcgctgtttccccttccactcctcgttttcggtttcctactcagtggtaagataatcctgtagttttgcgagttaggtgggtaattaatatccatcaattgatccaaggaaatcccatccagctggaaagaaagagacagtcggagtgaaagagcaggtactctctctttgtttgttggtgtgggtggtgctcctttcgtgtgacgcacaggtacacagcgagaaaaaacttactgagtaaatacagtaaactgttttagtgctttttggattaattaacgggatgacaaagtcagtttcgaagataaatagaaattataatttaatagtcctacctttatcgtatatttttttgtgagcaccaaaatgtaggcaacataacataacacaatacatatgtaatttgatgtgtatgtttgtgtagttttcttattattaggagaaacttcggcccgcccctcatcccatcccccactttcaaatcccatccattgcttgcactttttacattttcgttttggatcgcaaaaattcattaagaggttaaattaaagcacacacagtttgctggggaagcccaagacgagcatcgatgcgctgacagagacgctggagggtctggacatgggcgacacggaacgcaagcggatcaagatgttcctcagccagaaggagaagatcggcgagctgtccgacgaggatctggagaagctgggcgagctcggatcgggcaatggcggcgtggtgatgaaggtccggcacacgcacacacacctgatcatggccaggaaactgatccatctggaggtgaagccggcgatcaagaaacagatcctgcgcgaactgaaagtcctgcacgaatgtaatttcccgcacattgtcggtttctacggcgccttctacagcgacggcgagatcagtatctgcatggagtatatggacggtggatcacttgacctgatcctcaagcgggccggtcgaataccagagtccattctcggcaggatcacgctggcggtgctcaagggcttgagctatctgcgcgacaatcacgccatcatccaccgtgacgtgaagccgagcaatatcctcgtcaatagcagcggcgagatcaagatctgtgatttcggcgtctccggtcaactgatcgactcgatggccaactcctttgtgggcacccgtagctatatgtcggtaagtaactggatagctaatcaaaatctatacttaggtgtattaaacaacggaaggtcgatgaaatcggcgaaagtatttaaaaaagaacattgcaatagcaaaacaaggcactcatctatgcacagatgttaaatatagccaactataagagatctatataactcacatgctaatgtcctctttgtttcagccggagcgattgcagggcacccactactccgtgcagtcggacatctggtcgttgggtctgtcgctggtggagatggccatcggcatgtaccccatcccgccgccaaacaccgccaccctggagtcgatattcgccgacaatgcggaggagagcggccagccgacggacgagcccagggcaatggccatcttcgagctgctggattatattgtaaacgaaccgccgcccaagctagagcacaagatcttctccaccgagttcaaggacttcgtggacatctgcctgaagaaacagcccgacgagcgggcagatctcaagaccctgctggtaagcaaacgaaacgtcgccatttcttcagttatatatatattcaagttgttttatgtattcttcggcagagtcatccgtggatacgcaaggcggaattggaggaggtggatatatccggctgggtgtgcaagacaatggacctgccgccatcgacgccaaagcgtaatacgtcgcccaactagacgcctctgcgttccggcccccattttctctatcctcccatatccacacttgctctttgttcaatagagcgttgacgctgggcaaaaacaactgaactattattattattattattaaatcgaaaataaagaaatcgaagtcataccatgtatgatggggtgttcttattatttgcattggaggattatctttaattttaaaataatgcataaaattataatgtgttattgctaatcttgcaaaaggttgaatacataagcgaattaattgtatctcaattaaattttgtcatttttattcagacttcactccattgtatgaaatacattaattcaaaaaaaaaaaaaaaaagtatttgccgatctaaatgggaatcccctcaaaaaaatatatatttcaaacaaaatatactgaaggtatttttggatgtgcgtgtattttggtcacactgtgagaaaataaataaatcaattcagtgtggccagagtgtgtcacaacagctgtggaatttgtatataaacacataaactaaacgcatacacgggcgctcgtgcagcttgatacagttacagttacagatccagcacgcaattcgcggccaattgaaacgattcaaagatcgcgagtggaatagatcggaggcgacaccaacacaccaacacaacagcacacagacgtacgcgcactgtggcaagaggcagcgttctttgttgcaaattaccgttgcatccacctttcagcgccaccccctccatcggcctcaccgattcgcgatccacgatccgccttctgccaaccgccgccagccagttgcttccagccagtgatccgatgcagacgtttcgctgaaaaggagcgcacagccagaacagaagaagaaccatgtcggcggtgaaccagaaggagagtcccagccgggactcgacggcctccacatccgggcacatatcgatgctggctgacaacacattggaatcgctgtcgcgggactacagcctg

SEQ ID NO: 5174 - DNA, 1195 bp, DROSOPHILA
taagatgtcgaagaacaagctgaatctggtgctgccgccggtaaatacggaggcaactgttgccgccgccacagtggcgccgacgccgccattcaaaaccccctcgggcacagacacacacagtttgctggggaagcccaagacgagcatcgatgcgctgacagagacgctggagggtctggacatgggcgacacggaacgcaagcggatcaagatgttcctcagccagaaggagaagatcggcgagctgtccgacgaggatctggagaagctgggcgagctcggatcgggcaatggcggcgtggtgatgaaggtccggcacacgcacacacacctgatcatggccaggaaactgatccatctggaggtgaagccggcgatcaagaaacagatcctgcgcgaactgaaagtcctgcacgaatgtaatttcccgcacattgtcggtttctacggcgccttctacagcgacggcgagatcagtatctgcatggagtatatggacggtggatcacttgacctgatcctcaagcgggccggtcgaataccagagtccattctcggcaggatcacgctggcggtgctcaagggcttgagctatctgcgcgacaatcacgccatcatccaccgtgacgtgaagccgagcaatatcctcgtcaatagcagcggcgagatcaagatctgtgatttcggcgtctccggtcaactgatcgactcgatggccaactcctttgtgggcacccgtagctatatgtcgccggagcgattgcagggcacccactactccgtgcagtcggacatctggtcgttgggtctgtcgctggtggagatggccatcggcatgtaccccatcccgccgccaaacaccgccaccctggagtcgatattcgccgacaatgcggaggagagcggccagccgacggacgagcccagggcaatggccatcttcgagctgctggattatattgtaaacgaaccgccgcccaagctagagcacaagatcttctccaccgagttcaaggacttcgtggacatctgcctgaagaaacagcccgacgagcgggcagatctcaagaccctgctgagtcatccgtggatacgcaaggcggaattggaggaggtggatatatccggctgggtgtgcaagacaatggacctgccgccatcgacgccaaagcgtaatacgtcgcccaactag

SEQ ID NO: 5175 - protein, 396 aa, DROSOPHILA
MSKNKLNLVLPPVNTEATVAAATVAPTPPFKTPSGTDTHSLLGKPKTSIDALTETLEGLDMGDTERKRIKMFLSQKEKIGELSDEDLEKLGELGSGNGGVVMKVRHTHTHLIMARKLIHLEVKPAIKKQILRELKVLHECNFPHIVGFYGAFYSDGEISICMEYMDGGSLDLILKRAGRIPESILGRITLAVLKGLSYLRDNHAIIHRDVKPSNILVNSSGEIKICDFGVSGQLIDSMANSFVGTRSYMSPERLQGTHYSVQSDIWSLGLSLVEMAIGMYPIPPPNTATLESIFADNAEESGQPTDEPRAMAIFELLDYIVNEPPPKLEHKIFSTEFKDFVDICLKKQPDERADLKTLLSHPWIRKAELEEVDISGWVCKTMDLPPSTPKRNTSPN

SEQ ID NO: 5176 - DNA, 3731 bp, DROSOPHILA
tacccagtcgaaattcgcaagctcctcgagtccatgtgtcgtgttaaccaattctcagcaaccatggccaaatgtggctccactttgggtgccagaggcgggcgaaacaaagcgaaggcacaagagaaagtaagaaaatttcatttgcatcaatcaccaagaactgattatggaataagtagtttgtactctttatttgccacaaacacgggcaaactcccaagaaatcccaattccataacccataacccttaatccaaaaaggggcaacccacgaaggtcgagaatgcatatcgttatattgttatattatatcgtgacatatcaagagctcccagtagtaagacactcggatggctcgacacagctaatatagtgacattttatagaatttacttacatttttgaggcatctgacaagtttgatatatttatgcagaagtgaattaagcaaatgcagcgtgtatgcagagtggaatttttgaaattttttatacatatacttttatacacacatacatacgtaccttttcgattatgtctacgcaaactaagttgtaatccgattagctatactgacactgacactccaagtccgcccgatcccctacccgcctccacaccaaccacgcggtggcttaggtcagtagccacccactggtgggcggtggtgcagcgggagcgggctcgggtccggaaatattttcaagagaatgcgccgcaccaccgattcgggtcagtttcctttggctagagctgttcttttcaaaatattgcaaaacactgaaccccatcgaaagctgggcttacataatgctctccatgtgagcaatctgaaaatctatctaataaagaatccatgttggttacaaatgcaagcgagagttttctttacgtcgtgatactactgaaatgcgtggtcttaattacataaaaagatatttgcaaattttaattttaagttgagcataacaagtattgttcttagagtacggtaaagttactttgccttgaagaacctggtctccggaacatcgaatccattaaagggactggcgatgggcatggtgtaggctcccatattgcgaaagcctaatagatcgcccggattcaagttgggcaatagcaagtccgatatctgaaggcgaggtggtgaaagttattatgttgaaagtctttagaaactcacttaccttatccatagcatcgcagctgggtccccaaatcacagacttgagttttggcaagctctcggcttcgtcctggaatcggaggacaatttattattacttgaactatttaatcaataatttaatactataaatactgtttaagcacttttaaaaaagttgttaaatgataaaaacaattggagcacacttctcttcttaccaagtagagctcgggagccacctcttcagggtagtaaaacattcctgcgaacgctccgaagattccatcattcaggtagtacatcatggtgtccagcttgccatccttgctgcggacttcccgcttggcatgtaccttgcagatcaatgtgtatgcggcctccacaaagaagcgtcctggctcggaaatgattcggatacgcttatcgggaaaacgcagctccactgatgtgtttaccgactgcgctatctataaggaatgtgtttcatcaacaatagctcgaaatctagtcaattgctgtacccacttcctcgaacatctcatcatcaatgccaggaaagccaccgccaacatccaatagttccatcttgtgacctatcatctcgccgaccttaaagatgttttccgccttctcgatggcccgatcgtaggcctccacctcgctgcatccggagcccacgtggaaactggtaccggttaccttcaaacctaaggccttggccagaagcattagggctgcggcgtccgcctccgcatcgcatccgtatttgtcgcccaaggggcacagcgcctttttagcctcacttttgaacctcacgatgaggctggaataacgaaacatatcactaccagaagctcagatacgtatagacttacttggagtcgggatagtgttttctcagcttgtaaatctcgtactcgttatccaccgtaccgttgaccacctgctgctccttggcgtacctcaagtggctagcaggacgacagggatgtgcgaagataatgcgctcaggcgaaacgccaagtcccaggacctgaaggagtacatggaagttatgggaatgggtagagaataaatgaataaatctaagcgtattcttttcattcaataccgatcttcatttattttagtgaattcaactgataattgtcgttttgaatcttatgacatttagatttgatttgtttccatattgttattattcgccatttaatccatcgattcaaggtcgatctcaaatttggaagcttggaatacccaatactcggaaagcgcatccgtacttaccaacttaagttcgtttttggaggcgcagtcgaatccagttccgagatccgccagaaacttgaccaccaccggatcgtcgttgcacttgacggcatagtggggctcaatcctgggcataagcttgtgccagagacggagcttccgctccaggctggacaagtcacagatgttgagggcctggtccagatgttctaggtctgcctgctcgataaccttgcgaatgttgagctcttcatcgtagtattgtattcttaggtctccgttcaccatctcgattagactgatactgatacaaatgtggtctgcctgcccacagagagtcccagctttgggattatctattaggaagtgacaaaaacattatttatacataaacgatgtcgactttggacatgagatggattgcttttcggtttttttttttcaaggtctacgcatccgtaaattatgctacgagtcaagtcaacaaatttattaaactagaactggtggcaattaaagttccagttcatttgcatgattgatttctaggcaaattataagaaactgatacttaagatatatttgatggatgacaattttgggcttttatcgcttactgccttttaaatagatgatttgtgtgacttagaactattagcgaaaagtatgacagatctactgactttcatagtaacattaccgtaagttgtgagatccaaaattgtttacgcatgaattcccagctacgaaatacacatctcaaatgctccttttacatacatgaagatatttatgggcctaacaatccaccagccaggtatttttataaacccaagtctactacatataaaagttgtaagcaagtaaacaatagagagtccacaaaatgttggttttattggattgagtaagtgatttagtcatatagcttggaagtacagggtcttggggacttcgaatccattgaatgcactggcaatgggcatggtgtaggcgcccatgtttcggaatcccaaaagatcgcctcggtttaggttgggcaagtgcaggtcctccgaaatctgaagaagaaataaaacattacttggtattgctaagtttcaagcaacatttgacttaccttatctagggcgtcacaacttggcccccaaatcaaggactttaggtgtggcaaagattctgcattgtcctgtgggaaaatgaagtgaattgggtcttaaaaacatgtagaggtctgagctattcaaggggaacccctcttctttttaacaatgttcaatgacaacta

SEQ ID NO: 5177 - DNA, 1020 bp, DROSOPHILA
atggtgaacggagacctaagaatacaatactacgatgaagagctcaacattcgcaaggttatcgagcaggcagacctagaacatctggaccaggccctcaacatctgtgacttgtccagcctggagcggaagctccgtctctggcacaagcttatgcccaggattgagccccactatgccgtcaagtgcaacgacgatccggtggtggtcaagtttctggcggatctcggaactggattcgactgcgcctccaaaaacgaacttaagttggtcctgggacttggcgtttcgcctgagcgcattatcttcgcacatccctgtcgtcctgctagccacttgaggtacgccaaggagcagcaggtggtcaacggtacggtggataacgagtacgagatttacaagctgagaaaacactatcccgactccaacgaggtggaggcctacgatcgggccatcgagaaggcggaaaacatctttaaggtcggcgagatgataggtcacaagatggaactattggatgttggcggtggctttcctggcattgatgatgagatgttcgaggaaatagcgcagtcggtaaacacatcagtggagctgcgttttcccgataagcgtatccgaatcatttccgagccaggacgcttctttgtggaggccgcatacacattgatctgcaaggtacatgccaagcgggaagtccgcagcaaggatggcaagctggacaccatgatgtactacctgaatgatggaatcttcggagcgttcgcaggaatgttttactaccctgaagaggtggctcccgagctctacttggacgaagccgagagcttgccaaaactcaagtctgtgatttggggacccagctgcgatgctatggataagatatcggacttgctattgcccaacttgaatccgggcgatctattaggctttcgcaatatgggagcctacaccatgcccatcgccagtccctttaatggattcgatgttccggagaccaggttcttcaaggcaaagtaa

SEQ ID NO: 5178 - protein, 339 aa, DROSOPHILA
MVNGDLRIQYYDEELNIRKVIEQADLEHLDQALNICDLSSLERKLRLWHKLMPRIEPHYAVKCNDDPVVVKFLADLGTGFDCASKNELKLVLGLGVSPERIIFAHPCRPASHLRYAKEQQVVNGTVDNEYEIYKLRKHYPDSNEVEAYDRAIEKAENIFKVGEMIGHKMELLDVGGGFPGIDDEMFEEIAQSVNTSVELRFPDKRIRIISEPGRFFVEAAYTLICKVHAKREVRSKDGKLDTMMYYLNDGIFGAFAGMFYYPEEVAPELYLDEAESLPKLKSVIWGPSCDAMDKISDLLLPNLNPGDLLGFRNMGAYTMPIASPFNGFDVPETRFFKAK

SEQ ID NO: 5179 - DNA, 4494 bp, DROSOPHILA
aatgaacctacaaagttgttaaaaacatttgcatgaagtcaaaaggtaaacagttaagaggtaattttatattttgtactacaagtgctaattaatggttctgcataacatatttttaaaatgcaatatatttattggcgtactttcttttcacagcttggtcataatcagcgctataggctccacaaaaaataaaataataaataaacgcccatcctttttatattttgttttatgaaaagcccgaagcaacctttcacaatgctgcaaaaatgtgccaaaaaaaaaagagtaacagttattacaaaaagtgaacccaaaacctcagaaggcaaaactccggtccaagcaaagtgcgccaatttcagtcggatgatgacgttaatggagcaaatgccaacagccggtctcagtttcagattcagatttcagtttcagtttcgaactcggagtcagtttcagtttcagtttgaagcgcggctcaatggaaatggaaagagagtacgcagctaccgcgcaaagttacgtgatttactttacagttgaaaaaagggtctagtttaaatattcaaagatttaaatacaacaaaatttgtttacgattaaataaattatagtatataatacacacagtacatcaatattcatttcaattagaaaatattaattcctatgcgaaaaaattaaatatgtaatatctttataatcttaatgattttagaatagaatatccatagaatatattttttaaatttttcaaacatttttggtattaaaaaccataaataaaataaccttaagccttttaggtggctgtttgtaattgtgtgtagtagtaagtagtagtagtaagtattattttctttcagtgcagagcccagcttaccgcagagagcgagagtgtgttggaattttagcgcgtgttgcacgaccgcagacactctcgattttcggctcagttgccttgcagacgcgcagcggacaagttgttactggagatacggtgggcactcgctaagtaattcgaatcgaattgaattgaaccgaaaatacgttagtttaataattatgccattcgtatgtgcgttacgttttgtttttgccgagagaccaaaaaaaaagaaaaattgcagtatgtactgccgaaaatagcaagacacatttctatgaccactaactttcatttttatgcgatccgaaatttctgcgcgatgtttgcccagtttattagcggcaatttggggaggttagcgtgtaaatgaatttacagcagtaaaaaatgccgaaagaagtcagaaatcaatcagggccaaaatgagacaaggccaaactgtaaaggaaaaacaaatataaataaataaataaaaaacccaaccaaacgaatacaaggtagccttaaaaataaaaacataaaaaaacccaacaacagtgcgaagctcattgaacaaaagtgagagtgatttccaaaccgcgttgctgtgttgttgccgttgtggatttttgtatttacgcttttatttcgagacagacccaaaaaaaaaaaaaacatagtatagtatagtaaatggtatgtgtgtgtgtgtttgtgtttgcatatcgcatttgaatcgaaatcgcgtaaacaaaagcggccaacgaaaacctggcaactcaaatatttcaaatatttatccaaatgacgcacctggttttttcaagcggtcaacctgaccaacctcaagtcagagatcgggttttctgactgttgcgcaaacgcgccaaaatcgagccagtttgcggcaaaggcataattctgcaacatatagtaatcatatcgctggtggcatgaagtaatcgcctgtgtgtaattgcagtttctgcggctccacataaatgctgactgctgctgctggccatgatgtcttggccaaaacaatggggcttcgctagcctctggctgcccgtgctgatcggcctgctccacagtaagtaaatgcctttaaaatcgttcgaatcgcacagattggagcatttgtaaccggttcaactacttccaccgatccggcgacagtctatcgagatcttcagttgactccacggcagactttggcaccctgggctctcacacatgagctccaacttgttgccggtctttgtgtcaaggtcgtcggatagccgcagatgttgtttaacctgtggatcgtctatgggtctcattgtctgtctcgcaatgtgattcgtgtgattttttttttgggttttatttctgttcggattagagttacctaatgattctttgtgatcaaagtacaaggagtaaaatcattaagtatttttccattgaaatgggcaactagttaggtacgagaaaaaatcattataaaataataagatcaagcactttaagtggataaagtaaataaagtaaatactcttaaacacagctttggtttaaagagaattcttagtcttagattactcttaattattttattagcattatagtatcaacttaaagtattactcagaatttgttagcgaccttcaaagtgaaacggacctcagagccgtaagatattaagcatacgcactgttagtcatccgtgaatccgaaaatccaagaccataaaacggttacataatccgccctgaaattaactgtcccaaaaatttacataagtgctggggcttggccggcagtagagagataaaaatcattggactggccctgtcaattaactattgtatacttttacagcacaaaatgcatcagcttttattgtgccccgggaactgccctccatcttatccatagtttactccaatataccaccgattaaaaagggtaagatgatgtatatacaattggaaccattaatttaatgcgattttatattgaaacaggaactgattcccgtttgggctttggctttcgcctgggcgagcatgcggactttcaggtgatggtggaactgggtccccagaaggagacgcgtcccatcggcgagcccaaccaggatgatcaatcgttcaacaagcgccaggtgagccagagcgatcagaaggctctggcccgtcaactttatcgccagcaggtgatggaggaggcggagagattgatgacgtccacggagaggaatggggccagctggctgcaggcctggtcgaatggcatgaaaccgcagaagcccaaatcaaaggatcaggccaagaaaccagtgaaagaaagttcttcaagcaattatcagaatgcacaggcaacagatcccaccagtgccatgaagcagctgcagttgctctacaaaatggccaccagttcgagcaccacaaccaccacaacagtgcctcctgtctttacaggaggatcccttaatttgggtggtccaagtggctttaagctgccacctcctgctcttagccaggataccaatacgctgagcaatcctgatcctctcaagagcaaatctgagatcaccaaggagcttatggatgtcagtctggagacggacacttaggttgtgcgcttatctagttactaattaacctctatatacaaatacttgtgtatttgggtgcttagcaaatctgtgtgtagtatggcttagctatcttttgtaaataatattataaataaaacttaatttagtgaatcgctttattgaacagcctgaatgtaggcaatagaaattttatgtcaaatcgaggtcatgtaaaactcatgtagaattgtataaatgtaaactaaaatttacattggttaaatatattaaaaactggttataaattaaacatttaaagtttctgacgtcattcgtatttttttatttacaaatataaacaactttattctttctttctgagttacgctttattatgaacttagaaatgtttaaattaattacataaatagtcaagtatattacaaagttacatgctgtatcaacgtagctacattatcggcatatcttcatgtatttccctacttgcataagtattttgttcatctaagctagacagtagttatgggctatattataaattaaacgaaacatatgggacacagcagctgatcgtggatcgaaaataggatgaggtccttccaccaagccaactgtgcgctctgtggacatacagaatactataaatcatttaggctacatacatatcgcctacagttacatatgtaggcgtactaaagtaaatattacttataaatatagtcaatttccatttagcagacgagtgcatcggtgtacagtggtttttgggttttttttttatgggtatgagatgtttgtgtgtgttgtgtttgtgcgaaaaaaaaccatgcagtgtctataaaaataatgtctttcatatcatgtttttctctgtgtactgagtgtccggtgcctttcggtctggagttctctgattaagggattgccaaatgaaagccccgtaatctcaatgtgggagtaacaactactttaacttgtgcggatgatgatacccggtgggttgatatcttcctct

SEQ ID NO: 5180 - DNA, 862 bp, DROSOPHILA
acggtgggcactcgctaagtaattcgaatcgaattgaattgaaccgaaaatactttctgcggctccacataaatgctgactgctgctgctggccatgatgtcttggccaaaacaatggggcttcgctagcctctggctgcccgtgctgatcggcctgctccacacacaaaatgcatcagcttttattgtgccccgggaactgccctccatcttatccatagtttactccaatataccaccgattaaaaagggaactgattcccgtttgggctttggctttcgcctgggcgagcatgcggactttcaggtgatggtggaactgggtccccagaaggagacgcgtcccatcggcgagcccaaccaggatgatcaatcgttcaacaagcgccaggtgagccagagcgatcagaaggctctggcccgtcaactttatcgccagcaggtgatggaggaggcggagagattgatgacgtccacggagaggaatggggccagctggctgcaggcctggtcgaatggcatgaaaccgcagaagcccaaatcaaaggatcaggccaagaaaccagtgaaagaaagttcttcaagcaattatcagaatgcacaggcaacagatcccaccagtgccatgaagcagctgcagttgctctacaaaatggccaccagttcgagcaccacaaccaccacaacagtgcctcctgtctttacaggaggatcccttaatttgggtggtccaagtggctttaagctgccacctcctgctcttagccaggataccaatacgctgagcaatcctgatcctctcaagagcaaatctgagatcaccaaggagcttatggatgtcagtctggagacggacacttag

SEQ ID NO: 5181 - protein, 255 aa, DROSOPHILA
MMSWPKQWGFASLWLPVLIGLLHTQNASAFIVPRELPSILSIVYSNIPPIKKGTDSRLGFGFRLGEHADFQVMVELGPQKETRPIGEPNQDDQSFNKRQVSQSDQKALARQLYRQQVMEEAERLMTSTERNGASWLQAWSNGMKPQKPKSKDQAKKPVKESSSSNYQNAQATDPTSAMKQLQLLYKMATSSSTTTTTTVPPVFTGGSLNLGGPSGFKLPPPALSQDTNTLSNPDPLKSKSEITKELMDVSLETDT

SEQ ID NO: 5182 - DNA, 2993 bp, DROSOPHILA
cggtggccaccgacgaggccagcgagggagttgatctgctgcgcaagagttgcggtggccacggattcctttcctcggcgaatttcgatagcatctatggtctgaccgccgccacatacacctacgagggagagtacacagtactcctgctccagacagctcgtttcctcgtccggcagtatgcggatagcttaaaacgcaaggtgctgccctccagtgtctcctatttgagggatacagcccgtttgatttggggcaagaatctggttgcgaattgtgtgcgagcgctggagatttcagccatggagcaggtgcgtgatgcttggcagacccagaagatgcaccaatccggcaaggtgagtcccgagatggccagcaatctggctggaaggcagctcacctcggctgccatagcccatgctcacgcattcttcacacgcaatgcactggagcaagtggaagcacttcgaaagaagggcgatcttagcccgaatgtctcactcatcttgggccaactggttgagcttttcgtcatcgatacattcctgcgacagtcgggatgcgtgctgcgttggaacaacggcatcactggcacccaactgcgcttcgtggagcgtcgctttgaggagctgctggccaagctgcgacccaatgcggtggctctggtggatggattcgattttcacgatcgtgtcctgggctccacgctggggtgtcacgatggccgggtgtacgagcgtctcatggaggaggcacgccgaaatccgatcaaccaggagccggtcaactcgtccttccacaaccacttgttgcccatgatgcggggaaagctgtgatgtggggctggtcttttgttttctacatacgtatatgttattcactaatttttgtattgaagttgaatcataacatttttttttaataaaggaaataggatttcgcaattgtttgttattttgcacttaccattttcaaactaacttacttgctcgcccttgttaaagttgtctttttccgatttattcgtatcgttttacacattacacatattgaattaagctattaaattagtttactcggataaataaaggctggggtacacacaaaaaaaaaagggatttgatctgaatcgagtctagaacatcttcttcctgaccgccgtataccgctccatgtagacatcgtagccatcgagatcggtgaactgtttcgagttgaacagattgccgtcgacggccaggttgcagattttcgagtccttgaggatcttgggtgtaaaggccgctgcctgaaggcagttctcctcgagccgcagtgtcttcagcttgggacaatcggctacttcctccgccagcgaggatatttggttctggttaaggttcagttcggtcacaaacagtccgcccacatcggcgggcacatcgggtgatcttgttcctggacaggtccaggacatccaagctgcttcagaccgcacagcatggaggggaactccttcagctgattgttgctcagattcacggtcttcaggtgcgtgcaattggccagggttttgggcagccttgtcagcatattgtccatcagcaacagcacctccagcttggccagttcgcccaccacctcgttgagttccaccagtcgatttccgcttagattgaggtgcttgagtagcgtcagcttgcccagttcgtcgggcacacgttcgaagcgattctcggagagatccagggttttcaggacattcgggtaggcccttagctgcagtgggaattcttgcagccgctgcaaggatatcttcaggattcccgtcttctgggccgtctccagttgttgttttatctgtttattgcccattgtagcaggggtctctccagggaattcaaggtttttcgcctaattaagaggtgggcgggtcgactgatgacaaatccagatctcacactcttcctgcgcggtatgtgtgctccgctatcctcgttgtgcttgcgttttacagcaaacaaaacactttaactagccaatttaatttttatttatttatttctctcctgagaaatataccagatgtgcagaaaatgtgcctaaaaatgccattgattcgatgacaaaatggattagaactcagatagatatctagtgatgacgcaaccctaaagatttagccgagacaactatttcaaacactgaaaacaatttcatactctttggcttaggtagttacgataagtaagctttttatgcccaaaacaaaatacaaaaagtttattgtaaaatcgaacataaacatgtcatatttttgccagttgtaaaaagttttttatttcatattatattttagttttatataaaaccttagcaattctcgcctaaaactacacaataaacttaacatagcgcatttaattctcatttgtatccccaaaaaaactgtatgtgtaatgcaagcaatattatgttatgaaagactcaaagcaatatttatttgttattatattttcggttggttccgaagcgttcaaacattactccatattatgcaaaaatagtatctcttcatatttttctgggggtctactatcttttttttagcgatgtttcctatttatacataagaactaggtattaaattagattttataattaggaaaaaaaagattttgtctgcagaaaaaaacacaaggaaaatctcatcattttttttttttttgttttgtttgtttgtcttgttatcattgatggaaaatcaaaaataaaaaaaaaattaaaataaaagaattgtcttttctgccaagcgattcgagttgtgatcattgattaatccatgtgtatgatagcttttggcttgggtcaggggatgggaattgggttcgtttttggaaggggttaaaaggtcagggcttaatcacagaactaccaacggggcgttgggggcgtggccctgtcctggtctcgagtttcaactaagtagtatgatttgtgctaaataaaaataa

SEQ ID NO: 5183 - DNA, 993 bp, DROSOPHILA
taaaacgcaagcacaacgaggatagcggagcacacataccgcgcaggaagagtgtgagatctggatttgtcatcagtcgacccgcccacctcttaattaggcgaaaaaccttgaattccctggagagacccctgctacaatgggcaataaacagataaaacaacaactggagacggcccagaagacgggaatcctgaagatatccttgcagcggctgcaagaattcccactgcagctaagggcctacccgaatgtcctgaaaaccctggatctctccgagaatcgcttcgaacgtgtgcccgacgaactgggcaagctgacgctactcaagcacctcaatctaagcggaaatcgactggtggaactcaacgaggtggtgggcgaactggccaagctggaggtgctgttgctgatggacaatatgctgacaaggctgcccaaaaccctggccaattgcacgcacctgaagaccgtgaatctgagcaacaatcagctgaaggagttcccctccatgctgtgcggtctgaagcagcttggatgtcctggacctgtccaggaacaagatcacccgatgtgcccgccgatgtgggcggactgtttgtgaccgaactgaaccttaaccagaaccaaatatcctcgctggcggaggaagtagccgattgtcccaagctgaagacactgcggctcgaggagaactgccttcaggcagcggcctttacacccaagatcctcaaggactcgaaaatctgcaacctggccgtcgacggcaatctgttcaactcgaaacagttcaccgatctcgatggctacgatgtctacatggagcggtatacggcggtcaggaagaagatgttctagactcgattcagatcaaatcccttttttttttgtgtgtaccccagcctttatttatccgagtaaactaatttaatagcttaattcaatatgtgtaatgtgtaaaacgatacgaataaatcggaaaaagacaacttt

SEQ ID NO: 5184 - protein, 154 aa, DROSOPHILA
MGNKQIKQQLETAQKTGILKISLQRLQEFPLQLRAYPNVLKTLDLSENRFERVPDELGKLTLLKHLNLSGNRLVELNEVVGELAKLEVLLLMDNMLTRLPKTLANCTHLKTVNLSNNQLKEFPSMLCGLKQLGCPGPVQEQDHPMCPPMWADCL

SEQ ID NO: 5185 - DNA, 3086 bp, DROSOPHILA
ccctggcatattagagtttcttatgtgcgcatgcgattactttttacaccttgttataaaagggcattaaaatgataaaagatttcaaccaactgatactgcaagatgtgtgcacatctaatgaacaaagttttgttgtggactttggcatcggaatgaagtatctacaaaaagtccttttaaatcaattttaaacatgtatgattggtggagcttatataggagaatattgatgggcttgcatttcgatataagttgagtttcgtccccattcagatcgccagatcccccagccttgcaactttgcatcgtgcacctgtggtaattacgcaaatacgaaatgtatgacttcccgtaatgtttacacccaaaaagttctagcgaaaagtccggagcactgggaaaggtgctgtggcacgtcggaaacgtgttcaaggcggccacttgttccgcataatgtgacattttcccgggaaagttgcggcaagtgtgcgaaaatgtttcgttatttatgtatgcgcctgttgcagttcgcagttgcaacttcttcggtcatttgtttcttgtttttgtttggcgagtgtttgctgcaaactttggcccgggcctaggcccgatccccagctccatgtaccccataccatgtactatccaccatctaggatacagcattcagcaaatggtgccagtggttggcccgagtggagtgtcactggttgttgttcggtggtcgctcagcagctggcaggcgaataaatcacgtatttaaacaagttgcccaactttgctggcgagtgtaaacagggcacgtgcagaactttggtttatgacaaatgctcgcagcacttcgcaggacgaaacaaagcgataacaggatacccgctatctggcaatctccatttcgattaaaattatattatgacatctgaatttcggggaatttcgatttcctttttcttttaatatgtgtaggcacaaatttaaaggtaatattattacattaagagtaaagcaacatgccctccttgtcgtcttccaattgcttttcccaaaacaacttgtaggaaatatcccctaccagttgtccaagtttctcctctgccgtgggatatccattcttgagtttggccaggatcggcaggaagttggctatagcctctcgtgtctcgcagtgactggtcgagtgaaggaccaaaacgaatcctgtgggaaagacggcaaatctcacgcccaaattctcggtggtgtatgtgataaagggtcgccggctcctgttctgggccacctcgaccacatggcggcggctcatcagatccaaatcgattttgaatggcatgctgaaggaggcattcacgatgttcttgctgaagttcatgatgtccaccttatagtcgagatcctgcaggatcctgatcaccttgaacagaccacttctggctgaatcggcgttcaaggcggtggaggaaatctttccacccgcatggatcttcacctgggcagagggatgggtgatcttcacgaccacggagggatgactacttggatcgaatcgggattcggccaacagcaggcacagttcgtacatactgaaacggcagttgaagtccattacacaggtaaagggtctgaagtgcaattccagtttttcttctatttcggcaagattggccacattgtcgaagatgttctcatagtcgatgtaaaagtcgggtcccagggaactgcccttctcataggccttctcccacgggaaatcgatgggactcttgttaaagtaatccttataaaggtaactctccgtcttcatcggctccgtgaccaaatcttcttttgctgaactttctttacttattttgagttcttcaaaaagtttatccagactggatagtttagctgacgtcccttccttcaacttgaccccatcaaatcgtgcgtcatttctgtaagtggcacaataacaaataattaatggataacctctcatctcaaggacctactcctcatagtcatccccgtggtttagcgccttaaaccttttgatcacggaatccatttgaaaagcctttctttgtttactccaggtatttgttattcgaaataatgatatcaaataaatcattatgatggaaaaagcaaaacgagatcgtaatcttaatacattttgcttaatattcattaatttacataatgcccaagaatggccaaggttttaattgctcgatattcatcaatcagccaatacgtaaataataacagatgaaagatgtcttcatttattattattttttttttttaattcggaattatgaatgcaaatgaatcactctgattggtgaaagcaaaacgttaatcctgtctttcactccgctgagtaattgctttggccatctgatgcgctcacaaagcccgcatatcagttagccatgaaatctagatggatataacccattatataacccatttgttgctgtaagcacatgacaaactataacaaattaccagcaacaaaggcgttggatgaaaaaaagcgtggcatttcagtcaacttatgcgcttgtcaagcttatatttacacccagttgaccatattttatgtcgattccggttatgaaatttacagagctgtcagaaagagttcggcgacattttagtaaatattgaaatttaatcaagcaaagtgcagtgcacacacacacgcgcgtgagcttactgtgtgtgcgccgtatatatgtacatatatgtacatatgtgtgtgcacatacaaccggcaggatgacaaggatatgaacacgtccacccccagacacctgtcaccatcgtctcctgcactacgatggtcctgccgacctgccagtgtgggttatacaatccagggaacagggatgtgggcatggccatgggtgtgggtgtggatgtgtgtttgtcgaagtcaacaatcaattgaatcgatttcattttacaaattgcgttgaattttgtggtgcagccaccaccgccagctgcaattgacggcgaagccagcggcaacaataacgagccctgggtggcttacttcatatatcagagggaaccactagccagccacc

SEQ ID NO: 5186 - DNA, 1029 bp, DROSOPHILA
aatacctggagtaaacaaagaaaggcttttcaaatggattccgtgatcaaaaggtttaaggcgctaaaccacggggatgactatgaggaaaatgacgcacgatttgatggggtcaagttgaaggaagggacgtcagctaaactatccagtctggataaactttttgaagaactcaaaataagtaaagaaagttcagcaaaagaagatttggtcacggagccgatgaagacggagagttacctttataaggattactttaacaagagtcccatcgatttcccgtgggagaaggcctatgagaagggcagttccctgggacccgacttttacatcgactatgagaacatcttcgacaatgtggccaatcttgccgaaatagaagaaaaactggaattgcacttcagaccctttacctgtgtaatggacttcaactgccgtttcagtatgtacgaactgtgcctgctgttggccgaatcccgattcgatccaagtagtcatccctccgtggtcgtgaagatcacccatccctctgcccaggtgaagatccatgcgggtggaaagatttcctccaccgccttgaacgccgattcagccagaagtggtctgttcaaggtgatcaggatcctgcaggatctcgactataaggtggacatcatgaacttcagcaagaacatcgtgaatgcctccttcagcatgccattcaaaatcgatttggatctgatgagccgccgccatgtggtcgaggtggcccagaacaggagccggcgaccctttatcacatacaccaccgagaatttgggcgtgagatttgccgtctttcccacaggattcgttttggtccttcactcgaccagtcactgcgagacacgagaggctatagccaacttcctgccgatcctggccaaactcaagaatggatatcccacggcagaggagaaacttggacaactggtaggggatatttcctacaagttgttttgggaaaagcaattggaagacgacaaggagggcatgttgctttactcttaa

SEQ ID NO: 5187 - protein, 331 aa, DROSOPHILA
MDSVIKRFKALNHGDDYEENDARFDGVKLKEGTSAKLSSLDKLFEELKISKESSAKEDLVTEPMKTESYLYKDYFNKSPIDFPWEKAYEKGSSLGPDFYIDYENIFDNVANLAEIEEKLELHFRPFTCVMDFNCRFSMYELCLLLAESRFDPSSHPSVVVKITHPSAQVKIHAGGKISSTALNADSARSGLFKVIRILQDLDYKVDIMNFSKNIVNASFSMPFKIDLDLMSRRHVVEVAQNRSRRPFITYTTENLGVRFAVFPTGFVLVLHSTSHCETREAIANFLPILAKLKNGYPTAEEKLGQLVGDISYKLFWEKQLEDDKEGMLLYS

SEQ ID NO: 5188 - DNA, 6898 bp, DROSOPHILA
attagaaacaccactcattcagttggataaactttattcatttagcaacagaaaggcgtgatccggaggatcctaaacatatctgctggcgatggccagaaccttggtgtaatcggctcctttggccagcgtcttctccttgaggatggttcgcaggatcgtgggaatgggcacatggatgcgagtgcccagcggactgccattgtcgtcgatgagcaccaggttgttgctatcgaatttcggctgtttgggcttctggttctgcttgagtcccacgagaatgcccttcttcatctgtcccttgatggccaccagcaccttatcgccaatgaagccgactccgcgtttgttgtagacatggatgcacctcggtggtcgcccctcggccatcgctttctttcccaaatcgctgttgtccaccacccgtaaccgggccaatttccggatttcgcagcacgccggcgttgtgtgaatcaattgctgtgtttgctggccgcccagggttaccgccagtggttgggccacttgtctaactgttttcaggatgcgcagcgccattattcgcaggtattattgtagttcctattttatttaattcattaaactcaagggaaacgcacaacaaaaataaattatacaattccttttaatcgtacgacagcgttgccacatcgcggcgaaaataccatatgatttagctacagcgcagttatcgatgttacgacctaacagagcaagcagctgttaagagcggactatttgaacagtactgttaaaaggcaagttttattttaattcaaattattcctcgtttcgttttttaattgaaaattggcttgttgagaataattcaggtcagtcgatcgtctttcaacaacgatcacagtcattagcaaaaccaaccgttattctcgtcaccctcactttttaaacatccaagtgcgaggtacaaagaaacacacatttaacttctgtttttatttttttattttattcagtttaatacaatgccatatatatatatacacatcagcgcattaactgcagttgtttaaaaataatttattagcattagtaactctcggtattgggctagtttgtttcgctaccgtttgcttttatttatttgacacgactaagtagaccagtcccattggttagaaaattggttactatatttcactatgacgtaagaaatattatatcggcataataacatacatatatatatatagatatatatttatatagataaattttgcgcttttcgttttcttgttaattttttgggttctcttgtgacctaatgactaaaacaaacttttaaaaaactacatagttcataacaaaaactaagattagttaaaaaaatgtggggggggggggcactttaaaagcacggggatgaggtgaaaataagttttactaaatcttggctttatcgaaattatatacaaactcaacacaaaatgtattgttaacggtttaaaaaatatataacttgtgcgctgcttcaataatttttgcccgactctcctcagttcactttcaaaaacttaggatcggttgaggtcctcgcgtttgaagttccgtatcgcgtccaacagttgggagcgcggatcaggcgcggtgggaccactgcgtccgccgttggttttcacgggctgcagtgccggaggcggcggcggaggggagggtgtggtcgctggctggacagtgggcttgagtttgacctgcaggctcaccggcttagtttctggctcctggagctttacctccactttggtggacttcagagcgacgtagccacttattgacggcggtgctggtttgctttctggcggggacttgggcgcggtagctgaagaaggaatgctttcgttcacggacacccttattctcaaggcctgctcctgttcctgctgctccttggccaacatacgttccttgaagcctgtgcggcgtagagtactctggccaaagggcgctggtgcaggattggcttccactggtctgttcctctccaaactggaaacagggcgtggaagggagttcatggtcaagtgggagaccatttggttgttttgggcagcgggtagagtgaatcgattgcttttggctggacgcggcaatgtagaggaatggttttgaagggagttttggtcctgatccagtggtttttctatacgtttttgtaccggcttcaccggcgttttaggctttactttaactgaaacactttccttttcgatttcttgatcctttagctcctggacctccggcttctccttcttttcctgctgttgattttccaaaatctcatcctttagtggcttaaccgtaatgggaacatgatactcctttccctgcggaatacccatcctcaaaatgggtgaagccactccgatggtgagcttggaaggcggtgaagtcaactgttgcgacttccctgccccgccaaagatatagtcgccttcgttcttaatggccacagtggatttgggtcgctcgctccaggtggcgaaattaatgctcggtggtccggaataccgatatgtggttggcagaggcttggagctcggagctggttcatcccgctggctttgttcaatttccgccattgtgttattggggtttcgtaaattaaccggactgactggagtggctggggtatttggaggagttatcgtggattgggagctctcattgcctgatgattcctccttgactgcttcaacttttgggaatggatctgggaccttcttgacagctggcggagacatctttgacacaataacaaatgactccttcatggactcaagtggcggcgattctttctgtacaactatctccttttgatgcaacgaaacagcttgctcctcgacagatttcacagctggaggtaacgatggcctttcaactggagaagttctctgctcttgtacggcaggagatgacttctgcagtgcaggagaagacggataaggttcctgcacagctctgaaagtcggagatgtaggtttctcaactccaggattcgactttttcgggacaggcgtaggtgactgttgcgaagcttcagaacgagaggaactgatgtcttttactccatccactgatgattgttctttggccaggctctccagctgcttaatgatctttggttgctctgtaacaggagtagatgcactgcctccactttcggccagactgttctttctagagttcagaatggtcttgataacctctggactttgcaatgatggtgattcaccaatgctcaactcactagacgagcgtctctgacccaaaccaatgccattctgctccagcttgtttagggagacgtgagaagagctgcgatgacttagagctcttccggatgaggctacctctgtccctccgcctgaggcgcctgcctgaaaggagtcagctcgtccaatcctcgtcgtacttttcgccgtagttatgctgaagttagccaatcgatttggtttggccgattcgatttcaaccatttggggatcgggttgtttctttatcaacgtatccagacgctgttggttgattatagtggccagttcatccacgatctcgtctagcggcgagccaggacttaacgaaccagcattgcgtttctgcatttgctgatcggagaagtcgggagggggagagatgggatccaagtagttccacgacgtgagcgatgtttcgctactgggagtggccagatttccatttgttatgctcgctggctgatccacgtgattgtcctcctcctcgatatcctgcgctgtcagagctgtcaattccgccaaagtggctgccgatggttcaggtttcttggatgtctggcacagcttgaaattgtacaccttgattgcctcatcgtcctcggaactcgattcctgctgcgatttctccgcctctggttcgggagagacggatggcgatggcgctggctctccgattcccgaatccgcttgctttgatgccgtatcgttgtcatcatcctctgtggcactgcccagggatcggggctccggagtgggcgttctattcagaaggactttggacacgtttccattcggtgatccgttgccattgccatttacttgggcaagtggaggattggctgtcggggcaatgggcaagggagtggttatcctaggcgctggttgcggaatattcggggtaggtgtgaccggttccggtagtgaggccagtgatatattgtctcccccactttgaaagtccggcggtggagccggtgccgttttctttttgatctgcagcaatcgctttcgaggcgttggctccggaccgccagcaatcggaggtttcagatccagtgtagcataatggccatccgttgagtcttcatccggcgactttgagccgttaccattgcagtccaactccaagggaccggagaggttgggcgtggacatgcagagctgggggcgcttgacaattaccgcataagcgggttcgcttttcgagttagcagctggaatatccggaacagactgctctggaatgcaaacctggcttggcggccgaggagcggttcgctttttgcggggtggcggtgctagtacctttgctggtggcaccaccaccggggtacgagtgtagttcattcccgtggagtccatggagttcagtgagttgctggaactgtacggactcggcgttttggccgtgacctttgagtgccggctgctactgaagtccgagctgctgctcaacgagtctcgagcgacaccggtgcgctggaatttgtgcattacgtccggattgaagttgtcataggactccgacttgtggcacagtcggatctctgagagacccactgttccgatcgttgattcgcagctgtacacctgactagcatccactgaaaggtgaaggaagaaaaatagttttatattggaaatccttcgtaaacctttagatccacatacctggactgcgaaactcgtacttgtccgcatccagttgcttgttgtcgcagacgagggacaagagcttactcagtggaactctggctcccaatcgggccacgaagagctgatccttcggcagcagaacggtgatgcggaaggtctgttcaaagggcgcattgctggttgccgcgggcaccggggttatccggttgtactccaattgactagtctcgttgatgtccgtgtccgtggacaaatggtggagctgtgtcgacgacttggacaacttgcccatggaggagttgccagtgccggatttgtctgaaagatataaaattgagacattgttttaaagcgattcttaagatcaagcataattgtttccaaatcttgctcttactttttggccacttacccttttttcggccaaaccagcggttcagtgtggcgaagctgcccttcatgctgctcatgtcgtgggcgtggcttcgttagtgtctctctctctctcactctcactcgttatcctcttcttcctccttcaccgacttccgcttttggtttcctgtctaaaggtgtcctaatttcttaaactcgccgtttgctttaaaatttcgatcgaatttcgtaatatgcgtagagcatgctaaaaaaaaaaaatggcgtgcgatttgtgcgctgcaaaatctgaaagtggaaaaaggcaagaaatcgagtcagaagcggtccgattacaaaagacgctcggtcttatcgtttttttttttttgggctgataaggatgatggagggggaggtgggccattcctctggctccttatcaatgccacattgagcaacacatccataataacctgtgccaaacgaaaagacttttgttctgtgcttcccaaaaaacgacaatttcgatttccaaaatatgttctaaagtcgacttgatagatttagggttccaaactatttgaatattttttagttcattattttccgcctgctatttgcctttttcgccaggcttactgcttaattgtcggccaggttgtttaatgaccaccaacacctagacacaaatataaatacaaaatagctagcgataagcccaagaaatcgaaatcgtcggcggcattgagaagcgcgcgactcgcgggcgttttttgtcgcgtgcgattcatttgcacacaatgcaatatcgcgaaggcgatatgtatacacgtatatgcatacatatgggcgaaatggaacaaggggcagccagggggcgtggcactgttcactcagtagtaagttctaatgacatagttaggtgtgcggcagtgtgagtgcaagaccatgcaaattgcgggcaattgttgcagcaccaacttgttccattgttcgtgcactgagaaaaatatatgttagaagcgatcatcgcaggcatttgttctatgtttagattctatttgtataggctggaagttctttcagcacaggagttatattcaataagcatagttgatacggaaatattgtagaaattaaaatcaaacaattattgctttctgtgcttcgatttgaacttacaatttaattagacatacagcacgtaacaaacctataaggttgatcgcaagcagttcccacaggaagtgcatagttgctcgtaattgggaaatcaattcactaaataaccttccgaaccgacaaataaaacagatttaatggaactaaatgattataattgaactcagtatagaactcgcttggcttgacagctcgtacttatattttcattgtacaacccatttataaagcaaaggtgaagttattttcattatttactgaaattacactggatctcaaacgcgaaaaggtgctcaatgtgcaacagatcgctatatcctccatggacttatggtaatgagccgtactgtgtacattcgtgattggctgtagccaatcgatttgtg

SEQ ID NO: 5189 - DNA, 4361 bp, DROSOPHILA
cctaaatctatcaagtcgactttagaacatattttggaaatcgaaattgtcgttttttgggaagcacagaacaaaagtcttttcgtttggcacagattttgcagcgcacaaatcgcacgccattttttttttttagcatgctctacgcatattacgaaattcgatcgaaattttaaagcaaacggcgagtttaagaaattaggacacctttagacaggaaaccaaaagcggaagtcggtgaaggaggaagaagaggataacgagtgagagtgagagagagagagacactaacgaagccacgcccacgacatgagcagcatgaagggcagcttcgccacactgaaccgctggtttggccgaaaaaaggacaaatccggcactggcaactcctccatgggcaagttgtccaagtcgtcgacacagctccaccatttgtccacggacacggacatcaacgagactagtcaattggagtacaaccggataaccccggtgcccgcggcaaccagcaatgcgccctttgaacagaccttccgcatcaccgttctgctgccgaaggatcagctcttcgtggcccgattgggagccagagttccactgagtaagctcttgtccctcgtctgcgacaacaagcaactggatgcggacaagtacgagtttcgcagtccagtggatgctagtcaggtgtacagctgcgaatcaacgatcggaacagtgggtctctcagagatccgactgtgccacaagtcggagtcctatgacaacttcaatccggacgtaatgcacaaattccagcgcaccggtgtcgctcgagactcgttgagcagcagctcggacttcagtagcagccggcactcaaaggtcacggccaaaacgccgagtccgtacagttccagcaactcactgaactccatggactccacgggaatgaactacactcgtaccccggtggtggtgccaccagcaaaggtactagcaccgccaccccgcaaaaagcgaaccgctcctcggccgccaagccaggtttgcattccagagcagtctgttccggatattccagctgctaactcgaaaagcgaacccgcttatgcggtaattgtcaagcgcccccagctctgcatgtccacgcccaacctctccggtcccttggagttggactgcaatggtaacggctcaaagtcgccggatgaagactcaacggatggccattatgctacactggatctgaaacctccgattgctggcggtccggagccaacgcctcgaaagcgattgctgcagatcaaaaagaaaacggcaccggctccaccgccggactttcaaagtgggggagacaatatatcactggcctcactaccggaaccggtcacacctaccccgaatattccgcaaccagcgcctaggataaccactcccttgcccattgccccgacagccaatcctccacttgcccaagtaaatggcaatggcaacggatcaccgaatggaaacgtgtccaaagtccttctgaatagaacgcccactccggagccccgatccctgggcagtgccacagaggatgatgacaacgatacggcatcaaagcaagcggattcgggaatcggagagccagcgccatcgccatccgtctctcccgaaccagaggcggagaaatcgcagcaggaatcgagttccgaggacgatgaggcaatcaaggtgtacaatttcaagctgtgccagacatccaagaaacctgaaccatcggcagccactttggcggaattgacagctctgacagcgcaggatatcgaggaggaggacaatcacgtggatcagccagcgagcataacaaatggaaatctggccactcccagtagcgaaacatcgctcacgtcgtggaactacttggatcccatctctccccctcccgacttctccgatcagcaaatgcagaaacgcaatgctggttcgttaagtcctggctcgccgctagacgagatcgtggatgaactggccactataatcaaccaacagcgtctggatacgttgataaagaaacaacccgatccccaaatggttgaaatcgaatcggccaaaccaaatcgattggctaacttcagcataactacggcgaaaagtacgacgaggattggacgagctgactcctttcaggcaggcgcctcaggcggagggacagaggtagcctcatccggaagagctctaagtcatcgcagctcttctcacgtctccctaaacaagctggagcagaatggcattggtttgggtcagagacgctcgtctagtgagttgagcattggtgaatcaccatcattgcaaagtccagaggttatcaagaccattctgaactctagaaagaacagtctggccgaaagtggaggcagtgcatctactcctgttacagagcaaccaaagatcattaagcagctggagagcctggccaaagaacaatcatcagtggatggagtaaaagacatcagttcctctcgttctgaagcttcgcaacagtcacctacgcctgtcccgaaaaagtcgaatcctggagttgagaaacctacatctccgactttcagagctgtgcaggaaccttatccgtcttctcctgcactgcagaagtcatctcctgccgtacaagagcagagaacttctccagttgaaaggccatcgttacctccagctgtgaaatctgtcgaggagcaagctgtttcgttgcatcaaaaggagatagttgtacagaaagaatcgccgccacttgagtccatgaaggagtcatttgttattgtgtcaaagatgtctccgccagctgtcaagaaggtcccagatccattcccaaaagttgaagcagtcaaggaggaatcatcaggcaatgagagctcccaatccacgataactcctccaaataccccagccactccagtcagtccggttaatttacgaaaccccaataacacaatggcggaaattgaacaaagccagcgggatgaaccagctccgagctccaagcctctgccaaccacatatcggtattccggaccaccgagcattaatttcgccacctggagcgagcgacccaaatccactgtggccattaagaacgaaggcgactatatctttggcggggcagggaagtcgcaacagttgacttcaccgccttccaagctcaccatcggagtggcttcacccattttgaggatgggtattccgcagggaaaggagtatcatgttcccattacggttaagccactaaaggatgagattttggaaaatcaacagcaggaaaagaaggagaagccggaggtccaggagctaaaggatcaagaaatcgaaaaggaaagtgtttcagttaaagtaaagcctaaaacgccggtgaagccggtacaaaaacgtatagaaaaaccactggatcaggaccaaaactcccttcaaaaccattcctctacattgccgcgtccagccaaaagcaatcgattcactctacccgctgcccaaaacaaccaaatggtctcccacttgaccatgaactcccttccacgccctgtttccagtttggagaggaacagaccagtggaagccaatcctgcaccagcgccctttggccagagtactctacgccgcacaggcttcaaggaacgtatgttggccaaggagcagcaggaacaggagcaggccttgagaataagggtgtccgtgaacgaaagcattccttcttcagctaccgcgcccaagtccccgccagaaagcaaaccagcaccgccgtcaataagtggctacgtcgctctgaagtccaccaaagtggaggtaaagctccaggagccagaaactaagccggtgagcctgcaggtcaaactcaagcccactgtccagccagcgaccacaccctcccctccgccgccgcctccggcactgcagcccgtgaaaaccaacggcggacgcagtggtcccaccgcgcctgatccgcgctcccaactgttggacgcgatacggaacttcaaacgcgaggacctcaaccgatcctaagtttttgaaagtgaactgaggagagtcgggcaaaaattattgaagcagcgcacaagttatatattttttaaaccgttaacaatacattttgtgttgagtttgtatataatttcgataaagccaagatttagtaaaacttattttcacctcatccccgtgcttttaaagtgccccccccccccacatttttttaactaatcttagtttttgttatgaactatgtagttttttaaaagtttgttttagtcattaggtcacaagagaacccaaaaaattaacaagaaaacgaaaagcgcaaaatttatctatataaatatatatctatatatatatatggcattgtatta

SEQ ID NO: 5190 - protein, 1231 aa, DROSOPHILA
MKGSFATLNRWFGRKKDKSGTGNSSMGKLSKSSTQLHHLSTDTDINETSQLEYNRITPVPAATSNAPFEQTFRITVLLPKDQLFVARLGARVPLSKLLSLVCDNKQLDADKYEFRSPVDASQVYSCESTIGTVGLSEIRLCHKSESYDNFNPDVMHKFQRTGVARDSLSSSSDFSSSRHSKVTAKTPSPYSSSNSLNSMDSTGMNYTRTPVVVPPAKVLAPPPRKKRTAPRPPSQVCIPEQSVPDIPAANSKSEPAYAVIVKRPQLCMSTPNLSGPLELDCNGNGSKSPDEDSTDGHYATLDLKPPIAGGPEPTPRKRLLQIKKKTAPAPPPDFQSGGDNISLASLPEPVTPTPNIPQPAPRITTPLPIAPTANPPLAQVNGNGNGSPNGNVSKVLLNRTPTPEPRSLGSATEDDDNDTASKQADSGIGEPAPSPSVSPEPEAEKSQQESSSEDDEAIKVYNFKLCQTSKKPEPSAATLAELTALTAQDIEEEDNHVDQPASITNGNLATPSSETSLTSWNYLDPISPPPDFSDQQMQKRNAGSLSPGSPLDEIVDELATIINQQRLDTLIKKQPDPQMVEIESAKPNRLANFSITTAKSTTRIGRADSFQAGASGGGTEVASSGRALSHRSSSHVSLNKLEQNGIGLGQRRSSSELSIGESPSLQSPEVIKTILNSRKNSLAESGGSASTPVTEQPKIIKQLESLAKEQSSVDGVKDISSSRSEASQQSPTPVPKKSNPGVEKPTSPTFRAVQEPYPSSPALQKSSPAVQEQRTSPVERPSLPPAVKSVEEQAVSLHQKEIVVQKESPPLESMKESFVIVSKMSPPAVKKVPDPFPKVEAVKEESSGNESSQSTITPPNTPATPVSPVNLRNPNNTMAEIEQSQRDEPAPSSKPLPTTYRYSGPPSINFATWSERPKSTVAIKNEGDYIFGGAGKSQQLTSPPSKLTIGVASPILRMGIPQGKEYHVPITVKPLKDEILENQQQEKKEKPEVQELKDQEIEKESVSVKVKPKTPVKPVQKRIEKPLDQDQNSLQNHSSTLPRPAKSNRFTLPAAQNNQMVSHLTMNSLPRPVSSLERNRPVEANPAPAPFGQSTLRRTGFKERMLAKEQQEQEQALRIRVSVNESIPSSATAPKSPPESKPAPPSISGYVALKSTKVEVKLQEPETKPVSLQVKLKPTVQPATTPSPPPPPPALQPVKTNGGRSGPTAPDPRSQLLDAIRNFKREDLNRS

SEQ ID NO: 5191 - DNA, 3902 bp, DROSOPHILA
gatgcgaatatcacgcatacgccccgtaatctgcagttgcacaatcacagtttgttaaccccctcggcctaagcgatgaatcaccaccttgatcatgggagtgagcaagtgaatcggcaccaaagatcgaactgcagtcaaggtgcgcctgacagcgactaagaaaaatgagtggttattaacagtcagcgaaagaacgtgcttttaatttcatctaataaatacaagttggctagaagactcgaatggcgccataatcttaaaatgtgtactgaacgaatgtgtttattctgctgtcgaattcctttcaattgtactatatttttaatactatctaaaaaggcatttagtcatctattaatttgctgacgtctgtgaggctgcctgccaaatttgatgctacttttacaatgtacccatagaaattcttatacatgtaccataaatttatgattgtgccactcggttattaaggacttcctgttgtcggattgccgacaagtttgtcgcgacaacagattcatttagcggtggctgcagtttaatttaacacccgccgacacaaacaattcccaaaccccccgcagatctcattagtttttgcctttttgtttttgaatttttattttagtataattttaattggtttctgttttcatcgctccgttcggtgtctaaatatacaataatatataaattaaatggtgcttagttctttgctgcagcgcttaagtatcgttaatcatattacatatatcgcggatatgtgacaacaagttaccaactctgaaacactcgctggtaaaagcctttgcaaagttatttaaaatctggttttcaaaggggatttttataacattttcaaggtgctatagttcgatattggacggggttatatgattataagattataacgtaacaaatagttatataaagttagttatatatcgaggaagttccattataaattatattctcatttagacgaaagagtagggatggtattttcttattttaatagttccgatattttcacaaactctgcaaaggcttttattaaatccggtcaaccgaatatggttttagttctttctttagttttcatatatttaacccagttctcaactatttacaagcgtctagcgcctcagtcgcggctatatctatgtacagtgaatacttatgagctacatatgctgcttctcaagccaaagaatcctccgattcttctcgccagaatcttcagctattgcgggagactacggtgacgggtttgtgaagaggctgtggcgagggtcccggggaatcgccgccaggcgaaaggggcgcctgacccaccgccaggtgtgggtggtgatgggtgggcggtggttgtgacgccgccgatgctgccgccaccgagagttgcctttgatgagccgccagagcggcggctgccgcatgttgatgcaacagctgttggtactgcaatcgctggtagagctcactgctcgtgggtggtgcgacgaagggcggtggtggtggtcctggcggtccttgaggtcccggtggtccgggtaatcccggcaagcccggtggcaagcctggatgtcctggtccacctttcggggcgaagggattataacgctgatacatgctggccagcaagctaggcgccgtcggaggataggtaagaaattgtccaaactgcggataggcagccagtcccgggaacatgggtcctatcagggatctcttgaaggcggccagtcgggagcgagaggcggctgtggttctcctcctcagcttccccgtcgatccgccaatgaatacgtcttccgccgagggatccaacatccagtagttgcccttgccaggatcatcatagtgtcttggcaccttgacgaaacacttattcaggctcaagttatgtcttatggagttctgccagccctgtttgttgtcccggtagtatggatgattggtcattatgtactcgtagatgccattcagggttagacgcttctcggaactctgacgaatggccatcatgattagggcattgtagctgtaaggtggcttttcgttgcctttcttatccttcaccggcttgccatcgttcgatttattttccgcatcgccatcggttgtctccccatcacattcgatatcctcctccacgaactcctcgtcgacttcatccggatcgctttcattgggattcgcaacgggagccggtgacatggaggtcacatcgagatccgattcgggatcgctttccgcctcatgatcctctggcgatccccagttcgtggtattcagattgttattattatggttgggcggaaatttcgctggtgatttcttctcgacatcctcttcctcatcctcgtcgtgatgctccacagtctcgggtagaatggaattaatggaaaagctggacttcaaatgtggtgtcctggccattttcattagattggtgagattcagcccgacgggatggggactttggagcgcggaatggtgagtggtgggcggcagtgggtggtgatggtgctgaaagtggagactgtgagcgctaatctcgctggacggcagaccttcctcgatcttcaccatgattcttaggtcagatggtttaaaaactccacattgccttggaagttagctttattagttttggttttagtttgatttgccgatgtgctttcataaagttctttatggttttgccagaattcaagatagccaaaaccttaagttcattttttttctaaaggctttgctaaaggctatatttgattaacttctaattgatttatttggccgcttcaaagtcactagctattcaaattggggctcattcgttcagttctctcgctttacgttcagttttaccgacgctcgacgttaatacacagcccacaaaaatacacgatttcacgtccgttgctcaggggctttcagtgtagactaaaaacgagaattcccaataattcccaatcgcagtcggtccggttttctttcttctttttcgaacagggtcttcaacggtgttatcgggggtgggtcgcgcgccgaccaatcagcgctgtggaacgaatgaaaagtcgtctccctctcactcagcgcactctctttcccgctcagatttattttctcattcgttttactaattgccgccgacatgaaacacgaaaaacgccgacgccacgcacacaaataaacacaaactcatacatatatacatatagagctatatggtacaccccatttctcatgtagtgggtcacccttttccggattgtgggttgcattttgatacgctaggtctttcgtatacttattattatggtttttttttccccttgctcttttgaatccggcagctgttaatgtgtttcttgtttttacacacagttgccattattaattgtgtcccggaccgttgttgttgttatcgtttcagttgccatttgcccccgttaatttttcggcgagtttgcaaacttatggatagcgaaagggggttgcgattccgttagatatggacagagatttgtgggttcagattttcgatttctcttcctgtatagcaacattaagatcatttgttacaaatcctaaatgagttggagggagttttatatgatcttttcagttatattaggtattactttttgccagctgcagtctattaagaatacttataatgggttttttatctggccgaatgatagtgatacagacggtataacaattaaaaagaaagacaattacatagaaagggttgcgaaacataatacacatatgctttttatcatttctcccaaatatccctacatattttaagcttaatacttatttcctattattatagttttgtccatctggcacagttttgaaaactttcgacccaataa

SEQ ID NO: 5192 - DNA, 1902 bp, DROSOPHILA
ggctgtgtattaacgtcgagcgtcggtaaaactgaacgtaaagcgagagaactgaacgaatgagccccaatttgaatagctagtgactttgaagcggccaaataaatcaattagaagttaatcaaatatagcctttagcaaagcctttagaaaaaaaatgaacttaaggttttggctatcttgaattctggcaaaaccataaagaactttatgaaagcacatcggcaaatcaaactaaaaccaaaactaataaagctaacttccaaggcaatgtggagtttttaaaccatctgacctaagaatcatggtgaagatcgaggaaggtctgccgtccagcgagattagcgctcacagtctccactttcagcaccatcaccacccactgccgcccaccactcaccattccgcgctccaaagtccccatcccgtcgggctgaatctcaccaatctaatgaaaatggccaggacaccacatttgaagtccagcttttccattaattccattctacccgagactgtggagcatcacgacgaggatgaggaagaggatgtcgagaagaaatcaccagcgaaatttccgcccaaccataataataacaatctgaataccacgaactggggatcgccagaggatcatgaggcggaaagcgatcccgaatcggatctcgatgtgacctccatgtcaccggctcccgttgcgaatcccaatgaaagcgatccggatgaagtcgacgaggagttcgtggaggaggatatcgaatgtgatggggagacaaccgatggcgatgcggaaaataaatcgaacgatggcaagccggtgaaggataagaaaggcaacgaaaagccaccttacagctacaatgccctaatcatgatggccattcgtcagagttccgagaagcgtctaaccctgaatggcatctacgagtacataatgaccaatcatccatactaccgggacaacaaacagggctggcagaactccataagacataacttgagcctgaataagtgtttcgtcaaggtgccaagacactatgatgatcctggcaagggcaactactggatgttggatccctcggcggaagacgtattcattggcggatcgacggggaagctgaggaggagaaccacagccgcctctcgctcccgactggccgccttcaagagatccctgataggacccatgttcccgggactggctgcctatccgcagtttggacaatttcttacctatcctccgacggcgcctagcttgctggccagcatgtatcagcgttataatcccttcgccccgaaaggtggaccaggacatccaggcttgccaccgggcttgccgggattacccggaccaccgggacctcaaggaccgccaggaccaccaccaccgcccttcgtcgcaccacccacgagcagtgagctctaccagcgattgcagtaccaacagctgttgcatcaacatgcggcagccgccgctctggcggctcatcaaaggcaactctcggtggcggcagcatcggcggcgtcacaaccaccgcccacccatcaccacccacacctggcggtgggtcaggcgcccctttcgcctggcggcgattccccgggaccctcgccacagcctcttcacaaacccgtcaccgtagtctcccgcaatagctgaagattctggcgagaagaatcggaggattctttggcttgagaagcagcatatgtagctcataagtattcactgtacatagatatagccgcgactgaggcgctagacgcttgtaaatagttgagaactgggttaaatatatgaaaactaaagaaagaactaaaaccatattcggttgaccggatttaataaaagcctttgcagagtttgtgaaaatatcggaactattaaaataagaaaatacc

SEQ ID NO: 5193 - protein, 451 aa, DROSOPHILA
MVKIEEGLPSSEISAHSLHFQHHHHPLPPTTHHSALQSPHPVGLNLTNLMKMARTPHLKSSFSINSILPETVEHHDEDEEEDVEKKSPAKFPPNHNNNNLNTTNWGSPEDHEAESDPESDLDVTSMSPAPVANPNESDPDEVDEEFVEEDIECDGETTDGDAENKSNDGKPVKDKKGNEKPPYSYNALIMMAIRQSSEKRLTLNGIYEYIMTNHPYYRDNKQGWQNSIRHNLSLNKCFVKVPRHYDDPGKGNYWMLDPSAEDVFIGGSTGKLRRRTTAASRSRLAAFKRSLIGPMFPGLAAYPQFGQFLTYPPTAPSLLASMYQRYNPFAPKGGPGHPGLPPGLPGLPGPPGPQGPPGPPPPPFVAPPTSSELYQRLQYQQLLHQHAAAAALAAHQRQLSVAAASAASQPPPTHHHPHLAVGQAPLSPGGDSPGPSPQPLHKPVTVVSRNS

SEQ ID NO: 5194 - DNA, 6962 bp, DROSOPHILA
aaagaagggtagtaattatgctttactaatacacatatgagcttgcaaacatttgccaattgtttagttgttgcgcttactagttgtccaccaagcaatcatcaatcatattgtttaaactaaagagctttaatcgtatgcatgagtgttgatggcagctttttggtttaaatcgtttctcttagatgtggataaattgaatattgtgtataaaatagcttgctattttatgttgtacattaaacacataattttactgcttttcaactgtcgctgcgacagtttcgttttccggctcccccccacgttgatcatacaaaaggttctgtttgtctgtttatatcatattatttcagttgctattgttgcttcacattgttgctgttgctatttcatcgtccatacctttcaaatttcccgctttcccgctagccgcttccgcttttctcagctttccttcgttttatagaaatataatttgtctctgttttttttttttcaagtttgagtcttctgccacatcagcacaaacgtttttcgtcggcttttaaaaaaatttaaatacattctatcgttctacatccccatatcgcattttctgctatcgatggcatgccaattcttcaaaagattttttttttttttttggtttttcccacacaaatacaatatttacagttcacagtttccactggctggatttttatcatctaattcattacacccagagcttttccttgaacatatttttaatcaattcttgtgatcctttctatcatacggctggcatatgattttccgtctctaaaccctcaattttgactcaactttcgatcttttacatcccggagcttctacaaatctattgtttgtcctcctcaactttcgatccgtgttcgcattacagtttttgttacagtttttcagtttaaaattgtgaaaaaatagctgcatctattgtaaattttaggtttgtctcttttttgtgttttttggtttgcgttaaaatttgaattacctttagatttatataatttgatttgatgatatttcccgctgctgtttgcgcttgaatctgaatcctgaaactgctcgcttgcataatctaggggttttactagctgcccctagacactctggttatcctccgaatgctgtttcagtttcagcgtcctgctgtggttgttggttcgtataaaaagtctttgatttgccccccgttccgttgaccatcctgctccccgtcccaatccgacgacgatccttttccggctgctgctctggtgttagcgtgctctgcattagagactaacctgctgcatcttatcaaaatctaaacacggccgatgcggtcgctgcagtctctgggtggcgacggcggtgacgttagcggcatttccggcggaattggcagcattgtgtgtcgttgttgtgcctgatgatgatgatgctgacgatggtgatattgttgtggcgcccccggctgcaccactggcattgttactgggtcgccgcctgggcgatatggcgcagtggaacagtttcgccggcggactgaccgaacgcacctccatatccaggccagtggtgctggccggactgctccgcgagctgttgtagtggaaactatatttcggctgcggctggtaaatgtggtggctgctgttgctcatctttagcgagctgctgcacgccttgatcacactcggctcattctcgttgccgccgtttccgtttccggttgcggccacagttccgctggcattccctgccagtgcgccaatcttggcgcacttactgctattggccgcgccaccgccaccgccgttgtcaccattctcctcgtttacactattatcacataatttaatattttcgatgccacatcgggcctccgataatatcagtggcgttgtggagcggaacatcatatggctacgatttggcttgaatgcctccaatggcggcgatgtgcgaaaattcacgggcgtcaatatcggctccagcgagttgcgcaactgtttcggattgcaatcatagattggattaaatgattttgatactgtttgaccggaacccacctcatcgtcggagctgtgggccagcgatcgcttgcggttctccaccatcagcgtggagctagaacgcttcgagttggaggtggtggcccgctcctcgtagggcgcctccgtgtccagcgaggaggtgcatccgcgattcgagatccgggaggcacacgatgagcccgtggccgccgttccgggatgctgacccgcctgcgaggacggcccgttgatcacctccaactcctcctcggaactgtgctggtcgtacatgagatgggcgcaggatgacgacgtctgctggtgacacatcattgcagaagctattggtttttggccagcaacacctggcaggataacaaacccaaaaagttaggatatccgatgtagtatgtagtttttaaaagtatcttgatcacttactagtttccatatccacgtctaagtgacgttggttttccacatcgaggagttcaccatcagattcggtgccagagtcattcgattcacgctgcggaagaataaattaattttattaataaactaataattaattaataaatcgcactttatacaacaaaaaacaaactattcttagtgtatctaaactatgttaaaataaagtccttaaaactatatgttcatttagaaatcgcacctttttacgcataaaatttttcgattccctcagtgtattttcgcgatttttctgtctgacaaactttatcatgattttctactttggctgttattcacttcgcatgccacacgcacacaatgacaacgatgcacccacgcagcgcacacacacagtgcagaaaacttactacgacgccgcagtcgcagtcggcgccgcagtcgacgtcgaattcgctattcctctccttcttctgcttttccttgtgcctgtgcttctccttcgccttctgttcgcgctactattactacatactaccgacttttgtgccgttgcgctttacacgccgtttctatttatacgcctccgcatgtatttttgtttgttatttttacgcgctgcttcgtcgtgcatcccttttgtgcaaaaatttcaatcacgtttacgttctctcgcactctcttcggttgtaaatgcgtagtcaacgagtaacggtagcggcgagagagttagagttcctgccctctctcttcggtttccttgttttaaagaagttgttttccgagttttatagcatattttccaaatattccgatatctggactgatcacaagctattatatttttcatgaaaactccgtttcgatctttgaatttgcaacttcgagtgttttattgtgattttttgcaaatctcttgctccacacactctctttcgcgcacacttggctgtggtcctcaaatcacccgaaccgaactcaaatcccgaacggaatatccgcgcacctttcgccgtaacttatacagcacggaattatcgatttttttggcacggctacgggaaaggcaaccagacgacgcgaaatccgcaaaaaaaaataataaacaggcacaccgcacctccaaagggttaagctttgctgcttgatgtcttttaacccatcgaaattggttttcaaacactgcgcggcattagcttaagttctgctcttcggcgtttttcgaatttcctagcgaaatgcagttgtgcaactgttttggatccgcctacgcctgctgactttgctggttactacggtgttactgtgtgtatcgggtatatatcgggtatattcgctacagcccaccgcccgtcaccggctaacgttgcgctccaactgaaaagccattgcgaccacaatgtggcaatgtgtctccaagtctctgaaaatcaaaatctctgcgctggcgctggagacccgcattccccttgccataagccaattctccactgcgtgcaacccacgattctcttgcaatttcagggttaccagacgcacgctggaaaatccaatagaattgacttcagtagcataattaaattaaattaaattttattttattttggaacctcaaatcttttttataccaaaaatagtgagaataatataaattggttgttaaaataattaaatgtcataacgtatatttgatacattttaagggaattaataaaagattagagaatgtttctccggccccagaactcttcaatcagtgatttaaatttctaacatagaacaactacatatttaaataaactttaacctgcattcgaccccctatcttatttcacaacaatgtaagacttgtttaattgcaaaagttgcgcactataattgattgtggataatcggcgtgtagtaattaactgcgcgaaattaacattccctgcaaatttctttcgggtgattttcttttgtgtgcaccttgttttcccattcattgaattcctcgcccgttcccacccaacaattgctcaaatagcgcttgcaatagcgctggcaaccctggccgcactcacaaagtgcacttactacactttggatgtggatgcgatgatgcccgtgtgggcgctcatggaaaatggagggggcaggggggctgacgtatcgctgcgtgcttttgtacatgcgcgctcaactcgtgcctccaacatcggtggacagatgccgaacgaaagtataagtttaagtagcattaagtcattatgacttttttttttgcacacctttgttaggtttggtttatacataatgcagacagaagatcaagatcagctgacaacggaacgtttaaaaatgtaatcggatttttcagataacattccatacaatttaacatacaattttgtcgcgcaccttggtacttatagacgaaagaagaagcagctggagcgggcaagttcctattccaatgactatatgcctatatattcatgtctatgagtagtaacgtgtggcagcaaaaagaagaggcaagtaaatgaagagaagtaaacgaaggggaggtgaagaaatacggcaaaaaagttgcaacgatgatatgggaaattgtttggagctcgcttttcgacaccgaatgtggaaaacatggggaaaacatgacatggaaaactacgcacgaactggtttttcggctgctcgaggcagttttctcaatttattgtttcttacaaacgtcatgtaactttattccacatttgtttaatttgtttcaactaatatatgataagtgtggaaagccgaaagcacaataaattattaaattatacctgttcaaaaaggatacaaaataaatacaaacatttagattttacggttagatttcttacattcgtttcatgaggaaaatgtgattttcgccttgtgcacacacatgtttaataagctattattccttctaagttttgccactatatttgcaaactccctcgtgagcttttcaatttgctttcaattttacgcggaaaattttactacgagtctacgtgcccacacacacttgcacacatcagctgtctcgctcctccgcaagaacaagtacttttgttccattcataccacacacacacagcaagagtgtatttttctctctttctctgtctctgtttcgtttactggagagagcgtctgacgtaggtgggtggtgggtggaggggaggtagtcgtggtgcagccttcagcttgagttctaaatttagcacttgcaacttcagcaggaccctctttctctcacctcacacacacgcacgtacacatattgccacagtcaccgttagtcgaaaacttacttgattcgctcgctctctctcgcgtatctccgtctccctctatagatgttggttttccttttgtttgatcacaaaattgtgtattttattaggaaattaaatttattagattttttcggttgtggaattgcaggaaaaccagcggaaaaacggaccaacggcggcgagtgaaaaacgatgaatggcgcttactacagaaattaaacagcacgcgacgcgttctttggagagttgaccaactaaacaagcgctcaaaaagaaacgaagagcgagcacgcgtgctctgtgccagcagtgttgccaacttgggctttttctagcattaatacgaaatgcataatttctattgtcaaccgtattcattaccattgctttttaggaaattgatgtgtgtgtgaacagctcatattattagatatcaagattttgacatctagatactatgttagatatataagaatacgaatactatttaggtttttcaatttctatagaacttgtcgctcagagctggcaacactctccagcaacaacagttttcttttttttgcgcgtgccttgcataaagagcttacccaatgaacattttttaagaaaaaactattaagttctcaatgcccaatttaaattgagacacatcactttgaatctaatatgatcgaaatttcataccttttaattatatcgctgttgattggtacttaacaagagcaatgcaattaagagattgcaataagtaaggtgtaaataaattataaattattttaatcagagatggcagataactgttatcatgtaaaattatttctacagttctgagttttacatttatcgcagactcgaaccgttaatatttgttccatggaaaatcaattgttgggcgcacattaaatttgaatttaactgttgaaactgacctaaataattacttattactatatactaagataggggaaacccatgtattaggtgcttttttttttatataaaaacgacccgattttaatgatttcttttttaattttgttttatttttctgtgtatgtacaacaacttagaactaattcgtttcggcaatagttaatggtagacttaaagttaatggatggaatgatttaagtttaccacaaaaaaaaacaacgggcgggcg

SEQ ID NO: 5195 - DNA, 1585 bp, DROSOPHILA
tttttccgctggttttcctgcaattccacaaccgaaaaaatctaataaatttaatttcctaataaaatacacaattttgtgatcaaacaaaaggaaaaccaacatctatagagggagacggagatacgcgagagagagcgagcgaatcaacgtgaatcgaatgactctggcaccgaatctgatggtgaactcctcgatgtggaaaaccaacgtcacttagacgtggatatggaaactagtgttgctggccaaaaaccaatagcttctgcaatgatgtgtcaccagcagacgtcgtcatcctgcgcccatctcatgtacgaccagcacagttccgaggaggagttggaggtgatcaacgggccgtcctcgcaggcgggtcagcatcccggaacggcggccacgggctcatcgtgtgcctcccggatctcgaatcgcggatgcacctcctcgctggacacggaggcgccctacgaggagcgggccaccacctccaactcgaagcgttctagctccacgctgatggtggagaaccgcaagcgatcgctggcccacagctccgacgatgagttgcgcaactcgctggagccgatattgacgcccgtgaattttcgcacatcgccgccattggaggcattcaagccaaatcgtagccatatgatgttccgctccacaacgccactgatattatcggaggcccgatgtggcatcgaaaatattaaattatgtgataatagtgtaaacgaggagaatggtgacaacggcggtggcggtggcgcggccaatagcagtaagtgcgccaagattggcgcactggcagggaatgccagcggaactgtggccgcaaccggaaacggaaacggcggcaacgagaatgagccgagtgtgatcaaggcgtgcagcagctcgctaaagatgagcaacagcagccaccacatttaccagccgcagccgaaatatagtttccactacaacagctcgcggagcagtccggccagcaccactggcctggatatggaggtgcgttcggtcagtccgccggcgaaactgttccactgcgccatatcgcccaggcggcgacccagtaacaatgccagtggtgcagccgggggcgccacaacaatatcaccatcgtcagcatcatcatcatcaggcacaacaacgacacacaatgctgccaattccgccggaaatgccgctaacgtcaccgccgtcgccacccagagactgcagcgaccgcatcggccgtgtttagattttgataagatgcagcaggttagtctctaatgcagagcacgctaacaccagagcagcagccggaaaaggatcgtcgtcggattgggacggggagcaggatggtcaacggaacggggggcaaatcaaagactttttatacgaaccaacaaccacagcaggacgctgaaactgaaacagcattcggaggataaccagagtgtctaggggcagctagtaaaacccctagattatgcaagcgagcagtttcaggattcagattcaagcgcaaacagcagcgggaaatatcatcaaatcaaattatataaatctaaaggtaattcaaattttaacg

SEQ ID NO: 5196 - protein, 351 aa, DROSOPHILA
METSVAGQKPIASAMMCHQQTSSSCAHLMYDQHSSEEELEVINGPSSQAGQHPGTAATGSSCASRISNRGCTSSLDTEAPYEERATTSNSKRSSSTLMVENRKRSLAHSSDDELRNSLEPILTPVNFRTSPPLEAFKPNRSHMMFRSTTPLILSEARCGIENIKLCDNSVNEENGDNGGGGGAANSSKCAKIGALAGNASGTVAATGNGNGGNENEPSVIKACSSSLKMSNSSHHIYQPQPKYSFHYNSSRSSPASTTGLDMEVRSVSPPAKLFHCAISPRRRPSNNASGAAGGATTISPSSASSSSGTTTTHNAANSAGNAANVTAVATQRLQRPHRPCLDFDKMQQVSL

SEQ ID NO: 5197 - DNA, 7402 bp, DROSOPHILA
gattcaccagaacggaccggatcacgcccttgccgcatccgatcatcaggccagtcggtccattcaggttgtccacccatccgggcaacggctcgtaggcagccggcgacactacagggcggaaggaatagatgtttactaaggggcgtctaatctgctcagcgcatgaaaccagtctacataccacgagcccaagatgatggtcaccgaagccgtattatgtgtgaatgtgtgaatgtgtgtatggtgtgggtgtgagtagtgtagttgtatgttttggactatgtttccgccaaggataagtgtgggaatttagaaggtgggaaatagtgcgcaatcggggaaaatatcattgtgctctttgtcctgtgtgatctgtgtgttcagtgggttttgtgggttttgtttgtgttgttcgtgttgtcgcgcgagtcctctggatcaacacttgtacacttgaagcacagacacataaactcagtacacagattttttattttgacacgaaacatagataatcacttaaagtagaaatgaaaaccagattcgaggccactcgtcgagtggctcgaagttatgcccccaagcgaacctaagcagagattgattgagaaaagcgcgcgaatggattgaaaatgtcccgggtggccgtcgtattagacgccgagcaggcgtgccaccaaaccgtaggtccagtagcacagggtgcccacgatgagcgtcttgcaagcgcggtccaggatgtacattctataaatgaaaggaagaccgtgcttagagatcgggctcagggcttatgtccctgtgggcgagtctcgcttacagcttcagctggagccgggcgcggggcaaactatcgggcgactccttcatcaggtactgtcgccctccctggacacacgactcaatgtacatggggacagtctcctcgggatccatgtccatattgaagcttttgggtgggatcaggtgtttcggattaagtgaactcagtacccttctacgctcgcgctacgtactttttcctgtccgactcgtttagcatggcccacagcgaggaataggcatccgacttaaagaaccaggcgcgcatcgtgaagaactgcagcacctcgaggcccacagagatgcggttctgaacgcggatcatgctaggaagagaggatcaagctctgtgtccacgatccacagcgtccgcaacttacaatcgcttctggccaagcagcagcaggataaagtcaatcaagtaggcgggcagccagtggaaaagcagcacgttgatgttgtggtgcagtttgttggtggtgatgcatccgtctggataccagagacccgcttccatcgggtatcggtaccctatttccttactcatttcgattacttcgccccactgcatcttccggtggtcagcgcacgtgatattgtataccggcacgtccttcggccgctccgtcatcttggcaaactggtaggggatcacgcacagaccgttgatggcgtagtccaccggaataacctcggacaggtggcgcgtgtcaatcagcatcgatcggatgacacctttgccggcgcccaccatcagcccggtgggtccgttaaggttgtccacccatcccgggacgggctcgtacgccgacggcgacactgggcgtgcgggagatgagttcaaattgggactcctcctcccagacgttcttgggatcaggctgatgcggatgcggatgcgagggcggaggcggaggcggaggcagaggaagggtaaagcggggcgtttctgtcttctttgttttcattgcatgctcattgaactttttggtcaatgacgacggcatttgtgtgcagtggttgaggtagtttattgttttaagcaatgctgtacaccatgtcatgtaatcgggctctttcttttcaagcgctgtgattgtggtggtgtctgttggcagtttgtggttgctcagacctgtattgctgctgctgtggttcatgtgcggtgtacgtattaagaagcgcggcagcagaagagtcaagcggggagcccgcgccggataggaggacatgagatcaaccagtggcgatgtcataaaacacacggaaagcgtaaacacttgacgaattagcggtaggtggcaagaagcggcttaagactagcaccaaagcaaccccatacccaacaagtacattcattatcatctgctaatgtctctgaagatctgctaaaatcggcgaactctgccgaactttgctcgctagttagcaaacgaggacgtaacccgtccatattgggtgtatccatgggctatttgcccagctaagcaggtcacccttgccttgaaccctcccggttacaaatgaaatattcatccactcctatcgatttcagcattcagctagcctatcattaaataagtttgaggggagctgccatcggaaatacctattcacaaacattttcctaaccttatctgggcagtataaaaataaaagattcgattaaagtatactttcatatcaaattaccactcggcttagtgtttgattttggagatttgcatcaatatggtcggactggtttctgcccaatagtttctccacctcccatgaataacgccctctcaggttggccaaaaactgctaatagaaaactttaattgactgccagcgcagacagatcgtacattccaggcagagacgtccaacaaagacgccaggtggccgaaaaagatataaataataagcaagccagggcaacatagacacagacacagacatagacatagacttaaggcggcagaagcggaggcgcattattaggtattagttagaggggaactggcgactggcaattgcagactcaatttcgcttccagcgcagctggctaccaagcaagcaagcaatcccgtccagagacatagagaattaacgactctgataaatcgattcgccgcaggccaaagcgacgcggataggcaacagcgaggtggcatccgtacttaaaaggtcacttaccgatgctgggacgtgcgatgatgacgggcatggactcgtagtggtcgcgcaccagaagctccgccagacgctttgagtaggtgtatgtgttggggtgcggctttagcaaatccggcgtaatggcgtccagggtcttcacgtccatccactcggccaggcgcataagatcctccggcttgtgtggaaactcgtacaccttctcatacatcacatcctggtcgcagttgcaaaaagccgtggacaagtggatgaaggcctccagctgcttcatttccttggccacgttgagcgctcgccgggtgcctagcaagttcatatcgatggcgtcccgaaggttgccctccagcttaagggtggccgccatgtggaaaacaatgttagtgttctcggtcacgtgcttcaagctctccccgctgagcccgagctctacaaatgaagggcaggaaatgcaaatcaatcgagattaaagtgcggaacttaagcgctacacttacggtcgaaggtgacgtcgccctggtagatggtaaccctcttgagcatctccgggcgctcgtccttgatgcgctggaagatgggcagcttgaacatctcctcgagacgcgtctcgggtgccttgccgcgcttcgggcggcagatgatgatcacctccttgagggagtggcaggagtagagcaacttctccagcagaaccttgcccatgaacccagacgctccagtgatgaatatcgtcttatccttatagtattcctgcactggcgatagatccaccgtcatctttctgcaagaaagaggtgtattagcacaccttctgggaatgggaatggaaatggagtgacgcaagaagcattccgggaatgcgaaaaccagtcaaaggaaaaactagtgattggcaagcgaatggcgcaagtggtgctggaaaaactggggctaattctggccacgcgtgcccctcttaccacatctggtgttcgacttggaagcagccaacacacagcagcaaccagtgagctgaacctgccgcaaacgggtttctagtggactttcggtttctatttggattttcgattgcgcctgtggattcgcatttctttgctggcttatgcaattaccaggggtagctggcatcgaacccgtctagcgtgccaggttgtctttatatctccccctccgacggggattgttgcaagtatttgtttctcaatctgcatgcggctgggttggattgcagccgcgttacagttggccacatctgctcggcaatctcgaattgtggattgtgcctgtgccttgcactttgggcatgtcatgacatttcacgcaagaccgagcggacgtacttgtttacctatttattgcagctcgattgtggtcacaccccgcccaagcgtatgcatgtccaatactgtatctccggcaacgagtgtttacctcctccagcagagcaaagctggaaaagatggaaatcgcaggaagcatgacgcagcagccccactgcaccttgaactacaagctgaaatctatgtggttggatctgtttctgggatcacttcacttagatcactgcggttctccttcatctcgcctcgcggcacctgcctttaggggcttgttactgagccccagttttcggctttatggccaattaaaacgcgtccgccgaatgtgtgaaaccaacgagagccacagcccgagaaacaacttcagagtgcttgcacttatgcaagcctcgaaatacacacattgagacaaatttcggtcgacccaagttgtcaaacccgaagttatgagcattacagacaaacgtatttattaaaactgaacctaaaacaacggagcttcattttgtaaacgaaagacttaggccacaaacttgatcccaattggggcggacgagcgagaaagagacgagtcagaaaacagtaactaatgcaaaatactgatagacaactaaaataacataacatatttgtgatttctaatgaaagaacaatgtgtgcatagttttaacaacggagcatcacgaagataatggaattcaagaaatttgtttgagattttaccatctatgtattttgttcataagcatattgatgtagcggaacgacttgcaaaaattacgtcgaaatcgataaattcaaatccgaaatgtttttataccattttaaacttaccctccccacaattggcaagagtgtttttaagctctttgatattacgcaaacgcaaattgaccctatttgaaacgtcgataaacgataaagagtcttttatcttatgatatttgtttctctccttcgtttgtcatatttttattagagccaaaaccggtatatcgtatatcgcttgtaagtagaaacattttggaatctttaattagcttgtatgtggttgtgtttatcgattgtgtgttcctcttgtttacatattgctgctttttagcctaagtaatattgtgtggttacaactcgattgcgacctcagaactggctaccgatgatggggccattaaaattttccaatgcaaagtgcagcctgcaatcggtctgcagttaataaacccattggagcgcagtgactgattgactgactgcgctgtaccaatgaccccttttctaaggcaacgtaagctcgaatacggagaagagctgcggatgtggctgtgtggaggatcattaagaaagccacttgaggctgagacattaaaccatgaaatcgaacaaattttaaatgtttggcaattcttccattccatttcccatttggcctttgctcacgtagtctcacgatatatttaaataaaaatccccctcaatatgtaaatggcttttgtattggatcagcattgatacaaatgagatgaaaccccgacacataaaattagcagcaagccgcaagccgaggttcaaatatatgcaaagggccacggaactcaaagcggaaaatgtggaatatcgaaatatcagactttgcgacaggtcatgacacgaccctgacatagacgggggttcacgagcgtatctcgaaatcaaactcagtagggcagaggggcctacctttgtaatcgtcaattaaacgcttcgctgggctggcaaatgcctcgaattgcagcctaatagccccgaaaaataagcagcattgtctttacaatgcggtaatcacaaggaggaatcgcagctcgagatgaggtcggcggagtgctagattgcaagccgaaactattttggggctactaagtgtttcaattaccttgagtattgcttggtattctcctcaattaaaacacttgcaatattggtatcaaactctcgcacacgcgaattaatgcgagactatatcggttcggagcgtactagttcggatcgaatcgagtagtggagggagcggtgtggacgctgcgaagctcgaaagaagactgaacgcgaccagcccggtggttgtcaatatgaatacgttgtggagtggactagcagtgctttgggatgttgcaaaccatgccgaaacgaagcaaaaccactggcctggctgcacgccgtactgtggtaggtattcggcaggtgttggtacagacataaatatctattagctcggctaatctaggcggaactggccgtctggcctaagaggcttaggctgggtccaagtgatgggccaagtagttgacttttgactacatgggcgggactgctgggtaccacaagatgcaagtcccaggcccaggaactctttggcatattttgggaaacattaactttgccatttggacgagttttattgactttgctgcttttcagcgaataagatatattggcatcattatggatgcaaaattagcaacggatcgaattggtttccattacacaatggtccagctttgcattcgcagccaccgcggcggtggtttccactttgtttgccttaattaggtggttatcaatctcctatgcaaatctattgttgcccaatgtcgcgaatattggtaattagtgcagtctttcctgtgatttttgcacacgctaaattatgcatgttaccaattttgttgcaaaaaaataatatgtttgtgtcttccagtcccaactgatggtttcaaaaaggccgccaaagttgaaaatatcgatatcatgcagatgatatatggatacttgtcctgctaaggtagtgctgtcagagttgcttaaactgattagttataataaaccatcagttaattccaggtatgaaaaaaagcgtgcattatgtaaattgcatagtgaaattaaatcgacaatttgtaatctcgctgcgaatttccaggaatctccagccctggccggcttatcgatacatctggcacaaaaggcgtgcagagttgttctccaaatttcctgtcgcgaattttattcatttataattaat

SEQ ID NO: 5198 - DNA, 1449 bp, DROSOPHILA
cagcgtccacaccgctccctccactactcgattcgatccgaactagtacgctccgaaccgatatagtctcgcattaattcgcgtgtgcgagagtttgataccaatattgcaagtgttttaattgaggagaataccaagcaatactcaagaaagatgacggtggatctatcgccagtgcaggaatactataaggataagacgatattcatcactggagcgtctgggttcatgggcaaggttctgctggagaagttgctctactcctgccactccctcaaggaggtgatcatcatctgccgcccgaagcgcggcaaggcacccgagacgcgtctcgaggagatgttcaagctgcccatcttccagcgcatcaaggacgagcgcccggagatgctcaagagggttaccatctaccagggcgacgtcaccttcgaccagctcgggctcagcggggagagcttgaagcacgtgaccgagaacactaacattgttttccacatggcggccacccttaagctggagggcaaccttcgggacgccatcgatatgaacttgctaggcacccggcgagcgctcaacgtggccaaggaaatgaagcagctggaggccttcatccacttgtccacggctttttgcaactgcgaccaggatgtgatgtatgagaaggtgtacgagtttccacacaagccggaggatcttatgcgcctggccgagtggatggacgtgaagaccctggacgccattacgccggatttgctaaagccgcaccccaacacatacacctactcaaagcgtctggcggagcttctggtgcgcgaccactacgagtccatgcccgtcatcatcgcacgtcccagcatcgtgtcgccgtcggcgtacgagcccgtcccgggatgggtggacaaccttaacggacccaccgggctgatggtgggcgccggcaaaggtgtcatccgatcgatgctgattgacacgcgccacctgtccgaggttattccggtggactacgccatcaacggtctgtgcgtgatcccctaccagtttgccaagatgacggagcggccgaaggacgtgccggtatacaatatcacgtgcgctgaccaccggaagatgcagtggggcgaagtaatcgaaatgagtaaggaaatagggtaccgatacccgatggaagcgggtctctggtatccagacggatgcatcaccaccaacaaactgcaccacaacatcaacgtgctgcttttccactggctgcccgcctacttgattgactttatcctgctgctgcttggccagaagcgattcatgatccgcgttcagaaccgcatctctgtgggcctcgaggtgctgcagttcttcacgatgcgcgcctggttctttaagtcggatgcctattcctcgctgtgggccatgctaaacgagtcggacaggaaaaagtacgtagcgcgagcgtag

SEQ ID NO: 5199 - protein, 431 aa, DROSOPHILA
MTVDLSPVQEYYKDKTIFITGASGFMGKVLLEKLLYSCHSLKEVIIICRPKRGKAPETRLEEMFKLPIFQRIKDERPEMLKRVTIYQGDVTFDQLGLSGESLKHVTENTNIVFHMAATLKLEGNLRDAIDMNLLGTRRALNVAKEMKQLEAFIHLSTAFCNCDQDVMYEKVYEFPHKPEDLMRLAEWMDVKTLDAITPDLLKPHPNTYTYSKRLAELLVRDHYESMPVIIARPSIVSPSAYEPVPGWVDNLNGPTGLMVGAGKGVIRSMLIDTRHLSEVIPVDYAINGLCVIPYQFAKMTERPKDVPVYNITCADHRKMQWGEVIEMSKEIGYRYPMEAGLWYPDGCITTNKLHHNINVLLFHWLPAYLIDFILLLLGQKRFMIRVQNRISVGLEVLQFFTMRAWFFKSDAYSSLWAMLNESDRKKYVARA

SEQ ID NO: 5200 - DNA, 3753 bp, DROSOPHILA
aggagttccgtgccagcctggccaagctgggcgatgtctatgtcaacgacgccttcggcactgcccatcgcgcccacagttccatgatgggcgatggcttcgagcagcgcgcagctggtctgttgctgaacaaggagctgaagtacttctcgcaggccctggacaagccaccaaatcccttcctggcaattctcggtggcgccaaggtggccgacaagatccagctgattgagaaccttctggacaaggtcaacgagatgatcatcggtggcggcatggccttcaccttcctgaaggtcctcaacaacatgaagatcggcggttccctgttcgacgaggagggctccaagatcgtcgagaaactggtggagaaggccaagaagaataacgtgcagttgcatctgccagtggactttgtctgcggcgacaagttcgccgagaacgctgccgtcagcgaggccaccgtggaggccggaattcccgatggacacatgggtctggatgtgggtcccaagacccgtgagctcttcgcggcacccatcgcacgcgccaagctcatcgtgtggaacgggtaggtgtcacactgaagctacttctccaaatgtcctataatggttttcccattttagaccccccggtgtctttgagttccccaacttcgccaacggcaccaagtccatcatggacggcgtggtggccgccaccaagaacggcaccgtctccatcatcggcggcggcgacactgcctcttgctgcgccaagtggaacacggaggcactcgtctcgcacgtctccaccggaggcggcgcttcgctggagctcctggagggcaagacactgccaggcgtggctgcattgaccagcgcctaagcgtacatatatacggtatattaatgttaatcgcatcgtttaccttgtaagcacaaaccacgacgttaaaaagtgttgaatctatttgttgcggaaccatataatgcatacgaaataaaggaatcctagtttatttgcgggcaaagttgctgtccattgaggaggcggtgcgctgtatgttgttgagattggcccggatgcgatcgccaattgagttatggttggcaatggccttcttcacctccttgttaatgaactccttgtcgaagtctcgttcacgattttgggcctcctcgcgcgcgtatgcttctcggtgcttgcgaaccacctggctgcgatccgcttctctccaagtggcgttgtccatcatttcgcgcaggcgagcttctcggtcggcttcgcttaactttggcttgccggtgggacggctgggaggcggtctttcggcaatccttcgcttgtcatctcctttggaacttcggctcctgctgcgttttgatctggaacgctcttcaggtgtcctactcctgcgtttctcgcgctgctttgaagtgtccttgctttgacgtctggcttttctgtcctctgggctcctggttcttctctgtcttctcgctaagggacttctgctcctgctcctgcgcctttcccttctctcttctggactcctttgcctttgcctttgttccggacttctactctgtcgcttttttctatcccgggggcttctactcctgcgtctttctcgctgatttctgtcctctgagctgtggctccttttgtgctttctccttggctcttcctcttcgtcactactttcgtcactgctatcgctgcttttcttcttcttggatttcttgctctttttcttcttggtggccatgtctaattgatttgaaatggtgcggtacttggcgtccagcagcttgtccagtttaaggtcaccttggtctcccttgagtttgctcacttggcgggctaattttctgtccaagtcatcgtcgctatcattgctctcgctgtcactactttcctcattgctggatcgtcggttcttcttcttctttttggatttcttagactttttgttcttcttgttcttcttctttccctctgcggccttttgttcctgttcagtcttgagaatgcgatggatttccttcagcttgacggggttctcaagcagctttcgacgggattccatttcgcgctgcttgatgagcatcaggggatcctcgagggtcttgcgctgtatgtccacctgttcgttggactgcacattgcggtaggtccggatggagaagggcacacagtcgtgctccacatggttgatcgtttgcttgagacccactgtgttctgctcctggcggctttcctccgcttgcagcgtctcaaaggacttgtcgatcttacggcccaggaggtactcctcgcggttgatcagctctgtgctgtctggagcaagataaatatgtatggataatgagttttataagagtttcacatgtatgactcacttttgtacatccactccagcttggcctcgccggcggctccgccattattgctcagcactccggaactttcgcccaatcgccttagttcctctctgtcccgctcctcgttgatctccttgcgcagatcctgcagcttgcgctcctccatcttcgcttgctcctccgccttccaaacgcgctcctggtttttcatcgtgtgcggatgccatgatttcttcagattctgcgggaaaaatcaatggtaattgacggataatcagttgggagacattacttactagatctccgccacccatcttgggtttgatttgcgttttaacagcaaaacaaacaaattacaaacaattccagattttccctccttttctgttgttttcaacaaaatcatatgttcgcccgggctgccagatcgtggtgaagtaatttaacttggtgttgccatagggttacatttttcttttactttttcgaaaattattgaaaatagttaatttagttacttattttcataattacttcctcatcgtgcattgtattttcagtcaaaaacaggtaataaatttatttaatatgcttccaattcggcagagtttataccaaagagctcaaactcgatttacaaaattaagatttccaagattttttagcaaagacgattgcaatggaaagcaagtaaagaagttgagcttaaaaaatgtagatgtggctgggaaaagggtttttatgaggtgagtatccttgccagatatgttttagtgtgtgatttataaatttatttttagagtggactttaatgtacccatgaaagatggcaaaataaccaacaaccaacgaattgtttccgcacttcccagtattaaatatgccttggacaagaaatgtaagtccttggtgagttgatatatcttccttcaattcctaaaaagtatagaacgaataacttaattttttgcctaggttttggcatcccacttggggcgtccggatggcaaaaagaacaaaaagtttagcctggaacccgtggccaaggagctggagagtgtgctgggccagccggttcaattcctggacgactgcgtgggtgatagcaccctgagagctttgaaggatccctccgacggcactgtgttcctgttggagaatcttcgtttctatgccgaggagacgggcagcagcaaggacgataacaagaagaaggtcaaagcagatcccgcgaaggtgaaggaattccgagccaagttggcgcagctgggcgagatctatgtgaacgatgcctttggaacagcacatcgtccgcatagttccatgatgggcgatggctacaaggtgcgagcggctggtttcctgctggacaaggaactggagt

SEQ ID NO: 5201 - DNA, 1636 bp, DROSOPHILA
aaaaggagggaaaatctggaattgtttgtaatttgtttgttttgctgttaaaacgcaaatcaaacccaagatgggtggcggagatctaaatctgaagaaatcatggcatccgcacacgatgaaaaaccaggagcgcgtttggaaggcggaggagcaagcgaagatggaggagcgcaagctgcaggatctgcgcaaggagatcaacgaggagcgggacagagaggaactaaggcgattgggcgaaagttccggagtgctgagcaataatggcggagccgccggcgaggccaagctggagtggatgtacaaaaacagcacagagctgatcaaccgcgaggagtacctcctgggccgtaagatcgacaagtcctttgagacgctgcaagcggaggaaagccgccaggagcagaacacagtgggtctcaagcaaacgatcaaccatgtggagcacgactgtgtgcccttctccatccggacctaccgcaatgtgcagtccaacgaacaggtggacatacagcgcaagaccctcgaggatcccctgatgctcatcaagcagcgcgaaatggaatcccgtcgaaagctgcttgagaaccccgtcaagctgaaggaaatccatcgcattctcaagactgaacaggaacaaaaggccgcagagggaaagaagaagaacaagaagaacaaaaagtctaagaaatccaaaaagaagaagaagaaccgacgatccagcaatgaggaaagtagtgacagcgagagcaatgatagcgacgatgacttggacagaaaattagcccgccaagtgagcaaactcaagggagaccaaggtgaccttaaactggacaagctgctggacgccaagtaccgcaccatttcaaatcaattagacatggccaccaagaagaaaaagagcaagaaatccaagaagaagaaaagcagcgatagcagtgacgaaagtagtgacgaagaggaagagccaaggagaaagcacaaaaggagccacagctcagaggacagaaatcagcgagaaagacgcaggagtagaagcccccgggatagaaaaaagcgacagagtagaagtccggaacaaaggcaaaggcaaaggagtccagaagagagaagggaaaggcgcaggagcaggagcagaagtcccttagcgagaagacagagaagaaccaggagcccagaggacagaaaagccagacgtcaaagcaaggacacttcaaagcagcgcgagaaacgcaggagtaggacacctgaagagcgttccagatcaaaacgcagcaggagccgaagttccaaaggagatgacaagcgaaggattgccgaaagaccgcctcccagccgtcccaccggcaagccaaagttaagcgaagccgaccgagaagctcgcctgcgcgaaatgatggacaacgccacttggagagaagcggatcgcagccaggtggttcgcaagcaccgagaagcatacgcgcgcgaggaggcccaaaatcgtgaacgagacttcgacaaggagttcattaacaaggaggtgaagaaggccattgccaaccataactcaattggcgatcgcatccgggccaatctcaacaacatacagcgcaccgcctcctcaatggacagcaactttgcccgcaaataa

SEQ ID NO: 5202 - protein, 521 aa, DROSOPHILA
MGGGDLNLKKSWHPHTMKNQERVWKAEEQAKMEERKLQDLRKEINEERDREELRRLGESSGVLSNNGGAAGEAKLEWMYKNSTELINREEYLLGRKIDKSFETLQAEESRQEQNTVGLKQTINHVEHDCVPFSIRTYRNVQSNEQVDIQRKTLEDPLMLIKQREMESRRKLLENPVKLKEIHRILKTEQEQKAAEGKKKNKKNKKSKKSKKKKKNRRSSNEESSDSESNDSDDDLDRKLARQVSKLKGDQGDLKLDKLLDAKYRTISNQLDMATKKKKSKKSKKKKSSDSSDESSDEEEEPRRKHKRSHSSEDRNQRERRRSRSPRDRKKRQSRSPEQRQRQRSPEERRERRRSRSRSPLARRQRRTRSPEDRKARRQSKDTSKQREKRRSRTPEERSRSKRSRSRSSKGDDKRRIAERPPPSRPTGKPKLSEADREARLREMMDNATWREADRSQVVRKHREAYAREEAQNRERDFDKEFINKEVKKAIANHNSIGDRIRANLNNIQRTASSMDSNFARK

SEQ ID NO: 5203 - DNA, 4546 bp, DROSOPHILA
gtaaaaataccagtcaagtctgcgggttctgcacttacttcaaagatcgtgttgaaatcgttttaaaataataataatggtttcatttatttgtatcatttcaagcgaccaaaagtggcatttaatacaaatttcgcgcctatgcacgccatctattggtgatttgccggaacccgacgcttgtgtcggggctgccacttgaatcaaacccatctatgtttcttccatcactaccacctgcacttgtatatggttagttgattaatagcacgtcagaaactaatttacctgttgccgctcgtaccagatccagatttgtactatcccgagaagttaaaagctctaggcaaattaacaattagccgcgacacaaaccccgtttcgcagagcacctgataccctttatcgttatcgattggtacagccgaatcacgcctcctgataacgattaaacaaaaagtcgaaatgtagtaaaattcgcggaaagtaaataaattgttatagccaaggtgaaataacgagcggccagctagtggcgatactgatactgttgcgaacgttgggcagccaccgacggtgccggctggtcaggttgttatcgggtaattggcagctcctttggaaaatcctcaagttcagctgcttctgcacacactgaccttcattatacatacataccgtatatacgagctgtttgtgtgcgtgtgtgtgtgtgcgcttgcaagtgtgtgggtgcactgaaaaaaggttggaaaggatacaagccagaaatcagtgaaaaccgggaatattgcatcccggagacggcggaaaagccgaaaaagcccattaaaagtcaaggacgacatgctgccctccgcccacagaagtggatgtgggtggctcacccattagaactccaccaaaacgcaagcgcaggagtttttccttcaagaagtcaaggcttcttcgttttcggggtcatggtcacagcgcatagtatataggataaagcaacaccatgtccagcgagtcctccaccgaaggcgacagcgatctatacgatcctttggccgaggagctgcacaacgtccagttggtcaaacatgtgacccgcgagaatattgatgccctgaatgccaagtttgccaacctgcaggagccaccagccatgtacttaataggtgagtcgtcgaaagccgagctgaacactacctgggttcttggaaatcccacgcccacctccaagctatttataaaatacccgacatatgtgtatgtatgtatctcacgactttggttcttgcccacagaataccaggagttgacctccaagctccacgaactggaggccaaggagcaggaactaatggagcgactgaactcgcaggaccagcaggaggactcctccttggtcgagcggttcaaggagcagccccactatcaaaatcaaactcaaatcctgcagcaacaacggcaattggcgcgagtgcaccacggcaacgatctaaccgatagcttgggctctcagccgggcagccaatgtggaactttgacccgtcagcccaagatccttttgcgagcccacctgcccaatcaacagcgcacttcagtggaggtaatttcgggagtacgactatgtgatgccctcatgaaggccctgaaactccggcaactaacgccggatatgtgcgaagtaagcacaactcattccggaagacatatcataccctggcacacggatatcggcactctgcatgtggaggagatctttgtcaggctgctggataagtttcccattaggacacacatcaagcaccagatcatacggaagaccttcttctcgttggtattctgcgagggctgtcgaaggcttctgttcaccgggttctactgtagccagtgtaattttcgattccatcagaggtgtgccaatagagtgccgatgctgtgccagccctttcccatggatagctactatcagctactgctggccgagaatccggataatggcgttggtttccccggcagaggcactgctgtccgcttcaatatgagcagccggagtcgcagtcgtcgttgcagcagcagtggcagcagcagcagctcgaagccaccatcttcatcctccggcaatcatcgacagggtcgtccgccgaggatcagccaagacgatcgatccaattccgcgccaaatgtgtgcatcaacaacattcgatcggtcacaagcgaagtgcagcgcagtttgataatgcaggccagacctcctttgccggtgagtctaaatatttgctgttcatataattttgtggcttaacatatgtatggatttcttacagcatccgtgcacagatcactccaactccacgcaagcgtcgcccacgagcaccttgaaacacaatcgtcccagggccaggtccgccgatgagagcaataaaaatctgcttttaagagacgccaaaagttccgaggaaaactgggtaagctaagattacttgtgcggtcactcacgtatttaaaataatcaaaaaatgttatattcctgcagaatattctggcggaggagattttaattgggccgcgcatcggatcgggttcctttggaaccgtttatcgcgcccattggcacggtcccgtggccgtaaagacactcaacgtgaagacaccgagtcccgcccagttgcaggcgtttaagaacgaggtggccatgctgaaaaagacgcgccactgcaatatcctcctcttcatgggctgtgtatccaaaccatctctagcgattgtgacccagtggtgcgagggcagcagtctctacaagcacgtccatgtcagcgaaaccaagtttaaattgaacacgctcatcgatatcggacgtcaggtggcccagggcatggattacctgcatgccaagaatatcattcataggtgggtttccgtatggtcatcagttgtaatcggttaataattatattttcatttctctcttttagagacctcaagtcaaacaacatctttttgcacgaggatctttccgtgaagataggcgacttcggattggccactgcgaaaactcgatggtcgggtgaaaagcaagccaatcaacccacgggcagtattttatggatggctccagaggtgattcgcatgcaggagctaaacccctactccttccagtcggacgtttatgcctttggtatcgtgatgtacgaactgttggcggagtgcttgccctacggtcatattagcaacaaggatcagatcctgtttatggtggggcgaggacttctgcgtccggacatgagtcaagtgcgctcggatgcgccgcaggcattgaagcgcttggccgaggattgcattaagtatacccccaaggatcgaccgctctttaggccgctgctcaatatgctggagaacatgctgcgcactttgcccaaaattcatcgcagtgccagtgaaccaaacttgacgcaatcgcagctgcagaacgatgagtttctgtatctgcccagcccgaaaacgccggtgaacttcaacaactttcagttcttcggcagcgctgggaatatctagacagcgacctgtacctgtacttacatatatcctgcgtgatcaacgtgatcctacatctatatactttttgttcttgtccctctgtacataagcgattcgcgaaggggacggctttggttgtccaccaaagtgaaagagagagagagagagagaaagagagagagatgggttgcctgccgacccgggagcgaaacttgcttctttccttggaactgacaaagtgcatttctgttaccacacacaaaacgactacaaactgtaaactaaactgcaacgcccatgtgtacataactgcatcataacttatatacgttaggcaagactactgaaactaaactaaactaaactaaactagctgatcgcaattacattatacacattatacttatactacaagagatggtgttgtttctggagtcgagcacgatgaagaacatttaattcaggtattatttgttattcattgtcattaactacttcttggtttatgtttacacacaaggttctaggaatttttaagtatggaaccacccagccgtatattcaattagaaacaccactcattcagttggataaactttattcatttagcaacagaaaggcgtgatccggaggatcctaaacatatctgctggcgatggccagaaccttggtgtaatcggctcctttggccagcgtcttctccttgaggatggttcgcaggatcgtgggaatgggcacatggatgcgagtgcccagcggactgccattgtcgtcgatgagcaccaggttgttgctatcgaatttcggctgtttgggcttctggttctgcttgagtcccacgagaatgcccttcttcatctgtcccttgatggccaccagcaccttatcgccaatgaagccgactccgcgtttgttgtagacatggatgcacctcggtggtcgcccctcggccatcgctttctttcccaaatcgctgttgtccaccacccgtaaccgggccaatttccggatttcgcag

SEQ ID NO: 5204 - DNA, 2220 bp, DROSOPHILA
atgtccagcgagtcctccaccgaaggcgacagcgatctatacgatcctttggccgaggagctgcacaacgtccagttggtcaaacatgtgacccgcgagaatattgatgccctgaatgccaagtttgccaacctgcaggagccaccagccatgtacttaatagaataccaggagttgacctccaagctccacgaactggaggccaaggagcaggaactaatggagcgactgaactcgcaggaccagcaggaggactcctccttggtcgagcggttcaaggagcagccccactatcaaaatcaaactcaaatcctgcagcaacaacggcaattggcgcgagtgcaccacggcaacgatctaaccgatagcttgggctctcagccgggcagccaatgtggaactttgacccgtcagcccaagatccttttgcgagcccacctgcccaatcaacagcgcacttcagtggaggtaatttcgggagtacgactatgtgatgccctcatgaaggccctgaaactccggcaactaacgccggatatgtgcgaagtaagcacaactcattccggaagacatatcataccctggcacacggatatcggcactctgcatgtggaggagatctttgtcaggctgctggataagtttcccattaggacacacatcaagcaccagatcatacggaagaccttcttctcgttggtattctgcgagggctgtcgaaggcttctgttcaccgggttctactgtagccagtgtaattttcgattccatcagaggtgtgccaatagagtgccgatgctgtgccagccctttcccatggatagctactatcagctactgctggccgagaatccggataatggcgttggtttccccggcagaggcactgctgtccgcttcaatatgagcagccggagtcgcagtcgtcgttgcagcagcagtggcagcagcagcagctcgaagccaccatcttcatcctccggcaatcatcgacagggtcgtccgccgaggatcagccaagacgatcgatccaattccgcgccaaatgtgtgcatcaacaacattcgatcggtcacaagcgaagtgcagcgcagtttgataatgcaggccagacctcctttgccgcatccgtgcacagatcactccaactccacgcaagcgtcgcccacgagcaccttgaaacacaatcgtcccagggccaggtccgccgatgagagcaataaaaatctgcttttaagagacgccaaaagttccgaggaaaactggaatattctggcggaggagattttaattgggccgcgcatcggatcgggttcctttggaaccgtttatcgcgcccattggcacggtcccgtggccgtaaagacactcaacgtgaagacaccgagtcccgcccagttgcaggcgtttaagaacgaggtggccatgctgaaaaagacgcgccactgcaatatcctcctcttcatgggctgtgtatccaaaccatctctagcgattgtgacccagtggtgcgagggcagcagtctctacaagcacgtccatgtcagcgaaaccaagtttaaattgaacacgctcatcgatatcggacgtcaggtggcccagggcatggattacctgcatgccaagaatatcattcatagagacctcaagtcaaacaacatctttttgcacgaggatctttccgtgaagataggcgacttcggattggccactgcgaaaactcgatggtcgggtgaaaagcaagccaatcaacccacgggcagtattttatggatggctccagaggtgattcgcatgcaggagctaaacccctactccttccagtcggacgtttatgcctttggtatcgtgatgtacgaactgttggcggagtgcttgccctacggtcatattagcaacaaggatcagatcctgtttatggtggggcgaggacttctgcgtccggacatgagtcaagtgcgctcggatgcgccgcaggcattgaagcgcttggccgaggattgcattaagtatacccccaaggatcgaccgctctttaggccgctgctcaatatgctggagaacatgctgcgcactttgcccaaaattcatcgcagtgccagtgaaccaaacttgacgcaatcgcagctgcagaacgatgagtttctgtatctgcccagcccgaaaacgccggtgaacttcaacaactttcagttcttcggcagcgctgggaatatctag

SEQ ID NO: 5205 - protein, 739 aa, DROSOPHILA
MSSESSTEGDSDLYDPLAEELHNVQLVKHVTRENIDALNAKFANLQEPPAMYLIEYQELTSKLHELEAKEQELMERLNSQDQQEDSSLVERFKEQPHYQNQTQILQQQRQLARVHHGNDLTDSLGSQPGSQCGTLTRQPKILLRAHLPNQQRTSVEVISGVRLCDALMKALKLRQLTPDMCEVSTTHSGRHIIPWHTDIGTLHVEEIFVRLLDKFPIRTHIKHQIIRKTFFSLVFCEGCRRLLFTGFYCSQCNFRFHQRCANRVPMLCQPFPMDSYYQLLLAENPDNGVGFPGRGTAVRFNMSSRSRSRRCSSSGSSSSSKPPSSSSGNHRQGRPPRISQDDRSNSAPNVCINNIRSVTSEVQRSLIMQARPPLPHPCTDHSNSTQASPTSTLKHNRPRARSADESNKNLLLRDAKSSEENWNILAEEILIGPRIGSGSFGTVYRAHWHGPVAVKTLNVKTPSPAQLQAFKNEVAMLKKTRHCNILLFMGCVSKPSLAIVTQWCEGSSLYKHVHVSETKFKLNTLIDIGRQVAQGMDYLHAKNIIHRDLKSNNIFLHEDLSVKIGDFGLATAKTRWSGEKQANQPTGSILWMAPEVIRMQELNPYSFQSDVYAFGIVMYELLAECLPYGHISNKDQILFMVGRGLLRPDMSQVRSDAPQALKRLAEDCIKYTPKDRPLFRPLLNMLENMLRTLPKIHRSASEPNLTQSQLQNDEFLYLPSPKTPVNFNNFQFFGSAGNI

SEQ ID NO: 5206 - DNA, 2805 bp, DROSOPHILA
caaaccggttagctccttgctggccgagatggattccgattccatgctggaggtcaccgcctcagctggttccacctgttgttgctcgaccacgcgcacatgttgttgttgcttctgctgcgactgttgttgttgctgtggcgctgacatgttgctgctgaaaaatcggtacaatatgctggttgaaggcaactgattgcaggcagtggcgcagttgacgccgatctgatttacctgctgatttacgcaacggttttatacaagaaaaatcctcgcacgctcgcacgcgcagctcagtttttcccgaatcggtcgagatcaagcccaatatcgatcggtcgctgatatcgatagtgcggtgtgctgatggatcgatagcattctatagtctgtattttcaaattggaattttacctaatttgtaatttagtacacaaaacaatatacacattataatttgattttattcgtttatataaaatatacgcaatcaaactaaataataagctttaaattgaattaaagttattttgcgcaattaaaattaattaaaaattgtatgtgtatgttcgtatatataatatttaacagttttttttttaacacgtaggcaattaaaaccagaaatataaaaaatgtttcgtgaaataaataaataataattaactacatatgtataacaattgaaaataagttcactgcaatccctcaataaaaacgccactaagagataaatatattagaaaaaattcacagtaggaacatttttacaaaaacggtttcttttatacatttgataagtatcaaactgaaatgcgattggttcaatttgttggtgtcattatgagcagtaggaatttaatgaaaacgtttagcttaagtacttgattcgatattcgaattccgctttgcacatcgcgcaaattgagagataagataactgatggaataactatttcaaagccgtgcgaagagtagtagtgcgtccttcagcaaagcctccttttccagactgacctacgccatcgctatttcgacgagcagagcttctccgtaaagaacggagcctccttcagcttggccttgtccgcctcgtcgaggaacgccttggcctgctcgatgtccccgcggatggcggcaatcagtgactccagggagtcgaaactgcgctccggtcgcaggtagcctacaatgcatatcttgagtgtctggccgtaaaggtcacagttaaagtcgtgtagcatgtgcgtctccacgctcttctccttgttgttgtagaagggattccagccgatgctgaggaccatcttgtgcacgggtccattatccacgtttgcccaaccgtagtacgcgccagtgggcagggattccggcagcgatttcaccacctccagcggaaagttagctaacaagtggtttggttatcaattagaaatgaccttcgcaattcgcctaacgtcgccaccaacctgttgggatgcccagctctttggagccgcgtccgaagccccgaacaatctcgcccccagcgaacagaggcagttggctcagcatttcccagatttccttgcaatctgacccagatctgctgtgctggcgcttgaaatgaatatcaggggccaatgggcggttgatttgcggtattctgtgcaaccgcaaagcgctgcgggccaatttatcgagtctggcaaggagtcaagcggggttttctacagagtacgtatgttgtgattgccgcgtagccactcacataactattcctcgttccattgatcggcataatattcataaacacacagacaaattttccgcattcataaagcgaatcagctgttgccttcgggctgccaacctgtttcagttatatagtactgtcaattagcgaattttttttactagatatttaaattgtaagaaactgaaatgtatatattacgcacagtatggttttaatcaataaagcttgggtttatattgtaatgcagaattaatgtaattggattgattttaaaattttagcggcgggttaaacatattttcatcaaaagcttttatttgctgtgtagagcttctattgaaaatattgaatttttatttcataaatgaatcatcagatgttttgtgtaaatactagtactctattcccaaaataaatagaacaccaaatcgtaattaaattacaatgaaagccagcttgcctgaaaaatatttgtgttattaatacaaatatacatacatatatacatatatatacatatatacatattttttcatatcatatcaatctcaattttttttattctgaataattgttttccatgtgtacatgtattattcagcactaaaaaaaatgtacaaatgatcagtgcgacggttggtttctttgcagttccagttatcatccaattctccaaaaagtgaacacttacacttgtgtagaatgagaaatcaattgaactctttaaaaaatgtgccgtttattcatataatttaccagcaataactgtaaaaccagcgaaacgggattattagtttgcaaaacaaggccaatgtcaatggtcaattcataagatgtcgtaaactgttcttttattaaaaaacattgcatttggttgttgatttagatgatgcacagcgcgaagaacgtgtgccggacttgtatggacgagaccggcaccctggtagatatattcgccaatgtaagggatcctgtgctcgacgaaccggagatgagcctctcgcacatcctggccaggtgtaccgaacgtccagtgaaacgcggcgacctgctgccgcagttcatat

SEQ ID NO: 5207 - DNA, 741 bp, DROSOPHILA
atttgtctgtgtgtttatgaatattatgccgatcaatggaacgaggaatagttatgtgagtggctacgcggcaatcacaacatacgtactctgtagaaaaccccgcttgactccttgccagactcgataaattggcccgcagcgctttgcggttgcacagaataccgcaaatcaaccgcccattggcccctgatattcatttcaagcgccagcacagcagatctgggtcagattgcaaggaaatctgggaaatgctgagccaactgcctctgttcgctgggggcgagattgttcggggcttcggacgcggctccaaagagctgggcatcccaacagctaactttccgctggaggtggtgaaatcgctgccggaatccctgcccactggcgcgtactacggttgggcaaacgtggataatggacccgtgcacaagatggtcctcagcatcggctggaatcccttctacaacaacaaggagaagagcgtggagacgcacatgctacacgactttaactgtgacctttacggccagacactcaagatatgcattgtaggctacctgcgaccggagcgcagtttcgactccctggagtcactgattgccgccatccgcggggacatcgagcaggccaaggcgttcctcgacgaggcggacaaggccaagctgaaggaggctccgttctttacggagaagctctgctcgtcgaaatagcgatggcgtaggtcagtctggaaaagga

SEQ ID NO: 5208 - protein, 153 aa, DROSOPHILA
MLSQLPLFAGGEIVRGFGRGSKELGIPTANFPLEVVKSLPESLPTGAYYGWANVDNGPVHKMVLSIGWNPFYNNKEKSVETHMLHDFNCDLYGQTLKICIVGYLRPERSFDSLESLIAAIRGDIEQAKAFLDEADKAKLKEAPFFTEKLCSSK

SEQ ID NO: 5209 - DNA, 5320 bp, DROSOPHILA
acggcactgtgttcctgttggagaatcttcgtttctatgccgaggagacgggcagcagcaaggacgataacaagaagaaggtcaaagcagatcccgcgaaggtgaaggaattccgagccaagttggcgcagctgggcgagatctatgtgaacgatgcctttggaacagcacatcgtccgcatagttccatgatgggcgatggctacaaggtgcgagcggctggtttcctgctggacaaggaactggagtactttgccaaggttctccacgatccggccaagccctttttggccattctgggtggcgccaagatagccgataaaattccactgataacgaacctcctgaacaatgtaacggccatgatcatatccggtggcatggccttcacctttctcaaagtgctcaatggcatggagattggaaagtccctcttcgacgagaagggatccgagttggtcaacgacatagtctgcaaggcgaaggagaaggacgtgaatatactatttccgattgactttgtcatagccaataagatcgacaaggagccggataaagtggaacatgtggatgccacacagggcataccggaggacatgatgggtctggaccacggccaggcatccagtcagatgtttgctggcgctatttgtgcatccaaaaccatcgtctggaacggaccgccaggcttgttcgaaaacgagctattctccaaaggcaccgagtccatgctggaggcagtaatcggggccactaaccgaggagccaccacaatcgttggtggtggggatacggccaccgcttgcttgaagttcggaggcgccgacaaggtctcgcatgtgtccaccggtggaggagcttccctggagttgctggagggtaaggttctgcctggagtggctgctctttcggatgcctaaacgcactgctttacaatggttattccacttatatgtacatgtatcttaaattcaatttggacaatttaaacaatcagtctctcaaaatacaaagttatttttattgtggaataacattagtcggttaaaacgtgataaaagggcgggcctcgatctcgtgcagcactactttccaactatctttttacctccatagatttggtctaaacttaaaatttatcatgttcctctttctcgcaacaaaaacttttgaaatagtaactaataaccgcgttcaactaaacaaaacatacattttttcgcttaacagccgcacgagaactttctgacccagccctgaagggtaatacaaatggaataacatctcttggattaatcaaagctaatcagttccgccgtagccggctcctcagctttaacgggcgcgggtcccggttcgttttgcggcggagcaggtgcagcagccaccgcttggacttgattgttggcgatttcggtaactggaggtgcctgtgctgctggaggagcctggtgctgctgcagcattacgtgacccatttggggttgtggctgaggttgctggacaggaatctgctgtggctgctgaccaggaatctgttgaggctgctgaccaggaatctgttgaggctgctgaccaggaatctgttgaggctgctgaccaggaatctgttgaggctgcggttggaatggtatttgaggaggctgggcgatcgaatgctgctgcggcagctggaggatagcagcaggattgttggcaaactgattttcgggcatgggcggcatcatctggggatttccaggtggcgcgggctgttgcattaatccgccgggctggagattcggcggcatcggctgctgtattgccggattgtacatgcccggcggaatggcctgaaactggccatgtccgttgggagccggtgcaggaccctgaggcaaatagccgggcacaccggcagcatagggattataaacgttgttgagctgatgcgagggcgaaccatgttgtggcaccgccgatggtggcatgtaggggaaaggtggagccgactggcccatcaaatactgcgccttctgctgctcctggcgcagctgcatctcgcgctcctgctcctggatgcgctgcaatgctagctgtcgttgatactgcagatactcctgcttcttcttgcgcattatgtccagtttctgggccatctgcatctgtcgctgacgttcctgctcctcggcgatcctgcgcagcttctccacatgctcctgacgcagctgatccagcgcagcacgcgagtccttgatctgggttagcttgtcctgcagctgctcgtaccacatgcgcttgtcgtccatctccttgatgtacgacaactgctgcgagtgcaacgaggtcagggtcatgaagagggtctgcacagaggagtcgttggagatgctgcgaccgcggctcgagttcgacttcatgcggttaacaaagatctccacctgcgtgcgcatattggcggcaaactcatcgatctgcacttcatccgcactcttgacctgcaggggcatgatctgctggggctgcggcgttggtggcatggggctcggtgccgagggacttgccatggatgacgattcgctgatcttgcgctgctcccagtagctgcggttcaagtacttggccagctccggattggtagcctcctccggctgctggtgatactccttgggttctggcggtgcctccggactgggagacctttgctgcatgcgataggcagcgggtggcagggattgcagcttgggcttctgctgctccgcttccgattgactgagggccagcgccagctgcagttcctcctcctccttgagttcctgctcggtcttgcgagctggtgtctagaaggaatatggttttgccattaatcggctgttctgtttcgattagattagctgttttcccagagtgactcacctgcacctgctgcgccaaagtgctgttcagatactccgccggtagctcgctgtccgccggacgtggtccggacttagcgcctccactgccgctcgtcggacgctggagggcagcgaagcagccgtcgcacacacgcacctccttttcgatgccgtacttgggcagcggacactgcttggccgtgcattggccacagaagacctggccgcagttccggcagtggtgcttccggttggtgaaggtgaactccacgcgacagcgatggcataccctgccatctgcccagttgggcgccgtgtccgccgtgaacatggcatctgcctcccgaagttcggggaaagtgtgccccttcgccttcaggatggtcatggtgtcctgcagagaatgggattgttagtaaagttagctgtagttatgtggcgtgagtctacaagggattcctcctcaatgctaagttcctcctccgagctcatttctattcaactgatgacatttcactgggttttgctacgcagcaaacagttgtttcctactaattaaattaatggcaaagcgcagggccggattttgaactaagtgtgcgctgggctgatgcaaagtgttatattcaatgcaaaagtatagagaaacccacaatctttttcaaagtgcatcaatcgcatggtaaagatccctttagatggagctgccaatcctaccttgatggcctggtacttgtccgaggagcggaaggcgtacgcccaggtctgcaccagctccagcatcttctggcgcacgttctcgtggggcgtcgactcgaggaaactgctgaacatctcgcagttctccttggtgaacacctcctcgtgaacgggtgcgccgcagttcttgacgatgctctcgaggaccaggagggaatagcaggaggagtgcgggttgggcgagttcatcttcttcttgatggcggcaaaggcattcttgggactggttttttgattaaaataataaatctggaatcgccgaaacttacgtgacatctttctggttgatttcatcgcaaatcagaagaattgatggccagtcgggctccagacgcaagtgactggtggcattttctgcgagtggaaagtgcgtaattgttagacctttgtgtgtttatcaaaatcttcaattgttttggagttcaatcgcctttttattgttacttctgaattcttcttccttgttttttttgtttttcgatgagtcattttttcttattggtttatttccttgactttggtgcttcttacctaagtttttgtcgaaacttgatcgaaacatgttttctgttttcttttatgctgcttctcgtcgttggttttctattgttattcgtttaaaataaggaaagcttattattattgttttgcaagcaaagaaattttctgcaatgcgctagtgctgccacatcaatgaaattaacatacccttacagtgctgccagatgacgaaaagcaagggcaacgcaaataagagcagcactacatgactgacgtaacgattgacgtaaagtttggaattttcgtaacggatttttaaaaatttgaaatgacttttatattaacatattaacattaagccccagattggaatcgcattttgtgccataaaaataaatgcgctactcatttgcttaagcttcttgtttattttgtttgttcatacaggtctcgcttacaattaggttaactagacaaataactacacgtacatacatatataaaggttagttatccatacataaacagtataaaaactatgattcgctatgcttagaggttgccgcaacagttggcactcgcatattgcaatggtccgttgcatttgttaaagtatcacacgccggtatataaaagattgggtttacttgcaactaagcgatatacatacatacataagtaacataaaatcacattcgattcaaattaagccgaatactaaaagcccccccccccccccccatcagttcgtcttgatcttgtgcttcagcgtaaagtaggacagaaccttgaatatcgctatttggatgaggatcatgagaatgttgtgaccaaagtcgccgtcctccataccaaattgtcgcagcacagtcacagcgttcctaatcgaaaacgataataaatgagtactttgaatatttgcagcttgcttatgctttcactcacttgaagtggcaatagaactccgtgggcgggcagatcaactggccacgctgattgccgtacagcgagatcaccatgttttcgagggcgtagcgaagtggcgatatataggccatgaatcgcatggcagccggaatgtgattcagcaggatgaggaagccggagaacattagcatacatgacgtcgaaacggcgccaacgaaagttccattctgcaaattaagtttttgtggtgacaaagg

SEQ ID NO: 5210 - DNA, 2698 bp, DROSOPHILA
cagcactagcgcattgcagaaaatttctttgcttgcaaaacaataataataagctttccttattttaaacgaataacaatagaaaaccaacgacgagaagcagcataaaagaaaacagaaaacatgtttcgatcaagtttcgacaaaaacttagaaaatgccaccagtcacttgcgtctggagcccgactggccatcaattcttctgatttgcgatgaaatcaaccagaaagatgtcactcccaagaatgcctttgccgccatcaagaagaagatgaactcgcccaacccgcactcctcctgctattccctcctggtcctcgagagcatcgtcaagaactgcggcgcacccgttcacgaggaggtgttcaccaaggagaactgcgagatgttcagcagtttcctcgagtcgacgccccacgagaacgtgcgccagaagatgctggagctggtgcagacctgggcgtacgccttccgctcctcggacaagtaccaggccatcaaggacaccatgaccatcctgaaggcgaaggggcacactttccccgaacttcgggaggcagatgccatgttcacggcggacacggcgcccaactgggcagatggcagggtatgccatcgctgtcgcgtggagttcaccttcaccaaccggaagcaccactgccggaactgcggccaggtcttctgtggccaatgcacggccaagcagtgtccgctgcccaagtacggcatcgaaaaggaggtgcgtgtgtgcgacggctgcttcgctgccctccagcgtccgacgagcggcagtggaggcgctaagtccggaccacgtccggcggacagcgagctaccggcggagtatctgaacagcactttggcgcagcaggtgcagacaccagctcgcaagaccgagcaggaactcaaggaggaggaggaactgcagctggcgctggccctcagtcaatcggaagcggagcagcagaagcccaagctgcaatccctgccacccgctgcctatcgcatgcagcaaaggtctcccagtccggaggcaccgccagaacccaaggagtatcaccagcagccggaggaggctaccaatccggagctggccaagtacttgaaccgcagctactgggagcagcgcaagatcagcgaatcgtcatccatggcaagtccctcggcaccgagccccatgccaccaacgccgcagccccagcagatcatgcccctgcaggtcaagagtgcggatgaagtgcagatcgatgagtttgccgccaatatgcgcacgcaggtggagatctttgttaaccgcatgaagtcgaactcgagccgcggtcgcagcatctccaacgactcctctgtgcagaccctcttcatgaccctgacctcgttgcactcgcagcagttgtcgtacatcaaggagatggacgacaagcgcatgtggtacgagcagctgcaggacaagctaacccagatcaaggactcgcgtgctgcgctggatcagctgcgtcaggagcatgtggagaagctgcgcaggatcgccgaggagcaggaacgtcagcgacagatgcagatggcccagaaactggacataatgcgcaagaagaagcaggagtatctgcagtatcaacgacagctagcattgcagcgcatccaggagcaggagcgcgagatgcagctgcgccaggagcagcagaaggcgcagtatttgatgggccagtcggctccacctttcccctacatgccaccatcggcggtgccacaacatggttcgccctcgcatcagctcaacaacgtttataatccctatgctgccggtgtgcccggctatttgcctcagggtcctgcaccggctcccaacggacatggccagtttcaggccattccgccgggcatgtacaatccggcaatacagcagccgatgccgccgaatctccagcccggcggattaatgcaacagcccgcgccacctggaaatccccagatgatgccgcccatgcccgaaaatcagtttgccaacaatcctgctgctatcctccagctgccgcagcagcattcgatcgcccagcctcctcaaataccattccaaccgcagcctcaacagattcctggtcagcagcctcaacagattcctggtcagcagcctcaacagattcctggtcagcagcctcaacagattcctggtcagcagccacagcagattcctgtccagcaacctcagccacaaccccaaatgggtcacgtaatgctgcagcagcaccaggctcctccagcagcacaggcacctccagttaccgaaatcgccaacaatcaagtccaagcggtggctgctgcacctgctccgccgcaaaacgaaccgggacccgcgcccgttaaagctgaggagccggctacggcggaactgattagctttgattaatccaagagatgttattccatttgtattacccttcagggctgggtcagaaagttctcgtgcggctgttaagcgaaaaaatgtatgttttgtttagttgaacgcggttattagttactatttcaaaagtttttgttgcgagaaagaggaacatgataaattttaagtttagaccaaatctatggaggtaaaaagatagttggaaagtagtgctgcacgagatcgaggcccgcccttttatcacgttttaaccgactaatgttattccacaataaaaataactttgtattttgag

SEQ ID NO: 5211 - protein, 672 aa, DROSOPHILA
MFSSFLESTPHENVRQKMLELVQTWAYAFRSSDKYQAIKDTMTILKAKGHTFPELREADAMFTADTAPNWADGRVCHRCRVEFTFTNRKHHCRNCGQVFCGQCTAKQCPLPKYGIEKEVRVCDGCFAALQRPTSGSGGAKSGPRPADSELPAEYLNSTLAQQVQTPARKTEQELKEEEELQLALALSQSEAEQQKPKLQSLPPAAYRMQQRSPSPEAPPEPKEYHQQPEEATNPELAKYLNRSYWEQRKISESSSMASPSAPSPMPPTPQPQQIMPLQVKSADEVQIDEFAANMRTQVEIFVNRMKSNSSRGRSISNDSSVQTLFMTLTSLHSQQLSYIKEMDDKRMWYEQLQDKLTQIKDSRAALDQLRQEHVEKLRRIAEEQERQRQMQMAQKLDIMRKKKQEYLQYQRQLALQRIQEQEREMQLRQEQQKAQYLMGQSAPPFPYMPPSAVPQHGSPSHQLNNVYNPYAAGVPGYLPQGPAPAPNGHGQFQAIPPGMYNPAIQQPMPPNLQPGGLMQQPAPPGNPQMMPPMPENQFANNPAAILQLPQQHSIAQPPQIPFQPQPQQIPGQQPQQIPGQQPQQIPGQQPQQIPGQQPQQIPVQQPQPQPQMGHVMLQQHQAPPAAQAPPVTEIANNQVQAVAAAPAPPQNEPGPAPVKAEEPATAELISFD

SEQ ID NO: 5212 - DNA, 15705 bp, DROSOPHILA
cacaaattttcacagggtaaactaggaatatgcttcatacatacaaaaattgaaccaaccatcacttgattgcatatataacttatatatttaataataataataattatcataataataatagcttaaatattacaatacagaatgcagttatacaaaagtaaacaaagaagcaaatcaatcgggagtaattgctaaacatacatacatacatacatatacatatattggatgtgttccagggcaaagaaaataactatttgtaacggaaagtctccaaagcttgtcagaaacattagtgtgtaccattattactcattggttttgttgttgtttataaatccctacacatttgctttcggtttagaaaattacaaaaattgcattaaaaatttgtttcgattcacttcgtttacaattaataattggagatatttgttgtttttctgttttttctttctccccgctttcctctgttgtttcttcgctaggattttaagtgttttatactattttatatatatttaaatatatatttagatatatttataaaaagcttttctgtgtggtttcttgttggtttgtgtggtttgcattttgctattaaactttaaaaatattacaaaaaaatgtatgcgtatatataattaaacaagagaaatatctgtagcaagttttaaattgcataattattatgggcttctttagttgtctacgattgatgattatatttaatatgtttaagcgttagcttcagctttaggttttagttttaacattttttttttacggaggcaacacaaacaaacatcgatgattcaaaaaaaaaaaaaaataagtaaccaaaaataaacgacagaattcgtaagttgcccgtctgtgtgcttttcgcttgatgttttcgaaaaaaaaacttgttgcctaaatcatatatatatatatatatatatatatatatttatgtatattacaatgaaagttaacgtggattatggattttgagtttctgagtgtggcaaatagttttaatatctgttgctgttcgtatgtgtgtactggtgttctcaaagttaattaattaaattgtattaacatatggttccgttctccatatccttcatatcctgtgtgttggtgttatcatccgtgtggccgttgtgttattttccaatttgttgctgctgcagttgttttgttgttcatcgtatggttgttgtccgttgttgttcttcatcatcctacagcagttggcagcaatgagagttgggcttcggcggctgtttcacgtccgtctgacgttgttttttacgcgatgaaatatccctgattagatcataaaatacctagacgcatacacaaacaatttattagtatcacagtttttttttttgcagcatttgattgatacttataattatttcaggtagtggggggggggggttaaatcgtttttctataagtacagaaattttgaaaagtagctataaccaaagtagaaaagatcaatacgaatgaaagcaaactttaaatagtgtcttaaactacctttattcaccagagaaccgtcatctcacaagcgatacaaagttagtttccgaacagaatggagaataaaataatcatggattctatagtttccattgtatttctttttttattgtagttacggtttacagaaatcaaaagaaagtttttaagaaatacgaccaaaccaataaattaggtgtaaatttcaggcatattccaacagcaaattcaaatgaactgaaatgctgctgtgaagaattcgaaacaatcttgtttataaaaaaaaaataaaggtgtttttgtataagcaagtatgtgtttgtacagatgtatgtaagtgtgttaatgtccatttgcaaaaagttattccgaaatatcatcactgcaatcataatttttattatagaaaagtaactgatatgaaaaacctagcagtcctcctcgatttgttccctgcaagaatgtttatacagatttatacaaaacgtatttcataaagtccattaattgtaaaatattacccaatattgcagaaatgtaatactaattcaatgctatttacattactatcgcctatccaaataatttccgtgttagtcttattgagatgaaaaactttcacgtttacggaaaacacatcttgtttgtttagtttcatgtgtagtgttggccaacgtaagaaatatgatacaaaaaagcatataattaaattcaacaagcggatgttgtaagaaatatagtaaaactcaaccattatcaagttattagttagtaaaagtaaagaaaatagtgccgaaagcaattaagcgagggttataagcaactaattacgagtgtctacgggttaagtaaagtaggtgtgttcatatactcagataggatacataatatagatcgtatttcatagtgttgaatagaatagttgtatgcacctaatgcctaaagtagggtacacttaagtctccgcttcttgcatctatctttagcacgcccgctcgtggctttcgaatcttcggtttttcgtgatcttatttcgcgcatcaaatcaaaaaatacctgcaattgtggattgggaatagagtcatatacaaagtcagcatcagagtcaattagtattcgcaaattattacatatataaaaataagatgatcaaggaccgaaccaacataattacacacgcacacacatcctttgtgcctttcggacaaagaactatattagcttttggcaattgtcaataaaaaatatggaattaaatcaaaataaaatagatatatttgttaagggcaacaacgttgaaagcatgataaattggtctacgatatttggcagtgcgtttatatgttgtagctgttgtgtgaatatttgtgtgtgcttcgctgtgtatttgtgctaaggtagctaacatatttgtatgttctatgaaaaactactatgactttaatgctaaaaatttacttggttcattaaaaaatatgtttgaactattgttgaaatcccagttcattagatataattgcaaataatatcatttgaacttatagttccattggttcccattacaatataactcttcattcggtttcctgattagatttttatatttttaaacgaattttcaatggcattgttatctgaacgacgccccttatcattcttttttttgaacgctagaaatgagggtgtgcaactatagatatagattgtatttagagaggaaatggcgtagaacaagctttgagtttggataagccttgtcatatttcaaactaatgtttaaaaaatacgattctacgcatcaacaatttcaaagaaactaattgtgcttatgaaccgtattcaaataatatttgttttttacgtaatcatcgcctattagtaaataaactcgcaaagccttaactcgcaaaaacttttcattgaatgaatgtggatttttcttatcactgtgtctctataaaaatgaaactcgaacaacttgataagcaaacaacactataaactgagtgttttgctggcgagaaagttgagaatgctccagtgatgttctcgttcgtaagtgaaaccaaaaaaaaaaaaaaaaaacaaatcacacttaataaactacgtatgaaaactagttaaacaaaaaaaccggtgtgcagttttcgtttgttcgataaacattttagcttgccaatttccaaagagttttcatttttttttttttttttgttcgtgggcagatggatcgtatcggtggcttgttggccactcctcctctggagcgatggagccaactcatctcggcgggatcaacaccactcaccttgtccacattttcgcgggttttagccgaggtctccacatagggcaccgcccactgctgcgccctcagctggcactcgctcagcggcaccttgcgcttatcattcagatcgcacttgttgcccaccagcaggaacggtatgctctcatcattcttcacccgcaagatttgttctctgaaaatagcagacaacagcaaatcgtttcgttaatattattagtatatagtagcattcaatatactgttcacacaacggattggcacaatgtagaaataaataccttgacaacactaatggatagataagcgtacttatcagcacttcaatataaaagtgactcagttcgtgtgtcactccatttagaagccagagaaaaacctagcagtcaagcagatatatagatatatatttatgtgaacacactgacagtggacaggcgaacgcataaatagtagggatcgaatataatggatatacataagtatttcccaggccagtcgcaccctgtcctctgccgacgtctaataacaattttctagccatatttatgtggcagcagcaatattaagttgccaagtttgaatactcaattaggtcgatggaaaagggggcgccttaagtgggagttatggcaacgaagtagcatattcatcggtcggtaattatcgctagtacatgatatggcatactaaaggcaggactattaactttggtgcctgatggggcattcaattggagttgaaatagtaactagttttgaataagatacaaataatattgtataccaagaagaaatgaataaagattaattacacatcgcacaaaaaaaaaaaaaagaggaagctgaacaactgaacaacttgcatgactaattagcaccgcagaataataaaagatggaaaaaactgaaaagcttgtgtgcaaaataaaaccgcgacacatgtcagcctgagaggaaagcaaaacgcgagactctcgagagacctcaggaaaatgtattaaaaaaaaaaaaaaaaaaaaaaaaataccgggggcaatgcgggaaagccaggggggagggggtgagggggctaacccggctgacacactcacctgaattcctgggttgcctggaagctttcgtcgtctgtgatggagaagacgcaaaggaaaccctcgccgctgcgaaagtagttatctctgatggcggcataatcctcctggccagccgtatccaatatatctatttgtacttcctcgccgtccagcacaacctatacatgattcaaataagatcgaattggataagcaagacatcgagtgagaggggaggggggtgtactcacctttttcctatagctatcggccttggtgggctcgtagtcctcgacgaactcatcgtacataaactgcagtgtgagggcggactttcccacgccgccactgcccaccattatgaccttgtggagcgccggtccggctgtcggcttcttgctcatgatggcgggatcactcactcgctgtatctgtatgtaagtggtgagggggatatacgaaataaataactaattaaataaatcggtgcttcctgtttgacagcattcagctggggccaaaaacagcgaaatttacgcatatttcttgtgcagttcacatatgtaaacaggtaatatatatatatatatgtatacgtaaaaggtgcgaatgggtttatgtaaatggtatggttatgaatggaaaacgaaagaaagaaagtacgatcgtatttgtctaaagattgcagctgtcaacttatggagtcggctcacaggtttgctgattgtttttggcccggcttttcagctcttcagcttttctcggggttacgtaagaaacgaaggcaatacgaaaagccgtcaataattcgccaaagtacacttcttacactttcaatgctctagcatttgtgaatgtgctttccatttacatatatgtatgtatatatatgacatacatagattttattaattgcttagcataaagaatcaaatactgaaacctcaatagcagatgtgttactgcttattatgcatagggtattcccatcttcgacttgaaaattgcacactttctgccttgtttctttcgcttggttcgatgaagcaaatgaagcataaaatgaaaagttcattgaactatttacacatggcaaagcggggcaacaacggcaaacataaaggccaacaatacagcagcataatgcagaccgggccgaaatgactctcgggttttgtttggccttttttttttttttttttttgtgcagctgttagctgcaattagccttttgtgaccattcacgagcccgtttttatttgctcactgcgtcgtcatcgattgcaataaattgaggaattgaatacggacgcattgagggaatatatatgttttccataaatgagccaaatcgaaatcgagacacacgtggccatttggcagttggccaatttccattcaagagttcaaccattcagactgaattcttactttagctcaacgttgtttattaatccgcatttggatcagggttactaagtatttaagttaccaaaaaataaccacaatgtttgtcagaagacaaacaacacacacaaaccgcatagagttcactgaaatgcaactgagttgaaatcattttccacgcttgttacctgagataacctagctgccttttaatggttaaaaccgaaaaaaaaaagaaaactgagatctttcaattcccagaataaatgtgctgtgcacgccagctgaattgccaagatggaaaagggtatttaacaatgtagccaattccctttagctctatttcttccgccttttccttttttttttcatttttttttttttttttttttttttgcttttctagctgccattcagtttgacgcgtcggtggaaaagtggaaaattgaatggaaagcgggcgggcaggcaggcagcactgctgctatgtcgaatgtatctggaggcaacaagtaagtcagccaaatgaaacaacggccaacgattgtcagtcagagtcaaccagttgggccgccactgcgtatgagtaatcaacgttagagctgcaccgtcaatcaattttttactcgagagagcgcaaaaatagaaggcttaaaattggacggcgaaaaacttcccacacccaggctgagtcaattgaattgtcaaggaggattgttggccaacaattgctaacagcgacaacacctgggaaataacgccggcgaacttgtttaattgcatattactcatacgcaacgttgagcgagctcgacaacgccaatgtatattggtgaccaaaaagttgggcatttttatacgcagctactctacaaatgcataatattatgtagcacatataatcgatgattccaatactattttcagacacaattttacacactttatagacggcaagcgcacttttttctaaaattaacattatggccacgactgtatggtcataaaacagattgtgcattccaaaacgttatttatggccagcaaaagagaaatgaaaatagtaaagttactgctagaaatttacctatagccaattgaaatatcgccgttcgatttgaaatcaattttcctgcgtcgaaaaaaaagttgactcaaagctaaccgtctagttaaacgagatatcgctcccatggctaagagttaccggttatgaaaaccatttgaagaacccgaagttatcatatgaagtgaaccgctaaaagctaaagaaaacattcaatgatttccaaatagttccaaccaaaaaaaaaaaacttgatctacatcgtgcacttgccattagtaaataaaaatgttttgcctgtctggcgaaaagaacaaccaaagattttctggtgattctgctgattagattatgtacggatttggcatttggattgtgaaatgaatatattttgcgtacgctcatatcgtaaaaactaatttaattgtcataataaaaggaaaaacaaagctgcatagaatttttagtttcttatggctggcattaaaaagatttcaaattaaaagcgggcaaaaaaaaaatagaacgaatcgacgaataaaattaccaaaattgtatacttgtgtgtactattacgaacatttcgcttctgatttccgcgctctgcggaaatttcacatcttaccttattgttgaaaataatacaatttgccatgacgtcggtgtttagttgtttatactagtacaccaaccgtgcaaaaaccacccagctttgtgcataaattagccaaaattcttgtttcgattttaaacaaaaacggaatttggctgcttctattcggttgtgtcaacataaattgctctctcattttcattaaatacgaattcttttgactgcattatgtccttaatagtagcaccccaaagcacctgttgtgacaatggaaatccaaataggaaaagtatccattcacctttaaagatttccttcaatagtcttacaaaaaataaatctgcacgttaagacttcattttgctatgaactcatttatcgctgtcgcaatttttgcatttcaaacaatcaagcagattgtgtatgttatttaagctttttgttttccttattaaacattaaaataaactaattcagcttaaatataccatttgaatgctttggatttggcttatacatttttttttaaatattcttgcctgagcatttttcatgttaccatctatttttttcaaagcacacttcaaatatttgctaaacacggcatttttcattcactttcacatcaaaggctaaaaatgtttgatttcgagtctacaatatcttttcaccaacacacactaatacacattcattggcaacaatgtatgcttttcctttcaaaatgcttttcccttagaatatataaactacctaatctcgatttgatacactttaggtgaacttttcactcggtaccaattatttagtatgaataatcgaaccgatatttatttggttccaagtgattttgaacagatcctagaatttatgaagttttttttcgcatttctctgcacattttctgatagagtatatatgtatatatcttatgtatatatatagatatatatattatatacacaaaacatcccggctccgttgggcgcccgatttgtttattactcatattatggttttgcctgttttgccattcgatttcgatttgatttttcctttgtttttcccttttatcccccctttttatgttattttttggtggtggcttgccaatgacgtcagttttcagcgtctccaccttgtgagtttagtttttcgtgccttttcatggtgctcggccacggttagcttttatttttattattacagacaagcctcaactattgaatatctttaattatggttaactttgaaatatgtttcataactatcttagctacttctacccatccccattccttttttcaatgtctcaattatggaaaccatcaaaagtgtgatcgaaatccttgagagaatccacctatcggtatatagtatcactcctaaacgatgttatcgaatgtttactgtactttttttcaactatttttgtggttggttatccaagcatgatgtgtgtgtgtgtgtgtctgtgtggcatgtgcaactcgaagagtttagtttaatgcttaaagtgcacgaaagagtctacgaatttaccgctattaccagttcccacaaaacgggcctttcgtgccttctatgcttctttgctctctgcgttcttctctttgccaccctctatccaccgtatttggcctttagcactgccgtagttccttcgttggcatttttttttttttctaatgacacctaaaaggggtaaatactcatacaatatgtacatataccagttgagcagttttggggccgccactcccatgtgatttataaagattttccagtttttgatgacgttttttttttttttttttttttaaacgtatgtaaacatttgcgtatttcgccggtgtctctcttcagatactacactttttaaatgctttattattttttttgcgaatcgttttccagctttcgaatgcgtgttgcgtgtgcttcgtgaaattcgtgtcagagttccatgtttgctctgctatatatattttttctttgttttgctagttccattttccagcctaactgttaaattaatgaatttattttcagttgatttcagtttactgtgggccttgcttggcgttgttatggcgttgttattgttattgttgttggttgactgcccccatgttgttgtggtttgttggctataaccttgaggcgatttcgtggttaacgaagtaacagttagtgcagagagaaaaatgccgtcgatcaaaccacactaataataattataaaaaaaacgaacaattattcatcctatttgggcatacaatttaaatattaaaattttccgttttttcttcatgtgcattaaaaccacactaataataattataaaaaaaacgaacaattattcatcctatttgggcatacaatttaaatattaaaattttccgtttttttcttcatgtgcattaaaacaacttgccgtatttatagagcgctgaaaatgtttatgggaaacgctggaacgcttttatggcctcaaacctaaaaatattaaaaaaaaaaaaccaaaaaacctatatatgtaaattagccacgccccctattttctgccaagtttgttgcccctttttttatgtgttttgatgcgccattggcggaatttgcaaccaagtgcagcgcttttccttgtcgccgcttttatctcttgtatttcaattcatttacactttttgtgctgcattctgcaaagcgaagaggcgtgattttgtgtaacttccgcacaagattaagttcaataaaccgccacatgtgcgaaaaaaaaagaagcgaaatccacgcatattattgtctctgtctgttttccccaacttgtcatcgcaacttctatgactttgtgtgggaattttgtgtttcagtctttttattctaaattttttttttttttctgtgcttttttttgtacatcattaaatgcaggtctgactgagatggttgttggaagagtagaagagcacacaacaacggagcacagagtgcattaatcaagcagaaaagaaatcccagcgagtgaacttttcttacttcattgaggagatggctgccattccgccgttagatcagttcaatgcacttttgcgattagggcaaatcacactgacacaaaaacccatgcatatgcatatatgtataaaacgtggaacgaaaggcatcgacattggaatgcaatattttccagatgagtcataatgcataattatttaaatctgtggcatttaatcgacgatttcaacgccgctgcgcagtcgcgtgcaacgctgtcaatgtcaagttgacaggcaaatatgttttaaatgaagttgcatagtaagcataatacaaacatttataaaaattcttgcatttcaaggacttaaatgcccaaatatatttattcggatcgatatagtgttgatcagttgatattaatcagtatagtattgaaaagcaaacagtattgataagactgaaaatatttctagatactttctcatactttctcagcgttattctcgtgatatgcgactggtttctgcggccctgacactttgaacttttatacattttcacttacccctgccagaaactgcagagtatttgttagcctgagaaagtgttgggtaaaacttgttcatttgatgtacatttgttacaactttctttggacaagccgaggaaaacttgtcaagcgaactgcgtggctcagactcatttacaaagtgtttttatttggccgagcaagtttgatctgcctttgcagatagcgatacctaaaaaaaaaaaaaaaaaaaaaactaaaaacttatttcacaccgagtggtatatgaaaaataggtacatatatgtacgaacaatgcgtgggaagtgttttctgaagcgaggagagcataattaaaacctaggcatagtcagctgtgataaaagatcttgaaatgcgatggagcaacaacaaaagccatggggaaacacttgagagcctgggcataaaacaaataaaacctgtataaggcaaatgtgttgagagaactttggagatgctgatacgatgatgtaacaaactaaagtcagctaacaaatatgtgattgcgcgcgcgactttgtcaagaatcgtttgttggaagaaatctcaagattttcaaatgttaaatgctttacaaacggatatcgtagatcgttggtaacgggcgattaatcatttaattggaaaataacaaagtcattacacgtatttaatgcacaattcattgataatcaggtatataaaacgtattttgaagacattcggcagacatatttggccattatggacaattatcatcaagtgtgtataacttttgcattaggccaacattattattcgtagaaaacaaactttaatgttggccataatggacttggcctagaagaaacatagaaatagaacccatttccgtgatttgtctcccttgacaaaactccattagaagtgaaattagagcaaatcacagcttgatggctataaattaggctaagttggccgacttgcgctatcttctcccttctggccaagttagcaaacatgccggagatgccgaacaaaagatgagaaaactacatatataccaaaaactgtgtcactgcgaaagatcgtgaagattatgagtcagtgttttcaactctattgttaatctattctcgcctgccagagaattatatttgaaaaggtcagaggtgaaacagctaacaaattgctcggctatatcttgcaaataatgtaagattttgtttacacttttgataacgattaaatttctctggaatatgaatggctcatattctacagaccgatctgaaatcaaaactggtttcgcattttgtaaataataaggcaaactacacaaagagcagttattgattatttaagcactcagttttaaaggaactgagaacgcatttttttttgacatacttcagctattcacttccccccgttcgcatttcgttcaattggtgagagcttttaacgccccttggcaaccaaacaaacaaacaaataattaggaaatgttggtgaaagggggaaaggggtcaacacatacgattaagtgagtcatagataaatgaaattattcaatataaaacaagctggcactcaaattgatcttgaacttgagcctaattagaaactgtaaaaccatttttctgtgtcacgtttttcagttttcctcatttgctttaggcgtgttggataaaaagatggaacattcagatgcgcataaagttgaagcggattaactaacgatcaccatcatgatgatctaacgctaatgtcaaaatggttctccgattagcaacagaacccgaaaatcggcacgttcgtggagataatgagaaatggggaaagggaaagatggtagcggaaaacgggtcactgtgagaaaataacgccacagagcgaatgccatcaaaagcgatctcacaaaataacagagattaaaaccagacaccgtttctgcgaattttcttgcatttcaaacgacaattttcgagtgccaaagaaggttcttagaaattcgaaatatgtgattaatgaagaaatgtgcttaataaacttgtcatttaaaaaaaaactcaactgtatttaactgttggttaaataatatttgtataatgttaaattattactaatacttgggaaaattcggcaaatgttatttagagcggcgtaaacgagatcccaaagcggaattgggataaagagaagtttaaaaagcaaaggggcgatgggggcgtgtgcgtgcttgcttgtgtgtgtgtgtttgtgtgtatgagtcaacgcgcaaaatgcgggcggcgactgcaccttgcacaccccgcaaaaagagagggcgataaagcaggagagagcggcagcgagagcgagagagaataaggtcaagcggggtgcggcaacaaatatttctgctgatagccgttgataaaaggctctcgccgcccttctccttttctttctctctctctctctatctctcgctctccgtgtgctcatcagtccgctcctttcctttattttgctgaatggagcacacacacaaaaatgccaagcgcaataccttttatttagtttacatttaaatattcaacaaagcaaatagcagcagaaagatttcactgctgagtttttttttcacctcttgctttgctcacacacatatacacacacacacacacacatccactttcttcgacgtcgactgcaacgccggcagcggcgccttttggcggcttttacaaattttgtttatgaaacaaaaaacccctgtgtatattcctttctgggatttcatcggtgtatacacccagataaaaagaaagaatctttccacacggcagacatcatgaagaacaacatacgaaatatgcgtaatcactctataatgctttagctgtaaatgcttttgcttctctttcctcctttttgcgtacttcgttttcttccttcctttttattgtattttgcgcgtccgctttggcctgtcgcttcgtttgttgttgctttgctgtgttatctcgcacttgatgcactaaactaaacaaaaaagttacaggcgcgatcggagaatcggcaactgatgaattaacaggatcggaacgcaacagtaaattggctgcttttcggtttctcttctcgttcgccgcacaccgcaattaaagttccgttggttttgcttgcttgaaagaaactagtgtgaaagtggaaaaataccacagaggtgcaccaatgtgaccgctctgccatcgatcaattataccaagcacaagcatcactaagaataacacaaaaataccaataagttccgtcttatattgaggtgggtgtgatcgctaaggctggtgggtgtactcgctttgctggttgatgtactcgataggcgagcgagcgagttgtgcactcgctggcgagcggtttaagtatccgataactatggttggtgcacacgctaagtaacaagtgaccgctaaactgctactttaacagacacaactgtgcatgttaagcgcactcatcgttccgccagatggcttctttgcacactcgtttcggtattttttttacaccaacttacagtatatttttaggccatttctgcgtgtgtgcgttcgtgtgaatattgtgaatattttttttactgtgaaaatagacaaaaatcggctgtggaaaaccgaagtaaacacatttgggaatcatggcgattggcccttaaccttaacccttaagtgtcgtgccgacagtgccacgccacaaacccaaatcccaaagaaacaaaagcgaaagaaaaaaaaaaaagaacaacaaaaagctatagttgcagcctctgaaagtttaagacaatcgccgatccgatcggaagcggaagatatatgctcgccacaccaaatggcatggtaaacacctctcgttcctctaaatgtgatgtcgatgtcggaaaagccgtagaaatcgtacaattcctaaaatcgcaaacttaacctcgcagcgttgtgtgcaaaaacggagaggggtgggggggaaacaacggaaaaaaaaggcaacgcaaagcaaagcaaacgaaaagcgaagcgtgtgcgagcgagaggcgagtgaatagcattgttgttattgttgtagtgacttttattttatctcagccggcgatttaattctctcgcactcacacatattcacgcgaataaaa

SEQ ID NO: 5213 - DNA, 1233 bp, DROSOPHILA
caagcaagcaaaaccaacggaactttaattgcggtgtgcggcgaacgagaagagaaaccgaaaagcagccaatttactgttgcgttccgatcctgttaattcatcagttgccgattctccgatcgcgcctgtaacttttttgtttagtttagtgcatcaagtgcgagataacacagcaaagcaacaacaaacgaagcgacaggccaaagcggacgcgcaaaatacaataaaaaggaaggaagaaaacgaaatacagcgagtgagtgatcccgccatcatgagcaagaagccgacagccggaccggcgctccacaaggtcataatggtgggcagtggcggcgtgggaaagtccgccctcacactgcagtttatgtacgatgagttcgtcgaggactacgagcccaccaaggccgatagctataggaaaaaggttgtgctggacggcgaggaagtacaaatagatatattggatacggctggccaggaggattatgccgccatcagagataactactttcgcagcggcgagggtttcctttgcgtcttctccatcacagacgacgaaagcttccaggcaacccaggaattcagagaacaaatcttgcgggtgaagaatgatgagagcataccgttcctgctggtgggcaacaagtgcgatctgaatgataagcgcaaggtgccgctgagcgagtgccagctgagggcgcagcagtgggcggtgccctatgtggagacctcggctaaaacccgcgaaaatgtggacaaggtattttttgatttgatgcgcgaaataagatcacgaaaaaccgaagattcgaaagccacgagcgggcgtgctaaagatagatgcaagaagcggagacttaagtgtaccctactttaggcattaggtattttatgatctaatcagggatatttcatcgcgtaaaaaacaacgtcagacggacgtgaaacagccgccgaagcccaactctcattgctgccaactgctgtaggatgatgaagaacaacaacggacaacaaccatacgatgaacaacaaaacaactgcagcagcaacaaattggaaaataacacaacggccacacggatgataacaccaacacacaggatatgaaggatatggagaacggaaccatatgttaatacaatttaattaattaactttgagaacaccagtacacacatacgaacagcaacagatattaaaactatttgccacactcagaaactc

SEQ ID NO: 5214 - protein, 201 aa, DROSOPHILA
MSKKPTAGPALHKVIMVGSGGVGKSALTLQFMYDEFVEDYEPTKADSYRKKVVLDGEEVQIDILDTAGQEDYAAIRDNYFRSGEGFLCVFSITDDESFQATQEFREQILRVKNDESIPFLLVGNKCDLNDKRKVPLSECQLRAQQWAVPYVETSAKTRENVDKVFFDLMREIRSRKTEDSKATSGRAKDRCKKRRLKCTLL

SEQ ID NO: 5215 - DNA, 8377 bp, DROSOPHILA
tcatacatatgcatatacacacacatatatgtctatatgtatttgctttttatacataattatttatgccattttttgtttgtcaacgtgtttcgtgtctccttgttttttttttttttcttttgctcaatgctcaattctgagtatttcttcgcaagtttttggcttccttttgcttttacttatttttggcacacagcgaaaaatctcagccactttggccaagaaggaaaagtccggcccatgagccacgccccacatcttggagcttccttccagtggcctttctatttctatatgtttcccgcaatttgcgtagaattttcagcataaaaaaaagggcggcgtataaaaagcgaaacttggccgtcgccatggcgtcccttttcgcttgtcttttttcttcgctgaccttttttttttggttttttttgagcgccgtattcgattttcacaacattttgccatttaaattctactcaaaatgaatgccaaacaaattacatagtttcaacagagaatacagcaaaatgaaaaagatcaaaatttaaataaattagcaaaaaaaaaaaaaaaaatcgtttaaaattcttggtgttatttatggtcttgttttcgcagcttttggcaatgcatcaaagagccttagaaacttgtacgatgtaagagtattcggttgaccgacttttatatgtttccaaacacactatgcacaattatgaaagcatattacagggtaatgagaaaaaaaagatcaatagtttagcaaaagttgttgttaatatggttggctctgtgaaatgctattctagcattcttttagatatttaaaaaatcattttttctcaattggttttatttgcgaaatatgaaaggaaaataatctcattgtttttcattaatgttctgcacttcaaagggaaactttcaaagtttgcacagttaatgcatttccatgcaccataattattattaataataatttttaaagcttacatatatatttcatagtggttaatataattgcatggcttaacactgcttatcttcttctggtttttggcttattttaagaaatatttgcactgcatttcaattacaaactaataacaattcacctttctaaaaaatttctttcacaatttttatttttttttttttgcagccatggcgaggatctcattgtgacgcctttcgcccaaattttagccagcttacgttcagtgcgcaacaatttattaagtctgacaaatgttccagcatcaaacaagtaagtgtattgtgaccttgacacgccccttttaccaccacaccccctcagccccccgttagccaccacagcctccacaatccacgggaggcattcaatttgttgtgtactatgtatatgcaatgtacttgaccccgaaaatatgaaatctcgctctgtttttaacccccttaacccctatgtgtgctaccgcctgctctctgctcgccttaacctactctcgctctctccctctctctctctctctacccctctgtctctctctctcgctccctctctcgctggtcttggtgtttgtgttttttttttgttgtcgtctcacactttaattaatcaaaagcagcgaccacaatgacaacaaacaaaataaataacactcgcctccaacaataacttttgatgctcgagtctatagaaaaaaaatgtggaaaaacaaaaaacgcaaatagattagatgaaataatataaatagaaccctgcgaaaggttggaggtacgcacacgacattcgataaaaaaaaaaaacacccaacttttcagaaatgacgcgaaatattccaaaaatacaacaagtgtatcgccaaaacaagtgggacagaaacacacattttatacgaattttttcgtggaatatatccatggcgcaaaacttaaatttagagagcatttctgttcaaaagctatgaaaagtcaattttccaaagaacaattgccgtcaattcgtttgtcttgtcgattgctgcttataagtttataaatatgtatatataatacatataattatagagcaaatttactaaaaccaaaaatgtcaataacaattttaatcacttttaattaaaatagtaaataaaaccgtttgttcgaaaagatgcacgccttgaagaaatgggttaaagcacataaaacttaacacttaacacctaacatctaacccttaaccccctgcaggcccctaaaacccctcagatgacctgacttttcagtgattgctgtaaatagatagttgaacccttttaaattaaaaaaaaaaccctaaccccccccccccaaaaaaaaaaatgatgaaaattcacaaatataaatattttttctctctctctcttccgctctctctcgctctctctctctctctctaactctgtttccgattttgccatttccatatgcgtctatgtgtgtcaccgatacgttttgcaaaatcacaaatctaaatgtcgtgttctcctcttgccacttgccacacccacaccatgctacgtgacattccatataccataaatccgtactccccacttccccccttttcccctacccccctttccactgcccgttttaatttttaacaattattgcccaattaaattctcaaaatgttcataattgcctaccatgctcccttaaatgtttgttcgattgtttgttgattcgtttgtctgtttgtttgtttgtttgtttgtttgatgattttgttcgtttgttgtatctgcaccccgaacccaaccgcctaccccccgcccattttcccaatccccctctctctctgtgtgtgtgtgtgtgtgtgtgcgtgtgtggaaaactgtgtattaatccatcaagatccaggcggcccaaccaatcgtcgtcggcctcgcgatcaggaaatccaccaggagccccgctatcccaaggcgaggaggcatacacccgcctggccaccgacacaatcgaggagctggactggtgcctcgaccagctggagaccatccagacccatcgcagcgtctccgacatggcgtcgcttaaggtaggattccaacattccaaaaattcacacttcacttcagatacaagttacagcgagcgaatagatacaaaataacattttacattatctatttgtttatctaagttcgagtcattatagcaaaacgattgttagtcttaagttctttggttattcattagtgcgatattaattaacttaattaattaattaattaactcaaatttcccccctcccctttcagttcaaacgcatgctcaacaaggagctgtcgcactttagcgagtccagcagatcgggaaatcagatttccgaatatatatgttccacatttttgggtaagttagatatgttagatattagatatcttatatatatatgtatttgaataagtttactctccgttcctttcgagcaatcagcaattcaatgctgaaatccgtttcaagtttggaaactcatttcattgcaaagtttttgcaaaacaatacgaatcatttcccatggattttcaattctatttaccccgtttttgcgaactatgacttaacccatcagaagcccctcctccaaagttattcaagatgttttgcggctttaactttcgctggctgcaatttgttttttgttttttctgcctgctcgactcgccaaagtatgcaataaaatcgcattagccaccgcggcgggaacgagcaaaagaatgtggagttcaagtagctaaagcctcgggccatcaatctgcctggcgctgcagagccaacgaaatagagcggaaaagctcgaaaaaattatgcaaatccatttggatttgaaatgcctgcaaaaaaaaaaaaaaaaaggtcgagaaaataatacacttgaacaacaagtgtatttaatgtatattttatattccatgtagttgccattgtaattcgacatagatcgttttaatagatttccagggcacaaaatagttcattgtttgtaaaaggagtctctaacacaaattttctcgaatcgaaagtgcaaaattaaattatgcagagcagcataaaaacagatgaagtggaaatttcattgtttaacctgcgagccaatcccccaaaaggaaaaggagacctctgcacacgcactctgctggcgttccccattttccaccgaaaagttttccccattttccccagttctcgtttttggtggcactttgtgcgggaacgttgatacattcgggctttaaaacagtgaccgctcgttaatacagaaaacaaattgaattggaaactattttttttaaatttgtgattaaaaaaaaaactaaaaaaaaaaataacatttaatacgattgctaacaaagtagttatccacttatgaacttcatgaagttagcatatatttcaaattatttttttcccgtgcaaagtgggcggtaggcgtggcgtcagcgtggacaaacaaaggggccgcacctagtcaaaaagcagcaaaaaaaaaataaaataaaataaaatttaaaagcgtaggagaaaaaaaagtgggaacagagggagcgaaaggatatcgggcatatttgcacatttgtccatatttctgcttcactgagcagccactgaaagagtggccatgggggcgtggcaagggggcggggggtggttggataaagtgaccttctcgggatctaagcccaccttttcactagaattttcaggcctaacccaactaacttgttgttgtcgtagtttatcaagcataaaatcgcatttgggggatacacacagtgaaaaaaaaataaaatacccccccccctcaaccacacacacacacacacacacacacacacggctgcctaatgtccatttgtaacacttcatttgaaacagaagcctcgacctcgaaagtcaaaaaaaaagaaggaatgaagagggaatgagaaagaaggttaggaaaatgccccaaaaaaaattatggtgcgccaaaacagatttcagcacctgaaattcgccctgggaaacaggaaaatctcaaaaaaaaaaaaaaaaaaaaaatatcaaccgaagagaaagtaaggacagcagcatatgcaaaacaagatactgccacacatatcaggtgaataaattttccgttgaaaggaagagattttcgagcatgccaaaaagaaacgcaaggagtggaaaaccaaacaaaaaaaaaaagaaaaaactgcttgactttagtgctttaaaattttgtacaagcttgtcaagagttgatcaaatgtggaaacacatgagccacattaaaaggacacaatcctgtcgcttgtgtcgctcttttatgctagcaaatgaaacacatccatttccctgcatggttatttatgtttgatgtgtagtttttaagtttttatgtagtttttaccggcaaacgaacgcaattcaacgcaatttggaatttgaaatgaatattaatttatgcacaggcaatttgaatttgaatttgctctccatgccacaaacagcgacaaacaaacaaaaacaaaaacaaaaacaattgggctgcgagggtttaagggctgcggccccaaaaagtaggcaatggaattttgaatggggaaaactgcaaaagttttgcttgtttgccgtcgaacgcttgaatatttatacggctatttaagcaccgagtaagaagcaaggctaccctgagcaatgcgagttgaaggacttgggtcgctgctccacatccacatccacatctttcacatctttcacatcccttggccgacattcgcctgccccactttggttatagaaatatgcagatgtagatatacatattgtacaagatacctgacccatgtgtgtgttgatggctcaaaacgatgtcttcgatatcttcatttgttgtaccaaacaattgaaatccatttaaattaatatataatataacattcgttccaactccttgcagacaagcaacaggagttcgacttgccatcgctgcgcgtggaggataatcccgagctggtcgccgccaatgcagccgctggtcaacagtccgctggacagtatgcacgctcccgatcgccgcgcggtccgcccatgtcgcagatcagcggcgtgaagagaccgctgtcgcatacgaatagctttaccggcgaacgtttgcccaccttcggtgtggagacacccagggagaatgagctgggcacgctgctcggcgaactggacacctggggtattcagatattcagcatcggcgagttcagtgtcaatcgaccgctcacctgtgtggcatacaccatatttcaggtgcgaaaaataaaatgaaaatgaaaatcatatcgcatcatatcatatcattcaaatatcaaatcaatgaaaatcctctttttcgttttttcgttccgccccacagagtagagaattactgaccagtcttatgataccaccgaaaacttttcttaactttatgtctactctggaggaccactacgtcaaagacaatccgtttcacaattcgctgcatgccgccgatgtgacacaaagcactaatgtgctactcaatacaccggcgctggagggcgtattcacgccgctcgaagtgggcggggcgctgttcgccgcttgcatacacgatgttgatcatcccggcttaaccaatcagttcttggttaactcaagtgcgtattacctacactttagttcgtttcacaaatctaattataattatctaaacatatcgaaccccgcaggttccgaactagcattaatgtacaatgacgaatctgttttggaaaatcatcatttagctgttgcctttaaattattacaaaatcaaggatgtgatatattctgtaatatgcaaaagtgagttcattcattaaacaaatgtattgcaaaacgtgtttatacctaaccgcgtttaatctttaatctttaaggaaacaacgccaaacattgaggaaaatggttattgatattgtgctgtccacggacatgtccaagcacatgagtctgctggccgacctaaagacaatggtggaaaccaaaaaggtggccggctccggagtactgctgctggacaactacaccgatcgcatacaggtgagtgtcgaatgaatgtcgatggatcgctttgtgctaacactaacaccaatactttttttcgaattaggtgcttgagaatctggtgcactgcgccgatctgagcaatcccaccaagccgctgccgctttacaagcgctgggtagccctgctcatggaggagttcttcctgcagggcgataaggaacgcgaatcgggcatggacattagtcccatgtgcgatcgccataatgccaccattgagaagtcgcaggtgggcttcatcgactacatcgtccacccgctatgggagacctgggcggacctggtgcatccggatgcccaggatatactcgacacgcttgaagagaacagagactactaccagagcatgataccgccttcgccgccgccatcgggcgtcgatgagaatccgcaggaggacaggatacgctttcaagtgagcacatacctcgtacagaaatcagttactgacacgattatatacgcctaaatttacgctttcataatcgatgtcagttctgaattcaagtaccaaatgaaagtcaacactcgcaaataattttgattgcatttatgccgtaacgaataggtaacccttgaggaatccgatcaggagaacctcgccgaactggaggagggcgacgagagtggtggcgagagcaccaccacaggcacaaccggaaccaccgctgcatccgcgctaagcggagctggtggcggtggcggtggaggcgggggaatggcacccagaacgggtggctgccaaaaccaaccgcaacacggtggaatgtgacggagagtcgtgggaatttatcgcaaattacaggaaaaggctcacaactttttcctattacgttagtgactactattaacacagaaaaaaccaaaacaaaaacctaaaacgaaaagcaaaaaaaaaaacaaagaaaaactcttggaaaaaatgcaaaaaaaaatccacaaaaaaaaaaccaaaaaacccaagtaaggaaatattaaaccaatgtttaaacgcatacaaaaatccaaacagcaatagcaaaactaacgttaaacctataaagtctagagaaaatcgaaaaaggaaattagaaatttacttaatggaacccgagattgatgttgaaaatacactgaaaaagaaggaggaggccgagctaactaagataaaatcgtacatattgttaaaaacaaaacaaaaaaacatagacacactaaattcaagacaaagcaaagataataagaaaaattgataagttacaaaaaataagac

SEQ ID NO: 5216 - DNA, 1876 bp, DROSOPHILA
atgcatcaaagagccttagaaacttgtacgatccatggcgaggatctcattgtgacgcctttcgcccaaattttagccagcttacgttcagtgcgcaacaatttattaagtctgacaaatgttccagcatcaaacaaatccaggcggcccaaccaatcgtcgtcggcctcgcgatcaggaaatccaccaggagccccgctatcccaaggcgaggaggcatacacccgcctggccaccgacacaatcgaggagctggactggtgcctcgaccagctggagaccatccagacccatcgcagcgtctccgacatggcgtcgcttaagttcaaacgcatgctcaacaaggagctgtcgcactttagcgagtccagcagatcgggaaatcagatttccgaatatatatgttccacatttttggacaagcaacaggagttcgacttgccatcgctgcgcgtggaggataatcccgagctggtcgccgccaatgcagccgctggtcaacagtccgctggacagtatgcacgctcccgatcgccgcgcggtccgcccatgtcgcagatcagcggcgtgaagagaccgctgtcgcatacgaatagctttaccggcgaacgtttgcccaccttcggtgtggagacacccagggagaatgagctgggcacgctgctcggcgaactggacacctggggtattcagatattcagcatcggcgagttcagtgtcaatcgaccgctcacctgtgtggcatacaccatatttcagagtagagaattactgaccagtcttatgataccaccgaaaacttttcttaactttatgtctactctggaggaccactacgtcaaagacaatccgtttcacaattcgctgcatgccgccgatgtgacacaaagcactaatgtgctactcaatacaccggcgctggagggcgtattcacgccgctcgaagtgggcggggcgctgttcgccgcttgcatacacgatgttgatcatcccggcttaaccaatcagttcttggttaactcaagttccgaactagcattaatgtacaatgacgaatctgttttggaaaatcatcatttagctgttgcctttaaattattacaaaatcaaggatgtgatatattctgtaatatgcaaaagaaacaacgccaaacattgaggaaaatggttattgatattgtgctgtccacggacatgtccaagcacatgagtctgctggccgacctaaagacaatggtggaaaccaaaaaggtggccggctccggagtactgctgctggacaactacaccgatcgcatacaggtgcttgagaatctggtgcactgcgccgatctgagcaatcccaccaagccgctgccgctttacaagcgctgggtagccctgctcatggaggagttcttcctgcagggcgataaggaacgcgaatcgggcatggacattagtcccatgtgcgatcgccataatgccaccattgagaagtcgcaggtgggcttcatcgactacatcgtccacccgctatgggagacctgggcggacctggtgcatccggatgcccaggatatactcgacacgcttgaagagaacagagactactaccagagcatgataccgccttcgccgccgccatcgggcgtcgatgagaatccgcaggaggacaggatacgctttcaagtaacccttgaggaatccgatcaggagaacctcgccgaactggaggagggcgacgagagtggtggcgagagcaccaccacaggcacaaccggaaccaccgctgcatccgcgctaagcggagctggtggcggtggcggtggaggcgggggaatggcacccagaacgggtggctgccaaaaccaaccgcaacacggtggaatgtgac

SEQ ID NO: 5217 - protein, 624 aa, DROSOPHILA
MHQRALETCTIHGEDLIVTPFAQILASLRSVRNNLLSLTNVPASNKSRRPNQSSSASRSGNPPGAPLSQGEEAYTRLATDTIEELDWCLDQLETIQTHRSVSDMASLKFKRMLNKELSHFSESSRSGNQISEYICSTFLDKQQEFDLPSLRVEDNPELVAANAAAGQQSAGQYARSRSPRGPPMSQISGVKRPLSHTNSFTGERLPTFGVETPRENELGTLLGELDTWGIQIFSIGEFSVNRPLTCVAYTIFQSRELLTSLMIPPKTFLNFMSTLEDHYVKDNPFHNSLHAADVTQSTNVLLNTPALEGVFTPLEVGGALFAACIHDVDHPGLTNQFLVNSSSELALMYNDESVLENHHLAVAFKLLQNQGCDIFCNMQKKQRQTLRKMVIDIVLSTDMSKHMSLLADLKTMVETKKVAGSGVLLLDNYTDRIQVLENLVHCADLSNPTKPLPLYKRWVALLMEEFFLQGDKERESGMDISPMCDRHNATIEKSQVGFIDYIVHPLWETWADLVHPDAQDILDTLEENRDYYQSMIPPSPPPSGVDENPQEDRIRFQVTLEESDQENLAELEEGDESGGESTTTGTTGTTAASALSGAGGGGGGGGGMAPRTGGCQNQPQHGGM

SEQ ID NO: 5218 - DNA, 15677 bp, DROSOPHILA
cacaaattttcacagggtaaactaggaatatgcttcatacatacaaaaattgaaccaaccatcacttgattgcatatataacttatatatttaataataataataattatcataataataatagcttaaatattacaatacagaatgcagttatacaaaagtaaacaaagaagcaaatcaatcgggagtaattgctaaacatacatacatacatacatatacatatattggatgtgttccagggcaaagaaaataactatttgtaacggaaagtctccaaagcttgtcagaaacattagtgtgtaccattattactcattggttttgttgttgtttataaatccctacacatttgctttcggtttagaaaattacaaaaattgcattaaaaatttgtttcgattcacttcgtttacaattaataattggagatatttgttgtttttctgttttttctttctccccgctttcctctgttgtttcttcgctaggattttaagtgttttatactattttatatatatttaaatatatatttagatatatttataaaaagcttttctgtgtggtttcttgttggtttgtgtggtttgcattttgctattaaactttaaaaatattacaaaaaaatgtatgcgtatatataattaaacaagagaaatatctgtagcaagttttaaattgcataattattatgggcttctttagttgtctacgattgatgattatatttaatatgtttaagcgttagcttcagctttaggttttagttttaacattttttttttacggaggcaacacaaacaaacatcgatgattcaaaaaaaaaaaaaaataagtaaccaaaaataaacgacagaattcgtaagttgcccgtctgtgtgcttttcgcttgatgttttcgaaaaaaaaacttgttgcctaaatcatatatatatatatatatatatatatatatttatgtatattacaatgaaagttaacgtggattatggattttgagtttctgagtgtggcaaatagttttaatatctgttgctgttcgtatgtgtgtactggtgttctcaaagttaattaattaaattgtattaacatatggttccgttctccatatccttcatatcctgtgtgttggtgttatcatccgtgtggccgttgtgttattttccaatttgttgctgctgcagttgttttgttgttcatcgtatggttgttgtccgttgttgttcttcatcatcctacagcagttggcagcaatgagagttgggcttcggcggctgtttcacgtccgtctgacgttgttttttacgcgatgaaatatccctgattagatcataaaatacctagacgcatacacaaacaatttattagtatcacagtttttttttttgcagcatttgattgatacttataattatttcaggtagtggggggggggggttaaatcgtttttctataagtacagaaattttgaaaagtagctataaccaaagtagaaaagatcaatacgaatgaaagcaaactttaaatagtgtcttaaactacctttattcaccagagaaccgtcatctcacaagcgatacaaagttagtttccgaacagaatggagaataaaataatcatggattctatagtttccattgtatttctttttttattgtagttacggtttacagaaatcaaaagaaagtttttaagaaatacgaccaaaccaataaattaggtgtaaatttcaggcatattccaacagcaaattcaaatgaactgaaatgctgctgtgaagaattcgaaacaatcttgtttataaaaaaaaaataaaggtgtttttgtataagcaagtatgtgtttgtacagatgtatgtaagtgtgttaatgtccatttgcaaaaagttattccgaaatatcatcactgcaatcataatttttattatagaaaagtaactgatatgaaaaacctagcagtcctcctcgatttgttccctgcaagaatgtttatacagatttatacaaaacgtatttcataaagtccattaattgtaaaatattacccaatattgcagaaatgtaatactaattcaatgctatttacattactatcgcctatccaaataatttccgtgttagtcttattgagatgaaaaactttcacgtttacggaaaacacatcttgtttgtttagtttcatgtgtagtgttggccaacgtaagaaatatgatacaaaaaagcatataattaaattcaacaagcggatgttgtaagaaatatagtaaaactcaaccattatcaagttattagttagtaaaagtaaagaaaatagtgccgaaagcaattaagcgagggttataagcaactaattacgagtgtctacgggttaagtaaagtaggtgtgttcatatactcagataggatacataatatagatcgtatttcatagtgttgaatagaatagttgtatgcacctaatgcctaaagtagggtacacttaagtctccgcttcttgcatctatctttagcacgcccgctcgtggctttcgaatcttcggtttttcgtgatcttatttcgcgcatcaaatcaaaaaatacctgcaattgtggattgggaatagagtcatatacaaagtcagcatcagagtcaattagtattcgcaaattattacatatataaaaataagatgatcaaggaccgaaccaacataattacacacgcacacacatcctttgtgcctttcggacaaagaactatattagcttttggcaattgtcaataaaaaatatggaattaaatcaaaataaaatagatatatttgttaagggcaacaacgttgaaagcatgataaattggtctacgatatttggcagtgcgtttatatgttgtagctgttgtgtgaatatttgtgtgtgcttcgctgtgtatttgtgctaaggtagctaacatatttgtatgttctatgaaaaactactatgactttaatgctaaaaatttacttggttcattaaaaaatatgtttgaactattgttgaaatcccagttcattagatataattgcaaataatatcatttgaacttatagttccattggttcccattacaatataactcttcattcggtttcctgattagatttttatatttttaaacgaattttcaatggcattgttatctgaacgacgccccttatcattcttttttttgaacgctagaaatgagggtgtgcaactatagatatagattgtatttagagaggaaatggcgtagaacaagctttgagtttggataagccttgtcatatttcaaactaatgtttaaaaaatacgattctacgcatcaacaatttcaaagaaactaattgtgcttatgaaccgtattcaaataatatttgttttttacgtaatcatcgcctattagtaaataaactcgcaaagccttaactcgcaaaaacttttcattgaatgaatgtggatttttcttatcactgtgtctctataaaaatgaaactcgaacaacttgataagcaaacaacactataaactgagtgttttgctggcgagaaagttgagaatgctccagtgatgttctcgttcgtaagtgaaaccaaaaaaaaaaaaaaaaaacaaatcacacttaataaactacgtatgaaaactagttaaacaaaaaaaccggtgtgcagttttcgtttgttcgataaacattttagcttgccaatttccaaagagttttcatttttttttttttttttgttcgtgggcagatggatcgtatcggtggcttgttggccactcctcctctggagcgatggagccaactcatctcggcgggatcaacaccactcaccttgtccacattttcgcgggttttagccgaggtctccacatagggcaccgcccactgctgcgccctcagctggcactcgctcagcggcaccttgcgcttatcattcagatcgcacttgttgcccaccagcaggaacggtatgctctcatcattcttcacccgcaagatttgttctctgaaaatagcagacaacagcaaatcgtttcgttaatattattagtatatagtagcattcaatatactgttcacacaacggattggcacaatgtagaaataaataccttgacaacactaatggatagataagcgtacttatcagcacttcaatataaaagtgactcagttcgtgtgtcactccatttagaagccagagaaaaacctagcagtcaagcagatatatagatatatatttatgtgaacacactgacagtggacaggcgaacgcataaatagtagggatcgaatataatggatatacataagtatttcccaggccagtcgcaccctgtcctctgccgacgtctaataacaattttctagccatatttatgtggcagcagcaatattaagttgccaagtttgaatactcaattaggtcgatggaaaagggggcgccttaagtgggagttatggcaacgaagtagcatattcatcggtcggtaattatcgctagtacatgatatggcatactaaaggcaggactattaactttggtgcctgatggggcattcaattggagttgaaatagtaactagttttgaataagatacaaataatattgtataccaagaagaaatgaataaagattaattacacatcgcacaaaaaaaaaaaaaagaggaagctgaacaactgaacaacttgcatgactaattagcaccgcagaataataaaagatggaaaaaactgaaaagcttgtgtgcaaaataaaaccgcgacacatgtcagcctgagaggaaagcaaaacgcgagactctcgagagacctcaggaaaatgtattaaaaaaaaaaaaaaaaaaaaaaaaataccgggggcaatgcgggaaagccaggggggagggggtgagggggctaacccggctgacacactcacctgaattcctgggttgcctggaagctttcgtcgtctgtgatggagaagacgcaaaggaaaccctcgccgctgcgaaagtagttatctctgatggcggcataatcctcctggccagccgtatccaatatatctatttgtacttcctcgccgtccagcacaacctatacatgattcaaataagatcgaattggataagcaagacatcgagtgagaggggaggggggtgtactcacctttttcctatagctatcggccttggtgggctcgtagtcctcgacgaactcatcgtacataaactgcagtgtgagggcggactttcccacgccgccactgcccaccattatgaccttgtggagcgccggtccggctgtcggcttcttgctcatgatggcgggatcactcactcgctgtatctgtatgtaagtggtgagggggatatacgaaataaataactaattaaataaatcggtgcttcctgtttgacagcattcagctggggccaaaaacagcgaaatttacgcatatttcttgtgcagttcacatatgtaaacaggtaatatatatatatatatgtatacgtaaaaggtgcgaatgggtttatgtaaatggtatggttatgaatggaaaacgaaagaaagaaagtacgatcgtatttgtctaaagattgcagctgtcaacttatggagtcggctcacaggtttgctgattgtttttggcccggcttttcagctcttcagcttttctcggggttacgtaagaaacgaaggcaatacgaaaagccgtcaataattcgccaaagtacacttcttacactttcaatgctctagcatttgtgaatgtgctttccatttacatatatgtatgtatatatatgacatacatagattttattaattgcttagcataaagaatcaaatactgaaacctcaatagcagatgtgttactgcttattatgcatagggtattcccatcttcgacttgaaaattgcacactttctgccttgtttctttcgcttggttcgatgaagcaaatgaagcataaaatgaaaagttcattgaactatttacacatggcaaagcggggcaacaacggcaaacataaaggccaacaatacagcagcataatgcagaccgggccgaaatgactctcgggttttgtttggccttttttttttttttttttttgtgcagctgttagctgcaattagccttttgtgaccattcacgagcccgtttttatttgctcactgcgtcgtcatcgattgcaataaattgaggaattgaatacggacgcattgagggaatatatatgttttccataaatgagccaaatcgaaatcgagacacacgtggccatttggcagttggccaatttccattcaagagttcaaccattcagactgaattcttactttagctcaacgttgtttattaatccgcatttggatcagggttactaagtatttaagttaccaaaaaataaccacaatgtttgtcagaagacaaacaacacacacaaaccgcatagagttcactgaaatgcaactgagttgaaatcattttccacgcttgttacctgagataacctagctgccttttaatggttaaaaccgaaaaaaaaaagaaaactgagatctttcaattcccagaataaatgtgctgtgcacgccagctgaattgccaagatggaaaagggtatttaacaatgtagccaattccctttagctctatttcttccgccttttccttttttttttcatttttttttttttttttttttttttgcttttctagctgccattcagtttgacgcgtcggtggaaaagtggaaaattgaatggaaagcgggcgggcaggcaggcagcactgctgctatgtcgaatgtatctggaggcaacaagtaagtcagccaaatgaaacaacggccaacgattgtcagtcagagtcaaccagttgggccgccactgcgtatgagtaatcaacgttagagctgcaccgtcaatcaattttttactcgagagagcgcaaaaatagaaggcttaaaattggacggcgaaaaacttcccacacccaggctgagtcaattgaattgtcaaggaggattgttggccaacaattgctaacagcgacaacacctgggaaataacgccggcgaacttgtttaattgcatattactcatacgcaacgttgagcgagctcgacaacgccaatgtatattggtgaccaaaaagttgggcatttttatacgcagctactctacaaatgcataatattatgtagcacatataatcgatgattccaatactattttcagacacaattttacacactttatagacggcaagcgcacttttttctaaaattaacattatggccacgactgtatggtcataaaacagattgtgcattccaaaacgttatttatggccagcaaaagagaaatgaaaatagtaaagttactgctagaaatttacctatagccaattgaaatatcgccgttcgatttgaaatcaattttcctgcgtcgaaaaaaaagttgactcaaagctaaccgtctagttaaacgagatatcgctcccatggctaagagttaccggttatgaaaaccatttgaagaacccgaagttatcatatgaagtgaaccgctaaaagctaaagaaaacattcaatgatttccaaatagttccaaccaaaaaaaaaaaacttgatctacatcgtgcacttgccattagtaaataaaaatgttttgcctgtctggcgaaaagaacaaccaaagattttctggtgattctgctgattagattatgtacggatttggcatttggattgtgaaatgaatatattttgcgtacgctcatatcgtaaaaactaatttaattgtcataataaaaggaaaaacaaagctgcatagaatttttagtttcttatggctggcattaaaaagatttcaaattaaaagcgggcaaaaaaaaaatagaacgaatcgacgaataaaattaccaaaattgtatacttgtgtgtactattacgaacatttcgcttctgatttccgcgctctgcggaaatttcacatcttaccttattgttgaaaataatacaatttgccatgacgtcggtgtttagttgtttatactagtacaccaaccgtgcaaaaaccacccagctttgtgcataaattagccaaaattcttgtttcgattttaaacaaaaacggaatttggctgcttctattcggttgtgtcaacataaattgctctctcattttcattaaatacgaattcttttgactgcattatgtccttaatagtagcaccccaaagcacctgttgtgacaatggaaatccaaataggaaaagtatccattcacctttaaagatttccttcaatagtcttacaaaaaataaatctgcacgttaagacttcattttgctatgaactcatttatcgctgtcgcaatttttgcatttcaaacaatcaagcagattgtgtatgttatttaagctttttgttttccttattaaacattaaaataaactaattcagcttaaatataccatttgaatgctttggatttggcttatacatttttttttaaatattcttgcctgagcatttttcatgttaccatctatttttttcaaagcacacttcaaatatttgctaaacacggcatttttcattcactttcacatcaaaggctaaaaatgtttgatttcgagtctacaatatcttttcaccaacacacactaatacacattcattggcaacaatgtatgcttttcctttcaaaatgcttttcccttagaatatataaactacctaatctcgatttgatacactttaggtgaacttttcactcggtaccaattatttagtatgaataatcgaaccgatatttatttggttccaagtgattttgaacagatcctagaatttatgaagttttttttcgcatttctctgcacattttctgatagagtatatatgtatatatcttatgtatatatatagatatatatattatatacacaaaacatcccggctccgttgggcgcccgatttgtttattactcatattatggttttgcctgttttgccattcgatttcgatttgatttttcctttgtttttcccttttatcccccctttttatgttattttttggtggtggcttgccaatgacgtcagttttcagcgtctccaccttgtgagtttagtttttcgtgccttttcatggtgctcggccacggttagcttttatttttattattacagacaagcctcaactattgaatatctttaattatggttaactttgaaatatgtttcataactatcttagctacttctacccatccccattccttttttcaatgtctcaattatggaaaccatcaaaagtgtgatcgaaatccttgagagaatccacctatcggtatatagtatcactcctaaacgatgttatcgaatgtttactgtactttttttcaactatttttgtggttggttatccaagcatgatgtgtgtgtgtgtgtgtctgtgtggcatgtgcaactcgaagagtttagtttaatgcttaaagtgcacgaaagagtctacgaatttaccgctattaccagttcccacaaaacgggcctttcgtgccttctatgcttctttgctctctgcgttcttctctttgccaccctctatccaccgtatttggcctttagcactgccgtagttccttcgttggcatttttttttttttctaatgacacctaaaaggggtaaatactcatacaatatgtacatataccagttgagcagttttggggccgccactcccatgtgatttataaagattttccagtttttgatgacgttttttttttttttttttttttaaacgtatgtaaacatttgcgtatttcgccggtgtctctcttcagatactacactttttaaatgctttattattttttttgcgaatcgttttccagctttcgaatgcgtgttgcgtgtgcttcgtgaaattcgtgtcagagttccatgtttgctctgctatatatattttttctttgttttgctagttccattttccagcctaactgttaaattaatgaatttattttcagttgatttcagtttactgtgggccttgcttggcgttgttatggcgttgttattgttattgttgttggttgactgcccccatgttgttgtggtttgttggctataaccttgaggcgatttcgtggttaacgaagtaacagttagtgcagagagaaaaatgccgtcgatcaaaccacactaataataattataaaaaaaacgaacaattattcatcctatttgggcatacaatttaaatattaaaattttccgttttttcttcatgtgcattaaaaccacactaataataattataaaaaaaacgaacaattattcatcctatttgggcatacaatttaaatattaaaattttccgtttttttcttcatgtgcattaaaacaacttgccgtatttatagagcgctgaaaatgtttatgggaaacgctggaacgcttttatggcctcaaacctaaaaatattaaaaaaaaaaaaccaaaaaacctatatatgtaaattagccacgccccctattttctgccaagtttgttgcccctttttttatgtgttttgatgcgccattggcggaatttgcaaccaagtgcagcgcttttccttgtcgccgcttttatctcttgtatttcaattcatttacactttttgtgctgcattctgcaaagcgaagaggcgtgattttgtgtaacttccgcacaagattaagttcaataaaccgccacatgtgcgaaaaaaaaagaagcgaaatccacgcatattattgtctctgtctgttttccccaacttgtcatcgcaacttctatgactttgtgtgggaattttgtgtttcagtctttttattctaaattttttttttttttctgtgcttttttttgtacatcattaaatgcaggtctgactgagatggttgttggaagagtagaagagcacacaacaacggagcacagagtgcattaatcaagcagaaaagaaatcccagcgagtgaacttttcttacttcattgaggagatggctgccattccgccgttagatcagttcaatgcacttttgcgattagggcaaatcacactgacacaaaaacccatgcatatgcatatatgtataaaacgtggaacgaaaggcatcgacattggaatgcaatattttccagatgagtcataatgcataattatttaaatctgtggcatttaatcgacgatttcaacgccgctgcgcagtcgcgtgcaacgctgtcaatgtcaagttgacaggcaaatatgttttaaatgaagttgcatagtaagcataatacaaacatttataaaaattcttgcatttcaaggacttaaatgcccaaatatatttattcggatcgatatagtgttgatcagttgatattaatcagtatagtattgaaaagcaaacagtattgataagactgaaaatatttctagatactttctcatactttctcagcgttattctcgtgatatgcgactggtttctgcggccctgacactttgaacttttatacattttcacttacccctgccagaaactgcagagtatttgttagcctgagaaagtgttgggtaaaacttgttcatttgatgtacatttgttacaactttctttggacaagccgaggaaaacttgtcaagcgaactgcgtggctcagactcatttacaaagtgtttttatttggccgagcaagtttgatctgcctttgcagatagcgatacctaaaaaaaaaaaaaaaaaaaaaactaaaaacttatttcacaccgagtggtatatgaaaaataggtacatatatgtacgaacaatgcgtgggaagtgttttctgaagcgaggagagcataattaaaacctaggcatagtcagctgtgataaaagatcttgaaatgcgatggagcaacaacaaaagccatggggaaacacttgagagcctgggcataaaacaaataaaacctgtataaggcaaatgtgttgagagaactttggagatgctgatacgatgatgtaacaaactaaagtcagctaacaaatatgtgattgcgcgcgcgactttgtcaagaatcgtttgttggaagaaatctcaagattttcaaatgttaaatgctttacaaacggatatcgtagatcgttggtaacgggcgattaatcatttaattggaaaataacaaagtcattacacgtatttaatgcacaattcattgataatcaggtatataaaacgtattttgaagacattcggcagacatatttggccattatggacaattatcatcaagtgtgtataacttttgcattaggccaacattattattcgtagaaaacaaactttaatgttggccataatggacttggcctagaagaaacatagaaatagaacccatttccgtgatttgtctcccttgacaaaactccattagaagtgaaattagagcaaatcacagcttgatggctataaattaggctaagttggccgacttgcgctatcttctcccttctggccaagttagcaaacatgccggagatgccgaacaaaagatgagaaaactacatatataccaaaaactgtgtcactgcgaaagatcgtgaagattatgagtcagtgttttcaactctattgttaatctattctcgcctgccagagaattatatttgaaaaggtcagaggtgaaacagctaacaaattgctcggctatatcttgcaaataatgtaagattttgtttacacttttgataacgattaaatttctctggaatatgaatggctcatattctacagaccgatctgaaatcaaaactggtttcgcattttgtaaataataaggcaaactacacaaagagcagttattgattatttaagcactcagttttaaaggaactgagaacgcatttttttttgacatacttcagctattcacttccccccgttcgcatttcgttcaattggtgagagcttttaacgccccttggcaaccaaacaaacaaacaaataattaggaaatgttggtgaaagggggaaaggggtcaacacatacgattaagtgagtcatagataaatgaaattattcaatataaaacaagctggcactcaaattgatcttgaacttgagcctaattagaaactgtaaaaccatttttctgtgtcacgtttttcagttttcctcatttgctttaggcgtgttggataaaaagatggaacattcagatgcgcataaagttgaagcggattaactaacgatcaccatcatgatgatctaacgctaatgtcaaaatggttctccgattagcaacagaacccgaaaatcggcacgttcgtggagataatgagaaatggggaaagggaaagatggtagcggaaaacgggtcactgtgagaaaataacgccacagagcgaatgccatcaaaagcgatctcacaaaataacagagattaaaaccagacaccgtttctgcgaattttcttgcatttcaaacgacaattttcgagtgccaaagaaggttcttagaaattcgaaatatgtgattaatgaagaaatgtgcttaataaacttgtcatttaaaaaaaaactcaactgtatttaactgttggttaaataatatttgtataatgttaaattattactaatacttgggaaaattcggcaaatgttatttagagcggcgtaaacgagatcccaaagcggaattgggataaagagaagtttaaaaagcaaaggggcgatgggggcgtgtgcgtgcttgcttgtgtgtgtgtgtttgtgtgtatgagtcaacgcgcaaaatgcgggcggcgactgcaccttgcacaccccgcaaaaagagagggcgataaagcaggagagagcggcagcgagagcgagagagaataaggtcaagcggggtgcggcaacaaatatttctgctgatagccgttgataaaaggctctcgccgcccttctccttttctttctctctctctctctatctctcgctctccgtgtgctcatcagtccgctcctttcctttattttgctgaatggagcacacacacaaaaatgccaagcgcaataccttttatttagtttacatttaaatattcaacaaagcaaatagcagcagaaagatttcactgctgagtttttttttcacctcttgctttgctcacacacatatacacacacacacacacacatccactttcttcgacgtcgactgcaacgccggcagcggcgccttttggcggcttttacaaattttgtttatgaaacaaaaaacccctgtgtatattcctttctgggatttcatcggtgtatacacccagataaaaagaaagaatctttccacacggcagacatcatgaagaacaacatacgaaatatgcgtaatcactctataatgctttagctgtaaatgcttttgcttctctttcctcctttttgcgtacttcgttttcttccttcctttttattgtattttgcgcgtccgctttggcctgtcgcttcgtttgttgttgctttgctgtgttatctcgcacttgatgcactaaactaaacaaaaaagttacaggcgcgatcggagaatcggcaactgatgaattaacaggatcggaacgcaacagtaaattggctgcttttcggtttctcttctcgttcgccgcacaccgcaattaaagttccgttggttttgcttgcttgaaagaaactagtgtgaaagtggaaaaataccacagaggtgcaccaatgtgaccgctctgccatcgatcaattataccaagcacaagcatcactaagaataacacaaaaataccaataagttccgtcttatattgaggtgggtgtgatcgctaaggctggtgggtgtactcgctttgctggttgatgtactcgataggcgagcgagcgagttgtgcactcgctggcgagcggtttaagtatccgataactatggttggtgcacacgctaagtaacaagtgaccgctaaactgctactttaacagacacaactgtgcatgttaagcgcactcatcgttccgccagatggcttctttgcacactcgtttcggtattttttttacaccaacttacagtatatttttaggccatttctgcgtgtgtgcgttcgtgtgaatattgtgaatattttttttactgtgaaaatagacaaaaatcggctgtggaaaaccgaagtaaacacatttgggaatcatggcgattggcccttaaccttaacccttaagtgtcgtgccgacagtgccacgccacaaacccaaatcccaaagaaacaaaagcgaaagaaaaaaaaaaaagaacaacaaaaagctatagttgcagcctctgaaagtttaagacaatcgccgatccgatcggaagcggaagatatatgctcgccacaccaaatggcatggtaaacacctctcgttcctctaaatgtgatgtcgatgtcggaaaagccgtagaaatcgtacaattcctaaaatcgcaaacttaacctcgcagcgttgtgtgcaaaaacggagaggggtgggggggaaacaacggaaaaaaaaggcaacgcaaagcaaagcaaacgaaaagcgaagcgtgtgcgagcgagaggcgagtgaatagcattgttgttattgttgtagtgacttttattttatctcagccggcgatttaattctctc

SEQ ID NO: 5219 - DNA, 1401 bp, DROSOPHILA
ttgcggtgtgcggcgaacgagaagagaaaccgaaaagcagccaatttactgttgcgttccgatcctgttaattcatcagttgccgattctccgatcgcgcctgtaacttttttgtttagtttagtgcatcaagtgcgagataacacagcaaagcaacaacaaacgaagcgacaggccaaagcggacgcgcaaaatacaataaaaaggaaggaagaaaacgaagtatcgctatctgcaaaggcagatcaaacttgctcggccaaataaaaacactttgtaaatgagtctgagccacgcagttcgcttgacaagttttcctcggcttgtccaaagaaagttgtaacaaatgtacatcaaatgaacaagttttacccaacactttctcaggctaacaaatactctgcagtttctggcagggatacagcgagtgagtgatcccgccatcatgagcaagaagccgacagccggaccggcgctccacaaggtcataatggtgggcagtggcggcgtgggaaagtccgccctcacactgcagtttatgtacgatgagttcgtcgaggactacgagcccaccaaggccgatagctataggaaaaaggttgtgctggacggcgaggaagtacaaatagatatattggatacggctggccaggaggattatgccgccatcagagataactactttcgcagcggcgagggtttcctttgcgtcttctccatcacagacgacgaaagcttccaggcaacccaggaattcagagaacaaatcttgcgggtgaagaatgatgagagcataccgttcctgctggtgggcaacaagtgcgatctgaatgataagcgcaaggtgccgctgagcgagtgccagctgagggcgcagcagtgggcggtgccctatgtggagacctcggctaaaacccgcgaaaatgtggacaaggtattttttgatttgatgcgcgaaataagatcacgaaaaaccgaagattcgaaagccacgagcgggcgtgctaaagatagatgcaagaagcggagacttaagtgtaccctactttaggcattaggtattttatgatctaatcagggatatttcatcgcgtaaaaaacaacgtcagacggacgtgaaacagccgccgaagcccaactctcattgctgccaactgctgtaggatgatgaagaacaacaacggacaacaaccatacgatgaacaacaaaacaactgcagcagcaacaaattggaaaataacacaacggccacacggatgataacaccaacacacaggatatgaaggatatggagaacggaaccatatgttaatacaatttaattaattaactttgagaacaccagtacacacatacgaacagcaacagatattaaaactatttgccacactcagaaactc

SEQ ID NO: 5220 - protein, 201 aa, DROSOPHILA; identical to SEQ ID NO: 5214

SEQ ID NO: 5221 - DNA, 5490 bp, DROSOPHILA
cacatgcaaaaagtcattttcaactgcatcgtgcgagtgagagggtgtccgatcgtgctaaaaagagaggggacgagtgagtgcgtgccgcagcagcgctactaaatgttccgcagctgccggagatgcaatatttaacccttgttacttgcgcctttgagtggcggtctggtggttattactgctacagtcaaacgggccccaagagtgattagcattcgatctggcttggttatgaattcaatgccatacagtcgatgaaaaaaatgtcgaagatacgtttgaggaacatccaaaagaattgatgtacatatatatatatactggaatattaggtgtttgtatcggatgatttaggagcgcttagttatcaggtcaaaatttcaacgcttaaaatgcatttaaatacatacttaacagattggtgattatcctaaaattcgacactagcatatgtggccaggattgtgtctgaaatgacattacttccggccaaatagcagcatgtatgacaaagggaaaagcatacatctattcttaacaaataccaactttatggggttaacttacggctgtactttatgtgcgtgttttgtgtgccaaagttttatttgcctctgctttcaacgcttcagaaatggagggagggtgggctatgtatatatatgtacatacatacatatgtacatacatgcgggctctgggattgcctcaatattccctttaccatttcggttctgagtggagtacagcagtttctctacttaccaccactcggtgcaactacagttaattttttttagtgaaaaacttcatctttttgctgcagttgcaggtgcagaatttcgcatttcctggctaggtgtttgtttgcccaaaaacaagttggtaaacatgaatgaattctctagtctgcatatgcctgtcaaatttatgtatttgtttgcctcgtgtgcggtctcgaattcatttgcaaaatttgtcagctccagcagcagatatcacattttttttttttctaatattcaaaattcgtaccacttggcagcacttaaaatggtcacattgcgcttcctgactcctcgcaggatcgtcgactattgtcgtcgtctgctgagcacggacctggtcacggcccttcgtccgttctaccaggccattcggacggatggcctggctcacaatccggcagagaagcgggttaacgaggagtcactacgtctgctttgctcccatctggaatccctgactgggccgtcggcaagttgtcttccgcccgatggccatttggagttctatattccatcgggctcggatgagtccggtagtcgggtggttagtcgactggttagggtgcaggtagaccggagtttattggatcccagggcggtgatttgccagattctgaggtcatgtaagctgctgccgaaggaaaaggagcaggaacaaatgaagcgggtaaatcaaatgatcaactcataaacatatgaatattcgttaggttcgttactcattcgaaaaagacaaagtttcctttcacagcgtagtatttgccctacgccaggtgcttcacaaacttattgcaaacataaagattcatattgttcgtgccaccccttttccacgcagggtcaggagatggaaaaggagctcggaaaagtgctgagaaaggaaccggtgagggaaagggtgagaccgccccaagcgccagtgcaaaagaatttgagtgccttaagggaactctttaaggatgccaaaagggagcactctttggaaatatggatgcgtcaggccctggcacgttcccaggcctccgaagtcgctactctacgcggcaaaatcgagggcattgaagcggctttggtccagttgttgggcattcggggaacccgttacgattgtggctgcaacatggaacgctaccacaactgcctcagcatcctcaagggcttgtccgaggatccgaaggtcgccggccagctgggagcccttcgcaatcgttttgtggtcttcgcaccgtacactggtattagcttggagggcgatgtaatgctcttttcgggcgactccccctcgggttggctggccttcctctccgagatgcgtttgcacgaggagcaactgagactggtgcccctgtacgagaaagccctgtctgccgtgctccttggcatacggattgagaggcgtagggttccggagccgggctgtgaggcgcgtgcctatgcgggcagcttgaggcgcgtgatccgtgcggtcagtgagcacctgaggctggaggatagtgtccaggagttgccggcatcgctgcaggaccatcatttggccattgtgccggatagtgatataccgaaggttagccaaaccggtctcttcttggccccggcctcctgctccggacccgatctcgtggagttcatatgccggaacttggacgtggccagcgggcggttcagtcgctatcgcagggatatccaggtggagcggcaattgtggcgacagtgccaggaggaacttggcttgcagcgactcagcaaggacgactctgtaacgccggacaagatggtcatggccatacggcatctgcttcagagtggcgtcaagtcctgtcgcggtctcagtctgcacatcacgaactattggtcagtgcccaccgatggcatcgtctgcattccctgggactttatgtcacgcgagaagtagcgcatcctgctgggttgtgtcacttaaattgcataaattggtagataaattgaaaggtttgggcttacgcttttaaatgttcaactcgacattccggcgacttttttttttatttctgtgtcgttgggtatttggttttggtttaccttgttgctattgatcgattgcaattgttcatttattatttccattgatcccgcgcatcatttgattgttccttatccagtggccagtgtctttgcgctattttaccgagtcagcgctggaatcattgtttattcaggtaatttttattgtgtgcctgcgttggtttggattgatattttgctacattaggctggccagctgaatttccttcttggttcattacattctttaggcttttcgggcgaactaaatgcataaatagaaggacattctggtaaaagagcacacaggcaggactactgaaccaaagttcgcaactcttgcccgaatgactgggattttcctgtacttttcgtttggcgttgccttgccttctggggttgaacgtgtccccgtacgacttctgttgccactacccatttccagccatcgcatccctgcagatagagaaaaaggaaagctgtttttttttttttttttaatgaaagcgtatcaatggaacatttaagtgcttagtatgagctactagaacttctaaccatttacttgtcgtggaaactgagagcagtttcagttggttagccaaaagtttttcgcagtgcatgacgaccctttgagctatgttttcctttgcaaccccgtcaaggggcgaatggagtggaatggtcttgttgggcggacgaagcccatggatcccgcacccttcgttttcgccacgttgtgcgaaatttctgtaagatttagctaatgttccatggcttcgctccatcaatgtcgagcgctgggcatggggatggtttgcccggcgaagtttgtctggtgtcgcttatccttcttggggggggtggcatcccacatggcacccactcgatttccagacgttgtcatccacctccgacccacattatccgtcgcgtgtccgtgtccactgggtggagaatccttttccttttcaatttgctcttaggcatgagttatgactttctaatatcaaggatctttaacatttctgaaatattgggagatataaacacatacttattccgcttccggttgaggaactttctgaatttccttgaatttcaagtagtccatgagttaaacgaattcaactgtcaaattcttttatattactgctcccatattcagagcacaactacgagcactagcacacgaatagattttccacaacgttaagcatatgcaaacatctaaattctacggttctacattcgattccattcgattcgattacgattgccctcgtttttcagttttcttcgagatccgtttctatggctaaaataaatctttggttgggtaaactccgtgactctgttctgtccaggctgcaggtgagtgtttgcaagatgacaagaagatggccaatgaatccatcgtctctccaatagagcatcaagaaacccctaccccttccttcgaccaagggccccctcaatgccaatgaaacctcaaattccgaaggtaatattagtgactttcagcagggcgatccaataattccacccatcgaagctaacaaaatgataccgaggcctcaaaatggattcgtcagccgagccctctactaccgaggatactacattaggcgttaaaggattcgtgcctaacatgaaattcagtataaattgaaaattttacacaccggactcgtagtctcggattaaccaaatcgagccttgaaacaccggctatgttacaaattagctcagtaatttcttgaactttaacaaatcatcagcagtgaaataagcatgtgcaacatttggtctaaaatcaatcaatcaataaacatttgtacctttttttctcttttttttttttactaaatataagccagcggatgcaggatacaaatccaaatgcgaactcatccgaactacaagtgctatatactcgatttttcatttggccgaaccagagaagaggcgagcacttcttgtccccatagagatttgcagctgaagtggggtttgaggtacacactcgccactcccatgtgtgcctgatttgcaccatcattaaaatcatcatcgtcagcgtttgtaatctaatttgcagtcatctcatcaccatttgaccccatatactgtgggtgctcgcactcgcactcagcttgcgagtatcctttgcaaaagttttacgcccggcattcaatttaaatggggtgggtggcctggccaatggccattcgaagggtggtggtgtgcttgttgaatgaaacaaacccaaacccgaaactcgaaatgcgaaacccaaacccaaatccgaaaccctaactcaaaaccatgacaatctcttcgagtgtcgccatgaatagatttcgcccacaatagatgggtctaatgaaaggggtgtgcccagtggcatgggcacgacttggaaagatctcaaaattggagcggaaaattgcataatactatgtggtcctactacatactacatttggatacctacgctacatgctcgcgctcacttcaaatttcttttattgtacagaatttagttagtgtatagttaaattagtaaatatacttagtatactctaggggacactgctgcttgcgcttcatatcttagggattacgaatgatgggagtggtgtaaattgatttgcag

SEQ ID NO: 5222 - DNA, 1913 bp, DROSOPHILA
atcacattttttttttttctaatattcaaaattcgtaccacttggcagcacttaaaatggtcacattgcgcttcctgactcctcgcaggatcgtcgactattgtcgtcgtctgctgagcacggacctggtcacggcccttcgtccgttctaccaggccattcggacggatggcctggctcacaatccggcagagaagcgggttaacgaggagtcactacgtctgctttgctcccatctggaatccctgactgggccgtcggcaagttgtcttccgcccgatggccatttggagttctatattccatcgggctcggatgagtccggtagtcgggtggttagtcgactggttagggtgcaggtagaccggagtttattggatcccagggcggtgatttgccagattctgaggtcatgtaagctgctgccgaaggaaaaggagcaggaacaaatgaagcggggtcaggagatggaaaaggagctcggaaaagtgctgagaaaggaaccggtgagggaaagggtgagaccgccccaagcgccagtgcaaaagaatttgagtgccttaagggaactctttaaggatgccaaaagggagcactctttggaaatatggatgcgtcaggccctggcacgttcccaggcctccgaagtcgctactctacgcggcaaaatcgagggcattgaagcggctttggtccagttgttgggcattcggggaacccgttacgattgtggctgcaacatggaacgctaccacaactgcctcagcatcctcaagggcttgtccgaggatccgaaggtcgccggccagctgggagcccttcgcaatcgttttgtggtcttcgcaccgtacactggtattagcttggagggcgatgtaatgctcttttcgggcgactccccctcgggttggctggccttcctctccgagatgcgtttgcacgaggagcaactgagactggtgcccctgtacgagaaagccctgtctgccgtgctccttggcatacggattgagaggcgtagggttccggagccgggctgtgaggcgcgtgcctatgcgggcagcttgaggcgcgtgatccgtgcggtcagtgagcacctgaggctggaggatagtgtccaggagttgccggcatcgctgcaggaccatcatttggccattgtgccggatagtgatataccgaaggttagccaaaccggtctcttcttggccccggcctcctgctccggacccgatctcgtggagttcatatgccggaacttggacgtggccagcgggcggttcagtcgctatcgcagggatatccaggtggagcggcaattgtggcgacagtgccaggaggaacttggcttgcagcgactcagcaaggacgactctgtaacgccggacaagatggtcatggccatacggcatctgcttcagagtggcgtcaagtcctgtcgcggtctcagtctgcacatcacgaactattggtcagtgcccaccgatggcatcgtctgcattccctgggactttatgtcacgcgagaacatatgcaaacatctaaattctacggttctacattcgattccattcgattcgattacgattgccctcgtttttcagttttcttcgagatccgtttctatggctaaaataaatctttggttgggtaaactccgtgactctgttctgtccaggctgcagagcatcaagaaacccctaccccttccttcgaccaagggccccctcaatgccaatgaaacctcaaattccgaaggtaatattagtgactttcagcagggcgatccaataattccacccatcgaagctaacaaaatgataccgaggcctcaaaatggattcgtcagccgagccctctactaccgaggatactacattaggcgttaaaggattcgtgcctaacatgaaatt

SEQ ID NO: 5223 - protein, 610 aa, DROSOPHILA
MVTLRFLTPRRIVDYCRRLLSTDLVTALRPFYQAIRTDGLAHNPAEKRVNEESLRLLCSHLESLTGPSASCLPPDGHLEFYIPSGSDESGSRVVSRLVRVQVDRSLLDPRAVICQILRSCKLLPKEKEQEQMKRGQEMEKELGKVLRKEPVRERVRPPQAPVQKNLSALRELFKDAKREHSLEIWMRQALARSQASEVATLRGKIEGIEAALVQLLGIRGTRYDCGCNMERYHNCLSILKGLSEDPKVAGQLGALRNRFVVFAPYTGISLEGDVMLFSGDSPSGWLAFLSEMRLHEEQLRLVPLYEKALSAVLLGIRIERRRVPEPGCEARAYAGSLRRVIRAVSEHLRLEDSVQELPASLQDHHLAIVPDSDIPKVSQTGLFLAPASCSGPDLVEFICRNLDVASGRFSRYRRDIQVERQLWRQCQEELGLQRLSKDDSVTPDKMVMAIRHLLQSGVKSCRGLSLHITNYWSVPTDGIVCIPWDFMSRENICKHLNSTVLHSIPFDSITIALVFQFSSRSVSMAKINLWLGKLRDSVLSRLQSIKKPLPLPSTKGPLNANETSNSEGNISDFQQGDPIIPPIEANKMIPRPQNGFVSRALYYRGYYIRR

SEQ ID NO: 5224 - DNA, 5263 bp, DROSOPHILA
gcaattagttttaaggtgaaagaagtatttatcaacctttgaggtagagcccatatgtaccccctttgtcctccaaagtagtccgttcgtgcgaacaatgtgtcacaaagcataaccaatttaagacaacaattaaaaaaaaaaagtatgtacgtctcttcgtctaaatgtttaattcgttattttaaaactctgattttcaaattaaaatgttagatttttataactaaatcaaagattttcaaataatttaactaaaattggttcttattaatagcttacattaatattgcgactaaatgtaattcgaaacaaaaaggttctgttcgtaacgtactgctttggtaacttaaaggttagtctaagcatatttatgtttcatgttacgtattgtttgatatctcttcaatcgtctagtttgtagtttgtacccagtgggagttgtgattaagccgtgcaacgtacataattcacaaatccatcatcgaatgtccatgacgcagtgtctcaaaatccatgcccagaattccatatcagcctgcggaaatatcagacaagtcaaacgaacaacgcagctcccagacttttttgttttttttttcttccagcccaatgtcttgtgattgctttttcaataaataaatattatactcaagtgttttgcagaacaaatgtggtcaattatatctaaatggtatatatttaatggtttgccttatgcctatgcttgtttgtgagtcattttaggttttaaacttagagctaggagtgcacgctgatgtaaataacttactgctaaattctgtgaggatctcttgaccgcactcaaaatgtacaattcaaattatatataacttattacgtcaaacaatcgattcaactatattataaatagaggggtacgtgcgtttttaacaaaattcctagcacccttgccacattacatacatcattcaaaatgtacagaatcatccgaatccaaactcatgcatctccctgattagcgaaagagtcgcgtgaaggttttcaaggcttgcgaaatggctttcgttgtgtccgctctacaaaaggaaatataatatattatgaataaaatacaaaacgtctgatggcaaatcctcacctcagaactgtgctgctaaattcgtccagctgttgctgcgtggctgtcacgtagccaccgctgttctttttgggcagtgcctccagcgcctgggccaggaagggctgcatccgctcgttgcccaccacctgcttcagttcgtggagcacctcggccacatccaccagcatgtaggagtgcagctgaaagacggatgcctggatcaggttcatcaccagagcaccgccatgctgactggccagctccaccaccaagggacggcactcggtgttccggctatggttattcgatctgccccaaaccaacaggttgataaagaacttcatcacagacgagttggcctcgcggtggtccaaggagcaggctattagcgcacactggaagatcggcgtgatgagactgctctggagcagctggtggggacaacagtccaggtaacgcgatgccaaacggaagaagtcatccactgtgtcggggttattttttagaccgttctccatctgaagcaggccaaatgtgggctctataaatgcctgaagcatctccaaaagtccgccaatgcactcgctggactttgcgaactcgtccaccagtatggaacccacgtagaggaagcaactgtggtgctgcacagaatacagcacgaccatttgtttgatcagcggttccaccagcatcattgcttgctttctcaccatccgaatgccgtagcgaatcagtcggcaggtgcgctccatgatacgcagatcactctggtacttatccatcacccgcgatatcagctgccaggcgtcgttcagaatagctaccgtggggtgctccacgttgtcgggaacgtctggattcgtgtgtcggataatggcgcaggcgcggtctatccagtaaacgggatcggtgcgctctcccttttgaggagtactgccagtgctgtccaccaattgtgccagtggttgcagctggaagccgacgatttcccgcagagcaggctgcagttgctcgcgtggcaggcgtgtcagtataagcgatatgccctttagcaatcctattgccacatcgttgtttatttgaaagctgtccagactgcgggcgatctccacaagaccgcttatatggcacaccatcttctgtcggcaggcggagcaaatggaagtcaatgcaatggccgcagctggcgccaagccatttttctgctgcagggcgtacagcaaaaagtttaggactgcctccagcgattcaggatggttctcaatccagtcgcacagttcgccgatcagtagaatcgcagtgtacctaactgctatgtgcgtttgctccgacatattgagaatcgcctccaccaccttggggatcacttcgttctcatctctgcaaggtaagtattgtaaatctgacatggtaataaacagctgcatacgtacggaagtatatttttggccacgttctgcataatgaacagtgctgcctctgtggactcccacgtagtttctggagcttgcaggatatgaaacatttgcttgaagcacgctccagatcccactatgaaggccacgtcttttattagatctgagaccttgcgtcgaaagtcctgcaattcatttgttttaagattagtacaattaacttcaaggcattatattaatttaacgttgataatgtagaaaactaatcaaacttcttgtactcatttctaaataaaccgactctagccataaatgcctattcaattaaaatacccaacttcaaagaaaactgctaaaatttctcaatatcacacactcacaaagaaattgttgttctcctcgatgagcccgtcgtggtcgctctccatttgcgagtggcgaaacagggcgctgatcagccgctcgatgtgcggccggaatagaaccgtcagcttatcctcgttgcgctggaatagatcctcggagagtttgtaccacaggtggaaggtgatctcggccacctcgtagtcgaagtgtccgacgcaaagcagcacaagatccagtcctttcaaactgtagtgtggcttctgggcatcggccaataaatcgtagaagaaggcatcgcacaacgaggtgaaaattcggcagtagttgatcgtcttgtcggtgtcctcgtgcgccacactcaagtgatagggagtctccagcatgcagacagctccaaagagttgtgcctcgaaagaggactccggatcgctggcgccatcctgtcgtgtgtttatgcaggagagcagcgcacacacgcattcggtggcattgtcgtgcagttttccactggtctccggcagcgagagcaaccggaaggccagctgtgtgagggcgttgttgtacacgtgcgagacgggaaaggcatggatcaccagccaggcactgtaggtgcgcaacgccgcattccacacgcgctgctggtcgagatcctcccgctgtaggcacatacacaggaactttaggacacactctgcgctggcgtccagctgcttgtgcacctcctcgcgccgattggcgcccagccgcagataccgtgagtctatttcctcgggaagcaccttgagcacctccagcaggggccagatggcgcactgatgtggcgccagtgtcaccagaagatcgttgatcggctcccgccagctggccatcagcagggccagatcggcaaccgccagactgagctgcgtcacaatcacattgtccgtctgctcgtcgatctggcctatgtgtgtgatcagtgaatcccgcagagattcgtgcgtgtgcggtggcagttcgctgaaggagttctgtatcttgttccgcatggtctgcgcagcaaagtagttggcgtgcaggtctcgtttctggtgaagcagctcgtccgcaatcgtccaagaatagatctttaaggaagtccaaaaaaaaacttagcaatcgcacgaaggtttcgtacaccgggcgattatcactcaccgacttctggaagtcctggagccatttgttggccttctcctgctccttgggattgttgccttggaagagggcgctgattgcttggtacaccacgtccaccgagtacgtatccatttcatcggcagctttaatcagcgcataaaatttcttaattacttattattatactttattagcgatggctgattgcgtacatcccgtgtatcgataacgcaaggaggtggcatgcgataactttgaaaggtgaatgtccgatagtctgcaggactttttgaaattattcagggttgtcaagtgcgtcaaacattaaggaccattaaaaataattaaaatatttttacagtcaaatattttttagcttatgtgaattcgttttttgagcaataaagctactcggtttttatatcttaatacttgccacccctatgtagtcgatacatcgataccattggttgctcgcaacaacatctctaatcagttttctgatcagaattctgcaatggattcggacagcaccgtgacttccttggaggagaacacggagaacttttgcacgaatcccacgcgcgacatcctcgccgagggcatcaccaatctcttcaagccgacgatcgagcggttggacgagcgcgtggcctccaccatccagctgcaggctgagctgcgtggccaactggatgcactggccgcccagctgagggacatcgaaaaggcgcagagtcagatacccgagttcgcggacaaggtgaaggagctgctgaacgtcaagcacaaggtgacggtcataagcaacgtgttggtgaccagccaggagcggctgacgggtctgcacaagctgatagagaaggagcagcggcggcgacaggcgcttctcgattccgcgctcagcaccaacatatcctaaatccaattactgttcgtcatggagacgccctacaccgaccacttgagcccagaagatttcgagcacgtttacgagccagcggaggactcgttcctgctgctggatgccctggaaaaggatctggagtacctggaccggctacagccgagtctctgcgtcgaactgggctccggttcgggtgtgatcatcacggcgctggccaagaaactggctggcttttcgctgtgcctagctacggatatcaatcccaaagcctgcaatgccactcgaagaactgcgactcggaatggcgct

SEQ ID NO: 5225 - DNA, 2829 bp, DROSOPHILA
ggatgtacgcaatcagccatcgctaataaagtataataataagtaattaagaaattttatgcgctgattaaagctgccgatgaaatggatacgtactcggtggacgtggtgtaccaagcaatcagcgccctcttccaaggcaacaatcccaaggagcaggagaaggccaacaaatggctccaggacttccagaagtcgatctattcttggacgattgcggacgagctgcttcaccagaaacgagacctgcacgccaactactttgctgcgcagaccatgcggaacaagatacagaactccttcagcgaactgccaccgcacacgcacgaatctctgcgggattcactgatcacacacataggccagatcgacgagcagacggacaatgtgattgtgacgcagctcagtctggcggttgccgatctggccctgctgatggccagctggcgggagccgatcaacgatcttctggtgacactggcgccacatcagtgcgccatctggcccctgctggaggtgctcaaggtgcttcccgaggaaatagactcacggtatctgcggctgggcgccaatcggcgcgaggaggtgcacaagcagctggacgccagcgcagagtgtgtcctaaagttcctgtgtatgtgcctacagcgggaggatctcgaccagcagcgcgtgtggaatgcggcgttgcgcacctacagtgcctggctggtgatccatgcctttcccgtctcgcacgtgtacaacaacgccctcacacagctggccttccggttgctctcgctgccggagaccagtggaaaactgcacgacaatgccaccgaatgcgtgtgtgcgctgctctcctgcataaacacacgacaggatggcgccagcgatccggagtcctctttcgaggcacaactctttggagctgtctgcatgctggagactccctatcacttgagtgtggcgcacgaggacaccgacaagacgatcaactactgccgaattttcacctcgttgtgcgatgccttcttctacgatttattggccgatgcccagaagccacactacagtttgaaaggactggatcttgtgctgctttgcgtcggacacttcgactacgaggtggccgagatcaccttccacctgtggtacaaactctccgaggatctattccagcgcaacgaggataagctgacggttctattccggccgcacatcgagcggctgatcagcgccctgtttcgccactcgcaaatggagagcgaccacgacgggctcatcgaggagaacaacaatttctttgactttcgacgcaaggtctcagatctaataaaagacgtggccttcatagtgggatctggagcgtgcttcaagcaaatgtttcatatcctgcaagctccagaaactacgtgggagtccacagaggcagcactgttcattatgcagaacgtggccaaaaatatacttccagatgagaacgaagtgatccccaaggtggtggaggcgattctcaatatgtcggagcaaacgcacatagcagttaggtacactgcgattctactgatcggcgaactgtgcgactggattgagaaccatcctgaatcgctggaggcagtcctaaactttttgctgtacgccctgcagcagaaaaatggcttggcgccagctgcggccattgcattgacttccatttgctccgcctgccgacagaagatggtgtgccatataagcggtcttgtggagatcgcccgcagtctggacagctttcaaataaacaacgatgtggcaataggattgctaaagggcatatcgcttatactgacacgcctgccacgcgagcaactgcagcctgctctgcgggaaatcgtcggcttccagctgcaaccactggcacaattggtggacagcactggcagtactcctcaaaagggagagcgcaccgatcccgtttactggatagaccgcgcctgcgccattatccgacacacgaatccagacgttcccgacaacgtggagcaccccacggtagctattctgaacgacgcctggcagctgatatcgcgggtgatggataagtaccagagtgatctgcgtatcatggagcgcacctgccgactgattcgctacggcattcggatggtgagaaagcaagcaatgatgctggtggaaccgctgatcaaacaaatggtcgtgctgtattctgtgcagcaccacagttgcttcctctacgtgggttccatactggtggacgagttcgcaaagtccagcgagtgcattggcggacttttggagatgcttcaggcatttatagagcccacatttggcctgcttcagatggagaacggtctaaaaaataaccccgacacactgctccagagcagtctcatcacgccgatcttccagtgtgcgctaatagcctgctccttggaccaccgcgaggccaactcgtctgtgatgaagttctttatcaacctgttggtttggggcagatcgaataaccatagccggaacaccgagtgccgtcccttggtggtggagctggccagtcagcatggcggtgctctggtgatgaacctgatccaggcatccgtctttcagctgcactcctacatgctggtggatgtggccgaggtgctccacgaactgaagcaggtggtgggcaacgagcggatgcagcccttcctggcccaggcgctggaggcactgcccaaaaagaacagcggtggctacgtgacagccacgcagcaacagctggacgaatttagcagcacagttctgagagcggacacaacgaaagccatttcgcaagccttgaaaaccttcacgcgactctttcgctaa

SEQ ID NO: 5226 - protein, 914 aa, DROSOPHILA
MDTYSVDVVYQAISALFQGNNPKEQEKANKWLQDFQKSIYSWTIADELLHQKRDLHANYFAAQTMRNKIQNSFSELPPHTHESLRDSLITHIGQIDEQTDNVIVTQLSLAVADLALLMASWREPINDLLVTLAPHQCAIWPLLEVLKVLPEEIDSRYLRLGANRREEVHKQLDASAECVLKFLCMCLQREDLDQQRVWNAALRTYSAWLVIHAFPVSHVYNNALTQLAFRLLSLPETSGKLHDNATECVCALLSCINTRQDGASDPESSFEAQLFGAVCMLETPYHLSVAHEDTDKTINYCRIFTSLCDAFFYDLLADAQKPHYSLKGLDLVLLCVGHFDYEVAEITFHLWYKLSEDLFQRNEDKLTVLFRPHIERLISALFRHSQMESDHDGLIEENNNFFDFRRKVSDLIKDVAFIVGSGACFKQMFHILQAPETTWESTEAALFIMQNVAKNILPDENEVIPKVVEAILNMSEQTHIAVRYTAILLIGELCDWIENHPESLEAVLNFLLYALQQKNGLAPAAAIALTSICSACRQKMVCHISGLVEIARSLDSFQINNDVAIGLLKGISLILTRLPREQLQPALREIVGFQLQPLAQLVDSTGSTPQKGERTDPVYWIDRACAIIRHTNPDVPDNVEHPTVAILNDAWQLISRVMDKYQSDLRIMERTCRLIRYGIRMVRKQAMMLVEPLIKQMVVLYSVQHHSCFLYVGSILVDEFAKSSECIGGLLEMLQAFIEPTFGLLQMENGLKNNPDTLLQSSLITPIFQCALIACSLDHREANSSVMKFFINLLVWGRSNNHSRNTECRPLVVELASQHGGALVMNLIQASVFQLHSYMLVDVAEVLHELKQVVGNERMQPFLAQALEALPKKNSGGYVTATQQQLDEFSSTVLRADTTKAISQALKTFTRLFR

SEQ ID NO: 5227 - DNA, 13133 bp, DROSOPHILA
agtgccgtagattattgaatgagcgctcccagtctccctccagtgtaagcttcatctttatgtacgagtagtagcgtgcttctttctacataaaacgttcaccccttaacccttttcaagctcccaacgtctgcaagaatgatgataaagataaagctcagaaagggagaaagagcaagagcagcgcttctccgtgggcggattgagcgcataatgatgtttatgtgttgccagaaacataaaagcattaatttagtcattatcttcttaagatacggcgccagcagaggcagtggagtatcagaatcccctgaacgcgagaagagagcgtcaggctttttgccacccataatttccatcagcatttttatgctacccctgctactcactctgagtgaaagcgagagagcttctgttgccatatcctgcgcacccgcttcccttctctatcgctccctcgacagctatctctttctgtgggggccgcggggtctgtcagtgatgactttatctgtataaataactgtcagtggccaaagaaagtaagtagagagcgcaaaaatacaaaaaaatacatggaagcattggtgtgaattgggtggaaaaggaggggtctggtgaatggggcattatctctgtagcgccatctttatcctggacctcctgccagcctttaacctggaacactgcaagatgggggcccgacaccatcaaccaccaccagctagagcgagagaaagagatacagagggaaagcaaaaaagggagggaggatacagagagagggagaggcgtccaaagccagagagtattgccaagcaatatggtagcgttgagggcgtggcttcaccccgatttcattggccaacgtcgaaaaatgtccgctaaacgagagagcagatgtgagtttgtatctggcatctgagagtctgtatctatatctgtcgaggaactggcctaacgactactcaatcgacaacttgtcgggcggaacgctctcacaacactttcgcagctcgagcggacaagaagggttcccggtggcagaaaacctgtggaaataataaaatataaaatcacgacgcgattgcagtgcgtgtttctagtgcggtttagtgaacttggcatcgatcaaaacacactaatccagtgaaaaaaacctagacttaatattcgcaacattgccaccattactgaattaaaaaaaattgtaaagcgcttagtgcttcaaaagtgccgcttcattaaaaaaaaatcagtggggaagagactttttcctactcgaaagcttcatagacttcttcaagattctctcctcactgtggacccctggaggaggcggtggaggcaccaccaccaccactcccagcaccacgcccgacattccgccctcgaaggccaagttcaagatcaccgtcgtgagcacgcccagcccctccccgccgcctacgccccctccggctggatctatgctggcacaaatggtagagacaaattccccgccggcgggttacaccctcaaaaggtcgcccagcgatctcggcgagcagcagcagcctccaaggcagatctcgcgatctcctggcaacacggccgcctatcacctgaccaccgccatgctcctgaactcgcagcaatgcggctacttgggccagcgattgcagtcggtcctccagcagcagcacgcccaacaccagcagtcccaaagtcaaactccgtcctccgatgatggcagccagtcaggtgtcaccattctggaagaggagagaagaggaggagccgccgccgcgtctctcttcactatcgacagcattttgggctctcgccaacagggtggaggcaccgctccaagccaaggcagccacatcagcagcaatggcaaccaaaatggactcacctcgaatggcatcagtttgggtctgaaaagaagtggcgccgagtccccagcctcgccaaattcaaactccagttctagcgcagccgccagtcccatccgaccgcagagggttcctgccatgctgcagcatcctggcctgcatctgggtcacttggcggctgcagcggcgagcggttttgccgcctctccctcggattttttgggtaagtctatcaatccccctatactgaacgcacaagccccctcagctgaatttcattatgaagacaacttaagacgaaaccagttcaaaggatggttctttagataaagaaattttaacattttgaaataccttatttcatgcatctaaactctgaaatcaccttaaggcagctcactcatgcagtcaggaatcacccattcagccactcacccacttttatcctgacatcctcatcctctcccactcaaccgaaccacacccattccgaagcgagtcctgaatggcattattcataattaggcaatgatccgtgaaagatgattccgcatttcctctccattttccttcgattttgcggtgagaggatttgcattgggctctaagtcttagcttgggccggaaaaaccagggaaatccgggatgctggggtggctttaagatgggctcaggccttgtgttgattcgagcgtggatctcaggcgcagatttatgcagaataccgcttaaattcattcaaaggctcccccgcaggacatgaatattaaaaacctggtcgcaacttttttccccagcttgctgcaaccggaaacggaagccacacatacgtttacagatggggtcaaaggaatagatccgtttttgcaatatgttatccatatatcattgtaatattcttcgtaacgatatttacatgttttccaagtacaacatatgctgaagagggtaaatagttttacattttacttgaactgataccatttttgtgtctactgtaagccaaaatggcggcagttttattttgcgcggttcgttatgcgcatttttaaggatttacccaggaatattccacttacacccattcccgtggccctcttttctccagttatatgatgatgatatgactgttattccaaccagggaataatgaattttccttttgttttccctacagtggcgtaccccaacttctatccaaactacatgcacgctgctgcggtggcgcatgtggccgctgctcagatgcaggcacatgtgagtggagcagccgctggattgtcgggtcacgggcaccatccgcaccacccccatgggcacccccaccatccacatctgggcgcacaccaccacggacagcaccacctcagccatctgggtcatggacctccgccgaagaggaagcgtcgccatcgcaccatcttcacggaggagcagttggagcaactggaggccaccttcgacaaaacacactacccagatgtggtgctccgggagcaacttgccctcaaggtggatctcaaagaagaacgagttgaggtgagtttaaagcttctaatttttaatgccgaagaaggtgtaaaaaagggggcaagactaagtttaaagcataactttatagacatttaaagtaatttttttaaggccgctttgtcaccacaaaaaaacaatcaatgcctggctttagcttttgatcactgtgttcttcctagcagccgcccacactctgtgtttaacatttggctctaatttcacgctcgttttaattccccgcgtgaaaccaattgagtgctacacccccgctcctctacactccacttaaccagaatcagattccgaatccgaatctctggcatctgcatcgcaatctctattctctccagcgagattctccctctgagaacttctacttgtttatttagttgtcagcggcgtacattttgaggggcttcttcgccggcgaaagcaaaacaatgccaatcccaatgattcacttaatttgggtaatgggactcgggatacaaccgcatgtttaaacggatggtgagggttatttgctcgtcggtggttgccactgctgaatcgtatcattggtaatgtaaatatgcagggattccgccttctgcgcccttgtaaatcccaccccgggggatgaaccatccctttaacatcggcaattgtgattcaaagtccattagtgtcgaggaaacccaacaacaaacaaacaaattgagaggtcaccaaggaagaaagtgacgacaaaagttgacaatttaatttgttcacatttttggtgcattgatgggtggctatttcgcgtctttgatgaggattatccacgctttccgggctacgggccccgggttccgggcccccttagttttcgtttccctggcaatatgtttgtcaaccggtcaaatgtttaatctaacccatccaaccccatctcaccctcacctttcgcagcgcaggaaggcggacaagtgcgacatttgttgacactcgaagggtttgggcttatgtttagccgtgagcctaagacaacttacacattaacattactaaccatttaggataatgagaggcgtggcgttactcaacccgcaggcgaattgacgcccgctttttgattaggcgacaaatttaacccgcggcgagcattggaatccaaagcggattagaatgcaggttgtaagttgtaagttgcgaggttgttaggcgggaggagttctacaataggataagcaaatgaaaagccgaggtggggaagattttccagctcttcaactaattggaattcagcggactcgaatctgctggctcacgggggcgactaattaacatacaacacacaaaaagagacttcaaacttgtctctgacaagcaaagtggatgaggaaagagacggcagcaatcgcaatcccaatccccaagcaaatcttgtgctcagtcatcgctcgtcattgacttaagcagcataatcaacttcaggtctggcttccaactcggaaccccggcttttgtgactgctactgtttagcatatttgcatgccaagagttgccactcgaggcctccgagccccccgatttcgggaccgtctctctaagaccccagccgctccataagtggcaataattattgaaaatcttgcctaagacaaacagcagcaataacaaaagagaaaacaaatgaaaaaagcgaacaaattcgaagcctacacatccgatgctctaacggaaaagagtccgttcggtcgatgatcaattgggtaccaaaggctacccatttacacaccaaaagccaaacatggcaactaagttacgtctattagttaggcttggatatagtctagatatagctaagtgcataccaaaagtaccagaaaacaaacaccagagctccggaccaacgtctcgtaactattcagttcccatcctgggatcgttcggcatttaaatgatctgcttattttgacttcataatttacaattattatttttatttagccactcgaggcgagggtcggccggcttgggatcgagccggattggatcggattggtttgtatgggattggaacgccaaacagtagctctacctgtagagcaaacaagcccgttctctttgtccgcctgcctctcttttttcgccttggcttctgtggtgcgtgcaagtcaaatacgcctaatcccgcagctcaagtgatcgaggtgatttcgttctccgatcagccagatatggagggatatatgtagcttgggatgtagaggaggaatggctgggctggagggcatttcaaatatttgtcttcggtcgtcgccaagaaattagtaatcatcagcttggcataatttgtgctcctctctcctttcgatcgctcaactccacaaatattgatgttaccccttctcagacttatagagagagtggagaaccgagaagaatgtgcccactcatcactcccatcactccattgtgaactgatctctgttgtgtctgctgtctgctgttttctctcactgtcgttttgttttggccaggaattgaaaattgaaaagggcttgtcaccctactgcctcctttctttcgaggatcatccggaatctcaagcgttgccgctttgaagttgcacaattgagaggcctcagcctcaaaagggatcgggtttttttctacttcgggcccacctgcgttggcaattaactaaaatatggcttctgtattataactattattgttattgttgtctctccttagacacaataaacacgtctctcccccctcgcctttgcttgtttagcctcgaaattgaactaaaaatggcaatgagctggaatcagcagatttccgttaatttaacccgaggtcacaaaccacccaccacccaccatccaccatcaccaccacccactgggtgagccactcaacaacctttccgcccacaaatctcacaccccacactcgccgtaaatgctgttgttataatttttcataattttccattattcaaacacttgagtctcgggatgcgaaatttcagttatcccccgagaattctcgggcagcaaagtgcgtttatgtccgcgagccatggaaaatggaaagattggaggggcgggctttttccaaggggaacagacgcttttcccatgtttgctttacagttttggctgtcgaagcgtgtaaccgtagacaaatattatcgctgggggaggaaattgcccccaaagctgcataaatttacacaaaaaacgcagtgggtggtgaaaggtggcgcgacaggtgcacttctcactaagctcttaaaaggtcgtccgcgtcggcgattagtaataaaaaaaaattaattttataaataggttacattgaaaaagcgttttgagggtaaaaatacattaattttaatacggccaaatgacagactgtatgttaacaccattttgatgtcttattcagggaaattttacaaagtgctttactgataatcccaatcataaaaacggtaaaaagaagtttcactcacccattttatttttgcggttcttcttttgttttcttctttacattttctctcagtagtattacggttaactgcactacgcggagaatattttttataaacatacctttttaaaatcacttttaaatcactcacaacaatcactgaaaaaaaaattacaaaaaataaacacttttccaataagaagtccgtttatatgcacttacatacatatttatgtatgtttgtatgcacgaaacgccatgcaaattggcacgtcacacacacatgcatgcatacaaacaagcgggttgctttttttccttttaatcatatattttacgcatttagccgccgatttcttgaccttacactttagttaacacttttaacataaatttacataagcttctcctgttttaatagacagaaacacctttcttttacatacatttgtatgtatgtaagtaaaactttcacagggactccatttgccggcgaggaaagttgttcgattcgccgcctgatcatatttcttttttggcgcatacaagttgaggcacaacacaaaccagaactcccgacattgttttaaatcattttataccatttcttcaattttaaaccacagaaatttgctttttaatttgcacccttcctttcactttgacttttcttcttcttatagcctgccccgagcacgtgccgcgttttccagcactattttctgtattttgatttagggactaacgcgatctttcttaagcctacttggacttttacagtttagacagtttcgtttttgtggggatattcggttcgtttcagtttagctctttaatgcgaacgcttgcagttccttaaccccacaatacactgaaccaaatagggagtgggcatgtgcgtaacgagcaattttcatggatgcgcgattttaatccaacaacacgacgaaacagcgtcaacaatttaccaaaaaaggttggttctatggtaattggagtgcaggtagcgccacccatttcggtgacgaagtttccaaccgacttgtgctgccaattttcactaattagagtgtgactggcgaaaggcagccgccattttgtgctttctacctccccccccaccgccctctcctgctcgaattccccatcttaacccctgactgccgatttctattagcctttcctggagccaggcaaaatgtgatgattgctgttcttattttttgccagcctggcgctctcaatgttttttggcttttgccgggacacattttccgggcctggaaaaacacggcaaaattaggaggcaagttcaaacggcaggtgcagcgattatcgaagcgcaaagttatcatagcagtgaaactatggactgcattttcggaaacatttcatggtaatccagccacgcagtcagcagactggccaaaaacccaaaaataacacacacatcatggtggtcagtctgccaacggccccgccccctgcatttcccaatttcccgtggggaaaagtgaggggcgggcgatgggcggtgggttttcgtcgagtggagtgagaggggtctggagcgtaaagcgcttttgtagttaattaaaaatcaactgccgtgggtatgtttgttcaatggatttcatgcacgtttcgaatgtgtgccgctcgtcggcctttctgcccccggactttccaccgcccctcgactttcctgcggtatcagcgatttatgcgcttttggatgaaaaatctgtggcaatatttgcagtggccagtggttccggagatctatcgactccaaggcgcgagccaatgcatgccaagttgtgcacttttgggccccaaaaaaatgcatcgccagctcatacactgcaagaataggtggctggctcagtatgaaccatttcgttctcgatgtgcctaaagaaacatagttgtattccaagttatgaaatatccgggatatcgtatctttatactctgcctgcatgcaatcattcccttggctattttcgccattttgtcggcatgttcttgaggccatgaaacaatacggggaaatccccgtctcctcggatcaccactttttgcgcctttgtttatttaatttctccaaattttcactgcgatttttgcgagcgtgccagccagcgagacgcggaaaaaaacgcgcccgcggttatggccaaattgttgtgcgttagtcagattttaaacgcgtggaacggcagaggaggaggagggagttggatttggacggtacggaactctgttggccgtacaaattacgggattagcagagcgagcgctttttttccggcgcgcacacacggctctcgaactccggatttggtagttccgtcggattagggttcaatgcgattacggttcgctggccaacatttaattaaaatatgaaaatttaatgagcggaaacgacgaaaaaacccaatcaggcggtaaaaatcgccacacatttttttcgcccgcagccatatgcgaatttttttgttttagaatttgtggattaaaactgttgcataggtaattatcgtgttagtttgtgtgttgacataattaagctgagtaattcacatattcatggccgcgattttgaaaaacgcaacgcgtttgtgtgttgttctgttgttttaatgacttaagctcataaaattatgaaaattatgaaaataaatatgcaaaatatttggctggtgcaggagctgtctaaaatctaattagcccgaaaacgagaaataaatgttaatggcaatttaaactgacatttggcgagcacttcaattgcgttgccaactgccagagttcaaaggtttccaaggcgaaacaaaaagtagaactccaaatgttcggaaaacagctgcaaaaatgaactcaaaatttattgcaaacttaaatgagctctcaaatgtgaattcccaggaaatcccctcgccttataagtttagcgcatttccctgtcatttcctcattttcctctgccacttccgtttccgcttcccctgttgtttcaacaaattcagtcgatttgctgcataaacatttccggaaccccagagaaaactcaactttttccccaaatgataacattgtgcaaaatcaactttccaccgctgcctaattgttctaattaaactttttcctcccacccagttcgcagtgagctctcgccccgagtttccccagtatttattcagcaaataatcaaaaaacagacggacaaataaacacataggggttgcaaattcaccattgcactcggattgggcaaatagagaatcgctgggagaacgcagagaaagagagaaagactccgccctcgaagcaggaggaatgggtttttggggtagctttgggggctaatgacaaggcagatgggttcactgtccacgagggtgatcacataagggattcccgctcctccttctccaccacacctcgtcgccagaatgatagctaccctttgcgaggcggagatatcatcctgatgatgtttaacccctaagtcaattcacagccgccttttgttttaattaactaagtagcaggggtcgaggccaggctgtcaaggggttaagcaaggggttaaaagcggaataaggacccaacgatggaaagcatggggaatgggcgtggccaaagcctaattaaaagtaaaaatgcacactgaattcagctcggaaaatgaaaatggtaacgttacctgacttatcttcacttctttctaaatacggatttttcaagataggttcagcttgtattatagtttaatagttaatatttctgatattaggtacgaattttcgcaccaatggtttttacaacctaaagtacgcccttctgctcctcaattcataaacattctctcacctttttttcaaaacccacccctgtctggattctcaattaattacaattacaataagtcatctcattaagcccggaaaagtgaggaaagcgagtgggagttcgtggtaactggccaaaagataagcgccaaattgagaaattgaactcttagaagtgcaaaaaaccagagacggacaagcaaaaaatgcttaaattatttatgagcggaaatcgcaggcagaacaggcagctcccgcgagcaaaacggatgaaagtgtttttgaagccccgcgctccaagtaacctaggtagcaccccaaacacccacccaaccactgaaccttgagtccatctgtgtattcgttattatgaaattagcggggcgaactcagaagttgaatgatatcaatgagaacgaagtgcgaactgtttagattagacaaatgtttcaattcctcaaataaaaaatattaacggaccgtttctcctttttttccaggtgtggttcaagaaccggcgggccaagtggcgcaagcaaaagcgcgaggagcaggagcggctgcggaagctgcaggaggagcaatgcggcagcaccaccaacggcaccaccaacagcagcagcggcaccaccagctccaccggcaacggatccctaaccgtgaagtgccccggatccgatcactactccgcgcagctagtgcacatcaagagcgatcccaatgggtacagcgatgccgacgagtcatccgacctggaagtggcctaagaggggcgtggcactgggtgtacatatggaacgatagccatggaagtgggggttgttaggaagtgatttaagtgtatgttgtgtaaattaaagggaaacctatatataaaactaaactaaactagtttactgagctgcacatccttatttatttattaaatttgtatacgactgactacttaaactggatttaaaagttcaaagagcccggcgatattggtcctagctcatatactttgttttgtaaatagacaaaagcccattttcaagcactttttgttactaggttgtaagtcgataagcaggagggagacctagaaaatatcttaattatatttagtaaaattgtacagtcacctaaatgtatgtgaatgtgaacgtgtatgtgcgcgaatgtaatgtaccaaactagagggtgaatgcatttgtggtctttgtttcgtgtcctgtgtccaagtccaaagtttattgcatctatatacagtcaagtctgcataaagcgtattgataaataagccagcataccatactacacgaaagctaagtgtcattcctccaacgattaattctaatgttaaacttaaactaacttattgagaaccgaaaataaaccgaaaactcgccaaaagtcaaacaaaagtgccggaaagtcgtttaactctggtcgggaaacttcgatgataagtgggaagacccggcgagaagctttcacacctgccactccacaaatgggagatggtaatggggatccaagtctaactgcaaacggaccaggaaaatggcaagtgggtggcggcggtcagcctgttagcagcttcgatggtcactttgatggcttcgcctccaatcaactagaacacggacacggaccacacaaaggatctggagaggcgaagcacggggccgggcaatccatgtgcaatcgcatcttctccgctcctcggcagatgtatctgcatgtcctctgccggcatctgttggccattttcattcttgcattgcgaatcggtcgggggtcgtgccacaacaagatggaaaaaccactcaaatcatctcctgcacagagcgaatcactttaggtgtgctggcgatacaaaagatatatttgcctagatacagatacagatacagctaccgtagtggggattggttctgtatggaaagatatcgtacagaatttaatttccgggatgtacctactttcacagatactaccaactcgaaagtgtttcgttagatattttccagtttctggaggaactgcctcgaaattattctcggtttgacttacttcacctcccccagcttttgagtcgccccaaatttgactgacaagttgtctcgcttgggccgtattgtgtccttttcagcttgttattcctcccctctttttttttgtttttctctttgccaaagttccatcttgttattttcctttggcgcagccggagctgcaagttcaggtccattcaggtgagagactccgacgactcgaatcgatggccaaatttaaattcaaatttattctatcttgacccgacttggctccttctccgctagttgaaactccgctcctcggtcgccattttgcgcccagtcattcctgccttctatttgcataggc

SEQ ID NO: 5228 - DNA, 2353 bp, DROSOPHILA
acaacactttcgcagctcgagcggacaagaagggttcccggtggcagaaaacctgtggaaataataaaatataaaatcacgacgcgattgcagtgcgtgtttctagtgcggtttagtgaacttggcatcgatcaaaacacactaatccagtgaaaaaaacctagacttaatattcgcaacattgccaccattactgaattaaaaaaaattgtaaagcgcttagtgcttcaaaagtgccgcttcattaaaaaaaaatcagtggggaagagactttttcctactcgaaagcttcatagacttcttcaagattctctcctcactgtggacccctggaggaggcggtggaggcaccaccaccaccactcccagcaccacgcccgacattccgccctcgaaggccaagttcaagatcaccgtcgtgagcacgcccagcccctccccgccgcctacgccccctccggctggatctatgctggcacaaatggtagagacaaattccccgccggcgggttacaccctcaaaaggtcgcccagcgatctcggcgagcagcagcagcctccaaggcagatctcgcgatctcctggcaacacggccgcctatcacctgaccaccgccatgctcctgaactcgcagcaatgcggctacttgggccagcgattgcagtcggtcctccagcagcagcacgcccaacaccagcagtcccaaagtcaaactccgtcctccgatgatggcagccagtcaggtgtcaccattctggaagaggagagaagaggaggagccgccgccgcgtctctcttcactatcgacagcattttgggctctcgccaacagggtggaggcaccgctccaagccaaggcagccacatcagcagcaatggcaaccaaaatggactcacctcgaatggcatcagtttgggtctgaaaagaagtggcgccgagtccccagcctcgccaaattcaaactccagttctagcgcagccgccagtcccatccgaccgcagagggttcctgccatgctgcagcatcctggcctgcatctgggtcacttggcggctgcagcggcgagcggttttgccgcctctccctcggattttttggtggcgtaccccaacttctatccaaactacatgcacgctgctgcggtggcgcatgtggccgctgctcagatgcaggcacatgtgagtggagcagccgctggattgtcgggtcacgggcaccatccgcaccacccccatgggcacccccaccatccacatctgggcgcacaccaccacggacagcaccacctcagccatctgggtcatggacctccgccgaagaggaagcgtcgccatcgcaccatcttcacggaggagcagttggagcaactggaggccaccttcgacaaaacacactacccagatgtggtgctccgggagcaacttgccctcaaggtggatctcaaagaagaacgagttgaggtgtggttcaagaaccggcgggccaagtggcgcaagcaaaagcgcgaggagcaggagcggctgcggaagctgcaggaggagcaatgcggcagcaccaccaacggcaccaccaacagcagcagcggcaccaccagctccaccggcaacggatccctaaccgtgaagtgccccggatccgatcactactccgcgcagctagtgcacatcaagagcgatcccaatgggtacagcgatgccgacgagtcatccgacctggaagtggcctaagaggggcgtggcactgggtgtacatatggaacgatagccatggaagtgggggttgttaggaagtgatttaagtgtatgttgtgtaaattaaagggaaacctatatataaaactaaactaaactagtttactgagctgcacatccttatttatttattaaatttgtatacgactgactacttaaactggatttaaaagttcaaagagcccggcgatattggtcctagctcatatactttgttttgtaaatagacaaaagcccattttcaagcactttttgttactaggttgtaagtcgataagcaggagggagacctagaaaatatcttaattatatttagtaaaattgtacagtcacctaaatgtatgtgaatgtgaacgtgtatgtgcgcgaatgtaatgtaccaaactagagggtgaatgcatttgtggtctttgtttcgtgtcctgtgtccaagtccaaagtttattgcatctatatacagtcaagtctgcataaagcgtattgataaataagccagcataccatactacacgaaagctaagtgtcattcctccaacgattaattctaatgttaaacttaaactaacttattgagaaccgaaaataaaccgaaaactcgcc

SEQ ID NO: 5229 - protein, 419 aa, DROSOPHILA
MLAQMVETNSPPAGYTLKRSPSDLGEQQQPPRQISRSPGNTAAYHLTTAMLLNSQQCGYLGQRLQSVLQQQHAQHQQSQSQTPSSDDGSQSGVTILEEERRGGAAAASLFTIDSILGSRQQGGGTAPSQGSHISSNGNQNGLTSNGISLGLKRSGAESPASPNSNSSSSAAASPIRPQRVPAMLQHPGLHLGHLAAAAASGFAASPSDFLVAYPNFYPNYMHAAAVAHVAAAQMQAHVSGAAAGLSGHGHHPHHPHGHPHHPHLGAHHHGQHHLSHLGHGPPPKRKRRHRTIFTEEQLEQLEATFDKTHYPDVVLREQLALKVDLKEERVEVWFKNRRAKWRKQKREEQERLRKLQEEQCGSTTNGTTNSSSGTTSSTGNGSLTVKCPGSDHYSAQLVHIKSDPNGYSDADESSDLEVA

SEQ ID NO: 5230 - DNA, 2972 bp, DROSOPHILA
ggcggccacggaggcggtgattttggcggccacggaggcggtgattttggcggccatggaggtggaggctatgagattcactcccacgatggcggatacagcggcggtggaggaggcggtggtcatgtgaacacctatgctgttatcaccgagaaccacggatacagttccgggggtggcggaggcggtggaggtggccacggatacagctccggcggatatagttccggtcatgatgatgccaagattgctgccatcgctgctgctgctggctcgtcctccgatcacggacatggcggacatggaggcagcggcggacacggcggaggttatggtggccatgccatcgccaacattgcagccatcgccgccagctcagactcctctgatcatggtggcagcggaggatacggcggctacagcggtggcggtcacagcggaggaggtcatgacacccaggtgattgtggctgctgctgcggctggagattcacatggctcttccggcggatacggcggcggatcctccggtggatacagtggtggctcctccgggggctacgatggtggatattctggtggatcctcttacagcggagcctcctcctacagcagcggctcgtcctacagctctggaggatacagcagtggacatggcggtggctatagcagtggcggcggatccagctatgatacacaagtggtggctgcagccgctgcttcaggcagcggtggctcctacggcgggtcttccggcggcggtggcgacggatacagctactcagcgccggcctcaggcggctgggcaggatccagttcaaactggaagtagacggcaatgtccgtcgttggccatctggtcgtctagtctactgttcacgtttaacttatatttgacatgttcgctcatccatattccacacattctcccaagatactggtgtacaaaataaaccatgttagtgtaataatttaagccagccgcccagtatgtgatttacctaatgcttgcccagtttttgccgatttttctccgcctctttcatcggagctatatagtggcgcttaaacatgtcatagatggagaagtacacggcactcatcagtcctgccttgagtagagtaggcaacattcccttatagaagcctccgattccttcctcccgaaacgtggtggtgatgcagcccaggatcgtagggcactcggggttgcgaccaaaggtcttacgttcctgtttgaaggccatcagctggatgcgctttttaagcaggtccgccgggtacacgatcatcttggccaacacccctgacagcgccccattgagaaacagaaatgcgccgtggatttcctggcgctggtcgggaggcttggccatcaagacagccgcgttgaggtacttgtagaagagaaagtttgcccctaccagcggaaacacctgcacaagcgtgaagggtagtcctcgggaaagtcccatccacccctccatcttatagacctttcgaagtccggtaaaagtgttcatctgactgcggcgcgaggaggggtctgcggccaccatctgtgttcttaccacgtcgaacggctgggcggccacggctcccagacatccggctatgccgccgcagatgaaaaacatgagaaagggtcgctccctccagtagtcaaactggtgggccatggagcgaagctgttcgtaggaccagaactgtaccagagcgtacgaaatgctcagaacctggccggagttgtgaccacggaacataccgcgcattccctcctcggcgtacaccgacttgaaagcgtggatgactccacggtatttggaccccttatggtttgtcaccggctccacttgcatctggaatcggatcttcagaacgtccagcggctgggttatggtccgcgtcgcagctccggcgattccgccgccgacggcctgcattaactggactaccaccgagttttcgggcatcggatgtggcgacgagcagtggacggattcactcacggcaggagttattcactgtacagatgaggacgaagtggtgtgttgtcattccgcaagctaaatttcctgctactgtataagaaagtggctaggcttttattaagctctggccaattacacagtattttccaatttaatatttagtcgaaattttaaaatacacaataatttctctgacaagaatgtaaaagcttaaaatttttaaggtgtctacgtactttagttggggtctgcatgtgaatgtacatacatttctatgcttgtgttggttgtcgcattattaatcccttcgatctctttcagctgtcgccaagcaccaggttgtcgcgtacacgcagaggtcgcaggttaagcacgagaaccggcacatccagctggtgcgggagtacggcttccacccgcgcactaaggcctccgtggaggacggcgacgtgctgccccgcaaattcgagccctttccggagcacatgtacggaaagccgctggaggagattgacaccttcatttacgaggaggtgagtactgccgcgttcaacattccctcattatccgcggcctcgcctcacttggccgcccattggctctaattaaaaagtcacaggcaggcgaccagaccccagatccgtgttctcatggtagggcaatcctcgtggtggcaggtgcaggcggcggaaatggaacgcggcgcgcggctgttgttgcttttgttttcataccgccgtctcgctgcacttgccccattgtaggcacaagtggaagtgcactttggctcagggaaactggggttaatggaaacgcctagaacggccctcgaaaaccgaaaaggaaatcagggtaaatgccgttcgttcgttaaatttcaaagccgggaataaattttggaactgtgtacatcaaacaaaggacacacagttgcaaacacgtctgcccaagtgttagtgcaggcatgaactcggtgctggaa

SEQ ID NO: 5231 - DNA, 972 bp, DROSOPHILA
atgcccgaaaactcggtggtagtccagttaatgcaggccgtcggcggcggaatcgccggagctgcgacgcggaccataacccagccgctggacgttctgaagatccgattccagatgcaagtggagccggtgacaaaccataaggggtccaaataccgtggagtcatccacgctttcaagtcggtgtacgccgaggagggaatgcgcggtatgttccgtggtcacaactccggccaggttctgagcatttcgtacgctctggtacagttctggtcctacgaacagcttcgctccatggcccaccagtttgactactggagggagcgaccctttctcatgtttttcatctgcggcggcatagccggatgtctgggagccgtggccgcccagccgttcgacgtggtaagaacacagatggtggccgcagacccctcctcgcgccgcagtcagatgaacacttttaccggacttcgaaaggtctataagatggaggggtggatgggactttcccgaggactacccttcacgcttgtgcaggtgtttccgctggtaggggcaaactttctcttctacaagtacctcaacgcggctgtcttgatggccaagcctcccgaccagcgccaggaaatccacggcgcatttctgtttctcaatggggcgctgtcaggggtgttggccaagatgatcgtgtacccggcggacctgcttaaaaagcgcatccagctgatggccttcaaacaggaacgtaagacctttggtcgcaaccccgagtgccctacgatcctgggctgcatcaccaccacgtttcgggaggaaggaatcggaggcttctataagggaatgttgcctactctactcaaggcaggactgatgagtgccgtgtacttctccatctatgacatgtttaagcgccactatatagctccgatgaaagaggcggagaaaaatcggcaaaaactgggcaagcattag

SEQ ID NO: 5232 - protein, 323 aa, DROSOPHILA
MPENSVVVQLMQAVGGGIAGAATRTITQPLDVLKIRFQMQVEPVTNHKGSKYRGVIHAFKSVYAEEGMRGMFRGHNSGQVLSISYALVQFWSYEQLRSMAHQFDYWRERPFLMFFICGGIAGCLGAVAAQPFDVVRTQMVAADPSSRRSQMNTFTGLRKVYKMEGWMGLSRGLPFTLVQVFPLVGANFLFYKYLNAAVLMAKPPDQRQEIHGAFLFLNGALSGVLAKMIVYPADLLKKRIQLMAFKQERKTFGRNPECPTILGCITTTFREEGIGGFYKGMLPTLLKAGLMSAVYFSIYDMFKRHYIAPMKEAEKNRQKLGKH

SEQ ID NO: 5233 - DNA, 3016 bp, DROSOPHILA
ctgcagatttaatccaatattagaaatgctacaaagaatagtttccggtatatagctaccgttttcaagatgtgcatggtgagggcgtctggtatggtgggcgagtagtcctccagctgctttatcagctcatccatctccgattcctccgtcgtcagaggaacctcctccacgtccggttgctcctcgtcggaatgcagttcggactgcattagtggcgagtctatatcctcctcctcggtgtccgtggccgatgttacggattctgcgggtgtaacactgatgtcctcgccatcggaagccattgttttccactttttaattgtttatttccagaaatttgttatctcagctggcgtgtatatgtgtgtatgtttatattgtaatcgatgacgaaccgtaagaagaatcgatagcactggcagcaacaatacggaataattcgataactagcatctcccatcactacgtctgcactgtgtttaatttgtattgtacacttttttcgatggtgggctccaatttcggaattatttaccacaacagcgccggtggcgcaagcagtcatggacaatcctcgggaggaggtggcggtggagatcgggataggaccacaccatcttcgcatctcagcgacttcatgtcgcagctggaagattatactccattgattccggatgcggtcacctcgcactatctcaacatgggaggctttcagtcggacgacaagcgcatcgttcggctgatcagcctagccgcccagaagtacatgtccgacatcatcgacgatgcactgcagcactccaaggcgcgcacccatatgcaaaccaccaatacaccgggaggatcgaaggccaaggaccgcaagttcaccttgaccatggaggatctgcagccggctttggccgactacggtattaatgttaggaaagtggactatagtcagtagataatggcatgcattgtagtagtttttttctcattaaaaataatgtatcttaagatctgtgttttgggaatttattgcgaaagaccttgggatcttaatgcattctcattctttcaagaaatccatttagtaaagggatttaagtccatagaatgcgtaactaatcgagcatatacaaggtaatttgtttttttttataatgttatacaaaagctattaactaggcggttaatactaggagtatgtttactggcatgttatgaattttctgaaactgcgagatgttcctccagccacccggaaggccaggactcccgtaagtatggtgaccaagtagtttatcagcagagtggtcgtgtaaagctcattggcattgagcagagttatcagggagacgaacaggtggctgaaaaccacatagcctatgtggatatagttgtttgtgtcgaatgcgttgaagaaaataacgctccagaaggtgtgcagcaggataatcgacaacgcctgggcagccgaggtgacgaagaatagctcagttccgcccttcaagcccatggtgccgggaccactctaaaaaccaaaagatctgtcattgctcggagcacattacgcacctttgctgcactcaccatatcagccagcacattgaccagtgcaaacatcccggatataatgccgaatcccaagccggagacataggccaggatgtgcttgttgtccgtcactcgcgtgtcctccgccacggcgtgcaatccctgctccgtgctgcgcagtatccggtagatgatgtaccggaaggcttcctggaagcacaccgagaagaccacgccaaatgccaggaactccttcagcggaatcagggcataccacagggaagagatcagcagggaaagcagccagaagaatgccgccgcaatcagaatgatgatccgcactggatcattggcgatggtgaagacgaacaaggcgaagggcggtccgaaggcgatgaaggtgcagccaaagaactcgggcaacgtcatcttgtctttgtattattactgttttttcttttgctctgtgggtgttttggtttacttgggaagaggaagcagagactcgcatagagttgccagacttttgcagtgccattcgggctgccacactgtacgttttagtagtgtacataccctacacagatgagtacattagcttgtgcgtcacgcaaaagtatacaaattatttaaactgcgagaattatccaaacaaatgggaatcttttaatcttaacttaattgcctaattacctatcctttgctttaatttgtatataaaaaccaaatccagcctttaaaagtaatatctactgaactacagaaagggtatattaggaccgcttttgaagatacatttttgaaagctgccagactgcagagcactaatgtcttcataccctactatataaagtctgttaattcaaaaataacttgttgctaaagtacacgatatgtattagagctcataaaaattgtagcctactaaatcattatacaatttatagaaatatttaatattattcaaaaatttagaatatagttattctaaatgttccctaagagccatacccgcgtagggtgttacagaggccgcctatgcgggattcacacgcacaaaacaaaggcctccgtcccacttgcaatgtttttgtttggggcggaattagtcactgtaaattgactcaacaactatgccaaccgcataatccgccgtaaaccagaagcgaattgcaagtgcccagctgcggatcgaaaacagcagcccagcgagaaatcacaaagagattcatagaacccgtatgcccagtgagcacagtgaaacctccaattagcagttcgtcgttcatttggtttcgttttttcttttaccccagttcacgccgtgatggccaagcgcctgcaccaccagcctaccttcgatggggatccacccggtccggatgagctggacagtccagccatcgaggcggcggccctcgacattccccctcccgaatccgataaggcgctccaaaaaggtttgtgtaaccat

SEQ ID NO: 5234 - DNA, 957 bp, DROSOPHILA
acacccacagagcaaaagaaaaaacagtaataatacaaagacaagatgacgttgcccgagttctttggctgcaccttcatcgccttcggaccgcccttcgccttgttcgtcttcaccatcgccaatgatccagtgcggatcatcattctgattgcggcggcattcttctggctgctttccctgctgatctcttccctgtggtatgccctgattccgctgaaggagttcctggcatttggcgtggtcttctcggtgtgcttccaggaagccttccggtacatcatctaccggatactgcgcagcacggagcagggattgcacgccgtggcggaggacacgcgagtgacggacaacaagcacatcctggcctatgtctccggcttgggattcggcattatatccgggatgtttgcactggtcaatgtgctggctgatatgagtggtcccggcaccatgggcttgaagggcggaactgagctattcttcgtcacctcggctgcccaggcgttgtcgattatcctgctgcacaccttctggagcgttattttcttcaacgcattcgacacaaacaactatatccacataggctatgtggttttcagccacctgttcgtctccctgataactctgctcaatgccaatgagctttacacgaccactctgctgataaactacttggtcaccatacttacgggagtcctggccttccgggtggctggaggaacatctcgcagtttcagaaaattcataacatgccagtaaacatactcctagtattaaccgcctagttaatagcttttgtataacattataaaaaaaaacaaattaccttgtatatgctcgattagttacgcattctatggacttaaatccctttactaaatggatttcttgaaagaatgagaatgcattaagatcccaaggtctttcgcaataaattcccaaaacacagatctt

SEQ ID NO: 5235 - protein, 238 aa, DROSOPHILA
MTLPEFFGCTFIAFGPPFALFVFTIANDPVRIIILIAAAFFWLLSLLISSLWYALIPLKEFLAFGVVFSVCFQEAFRYIIYRILRSTEQGLHAVAEDTRVTDNKHILAYVSGLGFGIISGMFALVNVLADMSGPGTMGLKGGTELFFVTSAAQALSIILLHTFWSVIFFNAFDTNNYIHIGYVVFSHLFVSLITLLNANELYTTTLLINYLVTILTGVLAFRVAGGTSRSFRKFITCQ

SEQ ID NO: 5236 - DNA, 4242 bp, DROSOPHILA
agggctgtcactggatattattccccctaatttcaattcaatgtcttcaatgcccgcttcagccaaccacccactaagcacctagtgaaaaagcaccaaccaccatgcataagaaaaaaagagcgcaacaacaaacgttaataatgcataataaactagattgctggttggttgtctactattgtgtttggacctgattcgtggaaatttgcatcggactttccacgaatgcgtaactaattcatcgctaacacacacgtacactacacacatactataatatactcacacacccgcacttaatcgtgtataattaaaccacgaaaggaccttcatcgccccctgattgttgattgttggctgttggctctgtgttgttgtcttttgtattcaacccgagttaatttgtattcattaaacaccgcttttgtcttttttccgccgctttgtgctctgattttagcccaagtcttcatttagtacatagtacatgccattttcatagaatttgtatagcttgaaatgatttaaataattctgaaaaaaaaaaacaatagactgaaaactacataggtgtcacataggtgaatagttttaatctgagcattgcaaatatttgttatatacatatctcacaaaatcatcatcatcatcggagtagaaacaaattagaaagtctatagagggaaattgttttacatatgtatgtcatcatgggttctgcatttatcgcatttcatttttagttctactcacacattttcattgattttccccacgacgctatcccaatttttctttgttttgatttgtctttttattttggtttttcttctatttcttctttacttttcggccattgatagaggacgataattcctcaatcaacaacaacaacaacaacaacaatacccatccccctcaacaacaacagcacagtgctgcggggagaacgacaacaacaagaataacgacaacaccagcaatattaacaaagttgatgggaaattcagtcacacccgcctcaaacaccacctccctccccacaagcaccccctcagttaccacttccccgcccgcctccacagactttatgctgctggcagcggcagcaacgagtgcaacgagtgcaacacccgcaacagcgacatctgctgctgcaacagcagcatccaatcctgccaagcgcaaactgagctccatcgccgaaataccgtccaaatttctagtggtatcagatgcgaaaggagtctattccgcacacacgcatcccaatggcttcgccgccgattccctgggcgtggataacaacgaaacgatgatcaaaaagctaatgcagaatttacaaagtcaacgccagcagcaatcgctgcagcaattgcgtagcttgcgacctgcggaaatttcccttacaccgccgccggcagccacaagaaaagtggacataagcaactcacggacacgctcttactcactgtccaatgtttcagcagccagggatcagcaggaccatccgcagcatcagcaacatgccaaccatatgcagatccagcagcattacggctatatgaggagtaacattggcggcgtgatctatggcttgcacaaggactctgccgactctgcggcatcctcggcatgtggagcgggagcgggagcagcagcggtgggcatgagcattgcctcctcggcgccagcggcgggatctcagctatcggcgcatcatcacacgggacacggaggccgcaggcgcaccaccagttccaatagtaatgggtgagttcgctttttttattgtcaaatttttactactattgtaagggagtatatatgtacttattttaatttccaatatctttcagagcgggcacccgggaggtgcacaacaagctggaaaaggagcgacgcgcccagctgaaggagtgctatgacctgctcaaaaaggtgctgcccatgggtgacgaggaccgaaagaaaacatcaaacttgacaatacttgacacggcccacaaatatgtcaatgtaagtgtgtccacgattgtgtgtagaatacattgagtaatgatggttaccccttctggttgcagtccttgagtcatgaagtttgcgagcaggaggcgaagatagagaaactggccaagcagaagatcgagctgcagaagcggctaaagcaactgagcttaaggagggaatcgccgcccaccgatcagcaaatcattccacaggccgacaaaggttcgagctcctccatccatttgctcgcatctgagatcttgaatctcagatcgagctacacaatcagaatgtagatcaagttttgcatgcgaacgtccttcgggttatgcaactgaaactgcaatagcaattcgattcgaaattcgattctcgacacatgcattcgctaatctcgcgctttctctctctttttccagcagtttgtctggcaacaacagccacaacagcaccaccaacggcggccagtggccacaatggaaccacaattctattcgatgcaggcaacgcctgtgccactggggtatgtatatgtcgacaataaataaaaaccacctgatgtgtggaaatgcatttaataaatacatttatacaaaaacaaaaaaaaaggatgcaccacaaaaatcaagctatatgtttttaacgattatgttgttttcatccagcagcagctaacaactgtgataaacaaaactaatggaggagcaaccgcagcagccagcagcaaacacaatggcaaccacacaggaggtgcaacaaccacactgactccggccatgggcatcatgacaattaaaaatggcaatggcagcaacggcaacatgctggcaatctcaccaacgggaggccacaatcatcagttgcaccagcaccacaacggcagcccagcgggcagtccatcgggaataggagccacaactggagccaccatcacacgtggctcgccaacgccatcgactccatcgccgtcgcccagctcctcgtccagtggcgtctcgttgtcgacctcatttatgggcggctcctcatcatcgtcctcatcctcctcatcatcatcatcttccagttcgtcgtccagttcttcgtcgcccacgcaacaacagcagataatcacgcccacggccacagcccgtagtgttggcctaaaattccatggcggtgcgggcgctgctgtgccagctggcggaggttcagtgaatggtaagaggggatccacacgattccactgactggcacttgcaataatgtatgtttagttccattcctggattggttatatacattttaaaaagaaggaaaacaaactattacacaagtatttatgcaaatgcattatcagtcagtggatagtataaggttataagaagatgaataagtactaatacgggtttgtaaactttcaacagggttccatcaggccgataaggatcgcaattacactttcctgaggctcagtgctgggacaacggcacagtaacccaaccagtaacccaagcaaacaacaaacaaccacaacaataacgaaaacaacaacaacaacaacaacaacaactgaaatgtgcgcaacagctcccaccttatgagaaagtaacaactagaagaaggttctctgaaaactcttttttaaagccagatgaaaacatgcgtattttccacactttcgcacacattgaaaatattaatacaaaaaaacggtagcaaacaacaaaagcaagtcattaaagctgcaattttgtaaaaaaaaaaacaacaacaaaaaaatgtaatagataaaaacaaaagctatcaaacagttccgcccaacacttagcatcgattttgaaaatcaacaaaatgaagagaaaaattattttttaatgaataattttaaagcaacaacaaaaacgcgagagaaaacgctagcaacaccaacaataaaccaacatcaacaagagaagaccaattaagtgaatattaaacagcaacgacaccggcactcaaccacaacaacaacaacaacaacagcttaaaactcctcaacaacccacaacacaccgcggcccatcaactgcatatataccacataactatatatctaattatattactttatagtaaaaaccaagaaaagaagagaaaacacaccaagaatagcacagttaaatgtaaaacaggaaaaaacaaaaccaaatgcgctgttgaaacagaaaccaccaatgggtaacgctttataaatatatatatctctaa

SEQ ID NO: 5237 - DNA, 1749 bp, DROSOPHILA
atgggaaattcagtcacacccgcctcaaacaccacctccctccccacaagcaccccctcagttaccacttccccgcccgcctccacagactttatgctgctggcagcggcagcaacgagtgcaacgagtgcaacacccgcaacagcgacatctgctgctgcaacagcagcatccaatcctgccaagcgcaaactgagctccatcgccgaaataccgtccaaatttctagtggtatcagatgcgaaaggagtctattccgcacacacgcatcccaatggcttcgccgccgattccctgggcgtggataacaacgaaacgatgatcaaaaagctaatgcagaatttacaaagtcaacgccagcagcaatcgctgcagcaattgcgtagcttgcgacctgcggaaatttcccttacaccgccgccggcagccacaagaaaagtggacataagcaactcacggacacgctcttactcactgtccaatgtttcagcagccagggatcagcaggaccatccgcagcatcagcaacatgccaaccatatgcagatccagcagcattacggctatatgaggagtaacattggcggcgtgatctatggcttgcacaaggactctgccgactctgcggcatcctcggcatgtggagcgggagcgggagcagcagcggtgggcatgagcattgcctcctcggcgccagcggcgggatctcagctatcggcgcatcatcacacgggacacggaggccgcaggcgcaccaccagttccaatagtaatggagcgggcacccgggaggtgcacaacaagctggaaaaggagcgacgcgcccagctgaaggagtgctatgacctgctcaaaaaggtgctgcccatgggtgacgaggaccgaaagaaaacatcaaacttgacaatacttgacacggcccacaaatatgtcaattccttgagtcatgaagtttgcgagcaggaggcgaagatagagaaactggccaagcagaagatcgagctgcagaagcggctaaagcaactgagcttaaggagggaatcgccgcccaccgatcagcaaatcattccacaggccgacaaagtttgtctggcaacaacagccacaacagcaccaccaacggcggccagtggccacaatggaaccacaattctattcgatgcaggcaacgcctgtgccactgggcagcagctaacaactgtgataaacaaaactaatggaggagcaaccgcagcagccagcagcaaacacaatggcaaccacacaggaggtgcaacaaccacactgactccggccatgggcatcatgacaattaaaaatggcaatggcagcaacggcaacatgctggcaatctcaccaacgggaggccacaatcatcagttgcaccagcaccacaacggcagcccagcgggcagtccatcgggaataggagccacaactggagccaccatcacacgtggctcgccaacgccatcgactccatcgccgtcgcccagctcctcgtccagtggcgtctcgttgtcgacctcatttatgggcggctcctcatcatcgtcctcatcctcctcatcatcatcatcttccagttcgtcgtccagttcttcgtcgcccacgcaacaacagcagataatcacgcccacggccacagcccgtagtgttggcctaaaattccatggcggtgcgggcgctgctgtgccagctggcggaggttcagtgaatggtaagaggggatccacacgattccactga

SEQ ID NO: 5238 - protein, 582 aa, DROSOPHILA
MGNSVTPASNTTSLPTSTPSVTTSPPASTDFMLLAAAATSATSATPATATSAAATAASNPAKRKLSSIAEIPSKFLVVSDAKGVYSAHTHPNGFAADSLGVDNNETMIKKLMQNLQSQRQQQSLQQLRSLRPAEISLTPPPAATRKVDISNSRTRSYSLSNVSAARDQQDHPQHQQHANHMQIQQHYGYMRSNIGGVIYGLHKDSADSAASSACGAGAGAAAVGMSIASSAPAAGSQLSAHHHTGHGGRRRTTSSNSNGAGTREVHNKLEKERRAQLKECYDLLKKVLPMGDEDRKKTSNLTILDTAHKYVNSLSHEVCEQEAKIEKLAKQKIELQKRLKQLSLRRESPPTDQQIIPQADKVCLATTATTAPPTAASGHNGTTILFDAGNACATGQQLTTVINKTNGGATAAASSKHNGNHTGGATTTLTPAMGIMTIKNGNGSNGNMLAISPTGGHNHQLHQHHNGSPAGSPSGIGATTGATITRGSPTPSTPSPSPSSSSSGVSLSTSFMGGSSSSSSSSSSSSSSSSSSSSSSPTQQQQIITPTATARSVGLKFHGGAGAAVPAGGGSVNGKRGSTRFH

SEQ ID NO: 5239 - DNA, 2696 bp, DROSOPHILA
ttaaggtgaaggtgaaggaggagcagagcaatagcaacctgtagccatgaccaccacggagaacgtgtccacggagcgcaaagcgaatccagtgaagtccttcctgaccggcggattcggtgggatctgcaatgtgctctctggccatccgctggacaccatcaaggtgcgcctgcagaccatgccgcgtccggcgccgggtgagcagcccctgtaccgcggcaccttcgactgtgcggccaagacgatcaaaaatgagggcgtccgcggtctgtacaagggcatgtccgcaccgttgacgggcgttgctccgatctttgcgatgtgcttcgccggctatgcgctgggcaagcggctgcagcagcgcggcgaggacgccaagctgacctacccgcaaatcttcgtggccggctccttctccggcctgttctccaccctgataatggcacccggcgagcgcatcaaggtgctcctgcagacgcagcagggtcagggtggcgagcgcaagtacaacggcatgatcgactgcgccggcaagctatacaaggagggtggacttcgcagcgttttcaagggcagctgcgccacaatgctcagggatttgcccgccaacgggctgtacttcctggtctacgaggcgctgcaggatgtggccaagtcgaagtcagagacgggacaaatcagtactgcctcaacgattttcgcaggtggagtggcgggcatggcctactggattctgggcatgccagccgacgtgttaaagagccgcctacaatcggctcccgaaggcacctacaagcacggcatacgcagtgtcttcaaggatctgattgtcaaggatggacctctggccttgtaccgcggcgtgacgcccatcatgctccgagccttcccagccaacgctgcctgcttcttcggcattgagttggctaacaaattctttaacatcgtagctccaaatttctagtttgtctaataaagaaagtgcctcgctaaaatgtttttacaacttgaagaaaactagctatatttgtgtgcccaattcaaaactttagagcttaactaaatctaaacgaaatactgcggcttgcgcatggtgatgccgtggtccgcgagtgccggcaccaggtcctccatggccagcgtgtacttcctgtccttggggtttttcttgtccttgctggaactgtgtccgctggaatgctggatgttcgtggtgcgcgtcttgcagtgctgcagtgcgtcgttggcaatatccgagatgaacttctgcgcggacaccgagacgaggcgcactatcttggggtccactgtgcagaagccagcctgcagatttaatccaatattagaaatgctacaaagaatagtttccggtatatagctaccgttttcaagatgtgcatggtgagggcgtctggtatggtgggcgagtagtcctccagctgctttatcagctcatccatctccgattcctccgtcgtcagaggaacctcctccacgtccggttgctcctcgtcggaatgcagttcggactgcattagtggcgagtctatatcctcctcctcggtgtccgtggccgatgttacggattctgcgggtgtaacactgatgtcctcgccatcggaagccattgttttccactttttaattgtttatttccagaaatttgttatctcagctggcgtgtatatgtgtgtatgtttatattgtaatcgatgacgaaccgtaagaagaatcgatagcactggcagcaacaatacggaataattcgataactagcatctcccatcactacgtctgcactgtgtttaatttgtattgtacacttttttcgatggtgggctccaatttcggaattatttaccacaacagcgccggtggcgcaagcagtcatggacaatcctcgggaggaggtggcggtggagatcgggataggaccacaccatcttcgcatctcagcgacttcatgtcgcagctggaagattatactccattgattccggatgcggtcacctcgcactatctcaacatgggaggctttcagtcggacgacaagcgcatcgttcggctgatcagcctagccgcccagaagtacatgtccgacatcatcgacgatgcactgcagcactccaaggcgcgcacccatatgcaaaccaccaatacaccgggaggatcgaaggccaaggaccgcaagttcaccttgaccatggaggatctgcagccggctttggccgactacggtattaatgttaggaaagtggactatagtcagtagataatggcatgcattgtagtagtttttttctcattaaaaataatgtatcttaagatctgtgttttgggaatttattgcgaaagaccttgggatcttaatgcattctcattctttcaagaaatccatttagtaaagggatttaagtccatagaatgcgtaactaatcgagcatatacaaggtaatttgtttttttttataatgttatacaaaagctattaactaggcggttaatactaggagtatgtttactggcatgttatgaattttctgaaactgcgagatgttcctccagccacccggaaggccaggactcccgtaagtatggtgaccaagtagtttatcagcagagtggtcgtgtaaagctcattggcattgagcagagttatcagggagacgaacaggtggctgaaaaccacatag

SEQ ID NO: 5240 - DNA, 637 bp, DROSOPHILA
cacacatatacacgccagctgagataacaaatttctggaaataaacaattaaaaagtggaaaacaatggcttccgatggcgaggacatcagtgttacacccgcagaatccgtaacatcggccacggacaccgaggaggaggatatagactcgccactaatgcagtccgaactgcattccgacgaggagcaaccggacgtggaggaggttcctctgacgacggaggaatcggagatggatgagctgataaagcagctggaggactactcgcccaccataccagacgccctcaccatgcacatcttgaaaacggctggcttctgcacagtggaccccaagatagtgcgcctcgtctcggtgtccgcgcagaagttcatctcggatattgccaacgacgcactgcagcactgcaagacgcgcaccacgaacatccagcattccagcggacacagttccagcaaggacaagaaaaaccccaaggacaggaagtacacgctggccatggaggacctggtgccggcactcgcggaccacggcatcaccatgcgcaagccgcagtatttcgtttagatttagttaagctctaaagttttgaattgggcacacaaatatagctagttttcttcaagttgtaaaaa

SEQ ID NO: 5241 - protein, 167 aa, DROSOPHILA
MASDGEDISVTPAESVTSATDTEEEDIDSPLMQSELHSDEEQPDVEEVPLTTEESEMDELIKQLEDYSPTIPDALTMHILKTAGFCTVDPKIVRLVSVSAQKFISDIANDALQHCKTRTTNIQHSSGHSSSKDKKNPKDRKYTLAMEDLVPALADHGITMRKPQYFV

SEQ ID NO: 5242 - DNA, 4173 bp, DROSOPHILA
acgaggatgagcccgatcggggcaataacaccatgcagcggcgggtgatggaggaatcctcacgactctcggctgatgattcacgaatgtcggacttctttggcgctagtggcagtaatactggagcgggcgtagtgaaaatggagcagaacgtgttcagcaagtctatgtttgggcatgaagccagcagtcctaagctcagcgccgccggatcaagctccaaccttgctgctcccagtggcttctacgatagccaaatgctagccaagcgcgaggagttcgagaacatggaattcatagacgaaccgcagccgcagtacacgcagcaacaggtccagcagaagatcaatcaactgacgcgccagattcgtgaactgaaagcgcagcaggtgcaaaagtcaacggaaattgcttccattcagaatgccacactcaaacaacgaatgcaggaaacgcttgataatctctacacacaggttattgaaagggaattggagctgaaggacttcgagaatatgctggagtcttaagatacagatataatacaaatggtggactagcataagttataataaaaactatgtacatacatattcggatgttacttcaaactatttacgacttcaacgccagtttctgttgttaaagtaaaccttagacaagaaattttgccatatcattggtcaactcattatttgtgtaaaattaaagtgtttcctcagtattgataagaatgattatttgcaaagcaacagagcacgacaattgaatctgtttttaagtatttattgcagtggacttatcaccaattaatcatctaaaattcaaaagaatcatatccgaatgcctccagtgcttgtggaacccatgacctccttaggaaatggtgcattgccgcacagagcaactggccttcggaccttggagcatactgctcgatatcatgcacgtaatttcatatcttcgatagctagagagagaaaatagagtctgtttaatcaatagtctaagtgtctttattattggcatttgcaaacaacaaattttagtgatattcaagatgggcaacaaagagttatgtattttgtactatgagtaaagttccagaggcaaaaccagacataaatcggtgtcttttagcttggggaagcacgtgggctgcttacttaagatctaataaggtagagtgtaaataggaatgggtgggctgtaatgctagataaactaaatgcaaaatttgtgacagtaattccgagccctctatggctatttatactgcaatttttgttatttcgtagtgggcaattgcgtgcaaaactggtttccaaaagcctttttcgtcttttggcacttatgagcttcaatcggtatcaccagctcaactcatcgggcagcccaccgggatattcaccagtgagacaggcggtgcagtggcccgttcccttggatttactatcgcctgcatcgcggtgctttagttggacagcctccactagtccctccacactaagataagccagactgtcggcgcccacatgcctagctagttggtcggggttcagcttgttggcaatcaattcctctcgagttggaatatttatacccatatagcatgggtactgcagcggtgggctggcaatgcggatgtgcacctcccgggcgcctgcatcccgtagcagcttgattattggtccaatggtgttgccgcgcacaatggaatcgtctatcaggaccaatctcttgccagccacgttctcggatagggctccgaacttcttggctactcccaactgccgcagccgggtagagggttgaataaacgtccgtcccacgtagcgattcctgcagagaacctcggcaaattcaatgccagactcacgggcatagccatgcgccgccgctgtgccagactcgggaacggaactcacaatatccgcctccactggagcctctcgccacagctgccggccgcactgcagcctcactgtgtacaccatctgaccctcgaagatgctgtctccgcgggcgaagtaaacgtactcaaatatacaaaaggccatgcgcttgaagtcgggtctttccacaatgtccaccgtgcggtagccacttcgcgacagctccactatctctccaggctccacttcgcggacgtatctggcaccgatcgacaggaagccacagctctcactggacaccacccaaccatcggcaggtgtgtctaagttatttccgtgcccagcattgatgggcactatcttgccaatgcatagcggcctatttccataggtgtccctcacggcgtagattttgtcctttagcatgatgaccagcgagtaggagagtggcgccagcatcatgaaatgcctgatcctagctggccagttgggtccatccagttcggaaacatcctccggggcgcagcacaacgactgggcgatcaactcactgtcgctgtgcgtggataagcccacgcctctggccaaaacctcccttcttagagattcgttgttaacaagctcaccattgtgggccagggccaatgctccatgtgtcgtatgtacctcaaagggctgacagttaaccactccggatccgccagcggtcgagtagcgtgtatgaccgatgcccaggttgccacgaagcttcttcatggagtcgtcgttgaacagggtgctgatcatacccatgcccttgtgcacgttgaagttcttggagcactttccctcgctggtcgctatgcccgcagactcctgcccacgatgctgcagtgccaccagccccaaacagatcacgtgtgcaatgtccatttgggtgggccaatctccgcaagcgattgccccgaaaacgccgcactcgtgcgtcaaaccggttagctccttgctggccgagatggattccgattccatgctggaggtcaccgcctcagctggttccacctgttgttgctcgaccacgcgcacatgttgttgttgcttctgctgcgactgttgttgttgctgtggcgctgacatgttgctgctgaaaaatcggtacaatatgctggttgaaggcaactgattgcaggcagtggcgcagttgacgccgatctgatttacctgctgatttacgcaacggttttatacaagaaaaatcctcgcacgctcgcacgcgcagctcagtttttcccgaatcggtcgagatcaagcccaatatcgatcggtcgctgatatcgatagtgcggtgtgctgatggatcgatagcattctatagtctgtattttcaaattggaattttacctaatttgtaatttagtacacaaaacaatatacacattataatttgattttattcgtttatataaaatatacgcaatcaaactaaataataagctttaaattgaattaaagttattttgcgcaattaaaattaattaaaaattgtatgtgtatgttcgtatatataatatttaacagttttttttttaacacgtaggcaattaaaaccagaaatataaaaaatgtttcgtgaaataaataaataataattaactacatatgtataacaattgaaaataagttcactgcaatccctcaataaaaacgccactaagagataaatatattagaaaaaattcacagtaggaacatttttacaaaaacggtttcttttatacatttgataagtatcaaactgaaatgcgattggttcaatttgttggtgtcattatgagcagtaggaatttaatgaaaacgtttagcttaagtacttgattcgatattcgaattccgctttgcacatcgcgcaaattgagagataagataactgatggaataactatttcaaagccgtgcgaagagtagtagtgcgtccttcagcaaagcctccttttccagactgacctacgccatcgctatttcgacgagcagagcttctccgtaaagaacggagcctccttcagcttggccttgtccgcctcgtcgaggaacgccttggcctgctcgatgtccccgcggatggcggcaatcagtgactccagggagtcgaaactgcgctccggtcgcaggtagcctacaatgcatatcttgagtgtctggccgtaaaggtcacagttaaagtcgtgtagcatgtgcgtctccacgctcttctccttgttgttgtagaagggattccagccgatgctgaggaccatcttgt

SEQ ID NO: 5243 - DNA, 2096 bp, DROSOPHILA
ccgattcgggaaaaactgagctgcgcgtgcgagcgtgcgaggatttttcttgtataaaaccgttgcgtaaatcagcagcagcaacatgtcagcgccacagcaacaacaacagtcgcagcagaagcaacaacaacatgtgcgcgtggtcgagcaacaacaggtggaaccagctgaggcggtgacctccagcatggaatcggaatccatctcggccagcaaggagctaaccggtttgacgcacgagtgcggcgttttcggggcaatcgcttgcggagattggcccacccaaatggacattgcacacgtgatctgtttggggctggtggcactgcagcatcgtgggcaggagtctgcgggcatagcgaccagcgagggaaagtgctccaagaacttcaacgtgcacaagggcatgggtatgatcagcaccctgttcaacgacgactccatgaagaagcttcgtggcaacctgggcatcggtcatacacgctactcgaccgctggcggatccggagtggttaactgtcagccctttgaggtacatacgacacatggagcattggccctggcccacaatggtgagcttgttaacaacgaatctctaagaagggaggttttggccagaggcgtgggcttatccacgcacagcgacagtgagttgatcgcccagtcgttgtgctgcgccccggaggatgtttccgaactggatggacccaactggccagctaggatcaggcatttcatgatgctggcgccactctcctactcgctggtcatcatgctaaaggacaaaatctacgccgtgagggacacctatggaaataggccgctatgcattggcaagatagtgcccatcaatgctgggcacggaaataacttagacacacctgccgatggttgggtggtgtccagtgagagctgtggcttcctgtcgatcggtgccagatacgtccgcgaagtggagcctggagagatagtggagctgtcgcgaagtggctaccgcacggtggacattgtggaaagacccgacttcaagcgcatggccttttgtatatttgagtacgtttacttcgcccgcggagacagcatcttcgagggtcagatggtgtacacagtgaggctgcagtgcggccggcagctgtggcgagaggctccagtggaggcggatattgtgagttccgttcccgagtctggcacagcggcggcgcatggctatgcccgtgagtctggcattgaatttgccgaggttctctgcaggaatcgctacgtgggacggacgtttattcaaccctctacccggctgcggcagttgggagtagccaagaagttcggagccctatccgagaacgtggctggcaagagattggtcctgatagacgattccattgtgcgcggcaacaccattggaccaataatcaagctgctacgggatgcaggcgcccgggaggtgcacatccgcattgccagcccaccgctgcagtacccatgctatatgggtataaatattccaactcgagaggaattgattgccaacaagctgaaccccgaccaactagctaggcatgtgggcgccgacagtctggcttatcttagtgtggagggactagtggaggctgtccaactaaagcaccgcgatgcaggcgatagtaaatccaagggaacgggccactgcaccgcctgtctcactggtgaatatcccggtgggctgcccgatgagttgagctggtgataccgattgaagctcataagtgccaaaagacgaaaaaggcttttggaaaccagttttgcacgcaattgcccactacgaaataacaaaaattgcagtataaatagccatagagggctcggaattactgtcacaaattttgcatttagtttatctagcattacagcccacccattcctatttacactctaccttattagatcttaagtaagcagcccacgtgcttccccaagctaaaagacaccgatttatgtctggttttgcctctggaactttactcatagtacaaaatacataactctttgttgcccatcttgaatatcactaaaatttgttgtttgcaaatgccaataataaagacacttagactatt

SEQ ID NO: 5244 - protein, 511 aa, DROSOPHILA
MESESISASKELTGLTHECGVFGAIACGDWPTQMDIAHVICLGLVALQHRGQESAGIATSEGKCSKNFNVHKGMGMISTLFNDDSMKKLRGNLGIGHTRYSTAGGSGVVNCQPFEVHTTHGALALAHNGELVNNESLRREVLARGVGLSTHSDSELIAQSLCCAPEDVSELDGPNWPARIRHFMMLAPLSYSLVIMLKDKIYAVRDTYGNRPLCIGKIVPINAGHGNNLDTPADGWVVSSESCGFLSIGARYVREVEPGEIVELSRSGYRTVDIVERPDFKRMAFCIFEYVYFARGDSIFEGQMVYTVRLQCGRQLWREAPVEADIVSSVPESGTAAAHGYARESGIEFAEVLCRNRYVGRTFIQPSTRLRQLGVAKKFGALSENVAGKRLVLIDDSIVRGNTIGPIIKLLRDAGAREVHIRIASPPLQYPCYMGINIPTREELIANKLNPDQLARHVGADSLAYLSVEGLVEAVQLKHRDAGDSKSKGTGHCTACLTGEYPGGLPDELSW

SEQ ID NO: 5245 - DNA, 13583 bp, DROSOPHILA
tttctatagaacttgtcgctcagagctggcaacactctccagcaacaacagttttcttttttttgcgcgtgccttgcataaagagcttacccaatgaacattttttaagaaaaaactattaagttctcaatgcccaatttaaattgagacacatcactttgaatctaatatgatcgaaatttcataccttttaattatatcgctgttgattggtacttaacaagagcaatgcaattaagagattgcaataagtaaggtgtaaataaattataaattattttaatcagagatggcagataactgttatcatgtaaaattatttctacagttctgagttttacatttatcgcagactcgaaccgttaatatttgttccatggaaaatcaattgttgggcgcacattaaatttgaatttaactgttgaaactgacctaaataattacttattactatatactaagataggggaaacccatgtattaggtgcttttttttttatataaaaacgacccgattttaatgatttcttttttaattttgttttatttttctgtgtatgtacaacaacttagaactaattcgtttcggcaatagttaatggtagacttaaagttaatggatggaatgatttaagtttaccacaaaaaaaaacaacgggcgggcgtgttcgtctctcttggtctctctcaatcgtaatctcgattttaaaaagtatactataatttttaagggcaaactaaaagctacgaagctgtggtggttgttatcctaaacgaaactgacaaaataataattgtaattgtaggtaagctaaagaaaagaaaaatcaaagtattctgtttcatccaaaacgctaagcttacaaacgaatactaaatacaagtagcagctcttactctataaataaaatacaaatttgtcctagtatttagtcagttccgtaaagggttaatgtgtaaagtgagtgttaaattagagtatggatttgatgacggcacttcacatggccgtttccaggggctgactgtgacttcgtccgtttgtttgcagtggctgcagaccaaccgatcctccatccccatcgaaatctgtttcgagtagagcctccgatttggagcggtggtactgattggtcagtggtgacggtgtcgttggcgacgactcctcggatgcggtttggtaaaccgtcttgggacgccgttgcgccggtccacccgcgggcgccacatttggtgcagccggtggctgtgccagtggcctcggtgtccggtaatgtgatactggagctttactactcctgacggcagtataatacgagtccggacgtcgcatgtccgccggtgttgcttgctgactactgggaaccgcaggcgctgggcggtacagtgaggactctgtagagtagttgaattgatctagcttctgatcaaagggcagtgagtcgccgctgcttcggtggggcataaaactgctatgcgagcttctttggtactcgggcaggttctgtttgagttcggagagaaaggccaagccgggttggccacgccttccagccggagttcctccctcggttcgaagtggcaaggtgctcgcatttccataataatcggaaccaccctcatcgatctcctgatctgtgtgatgtatgattggcgtgtcctctgccacactggtactaatggaattggctcgggtgttatcaccgtaggtggagttatcccggaatccttcgtttcggtagcttaactcaaaggcgtcgggctccaaggccgcagcagcagctgcagcggctctcgctctatggccactcgccttggaaatggtggccaccttgtgactctgatgatcctgtgcaggatgtgctggtcgcaaggcattctgattcacatactcattgtagtggggcttctgttcatagccctcaaagctaccagcttccgagcttaatacacttttgtccatggaatctatggaaccattggccaccatctgcttgtagtcctgacccttggacaatgttccattgctggacatattctgattggcgaagaaccaaaatggttaacataaaatgtaataaaaaataaagaaaataatcacataaaaaattattcataatcaaatcaaaagcaaatcatacataattgggtcttctgcgaagggaaccctgtggatcgatgctgttcaagctgcgcagactttggcgaatgctgtttcttctctggagtcgttgggtatgtcgatgttttgatttagcgaaccaacagaaggccaccaggatcagcaatataatggcaaggacaaaggctgagataatactgatggcaaagatgtctgcacgccaggataggggatcaatgataacctgaaagatgacagttgctaaccaatgttgatattctattatttcttgagttttttaccctgggatccgattcgcaaataaaaccgcgctccttgttgcaatcctcaatttcgatttccccaaacacaaagctcgtgcagcgatctatgtgattatagtcctgaatccaaaccttatccggatatttcaagtgtcgcatctggctctgcaaatacttccatagcgtcgtcttatcggtgcgtatgaagggcattgtggagttctccgagcgacagaaatctcgagcttcgtggaaagtcatgggagctcccacgtagataaaacaggtgtcatggaccagtgcccaacctggaggacatttaccatccagtattgtctcattgttcatttggaagggcacggctaagacctccagtagcataggatcatctgtttgggattacagacagctatagagttgtattaaatctattgatttaagtccttgctcacctgacttatctctaatacgagattgcaccgagatggtattattatagctccaataattgtgacgagcgtcgatcttagagctccaggtttcaaaggtcctagatagagaaagtcaatattaatggccacttaacaaaggacttatatttatcttacctgttttcatagtcaaaactcaaactacaggtaggaaaattgtagaaaatggaaaaaataaaattagaaattagattcccattaatagactagtagaataggaacagagaaattggaacagtttacaaataataatcataaagttataaaaaggaagaatatttgcatataatatttaaaataataataattacatggaattgttgactgtgagcagctcatagtcgttttcgtgattctcgaaaatattatcaacatattgctggcccgcggttccggccacaattgttgccctggtcatccagttggtggcaaaattcctaaaaaattatattttaataacgggttcacaggggccaaacaaagattgtgacccacctgtagaaaccattgtgagccgttgtctgatagatctgcaatcgcaccttttcgaagccagatacctccatgattcttcctcccacattgctgtgcacatagttatagctaaagttggataccacttggcacaatcttattacatcctcataaccggccatattctgggcaaagtagttgcgataaagttccacttcttgatacggcgaggattgtctgccttcgacgtacagagctggacgattgcgattcctcatgaagagattgtgatgaacaaagcctcgaagtgaggtggctgaacctcgagaatcagctctaatccgaagaccaccttgattttctgttatcaggttgttctgagaatgacattcagaaaaaaaatgtagtctttgaatgggtatagtaatgtttcttaaagaccttaccataaaatacaacgaattcatattctgcacatccaaattcagagctgaagtgcaggtggagaaattgccatacaattgtcggcaattcttttctatccgattgccaattaaagtcaacgtgggcgtgacctcaccggcggatgagtatgtaaccgctcctttgatcgcacctgagatatgagtatctgtgatattgtgcaaggcatcgcgatctgttgagtatttcacgattaaaataaatatgtacatattcgggataatttaagtagcttacattgacccaaagtggaaatgggcacagtgacgacctcggcgatgaaaccatgtgtttcgggagcaccactagccaccaactggagactcatcgttgggcccttggtcttgaagaacgatctttgattatccgtatcggattcgattttacccaaataagtggcagtcacattatagatatcaccgtcgtacaacttgataaaatcggttctgccatacaatttggagtgattgaacaaattcgattgcaacaatctgaaaccaattggcttagctcgaaaagctgaggtaaagatcttcacacagttcactggattgttatcatatttgtagtaaattagcatgcgttcttcgatggtcagcaccttttgcggatcacatatgtccaccagggagaagagcttatatgggagatccaacttctttaagggcgtaaaactagattcatcgctatcacgaccctcgccactcagcgatacaatgctaattccggtacccaaagtattgttaatgttcaggtgattcaaattcagtttaccactgggtgcaatcatgtttatgccatgattagcagagttttctatgctcaccgacgttatggatgggttcttgtgaatggcttgaatggcagcggctttgtgattatgcagtatgcctgcctgttcaatcctgacgaactccaattgactttccctcaatggcaaccgcgcatgtgatcttgtgttgtgcaaacgatgttcatattggatttcctcgaacttggagttggcgaatcttatgccaccccaataaacttcatcgtcagcaatgccattgcagctgacaaagacgaatacatcatcccaacggcattcgtggcgatgtccataaagttgaccattcaatcgctccgcacaatcctccattctctcctcgtcacctcgacattccaatggctgcacccatgaccaaattcgcgtcagtgagttcgtgtggaactctatcctgcgatcatgaccatagtaaacattcagaggatcatagcccagttcgcggcaaacaacttgagcatttcgttctgtaaatctgctgtcacaaatgggaacccactgaagagtggtgtgattgaagtactccaaaaagccctcattcaaaccgaacaatccgtcggcatcacctgtgcaattgttggcactggtgcacagtcttatggaatcgaattcggtgagcggagcactcatatcctccagtgcccgtttcttgggctgaacatcgatcagagattccctggtggcatttctaaagggcctcatcacgataggtgattctctgtatccaatggccactagtgtgcccaaaaccaatattccaacgtttggttcaaattccattgtgacgccatggtttatagtcaaagttttgcctggcataaccgtgatatcagaggatatatagtagggagtactctgtttcgtcaataacaagtccttatacactctaccacctttatagttggtcaaatctatctcttgatcttgattgaagggtacgaccacagaaacactggcatcgtaactatcttcgatcaggaatggctgatatatgacatccgcatgatcgttccagttgtcaaagtcgaaaatcttagcctcgatgaaggcggtatccttggtgccccaccagttctctcttgcctcaaagtagttattcaatctggccgatctcacacctgccaccaaattatagtccatttcattttcggctatcagattgcgatatagtcgcacattctggacaccatccagtcgaatcactgcggtgggtattttgtgttgttttcgtatccttctggccactttcatataatgattcctatagtttgccgtcatggtaacaatattatttcctttaaagctgttaaattcaatgctggcaggtacttgtccaatgatttcacttagagaatccgccttgaaaagcagcacaaacttggcgttattcgactcaaaacgattgttatcaaaacgaagtcgcttttccattccatctagagatatcagtgcgccagggcagttattctctctaaagacatttgaggttatattgaagaccgtatagtgaccggaaacggaaatgcggaagtcgcgatttctttgccaggtgctgttgccgaaataaatcgaatgcgtgaagttttcgttgtattgccacacgtatggcaaagataccttaaaatgcaaaaagaaagcttagctacattgaaaagaaaatagataaatttcaatattacctgaaagcctccatgagtattctgctcaaatgtagtatcctgtatgacgtaatggaataggttgttcgacgatcgcagatccttcgacatttgtcgtattccaagtccattttgagtgattagcgaaccattgacatgaagtgtaacctctgataggttactggatatcacatcccagaatggtgaccttataagtatagcttctcgttcattgtagctaagctcagagttgattagcttaattgattcgttggcttttctcaaataatactccccattgtcgcctatgtagcgattgtagtagatgcccgtaatacccctcaaattcttttgtatcttcgttgatcgaatggttagagtgggcactgcaccgctcacaatgcgattccttatgttttgcactggagctgtgactgtgctcagcatcaaaacagctcctcccaaggcctgcagtccgctttcgtagtaaattataatgccataactgctgctggttactgggaatacgtttaaatctcgcttaacttgccacagatcacttctaatattctctgtcctggcattcaggatgtttatgctctctgtggacagattgtgtatgggattcaagagctgtattccaataacatagcctgccggacattgaaccactattttgcgattaatattttgtcccaatagctcttcagttcttatgtacttgtgttcgaaggttcccaagtcgatgttgcttatttcacggggcaagagataaggatcgtagtcagtatcgaaagaattgaaatctgtagccatgttaaaccatcccccgatttccttttgatccaaagcagatatcaccgcatcgtgagaaacaccactgcctttgttgtccttgataatggatcctgagaccctgaagtccaattgttttagactaattccacttcccttattgccagagaactccgagtttttgatgttgttcacagacttgccagcatatatgtctgcgtatataatacccaaaccgtcttgtagattattcacgattcttacgttttccagattgtgacgcgcatgatccatctgaacagcgggcttaaatgcattggtggtataatcgaaaagtccggccttttccacagttacatactgtagatccgctctttcggccaacatactgaaacgcacaccagcccaggcaccctcataacacctgagacccacatcgttttcatggctacacgtgttttcgaactcgtattcagcccggcacttggtcacgtctcgatcctggagtgtacacctgacattggccattaaaatgtcctcggatgtgccagcatttggtaactgcgagcgtagtagtctccaatcctgtggattcagggagtaacccaattggtggcaaaccagagctgcgttcaggacattccagccataatcacatacagtgccccatcgtccctttaggtatacctgaagtcttccctcattggcacccgctcctccgaccaagcgaactggaactcgaggtacaccatccgcgggtattacttccgtttccatatctatggcctcagtttcgctatccaaatcgatggtttccgtatcatttgattcgcccataattgtttcccgcttcaaagtgaagagtatgtcatcgggtctacgtcctctggcttccaattttccagccaccatcattcccacactgggttcgaacttgagagtggtaccaggttggagtatgagcttaccaccaggtctgatattgatgtccttggttacggtatatgtaccagctggtaccatatcctgaccatcgacttcgccaccaatgacatcgcttccctcgtggaaaaatcgtggaaccacagtggaaaccgtaatcatggcagtggaacctggattggagctgtgcaacaggtatggtagatagtttattttcgccaaattatagcgatcgttgcgatgaaacagccgagcgtatatcttattctcatccgtgtgacccagccaattgcaagtggcgttgatgatcttactttgatcagtgagttgtgagccaatttcatacatggaatccagattgtgcaggatgtttcggaatatatcaacattacttgatcccacgacaacaggggctgcaactcgggatcgcggatttagtcggccagcaccatcactgccctctgagcctgcgattagaggaccaaaagcctccgttatattgtttcctctcacaaagtttctcgtgaagagtatatactgtacttccgctctgctgtagggcgataggcccagagaaaccacatgaactccgctgtttctcatgaagtagttactctgtatgatcagcttgaccgggaaataattaaactctggatatatgtagtcgttgttgatgaacagacaaccataggaaccaaagcggaacatattgtattcgatgcgtccttgaagattcaaagctggactcagatagatggagttcgcttgggagtatttaaactgattatgtcctagctgaagttgcatgttgggtcgtccattggcagtggcttggtagcaggattcaatgaatatatcattttgttgactaccgttgaaactgtttcccgtgatgtttacccaaatgggacgacagaagttgccgtgaaaaactccagtctccagattaccaccgatttgcgagtactccaccacgctggtttggttaaaaggtatgtactccattcgatttacgtccgatgtctgatttagccaagtggctacgccatatcccttgttggcagtcaatgccgatctggagatatttcgattgccaccgtaataggtgatgttaacgccagcgccattgttaaagcttatgttggagctggttatgttcacgtctccagctccactcgtcacatgaactcctgccacatgaccgttgccggagacggagctactgtgcacatgcagcttggatcttatattgtcgatggcaacaccacgacctccattatcctccaccgtggattgtgacaccttaagatcgtaggccaccgagtcgccggacgtcatcctgaagaaaccatttagctcctgcctggcatccgctcgtatccttacaaacattttctccctcgttgaggtgacactttggggcctcgtaaaattcctggccttccattcgaacagcaggcgatcgtttgtcgaggctccatcgtaaatttccactgtggccgtctcgttttgcatgagtacgaaattctcaaaatggagagtgagcagatatcctggtcgtgtgaagaagtacttgccacactccttgccagatccagcgtaatatttctgcgtgaaggacagcgaaatgggataggtttgtcccgacgttgtgggcagagtgcaaaagtcatatatgctggcacgatccttcctttccgttcccctcaaatcgtgtcccacatatttgataccatctccagcgttatccactatggagcatccatccaattgcacagcgccttgactcgaattgacgaagactccaatgccattgcatttcctcacagtgacattttgtagctgaaatcctgcccagggacgtgtgctattgaatcctgtgtaggccgagtgactgatcaccacgtgctccatttgtggaggtaatccttggacttccaccgccgacttggcattgaatcctgcaccacttcctgcccttatgatgtccacatatttcagacgtgactccgattgggccgcataaacgatattatccctgcccagagcctttgtggatggcgcattatcgaagtatatacctcgccaatggcccaaagtttcggaatggacgggcagacattggatgcccaaatcgttgtgataatcacatgcaccagctcccatttgccgggaggtccaagcgcaatcctgaagacttccttcgccacctttgcacttgggctgctcgtacagcaaacggggataatatcctggcgttcgctccacccaattccagaatctgccgcctctgtagcccagctgcttacaagccactccataatccgccaatgtccaactgttcaaggaaaatattaaataaatatgcgagtgattttcggtatttatttactcactttctggaattggagcaaaccgatctccatgcacccttgtggaaaagctgcagtcttccctccactggagtgggtccatccactagtcgaatgcccttctcttgatcatcgggcagctccagtttgtagttggccgtgttactctgggattttaacacaattctggaggttggtgtgccctaaaaggtataaaaataatgttgtactatttaaaaattcatagctgattgcttaattcaaaaagcggttttttaagatccaagataatacagattccaagcaaaacgaaaatatttccttattataatttctgcgtttcttttgagtttgaaaaatttcacttcgactttgttttcctcacgtagcatgcaattattttcgttttcaattatgatatcttctcgtcacttggccttcgtttgccaatgaaaatcgacatgaaaaatacatagtatatgtaattttcgaagcaattggggcatcaattaacacctatgcaacgaagatctccaaacgaagagtcgcccacaggcgcaaaacagttttatttaattaacagcaaggcggtgtgaactcttaacccttgtgaaacttatgttttgcatattcaaaaaaaaagaaatgtgtaaaatttcgagagcttagaactggcttaagagtttggacaaagctaatttaatcatttccctttcggtctttggtattgtcaattatgccactccgacattcacttaaatctaattaaccctcggtgaccccctgaccgctgattaagtgactacaaaagctaagaacagagcggaacatgtaaagtgcgcgtcataattgataggaagtcaactgaacttggatgacccaattatggggttaaagatggagcaggtcctaacctaccacatactgtattatggcatccacatgcattccgcacatcgcccatccatatgaaatgcgatatctcccctttttaaacgatgtgtaaatcagacaattgtaatcttatcatttgctatataaagtcaacaatgagggaacttcggtacgaagcttttgtgtggagcttatctcgctagtaagattactcatagggcaccctcgacggctgatagcaacaggtgccgcgcttaatcattcgcaaatatccaacaggtgtaggccgaaaaattactttagaccatgaaattactctatattaatcgaactatttgccttaatggatttcaaataattatttatttttaatggttctagttgtgtcatttaaaactggtccttatcattattgcaatgtgagatttcattatgaatattgtttgtcgtttcccaagctcaaataataataatatgatttcattagggctattattagtgccatttcctaaactaattttataccctctaattgagttgcacccttagtcaatcaagctcaacttattagaaggacatctagtgcttatttgggtatattatatccatgtatatatttcatgtacaaactggtgcatttaataggatttcccaagttaagcttctagagtttctccccgtcaatcatgctcaagttactgccagcttttccgaatgtagccacaatgaattttccccattaggattttccggacttaccaccgcctgcaggacgccgttgattttgagtcctttggtgggggcgaattcgatggtaacacccggttcgatggtcaaacgggctccacgcaggacctcgatatcgtcgcgtgccaaataaggactctcgctgcgccgcaggattcggtcgctgaggatttcgccgccttgcagctcggtgtatgacgaagatgacgtcatcgatggggtggaaccttgtggcgccacggtgacgtctgcgccggaatgtcgggttgctggcaatagttggctggcgccatcgagactggcgaactcgatgtcattatcctgcagcagttccacctctttggagtcctccgtttgtcgactttcttggctccgtgccaagtgggtcgaaaaagccagcgttacgagcagccataaacatatgctggcccattttggatccctgtggggtttacttattcgctgtctgttggttttatgatgttgcagcttcatttgtgcatcgttttcgtatcacttttcgttgtcgttaaatttggtttatttttgctttcaattaactacttcactaacggtttttattacacattcgccatggcagtttcgtgattatttaacagctgtttgggggaaaaggtttagatatattatatagttaatttaaatatttctaattcgataatgtttagctaaaaatttcgacgctttcgcacattttttatttacttgaaagaattgggatgtatttttttcatatttttaacgccttaaaaacactttattttcgtattttagcttaattttttaggcagtgttgtgtttcactttttagctttgctttggaaaaaggtttcaacatttttaattcttttcaatgcacttttctgttatttatcaactattgttgttctttcaacactgaaatctcgaatatctcgagatttcccaatggaaacatgagaattttggttggcttcattgttaacaaatttttgtgataagccaccaagagaacgggcccaaaaaaaaaacgagtcagaaaacaacaacagaacttctaccacaacgcacacgcatacatatacatatcagcttttagatgtttttgttttgactttttccaattttcccataaaaacacgtccgtacgcaaagaaccgttagcaacgactgaaaaaccgagcgggtttagtacattgcattacccacagacagagcgagatagagtgattcaaagaacggctgaggaaaagagagcggccgatgaacaacaataacaaaagaaatgagacaagcaaacaacaatatgttaaatattggggagttgttgctggaattcccccactttagtaaaataactgtaaatgtggaggcacttcattcatgccacaagagagagcgagagagagagagagagagggggagtgagagcgacgcacgcaccgcaagttcgtgtttttcaccaagttttcttttattttccttcggttacgtg

SEQ ID NO: 5246 - DNA, 9348 bp, DROSOPHILA
atgaagctgcaacatcataaaaccaacagacagcgaataagtaaaccccacagggatccaaaatgggccagcatatgtttatggctgctcgtaacgctggctttttcgacccacttggcacggagccaagaaagtcgacaaacggaggactccaaagaggtggaactgctgcaggataatgacatcgagttcgccagtctcgatggcgccagccaactattgccagcaacccgacattccggcgcagacgtcaccgtggcgccacaaggttccaccccatcgatgacgtcatcttcgtcatacaccgagctgcaaggcggcgaaatcctcagcgaccgaatcctgcggcgcagcgagagtccttatttggcacgcgacgatatcgaggtcctgcgtggagcccgtttgaccatcgaaccgggtgttaccatcgaattcgcccccaccaaaggactcaaaatcaacggcgtcctgcaggcggtgggcacaccaacctccagaattgtgttaaaatcccagagtaacacggccaactacaaactggagctgcccgatgatcaagagaagggcattcgactagtggatggacccactccagtggagggaagactgcagcttttccacaagggtgcatggagatcggtttgctccaattccagaaattggacattggcggattatggagtggcttgtaagcagctgggctacagaggcggcagattctggaattgggtggagcgaacgccaggatattatccccgtttgctgtacgagcagcccaagtgcaaaggtggcgaaggaagtcttcaggattgcgcttggacctcccggcaaatgggagctggtgcatgtgattatcacaacgatttgggcatccaatgtctgcccgtccattccgaaactttgggccattggcgaggtatatacttcgataatgcgccatccacaaaggctctgggcagggataatatcgtttatgcggcccaatcggagtcacgtctgaaatatgtggacatcataagggcaggaagtggtgcaggattcaatgccaagtcggcggtggaagtccaaggattacctccacaaatggagcacgtggtgatcagtcactcggcctacacaggattcaatagcacacgtccctgggcaggatttcagctacaaaatgtcactgtgaggaaatgcaatggcattggagtcttcgtcaattcgagtcaaggcgctgtgcaattggatggatgctccatagtggataacgctggagatggtatcaaatatgtgggacacgatttgaggggaacggaaaggaaggatcgtgccagcatatatgacttttgcactctgcccacaacgtcgggacaaacctatcccatttcgctgtccttcacgcagaaatattacgctggatctggcaaggagtgtggcaagtacttcttcacacgaccaggatatctgctcactctccattttgagaatttcgtactcatgcaaaacgagacggccacagtggaaatttacgatggagcctcgacaaacgatcgcctgctgttcgaatggaaggccaggaattttacgaggccccaaagtgtcacctcaacgagggagaaaatgtttgtaaggatacgagcggatgccaggcaggagctaaatggtttcttcaggatgacgtccggcgactcggtggcctacgatcttaaggtgtcacaatccacggtggaggataatggaggtcgtggtgttgccatcgacaatataagatccaagctgcatgtgcacagtagctccgtctccggcaacggtcatgtggcaggagttcatgtgacgagtggagctggagacgtgaacataaccagctccaacataagctttaacaatggcgctggcgttaacatcacctattacggtggcaatcgaaatatctccagatcggcattgactgccaacaagggatatggcgtagccacttggctaaatcagacatcggacgtaaatcgaatggagtacataccttttaaccaaaccagcgtggtggagtactcgcaaatcggtggtaatctggagactggagtttttcacggcaacttctgtcgtcccatttgggtaaacatcacgggaaacagtttcaacggtagtcaacaaaatgatatattcattgaatcctgctaccaagccactgccaatggacgacccaacatgcaacttcagctaggacataatcagtttaaatactcccaagcgaactccatctatctgagtccagctttgaatcttcaaggacgcatcgaatacaatatgttccgctttggttcctatggttgtctgttcatcaacaacgactacatatatccagagtttaattatttcccggtcaagctgatcatacagagtaactacttcatgagaaacagcggagttcatgtggtttctctgggcctatcgccctacagcagagcggaagtacagtatatactcttcacgagaaactttgtgagaggaaacaatataacggaggcttttggtcctctaatcgcaggctcagagggcagtgatggtgctggccgactaaatccgcgatcccgagttgcagcccctgttgtcgtgggatcaagtaatgttgatatattccgaaacatcctgcacaatctggattccatgtatgaaattggctcacaactcactgatcaaagtaagatcatcaacgccacttgcaattggctgggtcacacggatgagaataagatatacgctcggctgtttcatcgcaacgatcgctataatttggcgaaaataaactatctaccatacctgttgcacagctccaatccaggttccactgccatgattacggtttccactgtggttccacgatttttccacgagggaagcgatgtcattggtggcgaagtcgatggtcaggatatggtaccagctggtacatataccgtaaccaaggacatcaatatcagacctggtggtaagctcatactccaacctggtaccactctcaagttcgaacccagtgtgggaatgatggtggctggaaaattggaagccagaggacgtagacccgatgacatactcttcactttgaagcgggaaacaattatgggcgaatcaaatgatacggaaaccatcgatttggatagcgaaactgaggccatagatatggaaacggaagtaatacccgcggatggtgtacctcgagttccagttcgcttggtcggaggagcgggtgccaatgagggaagacttcaggtatacctaaagggacgatggggcactgtatgtgattatggctggaatgtcctgaacgcagctctggtttgccaccaattgggttactccctgaatccacaggattggagactactacgctcgcagttaccaaatgctggcacatccgaggacattttaatggccaatgtcaggtgtacactccaggatcgagacgtgaccaagtgccgggctgaatacgagttcgaaaacacgtgtagccatgaaaacgatgtgggtctcaggtgttatgagggtgcctgggctggtgtgcgtttcagtatgttggccgaaagagcggatctacagtatgtaactgtggaaaaggccggacttttcgattataccaccaatgcatttaagcccgctgttcagatggatcatgcgcgtcacaatctggaaaacgtaagaatcgtgaataatctacaagacggtttgggtattatatacgcagacatatatgctggcaagtctgtgaacaacatcaaaaactcggagttctctggcaataagggaagtggaattagtctaaaacaattggacttcagggtctcaggatccattatcaaggacaacaaaggcagtggtgtttctcacgatgcggtgatatctgctttggatcaaaaggaaatcgggggatggtttaacatggctacagatttcaattctttcgatactgactacgatccttatctcttgccccgtgaaataagcaacatcgacttgggaaccttcgaacacaagtacataagaactgaagagctattgggacaaaatattaatcgcaaaatagtggttcaatgtccggcaggctatgttattggaatacagctcttgaatcccatacacaatctgtccacagagagcataaacatcctgaatgccaggacagagaatattagaagtgatctgtggcaagttaagcgagatttaaacgtattcccagtaaccagcagcagttatggcattataatttactacgaaagcggactgcaggccttgggaggagctgttttgatgctgagcacagtcacagctccagtgcaaaacataaggaatcgcattgtgagcggtgcagtgcccactctaaccattcgatcaacgaagatacaaaagaatttgaggggtattacgggcatctactacaatcgctacataggcgacaatggggagtattatttgagaaaagccaacgaatcaattaagctaatcaactctgagcttagctacaatgaacgagaagctatacttataaggtcaccattctgggatgtgatatccagtaacctatcagaggttacacttcatgtcaatggttcgctaatcactcaaaatggacttggaatacgacaaatgtcgaaggatctgcgatcgtcgaacaacctattccattacgtcatacaggatactacatttgagcagaatactcatggaggctttcaggtatctttgccatacgtgtggcaatacaacgaaaacttcacgcattcgatttatttcggcaacagcacctggcaaagaaatcgcgacttccgcatttccgtttccggtcactatacggtcttcaatataacctcaaatgtctttagagagaataactgccctggcgcactgatatctctagatggaatggaaaagcgacttcgttttgataacaatcgttttgagtcgaataacgccaagtttgtgctgcttttcaaggcggattctctaagtgaaatcattggacaagtacctgccagcattgaatttaacagctttaaaggaaataatattgttaccatgacggcaaactataggaatcattatatgaaagtggccagaaggatacgaaaacaacacaaaatacccaccgcagtgattcgactggatggtgtccagaatgtgcgactatatcgcaatctgatagccgaaaatgaaatggactataatttggtggcaggtgtgagatcggccagattgaataactactttgaggcaagagagaactggtggggcaccaaggataccgccttcatcgaggctaagattttcgactttgacaactggaacgatcatgcggatgtcatatatcagccattcctgatcgaagatagttacgatgccagtgtttctgtggtcgtacccttcaatcaagatcaagagatagatttgaccaactataaaggtggtagagtgtataaggacttgttattgacgaaacagagtactccctactatatatcctctgatatcacggttatgccaggcaaaactttgactataaaccatggcgtcacaatggaatttgaaccaaacgttggaatattggttttgggcacactagtggccattggatacagagaatcacctatcgtgatgaggccctttagaaatgccaccagggaatctctgatcgatgttcagcccaagaaacgggcactggaggatatgagtgctccgctcaccgaattcgattccataagactgtgcaccagtgccaacaattgcacaggtgatgccgacggattgttcggtttgaatgagggctttttggagtacttcaatcacaccactcttcagtgggttcccatttgtgacagcagatttacagaacgaaatgctcaagttgtttgccgcgaactgggctatgatcctctgaatgtttactatggtcatgatcgcaggatagagttccacacgaactcactgacgcgaatttggtcatgggtgcagccattggaatgtcgaggtgacgaggagagaatggaggattgtgcggagcgattgaatggtcaactttatggacatcgccacgaatgccgttgggatgatgtattcgtctttgtcagctgcaatggcattgctgacgatgaagtttattggggtggcataagattcgccaactccaagttcgaggaaatccaatatgaacatcgtttgcacaacacaagatcacatgcgcggttgccattgagggaaagtcaattggagttcgtcaggattgaacaggcaggcatactgcataatcacaaagccgctgccattcaagccattcacaagaacccatccataacgtcggtgagcatagaaaactctgctaatcatggcataaacatgattgcacccagtggtaaactgaatttgaatcacctgaacattaacaatactttgggtaccggaattagcattgtatcgctgagtggcgagggtcgtgatagcgatgaatctagttttacgcccttaaagaagttggatctcccatataagctcttctccctggtggacatatgtgatccgcaaaaggtgctgaccatcgaagaacgcatgctaatttactacaaatatgataacaatccagtgaactgtgtgaagatctttacctcagcttttcgagctaagccaattggtttcagattgttgcaatcgaatttgttcaatcactccaaattgtatggcagaaccgattttatcaagttgtacgacggtgatatctataatgtgactgccacttatttgggtaaaatcgaatccgatacggataatcaaagatcgttcttcaagaccaagggcccaacgatgagtctccagttggtggctagtggtgctcccgaaacacatggtttcatcgccgaggtcgtcactgtgcccatttccactttgggtcaatatcgcgatgccttgcacaatatcacagatactcatatctcaggtgcgatcaaaggagcggttacatactcatccgccggtgaggtcacgcccacgttgactttaattggcaatcggatagaaaagaattgccgacaattgtatggcaatttctccacctgcacttcagctctgaatttggatgtgcagaatatgaattcgttgtattttatgaacaacctgataacagaaaatcaaggtggtcttcggattagagctgattctcgaggttcagccacctcacttcgaggctttgttcatcacaatctcttcatgaggaatcgcaatcgtccagctctgtacgtcgaaggcagacaatcctcgccgtatcaagaagtggaactttatcgcaactactttgcccagaatatggccggttatgaggatgtaataagattgtgccaagtggtatccaactttagctataactatgtgcacagcaatgtgggaggaagaatcatggaggtatctggcttcgaaaaggtgcgattgcagatctatcagacaacggctcacaatggtttctacaggaattttgccaccaactggatgaccagggcaacaattgtggccggaaccgcgggccagcaatatgttgataatattttcgagaatcacgaaaacgactatgagctgctcacagtcaacaattccatgacctttgaaacctggagctctaagatcgacgctcgtcacaattattggagctataataataccatctcggtgcaatctcgtattagagataagtcagatgatcctatgctactggaggtcttagccgtgcccttccaaatgaacaatgagacaatactggatggtaaatgtcctccaggttgggcactggtccatgacacctgttttatctacgtgggagctcccatgactttccacgaagctcgagatttctgtcgctcggagaactccacaatgcccttcatacgcaccgataagacgacgctatggaagtatttgcagagccagatgcgacacttgaaatatccggataaggtttggattcaggactataatcacatagatcgctgcacgagctttgtgtttggggaaatcgaaattgaggattgcaacaaggagcgcggttttatttgcgaatcggatcccagggttatcattgatcccctatcctggcgtgcagacatctttgccatcagtattatctcagcctttgtccttgccattatattgctgatcctggtggccttctgttggttcgctaaatcaaaacatcgacatacccaacgactccagagaagaaacagcattcgccaaagtctgcgcagcttgaacagcatcgatccacagggttcccttcgcagaagacccaattataatatgtccagcaatggaacattgtccaagggtcaggactacaagcagatggtggccaatggttccatagattccatggacaaaagtgtattaagctcggaagctggtagctttgagggctatgaacagaagccccactacaatgagtatgtgaatcagaatgccttgcgaccagcacatcctgcacaggatcatcagagtcacaaggtggccaccatttccaaggcgagtggccatagagcgagagccgctgcagctgctgctgcggccttggagcccgacgcctttgagttaagctaccgaaacgaaggattccgggataactccacctacggtgataacacccgagccaattccattagtaccagtgtggcagaggacacgccaatcatacatcacacagatcaggagatcgatgagggtggttccgattattatggaaatgcgagcaccttgccacttcgaaccgagggaggaactccggctggaaggcgtggccaacccggcttggcctttctctccgaactcaaacagaacctgcccgagtaccaaagaagctcgcatagcagttttatgccccaccgaagcagcggcgactcactgccctttgatcagaagctagatcaattcaactactctacagagtcctcactgtaccgcccagcgcctgcggttcccagtagtcagcaagcaacaccggcggacatgcgacgtccggactcgtattatactgccgtcaggagtagtaaagctccagtatcacattaccggacaccgaggccactggcacagccaccggctgcaccaaatgtggcgcccgcgggtggaccggcgcaacggcgtcccaagacggtttaccaaaccgcatccgaggagtcgtcgccaacgacaccgtcaccactgaccaatcagtaccaccgctccaaatcggaggctctactcgaaacagatttcgatggggatggaggatcggttggtctgcagccactgcaaacaaacggacgaagtcacagtcagcccctggaaacggccatgtga

SEQ ID NO: 5247 - protein, 3115 aa, DROSOPHILA
MKLQHHKTNRQRISKPHRDPKWASICLWLLVTLAFSTHLARSQESRQTEDSKEVELLQDNDIEFASLDGASQLLPATRHSGADVTVAPQGSTPSMTSSSSYTELQGGEILSDRILRRSESPYLARDDIEVLRGARLTIEPGVTIEFAPTKGLKINGVLQAVGTPTSRIVLKSQSNTANYKLELPDDQEKGIRLVDGPTPVEGRLQLFHKGAWRSVCSNSRNWTLADYGVACKQLGYRGGRFWNWVERTPGYYPRLLYEQPKCKGGEGSLQDCAWTSRQMGAGACDYHNDLGIQCLPVHSETLGHWRGIYFDNAPSTKALGRDNIVYAAQSESRLKYVDIIRAGSGAGFNAKSAVEVQGLPPQMEHVVISHSAYTGFNSTRPWAGFQLQNVTVRKCNGIGVFVNSSQGAVQLDGCSIVDNAGDGIKYVGHDLRGTERKDRASIYDFCTLPTTSGQTYPISLSFTQKYYAGSGKECGKYFFTRPGYLLTLHFENFVLMQNETATVEIYDGASTNDRLLFEWKARNFTRPQSVTSTREKMFVRIRADARQELNGFFRMTSGDSVAYDLKVSQSTVEDNGGRGVAIDNIRSKLHVHSSSVSGNGHVAGVHVTSGAGDVNITSSNISFNNGAGVNITYYGGNRNISRSALTANKGYGVATWLNQTSDVNRMEYIPFNQTSVVEYSQIGGNLETGVFHGNFCRPIWVNITGNSFNGSQQNDIFIESCYQATANGRPNMQLQLGHNQFKYSQANSIYLSPALNLQGRIEYNMFRFGSYGCLFINNDYIYPEFNYFPVKLIIQSNYFMRNSGVHVVSLGLSPYSRAEVQYILFTRNFVRGNNITEAFGPLIAGSEGSDGAGRLNPRSRVAAPVVVGSSNVDIFRNILHNLDSMYEIGSQLTDQSKIINATCNWLGHTDENKIYARLFHRNDRYNLAKINYLPYLLHSSNPGSTAMITVSTVVPRFFHEGSDVIGGEVDGQDMVPAGTYTVTKDINIRPGGKLILQPGTTLKFEPSVGMMVAGKLEARGRRPDDILFTLKRETIMGESNDTETIDLDSETEAIDMETEVIPADGVPRVPVRLVGGAGANEGRLQVYLKGRWGTVCDYGWNVLNAALVCHQLGYSLNPQDWRLLRSQLPNAGTSEDILMANVRCTLQDRDVTKCRAEYEFENTCSHENDVGLRCYEGAWAGVRFSMLAERADLQYVTVEKAGLFDYTTNAFKPAVQMDHARHNLENVRIVNNLQDGLGIIYADIYAGKSVNNIKNSEFSGNKGSGISLKQLDFRVSGSIIKDNKGSGVSHDAVISALDQKEIGGWFNMATDFNSFDTDYDPYLLPREISNIDLGTFEHKYIRTEELLGQNINRKIVVQCPAGYVIGIQLLNPIHNLSTESINILNARTENIRSDLWQVKRDLNVFPVTSSSYGIIIYYESGLQALGGAVLMLSTVTAPVQNIRNRIVSGAVPTLTIRSTKIQKNLRGITGIYYNRYIGDNGEYYLRKANESIKLINSELSYNEREAILIRSPFWDVISSNLSEVTLHVNGSLITQNGLGIRQMSKDLRSSNNLFHYVIQDTTFEQNTHGGFQVSLPYVWQYNENFTHSIYFGNSTWQRNRDFRISVSGHYTVFNITSNVFRENNCPGALISLDGMEKRLRFDNNRFESNNAKFVLLFKADSLSEIIGQVPASIEFNSFKGNNIVTMTANYRNHYMKVARRIRKQHKIPTAVIRLDGVQNVRLYRNLIAENEMDYNLVAGVRSARLNNYFEARENWWGTKDTAFIEAKIFDFDNWNDHADVIYQPFLIEDSYDASVSVVVPFNQDQEIDLTNYKGGRVYKDLLLTKQSTPYYISSDITVMPGKTLTINHGVTMEFEPNVGILVLGTLVAIGYRESPIVMRPFRNATRESLIDVQPKKRALEDMSAPLTEFDSIRLCTSANNCTGDADGLFGLNEGFLEYFNHTTLQWVPICDSRFTERNAQVVCRELGYDPLNVYYGHDRRIEFHTNSLTRIWSWVQPLECRGDEERMEDCAERLNGQLYGHRHECRWDDVFVFVSCNGIADDEVYWGGIRFANSKFEEIQYEHRLHNTRSHARLPLRESQLEFVRIEQAGILHNHKAAAIQAIHKNPSITSVSIENSANHGINMIAPSGKLNLNHLNINNTLGTGISIVSLSGEGRDSDESSFTPLKKLDLPYKLFSLVDICDPQKVLTIEERMLIYYKYDNNPVNCVKIFTSAFRAKPIGFRLLQSNLFNHSKLYGRTDFIKLYDGDIYNVTATYLGKIESDTDNQRSFFKTKGPTMSLQLVASGAPETHGFIAEVVTVPISTLGQYRDALHNITDTHISGAIKGAVTYSSAGEVTPTLTLIGNRIEKNCRQLYGNFSTCTSALNLDVQNMNSLYFMNNLITENQGGLRIRADSRGSATSLRGFVHHNLFMRNRNRPALYVEGRQSSPYQEVELYRNYFAQNMAGYEDVIRLCQVVSNFSYNYVHSNVGGRIMEVSGFEKVRLQIYQTTAHNGFYRNFATNWMTRATIVAGTAGQQYVDNIFENHENDYELLTVNNSMTFETWSSKIDARHNYWSYNNTISVQSRIRDKSDDPMLLEVLAVPFQMNNETILDGKCPPGWALVHDTCFIYVGAPMTFHEARDFCRSENSTMPFIRTDKTTLWKYLQSQMRHLKYPDKVWIQDYNHIDRCTSFVFGEIEIEDCNKERGFICESDPRVIIDPLSWRADIFAISIISAFVLAIILLILVAFCWFAKSKHRHTQRLQRRNSIRQSLRSLNSIDPQGSLRRRPNYNMSSNGTLSKGQDYKQMVANGSIDSMDKSVLSSEAGSFEGYEQKPHYNEYVNQNALRPAHPAQDHQSHKVATISKASGHRARAAAAAAAALEPDAFELSYRNEGFRDNSTYGDNTRANSISTSVAEDTPIIHHTDQEIDEGGSDYYGNASTLPLRTEGGTPAGRRGQPGLAFLSELKQNLPEYQRSSHSSFMPHRSSGDSLPFDQKLDQFNYSTESSLYRPAPAVPSSQQATPADMRRPDSYYTAVRSSKAPVSHYRTPRPLAQPPAAPNVAPAGGPAQRRPKTVYQTASEESSPTTPSPLTNQYHRSKSEALLETDFDGDGGSVGLQPLQTNGRSHSQPLETAM

SEQ ID NO: 5248 - DNA, 4164 bp, DROSOPHILA
atctgctcccgcatgatgtccgtgtaggtgcgagagcccacatctggggttttcccgccatcggcaaagggatccgctcgctctggggaaatgatgatgtgacgtctcttctgcctgtactcatcctcccgatcggcaatcgttggacgcctgcggtctgccatgggatccacatcctccttgccctgggtcacgtcctttagcacggaggccggcgccgtgtacgtggtgcgtttctggggcacggggaagccgtcgtcctcatcctcatcgacttcctcggcgtcgttggccgcaatggaggtgttgtacccctcgtaacgccccttccccttggcggcatcatcgtcgtacaagtcgctgtcgaagaatcctccgctgtccagcaatcccacgccggctgctgcggcagtggtcttggccaactccgtcttcttctcctggatcacgctgatctgtgcctcgatatctgtgagtaaaaataggtaaagatacttgattttcatagtagaccaccagccagaaaaaccggtcgatccccatttgtgtgtgcggttccttttggtgcgcagatagtatatttacgttttggcaatggcggtggtttgccaccgtgagtgtttatatcgcttaccttcatgtgttcgcggaatattttccatttttataaaaactttaccaagagaagagcgtacatgtaaaaccagtgttaccagatgataatagcgcctggtctaagtgtgaccaaatacatatcatatcgtactagcagctatcgggaaacattcgatttcttaaatcttctcattccacccgatattgatgatgatattttggacaacttttattacaaagttcgatacaaaatataaatgcattatttgtttattattttttaagcaaataataatcgatagctggcaggccagctgagccgtctgccgattgctcatcactaacgaacaagttgcggcacgtgtttacttttgttttgaccgcgagaatgttggccaaaaaacagaaaatgcaggagacggacacggagcaagaggccacgccacatacgatacaggcgcgcctcgtttcggacacgggcgaggaagcgggcccgccaatcgacctgccggcaggaatcactacccagcaattgggtctgatttgcaacgcgctgctgaaaaacgaggaagccactccatatttgtttttcgtgggcgaggatgagatcaagaagagcctggaggacacgttggacttggcgtcagtggacaccgaaaacgtgatcgatattgtgtatcagccacaggcggttttcaaagtgcgcccagtgacaagatgcacgagttccatgccgggacacgccgaggctgtggtttcgctgaatttcagcccggatggtgctcatctcgccagtggaagtggcgacaccacagtgcgattgtgggatcttaacacagagacaccgcacttcacctgcacaggtcataagcagtgggttctgtgcgtatcctgggctccggatggcaaacggttggccagcggttgcaaagcgggctctataatcatctgggacccggagacgggtcagcagaaggggcgacccttgagtgggcacaagaaacacatcaactgcctcgcctgggaaccgtatcatcgcgatccggagtgcaggaaacttgcttccgccagtggagacggggactgccggatttgggacgtgaaattgggccagtgccttatgaacattgccggacacacaaatgctgtgacagcagtgagatggggtggagcgggccttatttatacatcctccaaagatcgcacagtgaagatgtggcgagcagctgatggaatcttgtgccggacgttctctggccacgctcactgggtaaacaacattgcgctgagcaccgactacgtcctgcgcactggtccattccatccggtgaaggatcgctccaagagccacctcagtttgagcagtaagaattcatatgctctctatatatgctgtatatcctaaaagagattgttttacagctgaggaattgcaggaatctgccttgaagcgctaccaggccgtgtgccctgacgaggtggagtcgctggtttcctgttcggatgacaacaccctctatctgtggcggaacaaccagaacaagtgcgttgagcgcatgacagggcaccagaacgtggtcaacgacgtgaaatattcgccggatgtaaagctaattgcgtctgcttcatttgacaagtcagtgcgtctgtggcgagccagcgatggtcagtacatggccaccttccggggtcatgtgcaggctgtttacacggttgcctggtccgcggactcccgcttgattgtttccggcagcaaagactcaactctaaaaggttagcacgtagtttcagttttctagcgctagctaatacatatcctcttgcttagtatggagtgtgcagacgaagaaactggcacaggagctgcctggacatgcggatgaggtgttcggagtggactgggcgcccgatggctctagagttgcctctggtggcaaggacaaagttataaagctgtaagtttgagtaacgaggttttctataacaatatacagactctaattgtatctttcagatgggcttattaacaaatcattaacttgtacacggtaagaaaatacttaggaataaagtaaaacgtcctgagtaaatgccttcgttctttttggtgttcaaagtaccatctatatgctctgctgttgaatgatccgggcagtatgcttgtagcgactctcaaaagattcttgatttgagaagtacgttgcgggaacggcggactcagactgcagtgccctttcagcggccacaaagccgccggcgatgcactcgtccagagatcgccctcgcagcagggcagtgatgaagcccgcgcagaaactatcgcccgctccggagacattcacaatattgtgaaccatgggagcgggatagaagcgagtgctgtgtggcggcgtgggcttactcacatcgaggagcaatctggcatcgttttcagcgtcccctcgatagctgagtagcaccccgtggtcactcagcgtagctatgatgcaattgaagtggctgtcgatttttttgatcaaggacttcgcttgctgaaccagttccgtttgtggctgtttggtttctggattccatttgacagtttcgcccgttatagcctccgtaatagttttcaactcctgcatattcggtttgatcaggcgtatgttcttggttaactccggcagcagcttgaacggtttaccggctatgaacatatctgtgggctcgaagaagactggaatcttgttgatttgcgcctgctgcagaatgctggccatggcctgctccgatatgttgctgtccatgatgatgagaggagcttctcggaagagttggtggtgcgcttgcagggtctcggctgtaatgctctggtggatttccatgttgcccagaatcagcttgcaatctccaaacttatcgaagattagggagcacaatgaggtgttgtggttgtccgccacaattaggccccgcttcagcgcctttggcatcatttgaagcagcgtttgtcccatctggtcgtttcccacggcggaaattaggtttacatctccgtatagcttgtagatgccctcagctatgttccgacccactcccccagccgcctgtttagctaccgcggaatacgtcgctccatcaagcttcatgtcgcgtttctgatcgtccaccttaaaggaaagatccaggatggaggctcccacaaccagtggctttttatcgattgctttttggaccgggctttccagtttcgtggacacgtcacaaagcgatgcggcgatttgagcagcaaccttggcattgttcttgattagtgctatgttagacttaaggctccttccttcggtgatcttggctatggcggccagcaggaatggagtaacctccttgccggaaattccctgggccctggcttgagcagttgcttccttgatggcctcctcaattttgaatttatctgcggcaaactcctccggaatgggaacaccaattaccaggcctgattccattttcaattcccgccaagatcgcagcagctcagctgcctcctgggcacttttaaggttgtag

SEQ ID NO: 5249 - DNA, 1992 bp, DROSOPHILA
agaatgttggccaaaaaacagaaaatgcaggagacggacacggagcaagaggccacgccacatacgatacaggcgcgcctcgtttcggacacgggcgaggaagcgggcccgccaatcgacctgccggcaggaatcactacccagcaattgggtctgatttgcaacgcgctgctgaaaaacgaggaagccactccatatttgtttttcgtgggcgaggatgagatcaagaagagcctggaggacacgttggacttggcgtcagtggacaccgaaaacgtgatcgatattgtgtatcagccacaggcggttttcaaagtgcgcccagtgacaagatgcacgagttccatgccgggacacgccgaggctgtggtttcgctgaatttcagcccggatggtgctcatctcgccagtggaagtggcgacaccacagtgcgattgtgggatcttaacacagagacaccgcacttcacctgcacaggtcataagcagtgggttctgtgcgtatcctgggctccggatggcaaacggttggccagcggttgcaaagcgggctctataatcatctgggacccggagacgggtcagcagaaggggcgacccttgagtgggcacaagaaacacatcaactgcctcgcctgggaaccgtatcatcgcgatccggagtgcaggaaacttgcttccgccagtggagacggggactgccggatttgggacgtgaaattgggccagtgccttatgaacattgccggacacacaaatgctgtgacagcagtgagatggggtggagcgggccttatttatacatcctccaaagatcgcacagtgaagatgtggcgagcagctgatggaatcttgtgccggacgttctctggccacgctcactgggtaaacaacattgcgctgagcaccgactacgtcctgcgcactggtccattccatccggtgaaggatcgctccaagagccacctcagtttgagcactgaggaattgcaggaatctgccttgaagcgctaccaggccgtgtgccctgacgaggtggagtcgctggtttcctgttcggatgacaacaccctctatctgtggcggaacaaccagaacaagtgcgttgagcgcatgacagggcaccagaacgtggtcaacgacgtgaaatattcgccggatgtaaagctaattgcgtctgcttcatttgacaagtcagtgcgtctgtggcgagccagcgatggtcagtacatggccaccttccggggtcatgtgcaggctgtttacacggttgcctggtccgcggactcccgcttgattgtttccggcagcaaagactcaactctaaaagtatggagtgtgcagacgaagaaactggcacaggagctgcctggacatgcggatgaggtgttcggagtggactgggcgcccgatggctctagagttgcctctggtggcaaggacaaagttataaagctatgggcttattaacaaatcattaacttgtacacggtaagaaaatacttaggaataaagtaaaacgtcctgagtaaatgccttcgttctttttggtgttcaaagtaccatctatatgctctgctgttgaatgatccgggcagtatgcttgtagcgactctcaaaagattcttgatttgagaagtacgttgcgggaacggcggactcagactgcagtgccctttcagcggccacaaagccgccggcgatgcactcgtccagagatcgccctcgcagcagggcagtgatgaagcccgcgcagaaactatcgcccgctccggagacattcacaatattgtgaaccatgggagcgggatagaagcgagtgctgtgtggcggcgtgggcttactcacatcgaggagcaatctggcatcgttttcagcgtcccctcgatagctgagtagcaccccgtggtcactcagcgtagctatgatgcaattgaagtggctgtcgatttttttgatcaaggacttcgcttgctgaaccagttccgtttg

SEQ ID NO: 5250 - protein, 481 aa, DROSOPHILA
MQETDTEQEATPHTIQARLVSDTGEEAGPPIDLPAGITTQQLGLICNALLKNEEATPYLFFVGEDEIKKSLEDTLDLASVDTENVIDIVYQPQAVFKVRPVTRCTSSMPGHAEAVVSLNFSPDGAHLASGSGDTTVRLWDLNTETPHFTCTGHKQWVLCVSWAPDGKRLASGCKAGSIIIWDPETGQQKGRPLSGHKKHINCLAWEPYHRDPECRKLASASGDGDCRIWDVKLGQCLMNIAGHTNAVTAVRWGGAGLIYTSSKDRTVKMWRAADGILCRTFSGHAHWVNNIALSTDYVLRTGPFHPVKDRSKSHLSLSTEELQESALKRYQAVCPDEVESLVSCSDDNTLYLWRNNQNKCVERMTGHQNVVNDVKYSPDVKLIASASFDKSVRLWRASDGQYMATFRGHVQAVYTVAWSADSRLIVSGSKDSTLKVWSVQTKKLAQELPGHADEVFGVDWAPDGSRVASGGKDKVIKLWAY

SEQ ID NO: 5251 - DNA, 5335 bp, DROSOPHILA
aatagtagtgcttaataataatagtttaacagataatcggactgcagacaatttgcagatctgccatccgcaggtgagtttcttactgaaggttattgtacgtacatacatatatgtacatatatacatttacatacatgtacatacatgtacatacgtatattcaaataccagagttatagagaactgcgaaccccaaccgtcattaattcgagcagcatacgttttttgcattgcaaaaacttttcagcacacgatattttccatattattacagattacaaacaccaatgtacattttttttttacgttttcccaacaacaacaacgcttttgtgtctgtcaaagttttcgccttctgcattgtgattataactaaatggtaattctgttaaattagttgcttttgttttgttctttctttgagataaaggtatgttcttattaatagcgggtgatagtggtcaaatatcttatttcttaaagccattttgcaaaaaaagaaaaaaaaaaatttgacacttccgaaactgtgacggccacacttttaaaaaaatgttcgatttttcttcattttaatttttttgtcttgccaatttctaccggtataccaaaaacactttggccacgcctcttctaacgcctttcagccaaaaaatgtagaatttcgcgatcgagcccatagcattctctcttgttgttgttgttatcgtacttatatatatacattattcaattattttgattaagatacgatggcatggacagcaggcaaggctaccaacgatttttaagaatatttggtaattttagtcccttttcatttgcctagctgttcaatgttcataaagatttttgctttgaatgctttaagaaaaaaaaaatcagcataggtggctttgacttttcatttcttatcgaattcaacaatccatataaaattcagttagtctctggctttcaggacaatcggagcagaccagtttcatcattgagcgatatggattacgaaattattgaattcgtcagacggcatataagccatatcgatatcagtgctgaaaccaggatgcgatatccggtgggtttcctgtattagcacttatcaggtttattttaacacaactcgaaatattgactacttaatgacaggatccaatttccaacaacaactttgattggaactccattggattgggcgaacaggaggatgccattggacaggatcagcagagccaggcgctaaacgaaaatgcgaataatgtaagtccggatgtacctccttcgacaattgcagaaccaacattggaaccatcaaccatagagggaaatcaaggacaaaatgtacgtgtgcataaatacttttgaatgtcagattggtaaggcgattaaaatgatctatctttttttttcaacagccaaggataatttcgtctatgcctgatatgatgccaatggctaattcattcaatccactcattaacataaatcaggaagcgggtgtggtaattaacacaggaataaattcaatagacaatggactaccaagtacatacagtgaacacatatctcagccaactaatacagaatctacaaggaatatgaattcttcaatttttgatattcccagcgatctagacaataattcttcaaatgagtctggcgatgaagtaactcagcccactgctaaacaatctaaaataaatgcgaattttgtttgtaaaatagaaagcgatacaaacatggataaattaccaactacgtccaataatacaaacgacaagccgccaaataacacagattctgattcggatattatttcaatttctgatttaattgaagatttaaatttggattttaatcaactaccgattacctcttgtgacgtagaaacccatccagcagacacacaatctaatatcgatgctaatttgccatatgatttgataagtgccataaatatggactttgtcaatccagctaacagaacatatatgtcagctgccaattcaacacgaggaaccgcctacaagattagaaagccccggacggtcaagagaatcattaaggcgccatcaaagtccaacattggaaagttgttgagggaagctgccaagaaggaaaatgcggctgcgggaacgcagagaccgaagaaggccacgtcgacgataacatcttcagttcaaaactttccaaatcccaataattggcctgcatgcccatttccgatgcagaacggcactatgccagcagatgaacccaatgacttaatgccaacggtttcgcaaagtctaacagtgccagctgctcaaaatcgtccaatacaaacaatcggaaagattattaagcctcctgtcaagcggacttacacgaagagagccaataagaccaataatacaaatataccaaataaaaatagtactggggtcatacagtctaatggagtggcacctacaatacgacaaggacttgtagagcccggcggaactaatattctgatgccatggaataggcagataccaatggtgtctgttgctgaaaatccacgagtacaaacaatcgataaaataattgtgcctccacccaagcgtacttacaagaagagagtcaataagaccgtgaatacaaatcagtcctccgagagtgctgtaggtgatggtgctccgagtgcacctatacaatcgatccccaaggttaggaagcccagaggtcctggaaaaaaaactgctaagatggtacccggtcaggaatctcaacaggatatacctttaggagttccgccaaatggagaagctcctcaaacctcttcccaggcacctgtgcctcgtgtcaagcgggcttacaggaagagagccaataataccaataatacaaatatacttaatgtaaatagtaccggggtcatggagtctaatggaggaggacctacaataccaaatagtcagcagattccaaacgttgctgttgttctgaatttacctatacaaccgatcaagcccaaggctcccagaaaaccacgtgctaaaaaagtgtgcaaccagcaaccggggacagatataccctttggggtatcggcacaaggacaaacggctcaaatcaagccgaagcctaagccaagagctcctagggtgcccaaggaacctaaggcgcccaaggaacctaaggcgcccaaagtaccgaaggcaccaagagtaccgaaggcaccaagagtaccgaaggcaccaagagtaccgaaggcaccaagagtaccaaagccacctaaggaaccaaagccacctaaggaaccaaagccacctaaacaaccaaaggcacctagggtaccgaaggagccgaagccgccaaaggtacccaaggaacctaaagcgcctagggcacccagggcacccagggtaccaaaagctccaaaggaaccaaaagtacccaagattccgaagaaccccagggtaccgaaagcaccaaggcaaccgaaagcgtcaatgaataaaatacagaacaccgtaaaggtaccgctacccattgagcccgtacctctagaaacacccacttacataaatcctattaatacgcctgtacaatcaaccgttggcgagatactcgcactagggtcgatgccacccatatcgccaattaagttcccagtactatttgacgaacatgctgctcagcataccgtagcaaactccaatatgccacaatcttctttgccaacgctagacattccacaacttccaacaaggaacaacaaacagccatcgacgaagagcgcagaagacacagaaatattaggacttggcaaaaacaaaaacgctatggtatatattatattcatatttatcatcatgtttatttatttatttaagtaagggctaaaaagctagaacggttgggacatataaaatttaactaaagtacatagttatcatattgtgtctaaataattaaaattgtttcatttaatattatattatgtttatattttatttaaagttttcgatttggtaaggaattttgcgttcgcattcacactagctgagcaacggggaactcgactatagcattcttttgtttttaagatttttttgctttccactttaaatattccttttaatattacttattttagaagtcagatggacggattaagcaaggtcgcgtgtcaaagccttcattacgtttttcaccatcaagctcttcattgcgccctgtagtacgctctttatcaagctcatcgtcaagctcttcatcctggtcatcgtgtacgacctgctccacctgctcgagctgctccacctgctcgagcagctccgactcttcacaatcttcacgatcgcgtaaccggaaacgtcgatctccaaaagttccaattccccacaagctatttgaatccaatggggaaataaattttcagttgggccaaccaacccgccttgaatcaccatcacctccgccacccgtgcccatgcaagcgtgtggcacctttgaagagcatttgacagatttgacattggtgcgcgttcatgctatatcgccgttaagaagccccacatatgatttcgatttcgacttgccagagcccatgttgtccgaggagtcatccagttcttcgtcggagagcaatgatgaaagcaatgtgaactgtcagatggcaccgaattctcaaaatgttagtatgcacttcttaaaagttatggttttttacaattgttatgttttatttcaacagttggagaaaaaacatcaaagcttgtttgaggagtcatccagttcttcttcgtcggagagcaatgatgagaccaatgtgaactgtcagatgacaccgaattctcaaaatgtttgtatacactttcttaacagttatggttttttacaattgcaatgttttatttcagcagaaaaaacttcaaagtgctcccattagagagcccagtccagatcaacccccagaagcagcttccagatcatccaatggaggcacaattgggccttgtaacctaaaagcttttaggcgtgattttatgatttcaaatgccgagaatactggatttactaacccaagtgaattaaatttgaagaaatgtgccactaaagtatgcactccaatggaaagaaattctggttctcaattgcctattcagaatcgctttatattgcccaattcaaataaagaagaaggtaagatgaatgttgaaccagtgatgccaaagcacaagccatcaaggatcccaataagaaccaaaacaccgatagctttgaatttaatgaaagaaccagaggataatgcacgcaaaccaaaaaatatccttaagcctttcttttcgaatgcagacgtaaaccc

SEQ ID NO: 5252 - DNA, 2586 bp, DROSOPHILA
atggattacgaaattattgaattcgtcagacggcatataagccatatcgatatcagtgctgaaaccaggatgcgatatccggatccaatttccaacaacaactttgattggaactccattggattgggcgaacaggaggatgccattggacaggatcagcagagccaggcgctaaacgaaaatgcgaataatgtaagtccggatgtacctccttcgacaattgcagaaccaacattggaaccatcaaccatagagggaaatcaaggacaaaatccaaggataatttcgtctatgcctgatatgatgccaatggctaattcattcaatccactcattaacataaatcaggaagcgggtgtggtaattaacacaggaataaattcaatagacaatggactaccaagtacatacagtgaacacatatctcagccaactaatacagaatctacaaggaatatgaattcttcaatttttgatattcccagcgatctagacaataattcttcaaatgagtctggcgatgaagtaactcagcccactgctaaacaatctaaaataaatgcgaattttgtttgtaaaatagaaagcgatacaaacatggataaattaccaactacgtccaataatacaaacgacaagccgccaaataacacagattctgattcggatattatttcaatttctgatttaattgaagatttaaatttggattttaatcaactaccgattacctcttgtgacgtagaaacccatccagcagacacacaatctaatatcgatgctaatttgccatatgatttgataagtgccataaatatggactttgtcaatccagctaacagaacatatatgtcagctgccaattcaacacgaggaaccgcctacaagattagaaagccccggacggtcaagagaatcattaaggcgccatcaaagtccaacattggaaagttgttgagggaagctgccaagaaggaaaatgcggctgcgggaacgcagagaccgaagaaggccacgtcgacgataacatcttcagttcaaaactttccaaatcccaataattggcctgcatgcccatttccgatgcagaacggcactatgccagcagatgaacccaatgacttaatgccaacggtttcgcaaagtctaacagtgccagctgctcaaaatcgtccaatacaaacaatcggaaagattattaagcctcctgtcaagcggacttacacgaagagagccaataagaccaataatacaaatataccaaataaaaatagtactggggtcatacagtctaatggagtggcacctacaatacgacaaggacttgtagagcccggcggaactaatattctgatgccatggaataggcagataccaatggtgtctgttgctgaaaatccacgagtacaaacaatcgataaaataattgtgcctccacccaagcgtacttacaagaagagagtcaataagaccgtgaatacaaatcagtcctccgagagtgctgtaggtgatggtgctccgagtgcacctatacaatcgatccccaaggttaggaagcccagaggtcctggaaaaaaaactgctaagatggtacccggtcaggaatctcaacaggatatacctttaggagttccgccaaatggagaagctcctcaaacctcttcccaggcacctgtgcctcgtgtcaagcgggcttacaggaagagagccaataataccaataatacaaatatacttaatgtaaatagtaccggggtcatggagtctaatggaggaggacctacaataccaaatagtcagcagattccaaacgttgctgttgttctgaatttacctatacaaccgatcaagcccaaggctcccagaaaaccacgtgctaaaaaagtgtgcaaccagcaaccggggacagatataccctttggggtatcggcacaaggacaaacggctcaaatcaagccgaagcctaagccaagagctcctagggtgcccaaggaacctaaggcgcccaaggaacctaaggcgcccaaagtaccgaaggcaccaagagtaccgaaggcaccaagagtaccgaaggcaccaagagtaccgaaggcaccaagagtaccaaagccacctaaggaaccaaagccacctaaggaaccaaagccacctaaacaaccaaaggcacctagggtaccgaaggagccgaagccgccaaaggtacccaaggaacctaaagcgcctagggcacccagggcacccagggtaccaaaagctccaaaggaaccaaaagtacccaagattccgaagaaccccagggtaccgaaagcaccaaggcaaccgaaagcgtcaatgaataaaatacagaacaccgtaaaggtaccgctacccattgagcccgtacctctagaaacacccacttacataaatcctattaatacgcctgtacaatcaaccgttggcgagatactcgcactaggtacgctctttatcaagctcatcgtcaagctcttcatcctggtcatcgtgtacgacctgctccacctgctcgagctgctccacctgctcgagcagctccgactcttcacaatcttcacgatcgcgtaa

SEQ ID NO: 5253 - protein, 861 aa, DROSOPHILA
MDYEIIEFVRRHISHIDISAETRMRYPDPISNNNFDWNSIGLGEQEDAIGQDQQSQALNENANNVSPDVPPSTIAEPTLEPSTIEGNQGQNPRIISSMPDMMPMANSFNPLININQEAGVVINTGINSIDNGLPSTYSEHISQPTNTESTRNMNSSIFDIPSDLDNNSSNESGDEVTQPTAKQSKINANFVCKIESDTNMDKLPTTSNNTNDKPPNNTDSDSDIISISDLIEDLNLDFNQLPITSCDVETHPADTQSNIDANLPYDLISAINMDFVNPANRTYMSAANSTRGTAYKIRKPRTVKRIIKAPSKSNIGKLLREAAKKENAAAGTQRPKKATSTITSSVQNFPNPNNWPACPFPMQNGTMPADEPNDLMPTVSQSLTVPAAQNRPIQTIGKIIKPPVKRTYTKRANKTNNTNIPNKNSTGVIQSNGVAPTIRQGLVEPGGTNILMPWNRQIPMVSVAENPRVQTIDKIIVPPPKRTYKKRVNKTVNTNQSSESAVGDGAPSAPIQSIPKVRKPRGPGKKTAKMVPGQESQQDIPLGVPPNGEAPQTSSQAPVPRVKRAYRKRANNTNNTNILNVNSTGVMESNGGGPTIPNSQQIPNVAVVLNLPIQPIKPKAPRKPRAKKVCNQQPGTDIPFGVSAQGQTAQIKPKPKPRAPRVPKEPKAPKEPKAPKVPKAPRVPKAPRVPKAPRVPKAPRVPKPPKEPKPPKEPKPPKQPKAPRVPKEPKPPKVPKEPKAPRAPRAPRVPKAPKEPKVPKIPKNPRVPKAPRQPKASMNKIQNTVKVPLPIEPVPLETPTYINPINTPVQSTVGEILALGTLFIKLIVKLFILVIVYDLLHLLELLHLLEQLRLFTIFTIA

SEQ ID NO: 5254 - DNA, 13171 bp, DROSOPHILA
ctttcatcaatattttaaaaaattctaattgcacttttttgtataatattttgtggttttttgtttttttgttgttttaattgctattttaacttgctttcatgtctcagttttcttattagaacattgtcttcatcctttgtatttgtgcacaggccaaaaagtgtgaaccaattaagcttaataaacgaaattcatttggaatttaataaatgaaaccttgcattgtttgttttttttttgtttgtttagaatttgtttgggatagcgtggttggtgtgttctctttcgttagttagttggttttttttttttttttttttttttgtatgactaggagaacttcggaggttttctgtaaacactatatttgtatgtacgcatatttctcaacgcaagacattttttttttgacactcgtcgtgtgtgagatattttagaacatccaatggatagggattagtgtggataatacaaaaattcagtaaggatagcaatgtggaatgtcactggcatatatatgtacatcatatacatagtttttcgtttaattggaagtatttagtattttgaattaaacggacatctctgcgaaaccgaaatggaaaccacaactgaatttttgtcgatttgttaacaagtatggagttgattttccttgctttttaaatttaacttatagattgttctggttttttgtttgtttctgctgttttgactacaaattctttgatttttgtttttttttttcttccttttttttcaattgcctacaactaattttttgtgtatttttgtttgtacaaatcgcgactgccattaatgagtaatactggccaatccgcccgatcatcttcctgctccttcctatataataatagcttagagattagcatatgggtcatagcctaaatgttcgcttaaaaacggtatgcaaatgtcttatataaaatctaaacattttaatctttgtctgctgctcggggattcactggtactttcatgtctccaacgaggtgaccaccagattgtggaacacgctggccgactcgctcatcatcgccgcctgtccgcaagaatcgctgctggcgccgctcggcggtgtcgccgttcccagcctcaaggcgtccatgatcacctcgaaatccttttggttttggttcatgtcgaaatcgaccagctccagatgatggtgcaaatggtgatggtgattgagatggtgatggtcattcagcttcatccgtttgcctccgggcatttcgacgccagcgcctgcagctcctccgatgccaccgattccactaattcctcccacattcacattcacattcattcccatacccaagccaaccacatccaggggacactcctcaatggcggagatgaggcgctgtggcggtatgtagaactgggacagagcctcgcgcaccaggcgatcactttcgtcctcgctgccgctattgctcctcaatctcttcctgctggcggacaaggcggccttctccagctgttcggctccttgggtaatctctggatcgattagcagcatgggtgcattgatggcgctcagctccctgtccagtatttccagatcgttgaccaagttgcagctggacaggtggcgttttcggttattcacgcgttccgatgccgagcccgaaacggaaaggggcgccgaattggccgcctcgggagcggaggcaccagcgggcgtccccaactgctgacgctcgggcggttgattctccagggagcaaattccgccgcgacccgacgatgatccgtttgaggagccaaaggcatcgccaaaagaggatgaaggcttgccgttggcgttgatattattgctagtgctattgccggccggcttggcgtcgtccatgttcggctggaagagattctcacgcgccagttcggtgcttgcgccgctgtcgctggttctgcaagtagagagagagagaaagtggtggggaaagttagtcaacagtgggtggcaaagagtggttcaagtgcagggaactgctcgataataattaaggtatcgggatctcaaccagagcaagttaacctaaatcccttcctgtttttatcccacctatcgacgccacagagacccacggcacacagagctgtgtcaaatcagttaacggtttaatctcgccataaacatttcaacgcccttcgataatataaccacccaccccactcctcaccgcaccccatcccataccaccgcatcccaggtgccagtccatttgaaacttaactcagccctgacatctgtgtgtttgttgccaaggggttttcccgccaggctgatggttgggtggaccatggttgggtgtgtatttgctggaggatttgagcaggagtggagagcagcggtgcggggggttacgtttttaattaactgggccaacaactgtggcaccaacgggccttctgccttctgcttttggcttttcttggtgaccagcagcgagcgagagcaaagtaatttcagtaaatttcagtaaacttcagtagatttctctttcaataaaatcactgtgtatggcgcgcaccaccgtcttcaccccctcgccgcttcttgttgctcctccgcgctcaatatggcaaccatttgaagtaaaatgaagagcaaaaagaaaaggcagtccataacggaagggaaaaacacaaactaataacgtcgaagcaatgtaggtagcagaagtgacacggttcaggtttggcaaacatacgtatgtaataataattctttctgaatctaacaaattagatcaaacaggtaaaatggtatccctgattaaccaactaatttgtgcggtgaatagtgggtgggggcaccttttaaatggggaagtggtgggtggttttctatggcaggcaaaacagcgcattaaaatgcgcagctgagcatgtcaatgttgactattaaagcgacgcaacaaaagcaatataactgacaacaagaatggcaaaagcggcaataaccaaggggcccgaggagagaaaaaaaaattaaatacacgccgctggagagagagagagagagagtgagtgagtgagagagaggggggagggcgaaaaaaaagcgaaagtatggaggaatctgtacaaaaacaaaacaaaacgaaacaaaacccaaacgaagaagcaacaaaaaatcgctcaacttatagaaaccaaaaaaccagaaagcgtacaaacaaaggggccaaaagaggggccatttttatttgggggcaggggcacaaagtgtgttagtttcgttgttgctgttgctgctgttgcttttaatgcacgcgcaaccgttaacttgaaatgatggacggccaaaacgaaatgggagcagcaaaagcagccactgagcacagtagtagttgctggccaaatgaggtgccagccagaaggctggcggagaagatggccgaaatggcggcgagaggagcggcggattgcacaagtggcccacaaagcggagacaaagacacaaagtcgagttgtggagagggcggctcagccagaagtggggtttaataagccgtaaatcgggcgagcttaactgaattgactcgccaaagagaaatacgtatgtacatattagcaaaaagggcagcagcagcacttcgcgtactcagttctagtgacagttaccaatactacccatgtacccatctcagtgccgctgttgccaaccggaacgaagggcaagagaggtaaccttttcaccgcgccagtgccactactactgccagttccggttttattgccaaatccgaccacactttaaagccgccatcgggcgcaaggcaatggctatgaccagctaagctagctgtgttgtttttttttttttttttctggccatttccatctaccaatgttggttgttggagagatcacacatatgtattccaaaactcacgataagtggccaccttatgaaatgcatttggcatggagcagatgcgtgtagccgaaaggaatatgagtatgtgtatcttaaaataaccacaaagcagttacaaagaccacgatgagtgtgccatactggattaatcagtggcttggggacgcagtttggggctattaataaaatcgattaatcacacagcaaagtgggcgatcagttcgagttttgtaatacgttatatgcaatataagccatgcaatcagcacaaatcatcgctcaaattcatgcggcatgcggctgataactgaaaaaaaggcccacaacttttgggtttgtcacttctagtttgctttctttgtccttcgcctcactgtcttatctgcgtcttcgttttgcgcacgtttttggcgtttttttttttttttttttttttgtcttttttgtttttttgtagtcagtccgttttgcgttaaccacccaccccaccatccataccacgttccacattaaatatgtggcgacttcctcgctgaatttgagctgaaattggggcacacttattacgcgttaatctcttgcctctttccctcgcaaagtaaacttggtcaacctttgcttttgtttgcccacctcataccgccccatcccgcccgctccatttattttgggggctttccagttcaaggctctttagccaatgttttccatgtgttgctactacagtgcgtacatatgtacatgcatactactatgtgcgtacgtcgaattctgcgtttcggccaaaaacaatgaagtgcgactgtggagagtttaactagatggggggggagtggggggtgtgtttgagtctatggttttaaaggttcggtacttaattcaattcttcctgcgatttacacatggttgacctgtatttcatttttgattaatcgaattgaaatctggctccacaaggaggggttagcaagcgcggggggggaggatttccctgctacacttgactgacaaggggagctagtggagtggtgttgtagggaggcgaggggaagggaaagcgagcaagagaaatagcgatgaaagagcgaaagcggcaaagaaagacgaaaacgttgtcaaacgacaagtgcacacaaaagcaaaggaaaaaaaaatgaaaaaaggggagcagcaacagcgcggggggtttcgcgtggaaaagtcgagggtgaaagggcggggacgggtggaaaaggggcgccaagtcgcgaatgtaggacgctgttgggggtcattgagcgcgcttttgacttggtccgtgtttgcgcaggggggcggggggcggttgagaaggaggaggtgatgggcgtaggtggtgcaaggacgagggtggacgagggaggggctacaaacgagccggaaaagcgggcggcgaatgccaggagagggacctttgaagaggggcgtggcaagccacatgcggcgatggcagtttcgtgtcaaagacaacttcatttcgcagtcttcttttcttttcaaccaaaaaaaaaaaaggaaaaaacacaaaacctacttgcacaattaaatgggcttgtggtttaaatatcgagaaaaaattccaataaattcccaataagctttttaattcgtttaaagcgatcacattcacaaactccaaaagaccaacatttatgcacaaaagaaaagacagcaaagcggagcaactcagttaacttgggatcggttcggttcgatacgcttcgtttaggtttgaaaattccattacaacataataaaacaaaaaaaagaaaccttggcacctgagctgaatatatcccccagcaacacctcaactttatcaccatccatccgcacacgtcgtgtatctctgtctgcttatcagtccgagcttctctctgataacttgattggcgcaaaaataaggggggaatgcgcgaaaagggtggagaaacgatggagaagggggcgaagggagcgaaaggcgcgcgcgtgtcgcaaggttggtgggcgagaactgaaaaacaattaaaagtaatacaggcgggtaaacaataacagcggcgggaaggtactgaaactagttgctattcacccaatctttatcccaccagctcgctcgctcgcccgcccgctcaggcactcgattttgtataatcgaatggttctaaacatttcgcaaaacaatggtgataagaataacgacagcgagacaaatatgcaagcgcaccacacaaaatgctcgataacaaccgaagtaatcgatctatgcaaaaatgcatatctgagcgatgtgattgtgtatctcagcgaaagtatatcataagcatcataattacttcttatgagtattactaaaatagaacggttgcttttcaatgtaggtagtggtggtgcaattcgcattaccaaatagatggtgagatggaaaaaaaaaaagaaaaaagcggcggcacacgattccaaatccgaatcggaatcacaacaataaaaacaaaaacaacaaaaaaaaaacacgaaaagcccaggggaaaggagacaagatagcagccccgaacagaaagaagcaaaaacagaaaactataaaaacgtcgtcgcagtcgcgaaattattacgacgacgccacaaaatggggcggcctgagtgggttacacaaaatgctatgcactgcacactatgccactatgcgatgatgtctgctgtgctgcgggtgtgtattagtgatatacgctgatgtagtgagtgccggggagtgaaagaggaagcaccactgccgtgaagcacgagcggaggaaactaccaagcagtcggcaggatggggggggggagggtcttctgaagattgattggcgaggagattccgttcggtaagcgattgaataagagcgtttctttcggtaccttgactggtactagcactgctagatcttcagctagtattagttatatttcgataggttcggtttgggtattcctagatactttaaggtatcttactaataatatctgtcccttttcagtgcgatgccgatgcatgattgcatatacatatatatattctgttttctgctgctgtgctgcgctttggtatttcatccatagttgttgctggctgccgttgttaatgctcttgtagtttctctggttattgttgtagttattgccattgttgttgtgcttgttgtagtgagcggcagcgccgacgactgttgcttggcgtaatgtcgagagtgtttaaaatgcataaaaagaaggcaggcaggcaggcaaggcagtagcaacagcagcagcagcagcagcaatttgtatggatttcatttcagcgagcggatgcataagcaatgagcagcgtggatattgtgtagataaacttccccaaactaccgtcatccgcctaaaactcgccacattcagcttcagttagtttgccttagggcgaattgaaattttgaatcaaagagtgtccgtaacttgagatggttattctcatttgacaggtccttccagccctacaatagtttcatttatggtgtatcccgttttcatcgatggcgtcgtccttttagaatgcaacaacgcaatgcaaatcaatcgatgagcaaatttgattgccgcattgcagaacgataagcgcatgcaaaagcatggccgacaatcagcgataacttatcgtccatcgccatcgctatctccggcacatcctcatcctccgtgcactctaaacgtacatatatatgtatgtatatgtgcaggcaggcatccatagacatgtttgtccacttgtctgtataataccacttataagcggctgtgcttatttcaatttcaccgtttaacatatttttgttcgtaattaaattatcgattgcagctacaggaaagcaacagagtaataataagcacatgagcataaaatacactatacacacactgtatttcatttcacatattcagtgtgcgtacgtgttggttttgtgcaaaggggcgaagagaaaacatgtcaaacaaagcgcaaagcacaaagcacacagcacacagcaaaagcaaaaaggcaaaagcaaaaaacggaaacgcgaggcgctggccaaaaggaaaatcggcgatgaattaactttgcaaagcgtgtaacggtatgttgaattgtttgtttgtttgttttctcctctctgatgaaagcaagcaaacgagcgggccaaaagaaggagaaataaagaaagcaagctcgccgatgatggagagataaatagattatctatgaccgagagcaggtgggctaaaagacgaaaatacataggcgtggcgccacttaacggttaaggaagtgctcatatagagaacgcaaaataaattatatcctttaagttgacctttcttaaagttttcaactctttgcttttgacacggaaagctgtcattttcgtaagcttcatattcgagtttcttattgtacaatatctatttaggcttgtgtacatatgtacatacatacatgcatctacatacataaagagaattaattttcaagcacttcttgcatctcaaattagcaactggcactaaatgcccaacatatgtttctttagagtaaaaaatgcagatacatatacttaaaaaattaacaaaaataataccgaaaaaaaaataggctaaaagacgcagcgaacgcgtggaaaaggcaagacgaaaataatgacacacagattcaaaaaaaaacatctatgtgttggcaaagtctgaaggtttagtgcactggatgttgttgcttttgccgtttttgtttttgttgttgctgttgctggtgttgttggcatgtgcccataaaaacaacaacaattgctttggctatcttcgcctctttgttgttgttgcggctgctttttttttttgttgcaagtggaacgtgattatttcaacgagcgcaacgttttcttgttttgtttttgttttgtttttggcgcacaccaacagcagatacaaaattaaaaaatataaaaaaacgattcagagacagagcagccagcagttgtctgtacacacatatatatacatatatatatatatgtaaaaattcctatttgctggctttgatttctttctttattccttttttcctgctgcttttcttgttccgaacgatgcgtgtgtgcatttgtgttcctgtatttaattttattttttgtattttgattgattaagtggaatgtttgctgctatctttcggggcttcaattggttattggttgaatatttaacatatcaattcggttttttttttcgatgccttgcacaaggcgtagatgcattgattatttccgtttattattcagtaatgtatttaatactttccgtgaaatgttaagatctttctgctagtttattagtttcggtgttcatttgttgtatttttaacatttttttttttttttttgtacccaaagtatctttgtatctttccgaagtatctttagattcaacgatatcttgcaagctcatttggatggataatctaccattctttcattgcaattagatggctaagtagcccagcacagcccactatgcccacttcgtttttcgagctatctgggaccttttcttttcctaattactggcataaactactttttccattgtttccgttgggcttctcctctgtttttagtttcgttttcgtgtcgcgtttttatgtctctgaatatctgcgtttagctatgctacgcttttgctttgctgtgctttggtttgctttgctttttctgtgctgtgctttgctttggtggctcgctgctcgttttgcgctgctttttgcttctcgctttgggttttctttggtttttggcctgagcttggcctgaatgttgttggctatgaaatatgccgctttccttgtgtttgtatccgtatctgtacgtggtacgtatgcatgtatatccccattgtatcttcacaagtatattcgtatctgtcggattgttgctgcaacattgcagtatcatcggcattgagcattggccagccagtggaaaggggcagacagagagacggacggacggacagacggacagacagtccttatggaagccatagaaaatgctgcttagtatttgtatttgggcctgaataattgcatcatcgttggcactgccaaactgacactttgtgctagttgggagcacagatacaaattgtagcaaattacgtttgagctagtgaagtaataatcattatcaaatcgaagtcccaatttcagatgcagccataaaatcagcaatcattcaacattggcgtcgattaggtgttcaaacacccccctccccccttttcacatgctactatccgtcagccatcagtcggttacggatgcatcgcgcacacacacacacacgaatatacatacatctcaacaccttgcattatcgcatttgcttactgctcagttttcagctttcagctttcagttttaactaccgcaaatgccacgcaactgggaaaagagcaaagtcgcccactctcaactcttaacctttaaaacccaggcaaccgcacatctgtgtatagccaaagctaaagctgtagctgtagccgtaacttcagcagtagctatatataaatatacatatgtatgtagtatataaatatagatatgtatgcatgtgcgagcacaatacgcaccacgcactttaaaagggcaaaaacaaatcaagcatccgccgcgtgggcgtcgcccccaagttcacagttcacatgacatacacatcatcatgattgcctcgcttgtcgtgataatgatgatgatgatgagtgtaacctgcactggaggctgaaataatattgcgagacacactccacccactcgcataatgagttaatttatttggcaaaatttacataccgtatcaggtatcaggtatcaaagggttttccagcagctgtgtcggctgcttagctcgacctttgcgttcgaatacgaatctcaattcgaatctgaatctgtatctaaatatgcaaccgaccgaaaaagaaacaaacgccacacacaaatgccacaaaattgcgtctcttaattggtttgacttgaaggcataattgctgaattgcaaatctattttacatgagcttaactactcaacaatgcctggccattttcaattctcgtacaacaaataattcctggccaaaagtgtggaaatgtaaatagaatcggctaaagtggtttgagcgctgaaaagggcatccctacatctacatcattcgaactgtttcgctatatttatgaccaaacaccaaataccaaatacattcgtttttaacccgacggctggaagatattcatatttcaaaagccggacacagtaagttactgggttttctgcttattgctttgagtaagtgaatgtaaaaatagaaaaatctagttagttgctgagtaagtcgcttgaaatgtaacaacaaacacactcgtaacaatgatgttcgatgcacaaaggagctccgttgcaatcatattcatgggttcgtacctctggagtactaaagttgatctattataaccgctatgcatatatcacaggcgctataagtatggatttcttaacaacgtaactatcttatagcttgctaactacaatcttgtaagagatcactgacgattgcactacttatgcaagagttaggcaactggatcgttgcactaatcgcagtagatttttaattaaggtcactggctcatagccattaaatccataatcatactaaacctattcatactgctaaccaaatgagattaggtgtgagtgagtgtgagtgagtcaggactaaattgaactgtcttctcacctgggcagattctggaggtagcgcatctgcttctcgcgccgcagttcgtcattcaggcggcagtaggtgttgttgatgcagacgctgcgccgcaggttcgcctccgagtccttgatcctctccatcttgtgggcgcagagctggaggatccgcttgcgctcctcgcgctgccgcagctttggcgagatcatgggcacacgggaacggtgatggtgatagccgatgggcggggagcagcggggtggtccaaacatgtctgagtcttcgtcgctgctgctgctgttgttactgctgatattgctgtggttgttgttgccgctgccgccgtcgtttgcagatgcgtgtgtgtttgtgggcaaggtcattgtgcgtttttcaagcaagtgtgtgccttgtttgctggcttgtttatgtggttttctttgacagacagaaaacaactttgctgctttgatttgcaatttaattttgattcgagtgattttcgataaattatttgaaacaaggaagtcacaccactcggctcacatacgctctcttttgcgagctctttttgctctcttgcacttgctgctgctggtactgctggtgctgcttcttcttctgtctgactttgctttttcttttctttttgctgatttctgtttttctttttgttgttgccttgcgagatttcacttggctgttcaccgttagtcgagcctgccgcttttgttgttgtctttgaagtttggcaaaattcaaaataatccaggacttttgaatttttgtgttttatttttttttttttttaagaacttgcacttgcttacgctatgtagtcaaacacaataaaaaaattcaacaaaaattgtcagatttgtttgtttagttttaggcacacaattgactcaaaattgcagaggggtcggggcttcacattaattgtttctatttcttagtggtctcttctaatttttcggtggccgcctgttgagggtttaaggtgaggggtgaagagaactttgtgcttggtcaccgtggcttactgtttcggttcctgtttcaaccgcacacgtccgcacggttctcgcgttcgaaacgaaataaaaacgcaaacgctaaatgaaagacgttcgctcgcagccgctgccgcagtggcgtcgctgcctctgccctcggtggcagagcgcacagatgtttgcgttcaaacggaagtggcttaagagagcgcctaagagagagagagtgagagagcgaatggcctacgtgcgtatttgtacatgcatacacacagctgaggcaaacaaataataacacctaggcgcttaaataaaagtttttaggccaatcgtctcaagctaaatgatttgatttactttatataggtgctctgtatgaactaagttaattgacatattgcattaacaatctttacagaca

SEQ ID NO: 5255 - DNA, 1362 bp, DROSOPHILA
agaaaaccacataaacaagccagcaaacaaggcacacacttgcttgaaaaacgcacaatgaccttgcccacaaacacacacgcatctgcaaacgacggcggcagcggcaacaacaaccacagcaatatcagcagtaacaacagcagcagcagcgacgaagactcagacatgtttggaccaccccgctgctccccgcccatcggctatcaccatcaccgttcccgtgtgcccatgatctcgccaaagctgcggcagcgcgaggagcgcaagcggatcctccagctctgcgcccacaagatggagaggatcaaggactcggaggcgaacctgcggcgcagcgtctgcatcaacaacacctactgccgcctgaatgacgaactgcggcgcgagaagcagatgcgctacctccagaatctgcccagaaccagcgacagcggcgcaagcaccgaactggcgcgtgagaatctcttccagccgaacatggacgacgccaagccggccggcaatagcactagcaataatatcaacgccaacggcaagccttcatcctcttttggcgatgcctttggctcctcaaacggatcatcgtcgggtcgcggcggaatttgctccctggagaatcaaccgcccgagcgtcagcagttggggacgcccgctggtgcctccgctcccgaggcggccaattcggcgcccctttccgtttcgggctcggcatcggaacgcgtgaataaccgaaaacgccacctgtccagctgcaacttggtcaacgatctggaaatactggacagggagctgagcgccatcaatgcacccatgctgctaatcgatccagagattacccaaggagccgaacagctggagaaggccgccttgtccgccagcaggaagagattgaggagcaatagcggcagcgaggacgaaagtgatcgcctggtgcgcgaggctctgtcccagttctacataccgccacagcgcctcatctccgccattgaggagtgtcccctggatgtggttggcttgggtatgggaatgaatgtgaatgtgaatgtgggaggaattagtggaatcggtggcatcggaggagctgcaggcgctggcgtcgaaatgcccggaggcaaacggatgaagctgaatgaccatcaccatctcaatcaccatcaccatttgcaccatcatctggagctggtcgatttcgacatgaaccaaaaccaaaaggatttcgaggtgatcatggacgccttgaggctgggaacggcgacaccgccgagcggcgccagcagcgattcttgcggacaggcggcgatgatgagcgagtcggccagcgtgttccacaatctggtggtcacctcgttggagacatga

SEQ ID NO: 5256 - protein, 434 aa, DROSOPHILA
MTLPTNTHASANDGGSGNNNHSNISSNNSSSSDEDSDMFGPPRCSPPIGYHHHRSRVPMISPKLRQREERKRILQLCAHKMERIKDSEANLRRSVCINNTYCRLNDELRREKQMRYLQNLPRTSDSGASTELARENLFQPNMDDAKPAGNSTSNNINANGKPSSSFGDAFGSSNGSSSGRGGICSLENQPPERQQLGTPAGASAPEAANSAPLSVSGSASERVNNRKRHLSSCNLVNDLEILDRELSAINAPMLLIDPEITQGAEQLEKAALSASRKRLRSNSGSEDESDRLVREALSQFYIPPQRLISAIEECPLDVVGLGMGMNVNVNVGGISGIGGIGGAAGAGVEMPGGKRMKLNDHHHLNHHHHLHHHLELVDFDMNQNQKDFEVIMDALRLGTATPPSGASSDSCGQAAMMSESASVFHNLVVTSLET

SEQ ID NO: 5257 - DNA, 2722 bp, DROSOPHILA
accttgcagtcctttcgtagttaattagtaatgaaacggagcaggcgaggatccaatgagtatcggctaagcatggatactgtgtagtgtgaaacttcgattccacgaacacagaacctcaaagacacacagagatagaaacagatatgaaacagatagagctcaaggatgtgccgacagttcgcatcctgatgttgggcgacagaggtgggccaacatgagtatacataatatgtccattggatgctcctaattgtgtctcctacacatttgcaggtgtgggcaagactagtttgaccaatttgatggccactacggaaattacgcccactccagactcgcgaaccgttggcgaggagtcgtggcatgtccaggtgcggttgcatgagtattccaagccggtgatcctgccgcccacgcccacctggacaacgccctcctcgtcggaggactccgagaattacccgtatatgcggagtacgcccaccaccacgaatatcctgtactttgtcgagttctacgacctgaacagcgattggcgcatgtgccgccagcagcgcgaaagcttctataagaatattgacggcatcgtcctcgtgtacaacatgctggaactgagctcccaggacagcctgcacgattggctgtacgatccgttgcgacagatctgcaagcatcgacatctgcgcatccgttccatattgaaaaaccataatgcgcccattctggtggtgggcaccaacctggacaagctgatgcgacgaccactgcgtcgaaggggcagcattgcccaccagttaaacgtcgaggagatgctcgtcaattgcctggatccccaaagctttgtggacaagagccgtaatcagggcaaactgtacggcttcctaaaccgcgtcatcgagttcaaggagcaatttccactgttaagtttccgccacttgtgaccttttattttttagtttcccatcaatttttttaataaaatttatggaaaaatgaagtagcactacgtttttctaacgaagctttctttaggaattatggacatggcgaatttaaagtaacttgttttagcatttcacatagtttatttcaaaaattctctgtggtgtaaatgatcttggatctggtagctgcaccatcggctgcttcttatcctggtggccactgcatctggcggccgccgaggaagtgcaaatgcaagtggtaaactgactgggcgccgtgcttgccattgttgatgaccacgcggtagccatccgcgaggccgagctccttggccaccttgcggcccaccagcatgagatgtcccagcagatcggcatctccatcctcggctagcgagagttgggcaattggcttgcgaggaatcacgaggaagtgggttggtgcctggggcgccacatcgtggaaggcaacgcactgtgaaagattcgataggtaacatctttttctagcaaccaaatggactgcgatctcactttatcatcctcgtggataaatttgcatgggatctccttgcgcaaaatcttgccgaaaatggtgtcttcactggcggctgccgtttgcgatttttccacttcgcttgccattctagcactgcagcttgctatttggcgagagctgcagcgtaaatacagtatataatcgcggcactttagataattaagccaatttcgcacgaactcacctgaaaacacgaaagaaattccggccggttgacaagaacatcgaaatagcgctgccaacttggttttcagacaattcacacagagcggcaaatttagggtattcgaatgctctcacacctgcgtcgctataatgttatttattatttaaaaaaaacatcaacaaattattacagggaaatgcaaaagtatttagtgccatagatcgctttaattaattagggctgtagggctagtgaaaattcaattcaaaggaggtgcacataggtggactttgaaccctgctgcaacatatggaaatcatagagatcttcaaaccagaaaaactactcttttgatcgcaagatcaagttgctccgtggcaatatttttgtgatatcagtgcagtccagtatctttatctggagaatcactgcatctgtgggaacatcaacagcttgtgacgtaatgttgccgcgctccttatcgctatagaatgctcaagattagttcgaaactatcggctaggtgcaaattccaataatccacttgacttgccagaaaacagcaacactagttccgaaatcgagcagctgccggccgttaaggtgaaggtgaaggaggagcagagcaatagcaacctgtagccatgaccaccacggagaacgtgtccacggagcgcaaagcgaatccagtgaagtccttcctgaccggcggattcggtgggatctgcaatgtgctctctggccatccgctggacaccatcaaggtgcgcctgcagaccatgccgcgtccggcgccgggtgagcagcccctgtaccgcggcaccttcgactgtgcggccaagacgatcaaaaatgagggcgtccgcggtctgtacaagggcatgtccgcaccgttgacgggcgttgctccgatctttgcgatgtgcttcgccggctatgcgctgggcaagcggctgcagcagcgcggcgaggacgccaagctgacctacccgcaaatcttcgtggccggctccttctccggcctgttctccaccctgataatggcacccg

SEQ ID NO: 5258 - DNA, 596 bp, DROSOPHILA
tcaaccggccggaatttctttcgtgttttcagctctcgccaaatagcaagctgcagtgctagaatggcaagcgaagtggaaaaatcgcaaacggcagccgccagtgaagacaccattttcggcaagattttgcgcaaggagatcccatgcaaatttatccacgaggatgataaatgcgttgccttccacgatgtggcgccccaggcaccaacccacttcctcgtgattcctcgcaagccaattgcccaactctcgctagccgaggatggagatgccgatctgctgggacatctcatgctggtgggccgcaaggtggccaaggagctcggcctcgcggatggctaccgcgtggtcatcaacaatggcaagcacggcgcccagtcagtttaccacttgcatttgcacttcctcggcggccgccagatgcagtggccaccaggataagaagcagccgatggtgcagctaccagatccaagatcatttacaccacagagaatttttgaaataaactatgtgaaatgctaaaacaagttactttaaattcgccatgtccataattcctaaagaaagcttcgttagaaaaacgtagtgctac

SEQ ID NO: 5259 - protein, 126 aa, DROSOPHILA
MASEVEKSQTAAASEDTIFGKILRKEIPCKFIHEDDKCVAFHDVAPQAPTHFLVIPRKPIAQLSLAEDGDADLLGHLMLVGRKVAKELGLADGYRVVINNGKHGAQSVYHLHLHFLGGRQMQWPPG

SEQ ID NO: 5260 - DNA, 11656 bp, DROSOPHILA
ttgcggtctttatacttagaattaaatacattgaagatagcataaggatatatatgaggacttttaataatctagtttgttattcatatgattatgataggctaagcaagctattgtatatcatcatgttttctttgatttaaattagaaatccaataacaaatagcgcttaatctagtttaattgattcagttcagcatttcctcccaatcttatcttcataatgcttgcagattaggactttttgaatctggcaacccatccacttcaattaaagctattctttcatttagacacttgagaattgaagcgtttatagctcaagatatgcaatccatccccaatggcgcccacatttgcgctgagtgtatcgagcaaaacaaaaacaggtggctgcgtcacagccaaacgccgccaaacatatcgcgtgagtttagggaaaagagacagcgaaaagctcgcgaccgtgtgtgcgagtgggaggcagtctctcacccagctttccgagaactttcgcggtgcgcaaacatggagagaaaagtggcggcaatagagatagagagtgccatgtgggaacgccgcattttgttttcattcatataatgttcaaaactcgtttggccagcggctggctcgctcagcggctctctccgcttctccggcccacggggcgtatgagcgatggtggccaacaccgctctgcggttcagttccctggcagtcgtcggctctgtcggtccgcaatccgctttccgcaaaccccagaagtacggcagatataccccaagacccagcccgtttcccaaataagtttctcgcgtgtgcggaccatcgttcgacattgatttttgtgtgtgaatatttcggccagcggagcgcggtgaaagtggtgcagtggcattaaaatattttgtgagcggctcgcttattagtcacacttgcataattgcgaggagccgctaaaacaccacgacgatccccctgccagagttcactttggatgctattggccctcgtggagctcattagaatgttgaagcgtcgcgccagcaagcgtttcgtacttgttgagtccggtgaagataatgccaacggctccggctcggcctcgggctctggctcgggatcaggagtgggaacggcggttataccccaatttgtggctgtggattgcgggcagaacgagagcaacaacaaccatgtcggcgagatgagtgccagcatcagcaatcacaatagctccaacaaccagtcgtcgccatcgctgctcagtgtgcccgtggtgggaaccctcaagtaaatgccatgtttaataccccatttgtttattgcaacgcgatactagttgacaagatgtaaacaaaagcgaattatgtgcagatcttttgatcatgtcagccaaaccggtttgtcaaatctcattgtgccttccgtttcttcgccacctgtcccatcgcgccataacttacactggccagcatgaaaagtgttttcagggttcagttggtgatgcaggcaaagcttaacttttggctgggtaatatagtaaaagatctaagcaaacattgaaatcatcatctttaagtattgaaagctcaaaaaaatgtttttcaaagtaaggtgagagtaattccttggaattttacaaccacgtttatgacccagtttcttatatagctatattctcaattgaaatcttaggccggtttttcccacattatatcccagcaactaactaactctcctttccctgacctcttccaggccgagtatgtcgcgtggcacagggctgggccaggaccggcaccaggatcgcgacttccacatcgcaaccaccgaggagttcgtgaagcgctttggcggcacccgagtgatcaacaaggtcctgattgccaacaacggtatcgcggccgtcaagtgcatgcgatccatccggagatgggcgtacgaaatgtttaagaacgagcgggccattaggtttgtggtgatggtcactccggaggatctaaaggcgaatgccgaatacatcaagatggcggatcactatgtgcccgtgcccggcggatcgaacaacaacaactacgccaatgtcgagctcatcgtggacattgctcttcgcacccaagtgcaggtgagtccggaatctgggggccaccgccatagaagtggccagtgtcggctgtgccgagttgtctatttgccttggccagctccacccaaaacgcatcgtacgattcgtatttgcactccgtcaatcgggggaactggcaaagtcaagcgatcgccccgcataccaataaagagaccccctattcgtatacgaatatgtactcgtgtgtttacgagacggccggcatttctaagcagataactgtgtgtgtgtgtcagccaacactgtgctacaaaattagacaacatactcctgggtagagaagtttttagcgatctacagcccagtcccgtttccgaaatatataatatatgctcgaatgcaatttaaaggtattttgtgaaaacctttgacactgtaaacggttgtacgtgtcaattgccaataaacaaataaaattacacgttttgaacggacgactcacatacagttggaaacaattaagattcgttaaaagtgtaaagtttaagtatctaagagcttccaaatgcacagcgtgattttaccttactgcgtatattagctttaatctttaattgcaattccaagatccaacactagctctttagcaaagtacgctgtgaaaaaaaaaaaaaatgcgaaaactaacatattattttcctacctgtacatatagtatataaaaaccctgttgagtctaagtggcaacagctataagtaatacaatagtgtctgcttgttgcaatttaagagttgttcgagtgacagaagattgccttcaaaacattggattgcgcacacctgtaatctaaaacccttcaccattccgcctcccaacggagcttagattaaactgcattcgcagtactttcaagtgaaaattcaaccttaggtgtttactttcccttagatatagcagggcgctgggggttaattagcagccgccgacgacgacgactcttgttgcacagtgtgaattatctattttgttttgctatccgggtgttgccaatgaacgtcgcaatgacgtcacgattgatttttaccgacaataaagctccataattttccccacacccgcgacgagtgcgccgtccttggggcattgggcttattaagtcaaaatgaactgattattaacctgtgttcgaacctttctcgattgcaggccgtgtgggctggttggggtcatgcctccgagaacccgaagctgccggagctgcttcacaaagagggtctggtgttccttggccctccggaacgtgccatgtgggcgctgggcgacaaggtggcctcctctattgtggcccaaacggccgagattcccaccctgccgtggtccggttcggacctgaaggcccagtacagtggcaaaaagatcaagatttccagtgagctcttcgcccgaggttgtgtgaccaatgtggaacagggtctggccgcagttaacaagattggtaagtgtaatctgaacaaatagagttccgaacaagttgtttatgttcttgtttcactcaggcttccccgtaatgatcaaggcctcggaaggaggtggtggcaagggtattcgccgcgtggacaccactgaggagttccccggcctgttccgccaggttcaagctgaggtgcccggctcaccgattttcgtgatgaagctggcccgcggagctcgccacttggaggtgcaactgttggcagatcagtacggcaatgccattagcttgttcggccgtgactgctccatccagcgtcgtcatcagaaaattattgaggaagctcctgccatcgtggcccagccagaggtgttcgaggacatggagaaggccgccgtgcggttggccaagatggtgggttacgtcagcgcgggaaccgtggagtacctatatgatccggagggtcgctacttcttcctggagctgaacccacgtttgcaggtggagcatccgtgtacggagatggtggccgatgtaaatcttccagctgctcagctgcagattggaatgggaattcccctttaccggctcaaggacatccgtctgctgtacggagagtctccctggggctcctcagtcattgacttcgaaaatccaccgaacaaaccgcgtccctccggacatgttatcgctgctcgtatcacctcagagaaccccgacgagggctttaagcccagttctggaaccgttcaggagcttaacttccggtcgagcaaaaatgtgtggggctacttcagtgtggctgccagtggaggattgcacgagttcgcggattcacagtttgggcattgtttctcctggggcgagaaccgtcaacaggctcgagagaacctggtgattgccctgaaggagctgtcaattcgaggtgatttccgaaccacagtggaatacttgatcactctgctcgaaacgaatcggttcctcgacaacagcatcgacaccgcctggctagatgccttgatcgcagagcgtgtgcaatccgagaagccggatatcctgttgggcgtaatgtgcggatcgctgcacatcgcagatcgtcaaattactgagagcttttccagcttccaaacctctctggagaaaggtcagatccaagcagcgaacacgctgacgaacgtggtggatgttgagctaatcaacgatggcatccgttacaaggtgcaggccgccaagagcggagccaactcgtacttcctgctgatgaacagctcgtttaaggagatcgaggtgcaccgcctctccgacggaggcttgctcatctctttggagggcgcctcctacaccacgtacatgaaggaggaggtggatcgctaccgcattgtgattggcaaccagacatgtgtctttgaaaaggagaacgatccatcgctgttgcgcagtccgtctgcgggaaagctcatcaacatgattgtggaagatggcgctcatgtaagcaagggccaggcctatgctgagattgaggtgatgaagatggtgatgaccctgacgtcccaggaggcaggcacagtgacatttgtgcgtcgaccaggagctgttctagatgcaggatcccttttgggccacttggagctggacgatccatcgctggtgacgaaagcgcagcccttcaagggacagttcctgcagccagagaacgcaccggtacccgagaaactaaacagggtgcacaatacttacaagagtatccttgaaaacacactggctggttactgcctgccagaaccgttcaatgcacagcgactcagagacatcatcgaaaaattcatgcaaagcttgcgtgatccctcgttgccgttgttggagctgcaagaagttatcgcctccatctctggtcgcatacccatatccgtggagaagaagatccggaaactgatgacgctgtacgagcgaaacataactagtgtcctggcccaattcccctcgcagcagatcgccagtgttattgacagccatgcggccacgctgcagaagcgcgctgaccgtgatgtcttcttcctgaccacccagagcattgtgcagctggtgcagcgctataggaacggaatccgcggcagaatgaaggccgccgttcatgagctgttgcgtcagtactacgatgtagagtcgcagttccagtatggacactacgacaaatgcgtgggactggtgcgagagcacaacaaggacgacatgcagacggtggtcaacaccatcttctcgcactctcaggtggccaagaagaatctgctggtcactctgctcattgatcacctgtgggccaacgaacctggactaacggacgaattggccaacacgctaagtgaattgacctctttgaatcgagctgagcactctagggttgccctgcggtcccgccaagttctgatcgctgcccaccagccggcttatgagctgcgccacaaccaaatggagtcgatctttctctccgccgttgacatgtacggtcatgacttccaccccgagaacctgcagcgcctgattctgtcggagacctcaatctttgacatcctgcacgacttcttctaccactctaaccgggcagtgtgcaatgctgctctggaagtctatgtgaggagagcttacacatcctatgagctgacctgcttgcagcatttggaactctccggtggcctgccgctggtgcacttccagttcctcctccccacagctcacccgaacagactgttctcgcgcatgtcctcccccgatggattggatcaggcagcggcagagtctttgggaaactcattcgtgcgcaccggagcgattgcagcctttgactccttcgaacactttgagatgtactcggacgagattctggatctgctcgaagacttcgtctcgccagccatggttaatgccaaggtcctggaagccgtagaggcagcggattctatctcggacagccgacacagcacctcgatcaatgtgtcgttgtcggatcccgtaacccgggcgaatgctgccgaggaggccaagtccaccgaaccgattcacattgttagtgtggctgtgagagaaacgggggagttggatgacctgcaaatggcccaaatctttggaaattattgccaagagcataacgaggagctcttccagcgacgcattcgtaggattacatttgctgctctgaagaagcggcaattccccaagttctttacgttcagagccagagataagttcacggaggatcgtatttaccggcatctggagccagcatctgctttccatctggagctgaaccgcatgaagacgtacgatctggaggctctgcccacggctaaccaaaagatgcacctgtaccttggcaaggccaaggtttcgaaaggtcaagaggtcacggactaccgcttcttcattcgctcgatcatccgtcattcggatctgattaccaaggaagcctctttcgagtatctgcaaaacgaaggagagcgtgtgctcctggaggccatggatgagctggaggtggcattctcgcatccgcacgccaaacgcacggactgcaaccacatcttcctgaactttgtgcccaccgtcatcatggatccggctaagatcgaggaatctgtaacaaagatgattatgcgatatggtccacgtctttggaagctgcgtgtactgcaggctgagctcaagatggtcatccgccagtcaccacagtcacccactcaggcagtgcgtctgtgcattgcaaatgactccggctacttcctggatatttcgatgtataccgaacaaacagaaccagagacaggaatcgtaagttgaaattgagatcttccttaaccggttgaaaattattctaacattccttcaatcctagattaagtttaaggcctacggtgagaagcagggatctctgcacggacatcccatttcgacgccctacatgaccaaggacttcctgcagcagaaacgtttccaggcgcagtccaatggtaccacctatgtctatgatgtgcccgacatgttccgccagatgaccgagcgtcactggagagaattctccaaggctcgtcccaccgtggacattcgcactcccgacaagattttgatcgagtgcaaggagctggtcctcgagggcgacaaccttgtagagatgcagcgtctgcccggcgaaaacaatgtaagtggacttaaatgctgacgccatcgaaggtcctgtagcaatgttctctttattggtttcagtgcggcatggtggcttggcgcattgtcttggctactccggaatatccgaatggccgcgagatcattgttatagccaacgatctcacctacttgattggttcctttggaattaaggaggacgttctctttgccaaggcttcccaattggctcgccaactcaaagtaccgagggtaagtttggttttatctcgcagttatttccaacatttacacaatcccatttatttccccagatatacatctccgttaacagcggtgcccgcataggacttgctgaggaggttaaagctatgttcaagatcgcatgggaggatccagaggagccagataagggcttcaagtacctctacttgagcaccgaggactacgcccaggtggccaacctgaactcggtgagggctatcctgatcgaggacgagggcgagcagcgttacaagattaccgacatcatcggcaaggacgatggtctgggcgtggagaatctgcgttacgccggcttgattgccggtgaaacgtcgcaggcctacgaggagattgttactatcgctatggttacctgccgtaccattggcattggatcctatgtggtgcgcctgggtcagcgcgttatccagatcgataattcacacattatactcactggctatgctgcgcttaacaaggtaagcaaatcaaagctcgtcttacagtggatttcttaagcagtttgctgatctccattacactgattattttcaaaacgatcaatctaacaactcattgctttattgttttaatttcaagctgcttggacgcaaggtgtatgcctctaataatcagttgggtggcacacagatcatgtttaacaacggagtcacccacaaaacagaggccatcgacttggacggtgtctacaccatcctcgactggctctcgtacatccccgcgtacatcggttgtgacctgcccattgttttgcccaacgatcgtatcgaacgccctgtcgacttcatgcccaccaagtcgccctacgatccgcgctggatgctgggtggccgtgtgaatcccgtgaacgctaatgactgggagaacggattctttgatcgcgactcgtggagcgaaatcatggcctcgtgggccaagacagtggtcactggtcgcgcacgtctaggcggtgtccccgtgggcgtaatagccgttgagacccgcaccgtagaagtggagatgcccgccgatcctgccaatctcgattcggaagccaagaccctgcagcaggcaggtcaggtgtggtaccccgactcctcgtacaaaacggcacaagcgatcaaagattttggacgagaggagttgccgctgattgttttcgcaaattggcgaggcttctccggtggcatgaaggacatgtacgagcaaatcgtcaagttcggagcatacattgtcgacggcctgcgggagtacaagaagcctgtgctcatctacctgccgcccaacgccgagctgcgaggtggagcctgggccgtgttggattccctcattaacccgcgctacatggaaacgtatgccgatccggaggccagaggaggagttctcgagccggagggcattgtggaaataaagtacaaagagaaggacctggtcaagacgattcaccgcttggatccgaccaccattgcggtaggttttaaatgcgaattcaaaaaactgaaatagttcttactaaataaatatgtgttatccatgacagctgaaaaaggagctcgatgaggcaaatgcgtctggcgacaaggtcagggctgctcaggtggacgaaaagatcaaggcccgcatcgctgtgctaatgcacgtctaccacacggtagcagttcactttgccgacctgcacgacacgccggagcgaatgctagagaaggagtgtatcagtgagattgtgccttggcgcgattcccgccgctggctgtactggcgtctgcgacgtctcctgttggaggacgcatatattaagaagatcctgcgcgctcaggacaacctctccgtgggtcaggccaagcagatgctgcgtcgatggctggtagaggagaagggtgccacagaggtgagacattttgagcttccactccaggagaccactaaattattctcttatgtataattaggcttatctgtgggacaaaaacgaggagatggtgtcttggtatgaggagcagatcaatgccgaatctattgtttcccgcaacgtgaactccgtgagacgggatgccattatttctaccatttcgaaaatgctcgaggtaagagcagcccaaatcttaatacctataaattgggaactaactcctctatttatatatcttttcaggactgtcccgacgtagcgctggacgctgttgtgggtctttgccaaggtctgacgccagtgaatcgaggcgtggtcgtacgcacattagcccagatgcagctgaatgaggagacctctaacagcaaccagggatgattctacgctatgttctaagttctttttaggccctctatttcatccttcccgttcccgcccttcaccacatttctcagtcccgctttgcgcttgtaagatatcgcaaggcgtgcatgatgtgcattttgtttagttaaatttgtttaaaagtaattagcgtaaatctagttatgtattggagttgtaggcatgggttaatttgttgcctaagtggcccgataaactagttgtatcgtgtacatatttgattatgtatatcccctgaatacaaatcattccattagttgtataagaactaaagtcctttgtacacagagccttttgaataatacgagttactgaaaaaataaatgtatggtacactacattaacaaaactcgctggattgcaaaaggggtttttcgtcttgttctgtttttcttttcttttggttccacaggatcgataatgtacataatttcatttatttttataattttaaaatgaaatctatcgcagtcgggggttatatcctccgattcactgcgttcctatatgccgttttttaattaagatgagtggggggagatgggatggcgagagcctgcttcagttcaggttatccatccaatcgggctcggcgacacttatcttctctataatggaattaacctgatagcatagcgactggatctgcctatcccactgaggcagtagttcccgattctcgaagtgcacaatggccgagatctggtcgatgtgtccgttcatgcgaccttcggtaatcatctgagaggcaatcttctctgctttcaccgcgggtatgtccagcagagcgcctagctcctcaaaagttatgttgttgtacagcttactagccgacaacagattgtgctcgaaaacagcccgatccaagatcgaggatccatcggaggtggcagccttttggtggtcctgcagcagggcctcgaactcctgtagctcggagcgccgaatgatgcgctccaagtacatcttttccaaaattccataggccggcaagtgctgacagcgttcatccttgaacagagtggccagcatgcgggaacgctgctgtccggcagaggcgaggactgtgcagatgagcgctttcttcagtgccgtcatcctctcgccttggtccacgatcttgcggtaggagagctcgttatatcgctgggcggcctcgataaacttgcgcctgtaatccaggacacgagcataacagactttatatagaacctaaaaggtgcgatttttaacagattacccatctaaaatagcgctaggaagccatttacctgcaactcctcggaattagtttcggcctgcagcaatgatgcccggttgatgaacagctccgcctgcaccgaa

SEQ ID NO: 5261 - DNA, 7448 bp, DROSOPHILA
atgctattggccctcgtggagctcattagaatgttgaagcgtcgcgccagcaagcgtttcgtacttgttgagtccggtgaagataatgccaacggctccggctcggcctcgggctctggctcgggatcaggagtgggaacggcggttataccccaatttgtggctgtggattgcgggcagaacgagagcaacaacaaccatgtcggcgagatgagtgccagcatcagcaatcacaatagctccaacaaccagtcgtcgccatcgctgctcagtgtgcccgtggtgggaaccctcaagccgagtatgtcgcgtggcacagggctgggccaggaccggcaccaggatcgcgacttccacatcgcaaccaccgaggagttcgtgaagcgctttggcggcacccgagtgatcaacaaggtcctgattgccaacaacggtatcgcggccgtcaagtgcatgcgatccatccggagatgggcgtacgaaatgtttaagaacgagcgggccattaggtttgtggtgatggtcactccggaggatctaaaggcgaatgccgaatacatcaagatggcggatcactatgtgcccgtgcccggcggatcgaacaacaacaactacgccaatgtcgagctcatcgtggacattgctcttcgcacccaagtgcaggccgtgtgggctggttggggtcatgcctccgagaacccgaagctgccggagctgcttcacaaagagggtctggtgttccttggccctccggaacgtgccatgtgggcgctgggcgacaaggtggcctcctctattgtggcccaaacggccgagattcccaccctgccgtggtccggttcggacctgaaggcccagtacagtggcaaaaagatcaagatttccagtgagctcttcgcccgaggttgtgtgaccaatgtggaacagggtctggccgcagttaacaagattggcttccccgtaatgatcaaggcctcggaaggaggtggtggcaagggtattcgccgcgtggacaccactgaggagttccccggcctgttccgccaggttcaagctgaggtgcccggctcaccgattttcgtgatgaagctggcccgcggagctcgccacttggaggtgcaactgttggcagatcagtacggcaatgccattagcttgttcggccgtgactgctccatccagcgtcgtcatcagaaaattattgaggaagctcctgccatcgtggcccagccagaggtgttcgaggacatggagaaggccgccgtgcggttggccaagatggtgggttacgtcagcgcgggaaccgtggagtacctatatgatccggagggtcgctacttcttcctggagctgaacccacgtttgcaggtggagcatccgtgtacggagatggtggccgatgtaaatcttccagctgctcagctgcagattggaatgggaattcccctttaccggctcaaggacatccgtctgctgtacggagagtctccctggggctcctcagtcattgacttcgaaaatccaccgaacaaaccgcgtccctccggacatgttatcgctgctcgtatcacctcagagaaccccgacgagggctttaagcccagttctggaaccgttcaggagcttaacttccggtcgagcaaaaatgtgtggggctacttcagtgtggctgccagtggaggattgcacgagttcgcggattcacagtttgggcattgtttctcctggggcgagaaccgtcaacaggctcgagagaacctggtgattgccctgaaggagctgtcaattcgaggtgatttccgaaccacagtggaatacttgatcactctgctcgaaacgaatcggttcctcgacaacagcatcgacaccgcctggctagatgccttgatcgcagagcgtgtgcaatccgagaagccggatatcctgttgggcgtaatgtgcggatcgctgcacatcgcagatcgtcaaattactgagagcttttccagcttccaaacctctctggagaaaggtcagatccaagcagcgaacacgctgacgaacgtggtggatgttgagctaatcaacgatggcatccgttacaaggtgcaggccgccaagagcggagccaactcgtacttcctgctgatgaacagctcgtttaaggagatcgaggtgcaccgcctctccgacggaggcttgctcatctctttggagggcgcctcctacaccacgtacatgaaggaggaggtggatcgctaccgcattgtgattggcaaccagacatgtgtctttgaaaaggagaacgatccatcgctgttgcgcagtccgtctgcgggaaagctcatcaacatgattgtggaagatggcgctcatgtaagcaagggccaggcctatgctgagattgaggtgatgaagatggtgatgaccctgacgtcccaggaggcaggcacagtgacatttgtgcgtcgaccaggagctgttctagatgcaggatcccttttgggccacttggagctggacgatccatcgctggtgacgaaagcgcagcccttcaagggacagttcctgcagccagagaacgcaccggtacccgagaaactaaacagggtgcacaatacttacaagagtatccttgaaaacacactggctggttactgcctgccagaaccgttcaatgcacagcgactcagagacatcatcgaaaaattcatgcaaagcttgcgtgatccctcgttgccgttgttggagctgcaagaagttatcgcctccatctctggtcgcatacccatatccgtggagaagaagatccggaaactgatgacgctgtacgagcgaaacataactagtgtcctggcccaattcccctcgcagcagatcgccagtgttattgacagccatgcggccacgctgcagaagcgcgctgaccgtgatgtcttcttcctgaccacccagagcattgtgcagctggtgcagcgctataggaacggaatccgcggcagaatgaaggccgccgttcatgagctgttgcgtcagtactacgatgtagagtcgcagttccagtatggacactacgacaaatgcgtgggactggtgcgagagcacaacaaggacgacatgcagacggtggtcaacaccatcttctcgcactctcaggtggccaagaagaatctgctggtcactctgctcattgatcacctgtgggccaacgaacctggactaacggacgaattggccaacacgctaagtgaattgacctctttgaatcgagctgagcactctagggttgccctgcggtcccgccaagttctgatcgctgcccaccagccggcttatgagctgcgccacaaccaaatggagtcgatctttctctccgccgttgacatgtacggtcatgacttccaccccgagaacctgcagcgcctgattctgtcggagacctcaatctttgacatcctgcacgacttcttctaccactctaaccgggcagtgtgcaatgctgctctggaagtctatgtgaggagagcttacacatcctatgagctgacctgcttgcagcatttggaactctccggtggcctgccgctggtgcacttccagttcctcctccccacagctcacccgaacagactgttctcgcgcatgtcctcccccgatggattggatcaggcagcggcagagtctttgggaaactcattcgtgcgcaccggagcgattgcagcctttgactccttcgaacactttgagatgtactcggacgagattctggatctgctcgaagacttcgtctcgccagccatggttaatgccaaggtcctggaagccgtagaggcagcggattctatctcggacagccgacacagcacctcgatcaatgtgtcgttgtcggatcccgtaacccgggcgaatgctgccgaggaggccaagtccaccgaaccgattcacattgttagtgtggctgtgagagaaacgggggagttggatgacctgcaaatggcccaaatctttggaaattattgccaagagcataacgaggagctcttccagcgacgcattcgtaggattacatttgctgctctgaagaagcggcaattccccaagttctttacgttcagagccagagataagttcacggaggatcgtatttaccggcatctggagccagcatctgctttccatctggagctgaaccgcatgaagacgtacgatctggaggctctgcccacggctaaccaaaagatgcacctgtaccttggcaaggccaaggtttcgaaaggtcaagaggtcacggactaccgcttcttcattcgctcgatcatccgtcattcggatctgattaccaaggaagcctctttcgagtatctgcaaaacgaaggagagcgtgtgctcctggaggccatggatgagctggaggtggcattctcgcatccgcacgccaaacgcacggactgcaaccacatcttcctgaactttgtgcccaccgtcatcatggatccggctaagatcgaggaatctgtaacaaagatgattatgcgatatggtccacgtctttggaagctgcgtgtactgcaggctgagctcaagatggtcatccgccagtcaccacagtcacccactcaggcagtgcgtctgtgcattgcaaatgactccggctacttcctggatatttcgatgtataccgaacaaacagaaccagagacaggaatcattaagtttaaggcctacggtgagaagcagggatctctgcacggacatcccatttcgacgccctacatgaccaaggacttcctgcagcagaaacgtttccaggcgcagtccaatggtaccacctatgtctatgatgtgcccgacatgttccgccagatgaccgagcgtcactggagagaattctccaaggctcgtcccaccgtggacattcgcactcccgacaagattttgatcgagtgcaaggagctggtcctcgagggcgacaaccttgtagagatgcagcgtctgcccggcgaaaacaattgcggcatggtggcttggcgcattgtcttggctactccggaatatccgaatggccgcgagatcattgttatagccaacgatctcacctacttgattggttcctttggaattaaggaggacgttctctttgccaaggcttcccaattggctcgccaactcaaagtaccgaggatatacatctccgttaacagcggtgcccgcataggacttgctgaggaggttaaagctatgttcaagatcgcatgggaggatccagaggagccagataagggcttcaagtacctctacttgagcaccgaggactacgcccaggtggccaacctgaactcggtgagggctatcctgatcgaggacgagggcgagcagcgttacaagattaccgacatcatcggcaaggacgatggtctgggcgtggagaatctgcgttacgccggcttgattgccggtgaaacgtcgcaggcctacgaggagattgttactatcgctatggttacctgccgtaccattggcattggatcctatgtggtgcgcctgggtcagcgcgttatccagatcgataattcacacattatactcactggctatgctgcgcttaacaagctgcttggacgcaaggtgtatgcctctaataatcagttgggtggcacacagatcatgtttaacaacggagtcacccacaaaacagaggccatcgacttggacggtgtctacaccatcctcgactggctctcgtacatccccgcgtacatcggttgtgacctgcccattgttttgcccaacgatcgtatcgaacgccctgtcgacttcatgcccaccaagtcgccctacgatccgcgctggatgctgggtggccgtgtgaatcccgtgaacgctaatgactgggagaacggattctttgatcgcgactcgtggagcgaaatcatggcctcgtgggccaagacagtggtcactggtcgcgcacgtctaggcggtgtccccgtgggcgtaatagccgttgagacccgcaccgtagaagtggagatgcccgccgatcctgccaatctcgattcggaagccaagaccctgcagcaggcaggtcaggtgtggtaccccgactcctcgtacaaaacggcacaagcgatcaaagattttggacgagaggagttgccgctgattgttttcgcaaattggcgaggcttctccggtggcatgaaggacatgtacgagcaaatcgtcaagttcggagcatacattgtcgacggcctgcgggagtacaagaagcctgtgctcatctacctgccgcccaacgccgagctgcgaggtggagcctgggccgtgttggattccctcattaacccgcgctacatggaaacgtatgccgatccggaggccagaggaggagttctcgagccggagggcattgtggaaataaagtacaaagagaaggacctggtcaagacgattcaccgcttggatccgaccaccattgcgctgaaaaaggagctcgatgaggcaaatgcgtctggcgacaaggtcagggctgctcaggtggacgaaaagatcaaggcccgcatcgctgtgctaatgcacgtctaccacacggtagcagttcactttgccgacctgcacgacacgccggagcgaatgctagagaaggagtgtatcagtgagattgtgccttggcgcgattcccgccgctggctgtactggcgtctgcgacgtctcctgttggaggacgcatatattaagaagatcctgcgcgctcaggacaacctctccgtgggtcaggccaagcagatgctgcgtcgatggctggtagaggagaagggtgccacagaggcttatctgtgggacaaaaacgaggagatggtgtcttggtatgaggagcagatcaatgccgaatctattgtttcccgcaacgtgaactccgtgagacgggatgccattatttctaccatttcgaaaatgctcgaggactgtcccgacgtagcgctggacgctgttgtgggtctttgccaaggtctgacgccagtgaatcgaggcgtggtcgtacgcacattagcccagatgcagctgaatgaggagacctctaacagcaaccagggatgattctacgctatgttctaagttctttttaggccctctatttcatccttcccgttcccgcccttcaccacatttctcagtcccgctttgcgcttgtaagatatcgcaaggcgtgcatgatgtgcattttgtttagttaaatttgtttaaaagtaattagcgtaaatctagttatgtattggagttgtaggcatgggttaatttgttgcctaagtggcccgataaactagttgtatcgtgtacatatttgattatgtatatcccctgaatacaaatcattccattagttgtataagaactaaagtcctttgtacacagagccttttgaataatacgagttactgaaaaaataaatgtatggtacactacattaa

SEQ ID NO: 5262 - protein, 2348 aa, DROSOPHILA
MLKRRASKRFVLVESGEDNANGSGSASGSGSGSGVGTAVIPQFVAVDCGQNESNNNHVGEMSASISNHNSSNNQSSPSLLSVPVVGTLKPSMSRGTGLGQDRHQDRDFHIATTEEFVKRFGGTRVINKVLIANNGIAAVKCMRSIRRWAYEMFKNERAIRFVVMVTPEDLKANAEYIKMADHYVPVPGGSNNNNYANVELIVDIALRTQVQAVWAGWGHASENPKLPELLHKEGLVFLGPPERAMWALGDKVASSIVAQTAEIPTLPWSGSDLKAQYSGKKIKISSELFARGCVTNVEQGLAAVNKIGFPVMIKASEGGGGKGIRRVDTTEEFPGLFRQVQAEVPGSPIFVMKLARGARHLEVQLLADQYGNAISLFGRDCSIQRRHQKIIEEAPAIVAQPEVFEDMEKAAVRLAKMVGYVSAGTVEYLYDPEGRYFFLELNPRLQVEHPCTEMVADVNLPAAQLQIGMGIPLYRLKDIRLLYGESPWGSSVIDFENPPNKPRPSGHVIAARITSENPDEGFKPSSGTVQELNFRSSKNVWGYFSVAASGGLHEFADSQFGHCFSWGENRQQARENLVIALKELSIRGDFRTTVEYLITLLETNRFLDNSIDTAWLDALIAERVQSEKPDILLGVMCGSLHIADRQITESFSSFQTSLEKGQIQAANTLTNVVDVELINDGIRYKVQAAKSGANSYFLLMNSSFKEIEVHRLSDGGLLISLEGASYTTYMKEEVDRYRIVIGNQTCVFEKENDPSLLRSPSAGKLINMIVEDGAHVSKGQAYAEIEVMKMVMTLTSQEAGTVTFVRRPGAVLDAGSLLGHLELDDPSLVTKAQPFKGQFLQPENAPVPEKLNRVHNTYKSILENTLAGYCLPEPFNAQRLRDIIEKFMQSLRDPSLPLLELQEVIASISGRIPISVEKKIRKLMTLYERNITSVLAQFPSQQIASVIDSHAATLQKRADRDVFFLTTQSIVQLVQRYRNGIRGRMKAAVHELLRQYYDVESQFQYGHYDKCVGLVREHNKDDMQTVVNTIFSHSQVAKKNLLVTLLIDHLWANEPGLTDELANTLSELTSLNRAEHSRVALRSRQVLIAAHQPAYELRHNQMESIFLSAVDMYGHDFHPENLQRLILSETSIFDILHDFFYHSNRAVCNAALEVYVRRAYTSYELTCLQHLELSGGLPLVHFQFLLPTAHPNRLFSRMSSPDGLDQAAAESLGNSFVRTGAIAAFDSFEHFEMYSDEILDLLEDFVSPAMVNAKVLEAVEAADSISDSRHSTSINVSLSDPVTRANAAEEAKSTEPIHIVSVAVRETGELDDLQMAQIFGNYCQEHNEELFQRRIRRITFAALKKRQFPKFFTFRARDKFTEDRIYRHLEPASAFHLELNRMKTYDLEALPTANQKMHLYLGKAKVSKGQEVTDYRFFIRSIIRHSDLITKEASFEYLQNEGERVLLEAMDELEVAFSHPHAKRTDCNHIFLNFVPTVIMDPAKIEESVTKMIMRYGPRLWKLRVLQAELKMVIRQSPQSPTQAVRLCIANDSGYFLDISMYTEQTEPETGIIKFKAYGEKQGSLHGHPISTPYMTKDFLQQKRFQAQSNGTTYVYDVPDMFRQMTERHWREFSKARPTVDIRTPDKILIECKELVLEGDNLVEMQRLPGENNCGMVAWRIVLATPEYPNGREIIVIANDLTYLIGSFGIKEDVLFAKASQLARQLKVPRIYISVNSGARIGLAEEVKAMFKIAWEDPEEPDKGFKYLYLSTEDYAQVANLNSVRAILIEDEGEQRYKITDIIGKDDGLGVENLRYAGLIAGETSQAYEEIVTIAMVTCRTIGIGSYVVRLGQRVIQIDNSHIILTGYAALNKLLGRKVYASNNQLGGTQIMFNNGVTHKTEAIDLDGVYTILDWLSYIPAYIGCDLPIVLPNDRIERPVDFMPTKSPYDPRWMLGGRVNPVNANDWENGFFDRDSWSEIMASWAKTVVTGRARLGGVPVGVIAVETRTVEVEMPADPANLDSEAKTLQQAGQVWYPDSSYKTAQAIKDFGREELPLIVFANWRGFSGGMKDMYEQIVKFGAYIVDGLREYKKPVLIYLPPNAELRGGAWAVLDSLINPRYMETYADPEARGGVLEPEGIVEIKYKEKDLVKTIHRLDPTTIALKKELDEANASGDKVRAAQVDEKIKARIAVLMHVYHTVAVHFADLHDTPERMLEKECISEIVPWRDSRRWLYWRLRRLLLEDAYIKKILRAQDNLSVGQAKQMLRRWLVEEKGATEAYLWDKNEEMVSWYEEQINAESIVSRNVNSVRRDAIISTISKMLEDCPDVALDAVVGLCQGLTPVNRGVVVRTLAQMQLNEETSNSNQG

SEQ ID NO: 5263 - DNA, 4849 bp, DROSOPHILA
gcaattgctgccgtagctcttcattagattggattgtattggattgattgaattggattggattggccggttgtgaaagaggtcctgacccggtcctgggcctcattacttcaaatagagcgctgaccaaacgatttaattataccgccgacgcccgacagttggccggcactcaggtggagaccgggttcggttatatttcaaaacctgacaacacaccgaccagagcgctcagtcggcacgcatccgccgtgtgagccgcatcaggatcagcattccttcgatagccttcgagcacaattcgagcacaagaactaaccaatatgaccagaatgataatacaaaactcgggcagctggacactttgcggagctgtactcctgttcgtcctgccgctgatacccacgccggaggcactgcagcacaccgaggagggtctcgagatgcttttccgcgagcggtgagttgtcaactccattgacatcgaaccgttccgatgtctatgtctccatcttttagttcccaatcggactgggagaacgtgtggcaccaggagacgcactcccgctgccgtgacaagctggtccgccagctatattgggcctgcgagaaggacatttaccgactgacacggcgcaacaaaaagaggacgggcaatgatgaggcttggatcaagaagacaaccacggaacgtaagttgttgaatcgaaatccattccaaccaaagacgattggaatttcaagcgatgtacacatgtacatctatgctatagatccattgatatcgatatgataccacctgctgtctttccagctgatggctccacctggctgcacgtgaactatgccaacatgtttctgcgaagtcgtcgatcggatggaaacactccatcgatatcgaacgaatgctgcaccaaggcgggctgcacctgggaggaatacgccgagtattgtccatccaacaagcgacgcaatcactactgattggccatcgacgttggatctgcttagatatatatatatatatacgaacaaacaaatatatattcgctttttttttcgtggttgttgttgttgatgttcttgttgtggtcaaataaaataaacaaaaggtttcggttaaataaaaagaaactttactggctttaactacaaatttcgcataataaaagctagatttgcatgatataacaaattatattaatcaatcaatgttatacaaatttaacagtaaaattgtctttgcagattagaatagtataattaaaaaaaaaaaaaaaatttcactttattcgacttacaatgatcctactttaaaatgccctaaatatgtccttaaagttatctacaatacattttatacctcttcaattttgggggcagtaacaatcctgtagtgcaatatcacctagtcaacaatatcgtccttttcgtccttgtcggtcacatcgatctccttacgactctttgctgaaccctcagccttgctgcagttgggtgattttcgtggcctcttcgaggccgaacccttttcataatgggtgtccagcatctcgagcaggctcaactggcggccacctgaacccattgatttcgtggctgtactgctcgttttggacgttgtgctgctgttgcttatttctacgctgcttttagcctccagactagcggcctccatcatggcattggcctcctcatcgtccgacagcataagaagggcctgatcttccgaagaatttgagttatcttgcgataattgcgcgggcaatagatcggtactttgttgcgttatggtgatttgcggtcgggcgggttgcttgttgagttctggcgaggatttcgctgatgtttctgattttccttcgcctaatccagctactctagagcttccagcttcggcggatgctccctctccgggcacatctctgaccttcttaagttcctctttaataaaatcatatagcttctttttggatgccttattctcacgcggctccttggagctcttctccttaataagcctactgtacgaccttaaaatactccaaagctgctgcaccgtagtcccgtcatttcgaaacaacagccacatttcatgaaaatcatccctaaactccacatttccaaaggtatagtaggccaaaggtctgcccaactgggcgcagaccataagttgcagcagggctttcagataggagtcaccgccgaatgcgccgcaaccccagttaccagttgccacacccggtggcggcgtcaccatccagtgaacaaatccaatgtacgccttgttcagctccctttccatgagatcctcgcgatattgatgatgtgactgggcaaaatgtagggcatcgattgccacaatggccgtttgtcgacgacctgagctatctcttggcgttgaatcctcaaagttgccggaccactcgaagcttccggcatatcccgtatagttactatacctttcggcgcccaacatcaccagggcctcgaatggtcgcagacactccgtaaagagtttacccaccaatagctccggacagataacaaagcgtatctcctcctgaacgcagccatgtcccaagacaccgccacccaaatatttgttggcaaagtctacttgcagcagtccaatgccctcatcctcgattgttccctcggcatccacgtgcaatggcacatcacccaacggcgccgcactttggctccagtcgatcagatgttccggcaatccgctccgacgaacaaaggttaccacaccggtgggcacattgctggcatcccgctctgtgggacacacgcgacgaaaatagtgcataatgcatttaagcttctccagaactgccggtcccgtcgattggtaaagccttttgatggaatcgaatatatttaacatacttcgactgaagatatacgaatctggtggacgctcacctgttaaagttgatgtctggaaaagtgctgtactcggacttcctcttgagggtgtttctccggggaaaggtgcacaggaaggcattggccaacaggcaggagatctgctgttggctcaggctcaatgaggcgttcttgtggtgcttgagcagcggaactggcgattgaatcaagtccggtagccgcaatgccaatcggataatgcgcggcaatagatcctcgaagaaaacccgtgtttcgctctcgtccagttcctcgtcgagaagttgatgaagggcacgaaagtgccactgatccctataggtggtattatatgatattatcgccgcctgcagttcctcacacgtctttatgggctgcagaagggctcgttcgatcatttcccagcgaaaatcgatggtggtgctgccatccggattctccctcggatatttcgactcgggcgcacagggcagacgcacatgctcggagtcccactttcccggtgatttgtaggggcgtggcggtgtttcacgaattggcagctggtacataacccggtggagattgccggcagtcactggtggcaaattctccaattcgaaaggctgccgattacgatgtatagcctccatggaaactccacgccacgaatcatctagggagttcgccagattttccggctcctcctccgtttctatttcggaaatcccgccatccggcgacttcgacatcctggcgcagtttaagcacaaagccttgccgagtcgattggtcagcacggatgcacttgctctgcggcgatttgccgtagattggtaaaccttttggaatatcggaaaaatcaagtgtgacctgaattcttgcataccggtgttttggggatgagcgatagctgtgatgaatatcgcactttataaataccacacacttcgattgaagcgtagtgaattgaagcgtttatatatcgaaatatattcaaatatatgttggtattcgtttgagaatgaatcaataacaaattcaaaattgcattgccttgaattcggcgggcgaaagtgtgaccattacatgtggtattttacctctcattgtcgctagtatttaaataccagcacgagaaataccaacactgtgtccgttgcaatgcgaattgcaaatataaccgccgaaggaacaacaacaaacaaaaagaaaaaaaaaacaaatcttccagcaatttgtcaactattttctctaatttttttttaaagtgtaaaactatcataacgagcgccaagttttacgttaagtgaaaggattttttcctgtccttcgtgcggtaaaaataatagtgcatattaccaaggaaaatcaagttaaaggcgtctgcgaaacttttataaatgtatttaatactcaaaaaggtaagaagcggcggaaagtaattgctgttttatgtttttataatcacgtttggcaagaaaatgttatttcgttgacgtcagtggtcaaatcaaattttttcagtttttaacccttaatgtggcactgtcactcgcacctatgtatatatttatgtgattgtggtattttgctcaagcttacgtgttgaaaagaggaagagaaaccgctgcatacacgtgcaaagactctgagaatggacacaagagagcgagagagggagagagagagagcgcagttgtttgttttgaaagcgtcgcaaaaacaatacaaaaaaggtcatacataatttgcacacacacttgcatctgaggaaaacgcaaaagcaaattcacagctagctaaaaaccaaaataaatataatttatgaaatgtacttttgctaaagttcaacacacctttatctctccgcgaaatttgtttgcaccatctctttctctcctttttgcgtaaacaaacgaaaaagctttgcaaggagaagcaaaaaaaaaaa

SEQ ID NO: 5264 - DNA, 2782 bp, DROSOPHILA
tcgaagtgtgtggtatttataaagtgcgatattcatcacagctatcgctcatccccaaaacaccggtatgcaagaattcaggtcacacttgatttttccgatattccaaaaggtttaccaatctacggcaaatcgccgcagagcaagtgcatccgtgctgaccaatcgactcggcaaggctttgtgcttaaactgcgccaggatgtcgaagtcgccggatggcgggatttccgaaatagaaacggaggaggagccggaaaatctggcgaactccctagatgattcgtggcgtggagtttccatggaggctatacatcgtaatcggcagcctttcgaattggagaatttgccaccagtgactgccggcaatctccaccgggttatgtaccagctgccaattcgtgaaacaccgccacgcccctacaaatcaccgggaaagtgggactccgagcatgtgcgtctgccctgtgcgcccgagtcgaaatatccgagggagaatccggatggcagcaccaccatcgattttcgctgggaaatgatcgaacgagcccttctgcagcccataaagacgtgtgaggaactgcaggcggcgataatatcatataataccacctatagggatcagtggcactttcgtgcccttcatcaacttctcgacgaggaactggacgagagcgaaacacgggttttcttcgaggatctattgccgcgcattatccgattggcattgcggctaccggacttgattcaatcgccagttccgctgctcaagcaccacaagaacgcctcattgagcctgagccaacagcagatctcctgcctgttggccaatgccttcctgtgcacctttccccggagaaacaccctcaagaggaagtccgagtacagcacttttccagacatcaactttaacaggctttaccaatcgacgggaccggcagttctggagaagcttaaatgcattatgcactattttcgtcgcgtgtgtcccacagagcgggatgccagcaatgtgcccaccggtgtggtaacctttgttcgtcggagcggattgccggaacatctgatcgactggagccaaagtgcggcgccgttgggtgatgtgccattgcacgtggatgccgagggaacaatcgaggatgagggcattggactgctgcaagtagactttgccaacaaatatttgggtggcggtgtcttgggacatggctgcgttcaggaggagatacgctttgttatctgtccggagctattggtgggtaaactctttacggagtgtctgcgaccattcgaggccctggtgatgttgggcgccgaaaggtatagtaactatacgggatatgccggaagcttcgagtggtccggcaactttgaggattcaacgccaagagatagctcaggtcgtcgacaaacggccattgtggcaatcgatgccctacattttgcccagtcacatcatcaatatcgcgaggatctcatggaaagggagctgaacaaggcgtacattggatttgttcactggatggtgacgccgccaccgggtgtggcaactggtaactggggttgcggcgcattcggcggtgactcctatctgaaagccctgctgcaacttatggtctgcgcccagttgggcagacctttggcctactatacctttggaaatgtggagtttagggatgattttcatgaaatgtggctgttgtttcgaaatgacgggactacggtgcagcagctttggagtattttaaggtcgtacagtaggcttattaaggagaagagctccaaggagccgcgtgagaataaggcatccaaaaagaagctatatgattttattaaagaggaacttaagaaggtcagagatgtgcccggagagggagcatccgccgaagctggaagctctagagtagctggattaggcgaaggaaaatcagaaacatcagcgaaatcctcgccagaactcaacaagcaacccgcccgaccgcaaatcaccataacgcaacaaagtaccgatctattgcccgcgcaattatcgcaagataactcaaattcttcggaagatcaggcccttcttatgctgtcggacgatgaggaggccaatgccatgatggaggccgctagtctggaggctaaaagcagcgtagaaataagcaacagcagcacaacgtccaaaacgagcagtacagccacgaaatcaatgggttcaggtggccgccagttgagcctgctcgagatgctggacacccattatgaaaagggttcggcctcgaagaggccacgaaaatcacccaactgcagcaaggctgagggttcagcaaagagtcgtaaggagatcgatgtgaccgacaaggacgaaaaggacgatattgttgactaggtgatattgcactacaggattgttactgcccccaaaattgaagaggtataaaatgtattgtagataactttaaggacatatttagggcattttaaagtaggatcattgtaagtcgaataaagtgaaattttttttttttttttaattatactattctaatctgcaaagacaattttactgttaaatttgtataacattgattgattaatataatttgttatatcatgcaaatctagcttttattatgcgaaatttgtagttaaagccagtaaagtttctttttatttaaccgaaaccttttgtttattttatttgaccacaacaagaacatcaacaacaacaaccacgaaaaaaaaagcgaatatatatttgtttgttcgtatatatatatatatatctaagcagatc

SEQ ID NO: 5265 - protein, 768 aa, DROSOPHILA
MQEFRSHLIFPIFQKVYQSTANRRRASASVLTNRLGKALCLNCARMSKSPDGGISEIETEEEPENLANSLDDSWRGVSMEAIHRNRQPFELENLPPVTAGNLHRVMYQLPIRETPPRPYKSPGKWDSEHVRLPCAPESKYPRENPDGSTTIDFRWEMIERALLQPIKTCEELQAAIISYNTTYRDQWHFRALHQLLDEELDESETRVFFEDLLPRIIRLALRLPDLIQSPVPLLKHHKNASLSLSQQQISCLLANAFLCTFPRRNTLKRKSEYSTFPDINFNRLYQSTGPAVLEKLKCIMHYFRRVCPTERDASNVPTGVVTFVRRSGLPEHLIDWSQSAAPLGDVPLHVDAEGTIEDEGIGLLQVDFANKYLGGGVLGHGCVQEEIRFVICPELLVGKLFTECLRPFEALVMLGAERYSNYTGYAGSFEWSGNFEDSTPRDSSGRRQTAIVAIDALHFAQSHHQYREDLMERELNKAYIGFVHWMVTPPPGVATGNWGCGAFGGDSYLKALLQLMVCAQLGRPLAYYTFGNVEFRDDFHEMWLLFRNDGTTVQQLWSILRSYSRLIKEKSSKEPRENKASKKKLYDFIKEELKKVRDVPGEGASAEAGSSRVAGLGEGKSETSAKSSPELNKQPARPQITITQQSTDLLPAQLSQDNSNSSEDQALLMLSDDEEANAMMEAASLEAKSSVEISNSSTTSKTSSTATKSMGSGGRQLSLLEMLDTHYEKGSASKRPRKSPNCSKAEGSAKSRKEIDVTDKDEKDDIVD

SEQ ID NO: 5266 - DNA, 5947 bp, DROSOPHILA
tccagcatcccgagtttgcccaggccatcatagactttgccagccgtaaaaacaaggcgaaattataaatacggcttaagtttattaccgtctcagtgattttgtccgcctattttaaaacccaagagatatgaatgctaattcttgtggcacaaacatcaaagcaaatagacttcttagcgattagattagggacataatgtgtgccttttgcaccataaccataggttaatctcttgcactatctgtgtatgtacatatgtaccaatatattgccaaagtgctgattaaaaacaattgaagaacgccacctacctgtttgtgaatgaatcgcacagctgtggtcaagataatagaatgtgtaatatatgaataaatatataaatatattttaaattccatcgatgttcccgcccttctgcgaaattcaaattggattcatgtatagttcactttattattgcgtacatacgagtattcgtttattaacatatcctttgatgcttctgccgcgagtgtgtatgtatataatatgtatatgaccgtattgcactttatactagttcaacattgagtgagtagttcccccaggagctctgagatccttgccgcacaagccgtgattatgaactggtggtgacttagattacactacgctttacattcctgtatcaactagatctatatagatctagatctaggccagaccatgaactctgactgtgagacactctgctagggaaattcgttggcctctctccggatttcaaatacactcgagcttagtccttaatcctagcttaatcctacgcgtgcctgctcatgtacaaattgatgatagacgtagaaacatatctataatagccagttaaacttaggctgcgttttaagttatttccaataactgcccctccaaattcaaaaactttacaattaatcaacaaaaagagctacgggagaacgatgttctctcaatttacctagtcctagttaagctaccttagctaaactccccccttagactatttagcacaaggagtgccattgcatgcagcatcaccatattccaccacgtgctgtgccatccaaccgcaccaccatgatgcagttcggcgaagctttcgcctggaagagattgctgatatgatatgggttcctactctagatgaatactctacaccaactcaccgttcagaatgtgaaccactatggtgaagttctggaactcactgatggagcatgtgtagttgccggaatccgttttactgatcttcgctatcgagagcgtcgagttggctccatcctccatcagttcggttttgacgctgcgaggatacgtaataaatgaaccttactgatggtgaccccgaccaagctaaattcactcacctcactcccccgcgagtaacgtcgtagttaaggatgttgtccatgtgcttccagaagaccacggaactggtcatggccacgtttcgcaccacacaggagagctgtagcgtggaatcgatctcgtagtacttctcctgcagcggatcacccacctcgtccactatcatcactttcggagctgtgttaaagcatactaaatccctttcttgctacccatcagagagttggatattcaccattaacgtgcaggttgatttgaatgacgcgtggcggatgcgttgagatctggcactcgtagatagcctcgtcgtccttcttcacattggttatcttcagtcgccagttgtttgggtactggaactccatcttgtagcgcttatcacccgtatacgtgtgcatgcccactgtcagcaggtccagggcgttgccattgtccttgccctcgtcctgcgtgttgtgccgcacccaagagacctgtttttaaagttaaataacatacatttttatgttataccaactaaaaaggatttatctttttgagactaagtaatgaacctaaatatggtgaccccgaaaaatcattcaattcgattcaattcgaatagcatctcataatctaaactcacagtcttatcctgcagcagtgagatcctgcagttcaggtgaatgctggagcccgcctgcacggtgagattggtggcctgaccaatccgctgcacatcctcgaagtgggggccatacctgcacagaatcacggaatcagctcgttttatatctttttttttttaattaaatagaaaaggaaatttaaggattctaaaatccgactaagctcgtttaaaacgatggataacctgctactgctgatgtggacttaataaagatcttatggctttcagggattttatccaactcacctctgatcgtgatgatggtgcttattggccgaagagaacgtgtcgaagatgtagttcagcatgggtgcgtccgtcttctggcccttggacagtggatgcttgctgtccaccttgacagcggagttgcggacgagtccggtgctccggttcctcgccggctccgtgggcgtggccaaggaggcgttgctgctcgacgggaggccggatgaagtggtggccactgtggccggcactaaggcgttaacattctggctgccaatctgctggaaggaggcgttcttcttgtgtccggacgaatcggggctgctctttggtgaaactgtgcccgatcctgcctgcagggataacgattccatgtcctggcccttcatggaggaatcctgatccaggatcgccaccgtagatgtctggctctctgggatgacataatcgccatctacgccatcatctgaatcctctgcaaaggagttattgattttagtgaaatctatgtttcggctttgcgggaggagaggaggagatgtgggcgagacaattgatgacattgctcaaccactcaagtgtgcgaacagctatgttcacaaaaatagcattacacttaaggatgatttattcttactttcttactgggaccatttggcaattgaaggatacacagaaaaagaaaaatgaaaaatcgtttgagtttaaaacgtaactttttttagcattctatttccagctataccataactaaacatagtttatggtttttataacaatagtcatgttcacaatacgactgtcgcccctattaatttgtcccccactgtatctatagctatatgtctatatgctaatgccaagttggccgatatttgtggcggagtttgtttgttcgttgcgaatacactgggacaatacaaatgtttagtttactacgccaaagctaaacaaataaatatttcgcagtcatcgcatgtattgaaatttaggaaagttaaatgttctgtgcacaaaatttaatttactgtttaaaactttaagtgctttgcctctgcaaataaaaaacttcaaactcggaaatttttgggtcatagtaaaatgaacaaacaagtgaaagtttaaaaactattaactggactgtaaattcattaacttccttggaacttagagaaatttatcaaaaacaaatcctttatattctttatacatattcatttccggctcttcatagaaaatgtttgaaaatacttaggaaaatagtatttcctaatatgagcattttttccagcgaactttttgacagcaaactgtcattcaatttatacaaaaacaatttgcataatattttcaatcaaagacactttattagtttattattatatttttcacgcaccaataaactttaaaatgttgtggggcttttctgtgcccaaaaaacagacacattactttaatctttaatcactttcacttgcaatttcaacttctgcgttttttttttgaagttttaacccctttcatttcacttaaaaaaccttgattatgtgctgacctcctttcggaaaccataagtttcagtttctgaaagaggtctcctttcatgtggttaaatcaagggtatatgaaattccagaaggcattttggacacgatgattgcacgtacaatggctgcgaagcaattgagtcagcaggataattgaaaaccaattatataattatgcattaaccgcattgcaaagctagcgggtagcaatttcgcaatttgcctaccgtaactactccgtaacgtggacacctggttgtggatgtgggcgtgggcagtggggggcgtggctggcgttgtttgcagcggaaccttggtcgtttcccgtggctcaaccaaggcatccagcgactgaatcatgttaaccgagtcgtaaattgtcttggcctggacgagtccggagcccatgatcgttgcgatgaggaggagcagcctgatcaggttgggcacggcgcaatcgaggtgaaggtcacccctggatgatgagaacttggtggcgtctgtcgttgatttagttctgggtcgcgttcttgcagctggttcattcaaacgcattttgcaatctcaagtagtcggctctaacaaactgcattggactcgactatttccccttcttgtgggtcacctttttggggtcacctatggcgtctcacgcactttggccatttgtcttttcttgcctgctcgttttggtttggccgtcacgtagatatcaacttgattaatttcacatacagcagggatatccttattgattagcttaacatgtgctctaggaacgatcgttacgatttcgaatcatattcgggattcattcactttcggggctcactgatgcacacgcttgtaatgcaccgtttgtaatatgcacaggggacacagaacggaacaaggacacaaggattgaatccggacaggatctgagggaaatgcattgggcagcggacctaatcctcatgcattcttcagttgcaccgaaacgaaggcaggtcgcagtgacggctcgaactgcatcacgcaccaaatagacgacaccgacttggtcgaaatcgggagtacggatcactcgtccatccggttctttgcgaagaacgtctacgcggttgaaggcttcgccaatgactgcttaaggaactgggtcccaattgttgttaatgtcctgctcgtcctgtgctcggcttcaccacaggatgatctctctcttttcccatctgcgcatgtccttgtttcgttaagtttttcccctctatggtgtctctaggagtccttttaaaaggactcacctttcggagttaacgaggggtgcttatgtgggggaattcgtttcggaataagcagttcaaggcagtcaattgataaggtatataaccattatcaggtatcaaaatcagacataaattattttttgactatatttatgggataaaaaatgtatctatatcataatagattgattaataaggatgtatatgggtatattggattgacctctatttggaactcgcaacgtatggaacaatttccataaagcagttgcttcttcgtttctaaaatttttatagaagtaaaaattatggtaaagcaagcgagtataacatactttccataaatgtgctgtgctacaccagagggcgccacttatttagaacacagtataacctcccttaattgtttttccccagcagaaggttatagaaacgaagttccaaatgaagattcaacattgtggcacgcaaagtattatatgtctcttaggcttcaaactctcaacgatatatgataagaagttagtcaacgtgggtcttcactgtccatttagaccaactcgctgaagagttgttatagtggatagcatgggggatgattggcctctgttgtggctctggtctggtatctcggacttccatttcagacgaacctcgtcttatcagacgcgcgagttaagtccgtgatcgagggtggagccttttgtgaagatatgatgtgtaaatgtatgaaggtttttaagtttcagcagatagttgtagtgtgaagatttccaataaagaatacgactgactttcttgaagttcaaaatcagtatgaagtttattgtcagagagtggctactcg

SEQ ID NO: 5267 - DNA, 2135 bp, DROSOPHILA
agccttcaaccgcgtagacgttcttcgcaaagaaccggatggacgagtgatccgtactcccgatttcgaccaagtcggtgtcgtctatttggtgcgtgatgcagttcgagccgtcactgcgacctgccttcgtttcggtgcaactgaagaatgcatgaggattaggtccgctgcccaatgcatttccctcagatcctgtccggattcaatccttgtgtccttgttccgttctgtgtcccctgtgcatattacaaacggtgcattacaagcgtgtgcatcagtgagccccgaaagtgaatgaatcccgaatatgattcgaaatcgtaacgatcgttcctagagcacatgttaagctaatcaataaggatatccctgctgtatgtgaaattaatcaagttgatatctacgtgacggccaaaccaaaacgagcaggcaagaaaagacaaatggccaaagtgcgtgagacgccataggtgaccccaaaaaggtgacccacaagaaggggaaatagtcgagtccaatgcagtttgttagagccgactacttgagattgcaaaatgcgtttgaatgaaccagctgcaagaacgcgacccagaactaaatcaacgacagacgccaccaagttctcatcatccaggggtgaccttcacctcgattgcgccgtgcccaacctgatcaggctgctcctcctcatcgcaacgatcatgggctccggactcgtccaggccaagacaatttacgactcggttaacatgattcagtcgctggatgccttggttgagccacgggaaacgaccaaggttccgctgcaaacaacgccagccacgccccccactgcccacgcccacatccacaaccaggtgtccacgttacggagtagttacgaggattcagatgatggcgtagatggcgattatgtcatcccagagagccagacatctacggtggcgatcctggatcaggattcctccatgaagggccaggacatggaatcgttatccctgcaggcaggatcgggcacagtttcaccaaagagcagccccgattcgtccggacacaagaagaacgcctccttccagcagattggcagccagaatgttaacgccttagtgccggccacagtggccaccacttcatccggcctcccgtcgagcagcaacgcctccttggccacgcccacggagccggcgaggaaccggagcaccggactcgtccgcaactccgctgtcaaggtggacagcaagcatccactgtccaagggccagaagacggacgcacccatgctgaactacatcttcgacacgttctcttcggccaataagcaccatcatcacgatcagaggtatggcccccacttcgaggatgtgcagcggattggtcaggccaccaatctcaccgtgcaggcgggctccagcattcacctgaactgcaggatctcactgctgcaggataagactgtctcttgggtgcggcacaacacgcaggacgagggcaaggacaatggcaacgccctggacctgctgacagtgggcatgcacacgtatacgggtgataagcgctacaagatggagttccagtacccaaacaactggcgactgaagataaccaatgtgaagaaggacgacgaggctatctacgagtgccagatctcaacgcatccgccacgcgtcattcaaatcaacctgcacgttaatgctccgaaagtgatgatagtggacgaggtgggtgatccgctgcaggagaagtactacgagatcgattccacgctacagctctcctgtgtggtgcgaaacgtggccatgaccagttccgtggtcttctggaagcacatggacaacatccttaactacgacgttactcgcgggggagtgagcgtcaaaaccgaactgatggaggatggagccaactcgacgctctcgatagcgaagatcagtaaaacggattccggcaactacacatgctccatcagtgagttccagaacttcaccatagtggttcacattctgaacggcgaaagcttcgccgaactgcatcatggtggtgcggttggatggcacagcacgtggtggaatatggtgatgctgcatgcaatggcactccttgtgctaaatagtctaaggggggagtttagctaa

SEQ ID NO: 5268 - protein, 525 aa, DROSOPHILA
MRLNEPAARTRPRTKSTTDATKFSSSRGDLHLDCAVPNLIRLLLLIATIMGSGLVQAKTIYDSVNMIQSLDALVEPRETTKVPLQTTPATPPTAHAHIHNQVSTLRSSYEDSDDGVDGDYVIPESQTSTVAILDQDSSMKGQDMESLSLQAGSGTVSPKSSPDSSGHKKNASFQQIGSQNVNALVPATVATTSSGLPSSSNASLATPTEPARNRSTGLVRNSAVKVDSKHPLSKGQKTDAPMLNYIFDTFSSANKHHHHDQRYGPHFEDVQRIGQATNLTVQAGSSIHLNCRISLLQDKTVSWVRHNTQDEGKDNGNALDLLTVGMHTYTGDKRYKMEFQYPNNWRLKITNVKKDDEAIYECQISTHPPRVIQINLHVNAPKVMIVDEVGDPLQEKYYEIDSTLQLSCVVRNVAMTSSVVFWKHMDNILNYDVTRGGVSVKTELMEDGANSTLSIAKISKTDSGNYTCSISEFQNFTIVVHILNGESFAELHHGGAVGWHSTWWNMVMLHAMALLVLNSLRGEFS

SEQ ID NO: 5269 - DNA, 21921 bp, DROSOPHILA
atggaggataaggatgggtaacatggatacaagtgttatccttaggcggctaattgatgcagcgcacgtggcgtatgcgttatattccgttcgtgaatattcggcatcgatggtttatatatatttaacactatgcaaatgtgataaatatctgccaaggtccgctgtctttttttttccagaaatattcccttctttctccttgtaatgtaattaaattaattttacataatttggtacatggccatccagatgatgttctgtgcaacagtggcattcaattagaatggaatgcctgcaaattcaataagtcagtttaaattaaggaaaagggaaatgtattcgatttctcaaaaattaatattaaaattttgacagaaattttattgtacaattaaataaaaggcgagtaaaatattcagcccactgtgcagcacatttcactttcgttcactgtggcgaaacaaaaggaaacttatcgaaacgcccacacaacgacggccttgactatccatctattttgcgtgaagagcggatatggatgtagatttattcgcatctctatagccatctatattcggcatctgcctatgcgagactatgcagaataaatatatgtatatgtatgtacatacctatgcctggttttcaggtaaactccattcctcatttggcgaaaagaaggaaaagaacaccttctcctgaaataaaggatatgcgcgacaagaggcgattactactttcaaattaacatataacataacatattaacatattaatttattagatcatatcttatcattaacgaaactttctgagatactttatatgctcgcaaacgcttgattctgcctgttacatacgtttcaacaaatctagcataccctcttactctacgtgtgttatgggtataaaaacaaaaaacaaaaaaaatatatatctgcatctgccagttcatatctaaattatttattacaccacttcaatttgtctctttcagggcgatataactcacggatatgcaatgcgaggtggctggcgtgggcgtgccgcaacaagcaaatgcgagaagccaaacaatagagacagagtcatccaattagaaaggccctacagaatcgaataatatatatactcatatatatatatatttaagcacgatagggatctctgtcaagatggctggccatcagtcgctggcacttttgttggccacgctaattagcagctggccaaaagcctcttggggcgccactggaaacggtagtatcataagcgttagcaacagcagtggcaacaactatgcattcacctcggaacacacggatcattcggatcacaatgccaacgactccatggaatatgatgcagagagtgtggccctcgaacggatcgtatccacaatagttcccgtattctttggcattatcggattcgcaggacttttgggcaatggtctggttattctgggtaagtggcaagcgagtctcaaaatttgtttaatcaatatctcttcccaatcaatctgaaagtatgcacatgatatcagatagatacagtgttttggcatcctccacaaaatccagctcgatataatcgtagatatcaatcgtagtacgagtgggtcgcaacattttcttagcagtgtatgcccccttcttgccacataaaaacgccgattcgcatccgacgaaacgctttcattagcgacctctggcaaattatgcgtaataattgcaaatgaagctgcaaaggacgaaaagcaataaggatgaggtgctggagagccataaaaacataaaatcgcttgcaagagccgcgcgttcatgcggaagctaattgattttttatatccccattaagggaatgggcgaataacggtgaggtgtgaggctgtgaggcatcgttaagattgcaatttgctagtattgcagaaatttaataggccagcagaggcacgcgctgcgttgcgattcatattcgtagtaaaccaaaatcaaagtgccaataagtgcattaaatggaaagtgcaatctcctatgtttttgttttttttttgcacaaataatagcaaataataaatatgccttaatttaatctgctctcttactgcagcaagaagcaggcaatgaaagaatgtcagggggtcaaagaaaggatcttacctcaaacacttgagtgcctgtctgtgtgtgcaagtggacaagtatatgtgtgtgtgggtgtgcatgtgtgtgtgcatgtgctctatcaccgacacaacagactaaatctcaacaggcaaactcattttgcatgcactagttttcgtctctttttttcgctttgttgttttctcgttgcaaccttggtgtgaaattctcagaggccatcttacctcacctgcaatttgccgtgtgtgtgtgtgtgtgtgtgtgcgtgtatgatagtgtgtgtgttggttggccacaccatctacccaccggaaaaacaaaaacagaaaagaaacaagctcaaacagctcgaagctcggtagaagaatctaaaaataagaaaatcacaaggcaaaaaaaaaaaaaactgaaaaaaggcggctgctctaagtgtagcggtaaaactaaacccccgacgtcgagcactaagaatacagttttttttctttgtttttcgccagccacctcttgactataagcttccgttcaagcctttctcttaagctcgaggttccgccataaaaatgaaaatgaaaacaacttgcagcaatggagacataaccaaactcaattagaacaaattcacttgccaaggattgtgaacccattttttacatctagttaagggctgtaatattttcatagtctttcgaaaagtaaaagctaatatttaaatttggctggcctaaagcttaattatttgtggattgctttctttaactagaattctagaaaccgagtatccttgaaagttatacaagaaacaaatgagtgggtcaaagtgcaggaggcgttggtgggtcacgcccacattggccaagtaaaaaagcgttttccatgtcgcttttcctcggtttcctatcgcattctcaacgctgtcaggccaatggaaaagttttattaaagtcgcaagtggcatccaattgcccacggacaaccacccacaatttccacagcatcctgttccaattttactcgggatgctgctgtgtggaaaagccactttgtcagctgcgttggcggcattatgataaatgatttgtaaatgaacgtgtggattttatggcaaattatgaaaggcgaaaattagagccactcaactgggagaacttccgagtttgcctactagtagtgccgccagttctaggcaaaactactagtctcgagaatacactgaaaatatgatgggctcgttagcacgttagttatatgctagaaaagatatgatgtaagacttatctcaaaaatattttcaagtgcacatatattttactatgaagatttagctgcctgcgttgcaaagtgcaagcgtttacttatggcttatggaaagataatttgtcaaaatgccattacacttgaccagttgaaaaaagaaaaaaaaaaacgccaactgacatcatcatcatcatcatcatcagcagcagcagcagcagcaggcatcattacaacattatccgtgtgtggatgataaggtgctgcattttatggctgatatgtacattttcacacccaaacgcacacgatatattgatagatgaaggcttgctgccttgcatgggcattaagctgaaattgatttaatttcagcattgctctcgccgcaaaactatggcatttccccagatacttttggcaaatgtatgcataagtttacacaactctgacacaaactgtcaacagcaatttgtgtaaatctgccggtcgaagcaaacaaaccgcaacacgaatccaaaacacacaatcctttatgcttataattataatttatgtttcaagaatattccgggctaggcaatgtcacttcaatttggcattggcctttgtcgctggagaacggttcagtttgacagcgttttttggtctaccatttgccaaaataaatccagcccagtggcgaatgtgcaagccagttgaaggggcccacaaattcagttataaaattgtaattgcctagacgaacaggaacgtgactcagtccccgtaacgataatcctgtctcaccgatatccactacgttttccggccacaggagcggtatgcaaagttaataggatttcggatggagcaacaaagttttgaaaagacttttgaagaaaaacagctcaagtttttcacaatttttttggcttgaaatgcttgcagctaaaaaacaaactcgaaatttaatttctttgcatttatatacactttcaaatcactttttcattgaaactaaaaaaaggtagagcatgtgctagttgaaataacttccatcgtagccaacaatacctgtgtgtttttttttctgttgtcctgacggagctggcaaatttgatttggtcccaaacccaaaacatgtttctcattcgacacagtttcccccttttttttttgttttttttttcgcctggcatcctttttcgacagatggaaccgcaaaatcaacttaaatgagggcgtaatacaatttcgtgggatatataaccgaaagggttgcagatagaatggatgagttggcgttaagagggagttgagaaaacgagaaaaccttatacacctgcatccataccgacatcctgtgaatccgtgaaggccacgccaaggacgccgggcataaattgtttgcacttttgccattgttattatggcttttcgcaggaaaatgtatttaccattctctggatttccaccatgcatatttgcatgtaaacacggctaggggaattctcgattggttcatggtgcaacaagaacaaattgcttgcattgccacacatgattagaaactgaaaacatgattggccgcccagaaagttctgcgaaataagttcgaaatcgacttcaattaatagcatcaatatagatttttcaaatccattaaatggaaaacttaatgatttggattattcctgttatatgcagagtaattttggcctactaccaagccagttatgttttacttcgtcctctcagctacaatttcctttttgttgcttatttttcgcaaaatattcgaccataaaagcagccaaacatgtgcaccggatgagtcctgatgcgaaggatacacctgagtctatgcttcaaacactttattatcgaaaaaatgccgagtacttttctttctggccaaggctcaaacttttgaggggcttgcatgtctccttcaggaatcatattaaaaaaaaaaccaaaatatgttgcagcctgcacgtagttgcaatttaaggaagcacatgcgagtattttagtgtgaagccccgtaaaaacgtacgcacaaaagtatgcaatgaaagaagcatttaagaggcatatggtcacatgcgtgtgtgggtgcgtgtgtgtgtgtgtgtgtgtgcacaaatccacaaggcgtacgaatttattatccagcgttgatagtgataaaatttataaccagcattgagcgaactgcctaaaagcgggcagtacaaacacaaacacggccgcacacagacaaacagacagacagacaaacaatgcccaagtgagccacacacaaacatacacacacacacacacacacacagagaggcaattgtgcgtgggtggatgggacccgctgtcccactcacttgctccgtctatctcgcttccactctccgtacattcgtcatatttatgcttttttatgggccatgtacaattttattgttttacttttcaatgcaatgtctgccggggcctggcacacacacacacacacacacacacactaactcactcgaatgtgtgcgaatacacacacacatacatgccacagcattgcgcaaacaagtagtacacaaatttttcttatattgctgttgtgtgctgctgtgttctttcgaaaatcattcgagtatagattgttaaactttcgctttagaatagtactattttcatgaccacaactgtatcgaaggacttggcaaatgggaagatacccactgaataccggaatacatgcactgcttaggaccccaaaacccgtttggcttgctgaacaaaggcagctgaacaggtataaaataccagagcttcgctgtcttcccacacaggatatgcataaggacaggactttccggcttgcgataacgtttggaaatgaaatctggacattttacattttaatatttaaaaattgcaagctgaacaacaaattattaagtgaaaatcatgcaatcattgattgaatacacaaagtttaaaaatcgtaaaaggactctttcagttttgggaacacccttctttagttttatttgccggcacttttgtgtgcattcctgcgcatacattcttttgtcctaaacccaaccccccccccccccccccccccggttttgacccccatttttaggcccttttcgacccttctatgtctccatcgttcgcacacacttgtggcgcactcttgtcaacacatatgcgcccatgatggccgcaccatatggccaggtagtccccagatcccacagccctcatcctcatcctcatccgcatcctcatccttgtgctcatgctcgtcttatacccatgcccaagtgtccttgggctttttggcccctggcaagtggccataggttttttattcgcccgctgactgatgcaaatcccatcaataatccaacaatgctgcgccgctcaagacgagatgttggtatatattataaaatagaaatggcgacaaagaaataaagaaaccgaaaacaaaagaaaacgaacttactttaaatatattgttaagtaaatgggatattcaaagggttttcgcattctatagtaaaatgatttcaaaaatattttatataactgacagttgtcagttttaaaatttattactgcgttgcaaaagtttaccgtgcacgatgattgactgcttgtcgagttgactgattcacatttgtttgtcaatcataatgatgagctcacgatattgatgtacaatttcatgctgctaccatgtattgtcgtcaatttgaagggtgaaatggcattgttaaacgagtgtctgtccaatctatacagatgatttacctgatatacatatatgtacatatctatgtatataatataatattatggttgtggtgcaaaacaaattaaatatggcaaaaaaatattacagcttatcccagctcgaataatatttagaaattaaagaatataagaagaagattatctaaaggagcatttgctcgatagcgtgaggctcttgaatttgaatgacattcgaatttattgccctacggctgttcaattcaattttaatgaactcaggaagtcaggtgcatttgattggattattaatgtgttttgataggtacttagttatggttgacactttgtgtggtaagtgataggaatgtatcttaaaattaattaatagaccacaatttgattgctgaagcaaattaagatatacaaataattaaaaccaaagtgtacaactctgattcaacacctgtttctcatccatggacaatgcacactgtaaagcagttaagcataaattattaacaaaataactataaatttaatatataaattgcatcacttaaacaggaccttcagttgaaatagtcattgtaacgagagtccctgggctctgaactcaattcagtgtggccataggaaaatgtttcccagaaaatgtgctcttcctttttttgatttatctaagttcaccccgcacactcgccttccctttgtctggcattaaatatgtatttgtataggctggcaaatgatgcaaataaaagtagagaaagtagggaaaataaaacaaaaataatgaaggctggacaccgctgatttcagagagtccgaagattgcagaaggatccacaaatgggccaagaaaaggacaatggaccaagggtcggttttgtaaccggatattcatgtgccaaaacaggatgtcttttctatctgtgctgtgcattaaaatttaaattaattgccatagccgagcgtactgtacttactgtacgcactttgcttggcaacaacagcacgaatcgaaatattcctgcatatcctgcatagcaatcatttatgcacttaatggggcttaagcccacacacttggccgcctttaattggatcataaaacaaaggcctcgaccgaatatccaaactcgaacggaactcttacattgagatagccaattttaattgagaataaatttctatgccattaaaattatgcctaccgtaatggatcgtgtccaaataatcaggcagtgtgattttattatgctcaaaaacaacgagcttaagacacgtaaattacttcactttagtactcttcaaaataacaacacaatttttgtttacttctcgagaaaatccaacgaatgaggaacctaattaaatcgctgcgcacttgaggcgtgaaatttgcccacttaactcctgagctgcccccttaaattttttattacccaaataaacgtatttcaattgtttgcttggcaacatatatactactaatttgaaataaataaatactaaatatgtaagcacattttttttttcataaaataaataagccaaagttcaatgcgaagaatgttcttaaacttaagcttgaaagttaagacctatactcacttttgtctactaaatcagagctcaaattgcgtatacgccgtgtcgacttgaagtgcatcaataacaggctaaaaacaggaaggaaaatacgggcaacaagagagggctaacgaaagggcgggggaaatgggtggggcattagagtgacattaaagttcaataaaagtgaatttatgcccccagatgcgagtgaacaggaaatcctgtctagaacacaggcacgcacacacccatgtgtgtgtgtgtgtgttgtctgaatatttgtttatttgtaagctcctttagaaccaacgtgacacgccccctgattttttttttgctttgcaggccagcattaaataacaaacgtttttttcgcttgaagaacttttgccgcttttgctgccgtgccccataaattatgctacactttattattttgtaaaattccagccagccaagaaggaaaaaacaaaaaaaaaaaaaataactggcacactttttcgtgtaatggcgggaaaaagttaatgccgcaacaaaaacgccacattttggacccttttttttttttttgtgcgaatccttctcgtgtgtcaacaggacccgcaaaaagttggttaaccacagtgactagtgggtgtgtagtgggtgtgcaccgccttctgttaattgataaagcctcagaacaaagttgccaactgaaccccatttaaagtagaaaaaaaaattcttttgtcatgtttttttattttttcttgctgtttgctggtaacataaatatctcgattaattggaatttgtatataaatttatattatatatatttgatatcctatcatttacttacgccatttggcaatttcatgcaaatacttatgccaaaacggcaaaaatttgctaccaatctgttgccaaaaactattcagcaataaacaagctgaagaagcctaagagaaaagtttggcaagggcttaaacggggttacagttgaagcacccaatggtaaacatatgttgaccttttctatatattgtaatataatatcaaatatatcgtgcattttgtattattgtcaccaattttttttttactgttacaatcctgttcctgctgctgcttattactctattgcctgctttttgcttatttttcacgtcaagcgagtttgcgctttttgctcaccttgaaaacatcctgtgctaaatatatatttgaaaaggaaattgatttgcggtcgcggcattcagctctggcttatacacttagaacaaaatgccttgagcatcgattaagttatataaacaacgattttatttcgtattgtacgttgtattgtacaaaagctggtgtgctttttttgcagtgtatttcgcgacatttcccatttcctcgagaaaatttgctacctgtattgccgtacatttcctcttcttttactcttcggtgattgttagcctcttgagtttgtacttcctttggcttcgtggcccacatcaatccattggcatcaacgcatcgcattctcgtatgggcgaaataacattttgttacagtttcaacactgttttagccccactttcgttccgtttctatatgtacatatatacatatatattttctttctctccctttcttgaatgtctttgtcacgcttcctttgtgtggagctacataaattgttggctaattgcaagtggctcctttggccaagggaaaatatgaaaaaatgaaaaaaaaaaacaaagtatatgaaaaaatagaaagcggtgaagcttaaaggagaaaagggaggttccttaaagaaagaactgcgttcggggaaagcgagtgaaaagtgaaagctgagcacgacaacaaagactcaaaatggtaacaatgaaagacttctgttctatcgccattccacctttttttgactttttaccccgcgcacacacacacgctttcacccacctacacaaacacacacaaacacacacattgacacacacacaaacatcgaaacattccgtatagaagtctgcgttgtttgctgccttttgtccgcgtaattggtggaaaagaaaaactgggtggaaaattgtgttgtcgggtgcttgctgccacaacagtaagtgaaagctggaccattgccatgacagcaatattcttaacgttatgagctttcattttatttaagaattttctagggggggggggggggaaataaaaactctcacaccccaactggcgactagcacatgtgaggttaagctgcatttgggccaatttgataaatttattaaaggagccaaataggaaaataaaattgaaagaaaatctcaaagtatatatttatatacgcttattacctaacagcaaagcatttcgtctggagcctttaaatcaaatcgaaatacatatatttaaaaaatgacacttataattgatttcaacattcgtgtaatatgattaaggcatcttaaccggtcttgaaacaagtttatatcccaatttgcatgtcgttgcagtggttgtggccaaccagcagatgcgctccaccaccaatctgctgataatcaacctggccgtctcggacattctgttcgtcatcttctgtgtcccgttcacggctaccgattacgtgctgccggagtggccgtttggcaatgtgtggtgcaagtttgtccagtacatgattgtggttacgtgccactgcaggtgggtgtctatatataaatatatatatatatatatatatgttgcataaccgcacatactaacccgacttgtgacttgcagtgtttacacgctggtcctgatgtcctttgatcgcttcctggccgtcgttcatcccgtgactagcatgtccctgcgaacggagcgcaatgccacactgtgagtgtctcatccaaagtcctacttctttcgatcaatcaagtgcatctcactaatcactttcagtggccacatagtatcattgtcaaatcaaatcagaaaccaacttaagaaacaaatgaatagggcgcgcggagatggcacttttggttctaaagtgtaggtaggccatatcccacatcatctagagtaattgcatcaatttgtccgggctttgtaattagctagctctacccacctgaaagccttgttcgctggcctctgaccttttgccttgtgccatctgccttctgccacccgtttcatagatacttcgtctcagttacacaactgaatctttaaaagtggaaaaaactttagccgatagcgagtcgtcaacaaatttcttgcccaaccgagacagatttgcaagaaattaaaaacccacaaaaaaaaacggaccaggaatctttgtagaatttttttttaccctaaatcaagttgaaactttgtggcatgttccttgattaaaaaacttgcaacgcgtctaaagaaacttgaggtaaaaacgaggagtaatgaaggcgaagtaatatcaaaaaaaaaaaaaattataaatgctagcctgatgatttattttcataaacagctccattcaaagttccaaatatattgaaaccctttaatatatatatatatgttacttcttacatatttcacttcaactttcacatttccttagggccatcatgtgcgcctggataacgattgtgacgactgcgattccggtggcactttcgcactcggtgaggatttatcagtaccacggaaatgctggcaccgcttgcgtcttttccacggaggaggagatctggagtctcgtcggttttcaggttagtttcttacactagcttcacacacgagaacgagaacttagctgacaactttataaacttgagacaaacattttcattatgatatatatggtaacgcaaaaccaactgaacacacaaagtaaaaactttaaagcaaatgggttatagaaaatgtttaaaataaataaatattacccttattatgttctgtgtacattccacacactttgttgtgacggcaaatcgcttattgtcgaaatcaagtcatgttttccagcgatttcccagcaaaactgcaatatatttgctacttagaacgagcacttgtctccactccgccccacgcccacttctgagtccttcttttgtgaaatgcgaggattatatatatatatatatatatatatttatatatagtgggttcttaaagtcatgttcaagtccgtagattcacaacaaacagctgtgtgcatatcgatttttgtgactgctttaagccattgatttgtttgcaagcagggaattttaatcaatcctgcctacagagttgttcaaagtgtgaccatatttttggttttattgcactttttgcagcactgaaacgaaacaaacggccacacttctgactaagccactgtgcatccacgcaatgcatcttgcatcttcacagatccccattaagggtcaaagggtacattcagcaaagtggcaaacagcagagtgttcagtgccatattttgcaattattctcgcccgtcttctaagcgaaagatagcgcacaattccatcatcattatggtctagattcccccacatagatcagcgttatcccaaatggtttttccgttcgcttgagttgctcatatttgttcgccccccccccccgagtttgttatgtttattacttgaactttttgtctattaatcaattcgggggacttcgaaggtcttccttcgagtgtaatttcatgccggaaggatgttacaccggaaaacgctacagttgttttggccctctgggcgccgggtgaagggaagtggatggaacgagcttttgtcgtctatttccattcacacacagcggaatgaatgagccactgacaagctacactgagacaaattgtaattaagtagtaaaataaacgaagaaatgctcgattgaatgacttaatgattgtggtgcaccaaagtcaatgatggtattacttgcagtaatagtagtagtagtagtagtagtaggggaatttcgctcagtgtgaaccaggtgacttactggctgcttgactaactgactgactgactgactgactccccgagttattcggtatcttcagctaatatgcacccgagaattttgccggctcacctttccactcaacatgaaaaccaactggcacggcaaattgcacagttcgcttcgcccggggttttccgacactgacacggataaggatacggatacggcgtgtgcttcgtccttatgtccctgtcctgccacgcccccacattccccacacacccccacacatcccctgactgtgcacataaatcgcaattgctttggaaaacacgaaaaggaaaccgcaactttgagagcttagtacaaagtgtgaatgctctttgacggaatggaaataccgtagacacaatcaaaacttgacaattaagccgggatttgggattatgtttaaatatttttcagattatttcaagtatgatttgcttatggtatttgtacacagactacttcgtattccattccatttatttgtgggttcttttagaaagagcattataactgcaatgatacgccatttgagaggcggtgccattcttagttgggatttgattttccgcttttggaagtagccattgtcagggtcaaaacatacatacatacatacatacatacatacatacacatagtgtattatttcgagccttgcctggcaataaaataaaaatggatcaaacttgtgcggcgcgacgacgcatccgtcaaagcaaaacgaacagtgaaactaacgaccgaattgttgtcatcgtaaagaactcataaaactgaaacaaatagtctggaaaggggcggtggaaatgggaaatgagcggaaaatagtgtttatctttcaatactgtgtccaaaaaaaaaaaaataaaaataaataagagaaagtttatttaagttgacttctgttccgctttgctgaagaattcgagttgaactttaccataaatcacgacgccagtgaatggcttaaatttaacaaaatatatatgtaaatatacaagcattaatgtctgacgaattaattttgctattactagtcaactttattaaggctgtaaaaaaaaaacggccatcatttgatgtccgcaatatggcagccaatttataatttcaatcatgtttttggtaaatttcctgggggtaaatacatatacatacatacatacacatacatagatacttaggtatatatttcgaggaaaatttgtgtgaaaacgaagcactcatcagagcccgtggcaagttgattaatttcgctgagtgtcaagttgcgtttatggacaaatcccaggcgcaatttttgggtcatgccgaatattaagtatacgcccccgccccccaaccatttatcatgtggcacacacttcagtttatggctttttattaggaccagcataaagtttaaaggccgattgaatgaataaaaaaaaaaaaaaaaagaaaaaaaggaaggaaatacaaaaagttcgctactcaacttttggcaacttttatttatggcgattgtgctgtaaaatttcatggtgtatatccatcgattcgggcatctctgtatctttgttttctggcatattttgcatctttctatttcctaagtggaagttatataacccccatggcaaagtttatagttgcgagcttagatctagatatattatacgcacttgtctcggaccattgacacagcaaaatggctggctcatccatttccaaatgcaattgggcacagcagaagttccatttcgaaatgtttgctaatcatttggcgcgaaaatgactttcagttttgttttgttttcagcttaaaatgacaatttggctaaaagcagctgagttcactttcgtaacaactagcgaattttgaaagtggctaaaagaagctggaaactacaatatttgcaaatcagagttttctcttctttttttttgtggcttcagcttaccgattaactgaaaacaataattaaaatgccttttaaaaatatataatgaaataagagagggcacaaagccgattaaattaagctagtccgcttgattgagcgcaaaaagatcgaaaggtggcactttcaatcatggaaagagaataattaaaagtataaactgcagagttcatcagatatacatatagttaacatcattgtcgcacattacaaacaatttccttggcaatcaacactttaattgatgcatcggtaatccatccacaccctcatctcagctaaatgaataagtaattctttatgggtttcgatttgcggatacttatctttcaaattgcagaaagtgaaaccatagtacaagaatatatatgtatatatatatatattaagtacataaaatatataaaatatatgaacgtatgtaatggcttacaatataaacaccttttttttgggcttcttgtttactaattaatgggtgtaatgggtgccaaatctggtgagtggacagtgtgacatccggttacgagatgcagaacacaattggatccttattcgtggatacgatttcgagaagtgtcatcacggattatgtcactcgtgtcctggttttccttgccgttgtcgataacaaacgacatgttcattggccatggtcatgggtaaatcccaacaaagtgatttcgattccgtattccatggctgtcaggcattcgcccaacacccaccgcccaccgcccaccgcccaccgcccaccgcccttcgaaatttatgaatgtgaaggcgggccaacgattattattaacaattgcggtatgcgcgatttcatcggtgcaccggcacaaaaattttacatttcagcacatatgtatgtacatttctcaattgatattacaaaaagaaatataaatatatacaccgtttttttctttttgtgtactcatcgcgcttcctttccttttccgtttcattgcgcccatttcgtagcctacaattgatatatgtacatatattttgacttgcacctttgtgcatattttgttgctcctcattgccagttttccgattttccaccggttttatgatggtggtggaaaggggggttgggttgtgccttaatcatttacacctggctgccgactgcctgccacaaaggaaaaccgattccactcgaaagttgaggcgccgccaaatgagttttaagcctagcagctcaatggaaatatatgcagagccccagaaaaaaaaaacgaatgaagccccaaagaattcaaccggattcaaggttccaaatactttaaatatccattgctggctggctgctctaaaaagttgatcaaagtcccaatggggcaaagaaatcttaaagttcgtaaagagcaaaatgtactcaaaactattagatcgatttattattttaacttcgtaataaccacaggcataagttaatatcacttgaattatctttacaattatattccataactcggcgattaatttcagtgcgattcaatcgaaatatgtacagatattcaaccggaagccagtagcaactactcgaattttccgccactttttgaccaacgccactatctcatgcacacgcccattgcatggatatatatgcatataatatatatgcatatatctttttgtctgttgggaatacggctaagcggcagctggtaaatggaaatgggggctttggttttttttttttgtttttttggggggaactggcaagtgtctggtactcatatctggtatctggtcagcattacgggtcagcgcttctgacaatttccatgcagaaacaaaagtagctgacatggcagcagatggcagaggaaaagccttcgaccagttacagcaacataaaacaaaagtagttgtacaaaaaaaaattgcaaaataaatatatacaacttaactgaaagcatatatctatggttaggttttctttttgaactaaaaactattcttgtaagtttaaatctaagcctagtagctacctaagcccatggctactgacgaattcttcagacaaaaatcaatctgttcctgatcttgcacagacgcaacagaagatatttatttacgcattttccgcattttgtatcttatttcaggtctcattctttctatcgtcatatgtggcaccattgacgctgatttgtttcctatatatgggaatgctggctcgtctttggaaaagtgctcctggctgcaaaccttccgcagagtcacggtaagtaaatgtatatcccaacaaactccaacacacgaatatcgcgtatacgccatgggtgcggaaatattccttccgcttgtttcgttcgtcgtatttttttttgtagctacgcacctgctgccatgatgaatgcctttttattaggctgtgcgtaaagctcaggagctttggctcatgcattttttaagtggccaggtcaacgagaccgaatcataagtagaaatgtgagcgatattcccgcaggtttaggaaaatgtgagcgatattcccgcaggttcaggaaaatgcgactaacaaaaaaaaaagcccagtaaaatgacaatttgttgtcatatttcatgctacaaaacataaaactaaaactttaaacattatttcattacttctaaggtaaacctaacattttaaatagccacaaacaagttgctcaaactacgctccgtggataaagcgagaaagtaaagttaactaagccacacagacgtgatcggggtcagcaaccatcaatttgaagttgaacttgcggccactttaaactttgcgaaaaaaaaaaccttgcccccaagttcggttttatcataaatcgaaaactattaaattgtgctcactcttcgtatgaaatgaattcaacttaaataaaaaatattatacaagcatatttaaacctttgcatattttgtaaatacatatgtatatagtaaaattacttgtgatatttttgagtcgaactaatgtaaagacaacgctaagaaataaaaaaatatctaagaaatagctagttcttttgatctcagcttaagactaaaaatcaaatgtaaattggtttgagaagaagacacaatatttgtatttcgggtgattcttaagattaggaaaagattcaaagagagcagtttggagcacccaaatacatatatgtacattgggttgcgttttaaatttgaatggaaatgaacttgcgacgagttcgcaatccgcacgcaaagttcataaatcacagcgcggccaatgcaaaattcagcaactgaaatgcggcataatttatatgcactccagatatccaagtctatacatatgtgcattgtacatatatatccatattagtatatagtatatctcgcatatatcactaactctccgatttctgtttgttcttgttgtttcttgatttcagaaagggaaaaaggcgcgtcacccgaatggttgttgttgtcgtattggcattcgccatctgttggctgcccattcatgtgagtacaataaaacacctggcattaagtgcaaataatcaaaaatgcaatgcaatgcacaaggtgcatagcaaatttgccaaaatttaccaaaacagtaaacaatcgatttgttatatagctaattaagattgaacggcgaacagcaaatgaactcatattcatatacctatattggtagttgttaaaaaaaaaaaaagaaaaataggtcaaggtcaagcttaaatgattttgtaaactttattaaaaacttctaggcattcgaatagcaaagtttcaaattaaattctcagcctgcgttgcaagaaaattacagggctcataatcgatttattgtacttaaagtttcagccaccagtttgagtatcttaaattggcaatgggcggcaacagctgctggtaaaattttgttggcaaacacaatggatgatagttgcgataaattgacatttgcgatagtccgatattctgagtatttgctgaaatgcttaataagccagcagctgctgctccttgagttgccagcacagcaaagtgtttgcacaaaatcaatgtgcttgcaaattacaaacgaaattacaattacacagacactttggagcgcaagaaatgcgccaattgcatctgtcatatggcagcatatggcaactaataatgtaaatgcaggcaactcaaatcaaatgatgaacttaaaatgttttaattttaaatttaaatctatcgcttaaagtatgcaacagcctaagttgtgcctaatttactgaactttcgttgcttaaatctgcctaatgctcctttgcaggtcatcctcgtgctaaaggcactgaatctttatggcggcagccacttatcggtcattattcagattatatcccatgtggtggcgtacacgaattcgtgcatcaatccgatactgtatgcctttctatccgacaactttcgcaaggcattccgcaaggtgggcaacgcatccatccatcaataaatttatgatcattcggtaataatgtgatatcgatcaacttgcaggtggtctggtgtggaagtccgccacctttgatgaccaatcaacaggtgaccaagacaacgcgaactgcaaccggaaacggaacgtccaatattgaaatgctctaagcgggtatgtacatacatacatacatcatacatacatatatgcatacatatgtatgatcttacactccattgaatatttcaattgaatttacccataatatttaactattaattatcttattattatattatcttatgcttgcagctcttgaaagtaaactaattgagatggtcacaacatttttgaaggcgacttacaaactcgaaacagaaaatatgaatttaaaactgacaaagaaaacataaaaacgcggcgcatataagttaactatagtgtatatatagtaaacaatgtatgtctatgaggagaatataattttccgaattatgaaatgtgattgttttgatagtttaaaatgtgtacgcattatttcactaagaataagacaaccgaaaaggtatattataaacacgcatatattctatgttaaattttaatacgattggtttctttttaaacattgagcgccgtgtaagttgcatttgtggcctagaacttaagtatttaacataataaaatttaatttttccaaaataataaaaaaaaaagaaaaaataagaaagttaaagcttaaaactcaattgtttacattttgcacctgaaatattgaaaatggcaaacaaaatctgcaacagatatgctgtaaatttcctgagacagaaatcgatgagagttgacacactaattaatgattagaattgataagcagtgggatttcttaaacaatttgtagattttcgtgttataagcaagtcatatgtcatttagccactaagcgtttaataatataaaatcaattaaaattaattaacagaaaagacagaaaagaaaagttattacagatttacatgaccatattgagaagattagatttaacaataaaacatttggaattttttctgtttgtccattgaaaaaaaaatattttgtttgacagataagcacaaagatagaagaaattgatctagcacgtaagaaagtttttttttttattaccagagctgtaatttaagatgcaggtaaatgttttagattcgaggtctaataaaattattactaactaatttctcgtactagcgaagctcaatttcataaaaaattatacttttcgttatgcaaatttaattaatcattaaatagatcaaataagtacaatgctttcattcgcataaattatagaaacattccatttcctactccaattattattaattcacaaattagccaattgttgaccatgtgaagttggtaaacgtttaagttaatcatgtaaattacacgtatatatagataaaacaatttataaacattttgactattatataagtgacattattaaaacatttatattgctttgttgacttttccttttgcatggcttcggccttgccgaatttaaatgtggcacaaaaaaaaaaagatatacgaaaatgggagtaggtgttgctagtgaaaaatcactttaaatctgaacaatggaacataaaatattagaaacaaaaaaaacaaatttttctttaataaatttctagattagtttactcgatttttatgc

SEQ ID NO: 5270 - DNA, 1778 bp, DROSOPHILA
ggcgatataactcacggatatgcaatgcgaggtggctggcgtgggcgtgccgcaacaagcaaatgcgagaagccaaacaatagagacagagtcatccaattagaaaggccctacagaatcgaataatatatatactcatatatatatatatttaagcacgatagggatctctgtcaagatggctggccatcagtcgctggcacttttgttggccacgctaattagcagctggccaaaagcctcttggggcgccactggaaacggtagtatcataagcgttagcaacagcagtggcaacaactatgcattcacctcggaacacacggatcattcggatcacaatgccaacgactccatggaatatgatgcagagagtgtggccctcgaacggatcgtatccacaatagttcccgtattctttggcattatcggattcgcaggacttttgggcaatggtctggttattctggtggttgtggccaaccagcagatgcgctccaccaccaatctgctgataatcaacctggccgtctcggacattctgttcgtcatcttctgtgtcccgttcacggctaccgattacgtgctgccggagtggccgtttggcaatgtgtggtgcaagtttgtccagtacatgattgtggttacgtgccactgcagtgtttacacgctggtcctgatgtcctttgatcgcttcctggccgtcgttcatcccgtgactagcatgtccctgcgaacggagcgcaatgccacactggccatcatgtgcgcctggataacgattgtgacgactgcgattccggtggcactttcgcactcggtgaggatttatcagtaccacggaaatgctggcaccgcttgcgtcttttccacggaggaggagatctggagtctcgtcggttttcaggtctcattctttctatcgtcatatgtggcaccattgacgctgatttgtttcctatatatgggaatgctggctcgtctttggaaaagtgctcctggctgcaaaccttccgcagagtcacgaaagggaaaaaggcgcgtcacccgaatggttgttgttgtcgtattggcattcgccatctgttggctgcccattcatgtcatcctcgtgctaaaggcactgaatctttatggcggcagccacttatcggtcattattcagattatatcccatgtggtggcgtacacgaattcgtgcatcaatccgatactgtatgcctttctatccgacaactttcgcaaggcattccgcaaggtggtctggtgtggaagtccgccacctttgatgaccaatcaacaggtgaccaagacaacgcgaactgcaaccggaaacggaacgtccaatattgaaatgctctaagcggctcttgaaagtaaactaattgagatggtcacaacatttttgaaggcgacttacaaactcgaaacagaaaatatgaatttaaaactgacaaagaaaacataaaaacgcggcgcatataagttaactatagtgtatatatagtaaacaatgtatgtctatgaggagaatataattttccgaattatgaaatgtgattgttttgatagtttaaaatgtgtacgcattatttcactaagaataagacaaccgaaaaggtatattataaacacgcatatattctatgttaaattttaatacgattggtttctttttaaacattgagcgccgtgtaagttgcatttgtggcctagaacttaagtatttaacataataaaatttaatttttccaaaataataaaaaaaaaagaaaaaa

SEQ ID NO: 5271 - protein, 290 aa, DROSOPHILA
MRSTTNLLIINLAVSDILFVIFCVPFTATDYVLPEWPFGNVWCKFVQYMIVVTCHCSVYTLVLMSFDRFLAVVHPVTSMSLRTERNATLAIMCAWITIVTTAIPVALSHSVRIYQYHGNAGTACVFSTEEEIWSLVGFQVSFFLSSYVAPLTLICFLYMGMLARLWKSAPGCKPSAESRKGKRRVTRMVVVVVLAFAICWLPIHVILVLKALNLYGGSHLSVIIQIISHVVAYTNSCINPILYAFLSDNFRKAFRKVVWCGSPPPLMTNQQVTKTTRTATGNGTSNIEML

SEQ ID NO: 5272 - DNA, 2980 bp, DROSOPHILA
ttgtcttgtccttgccaccaaaattgagctattcggatgccagccagaatatatgccaaaagcgaggctaatgcctcgatgccaggacctcgcatgctccttcgcaggtctcagcttctacatgtagaaaaatgcccacagtcttggttaaatcgagacatgcgctttggcattctaaaaatctattgctgatttcagacatttgctaacaagcctcttagatgccccaaaatctttagaggattaaagcgtcagtcgtccatgtgcagctaatatcgctttgcgtccgagttacttggagcatttgcaagtgtgtggtttccctaagtgtacgaactagtaagctggcttagcacaccaggctgtggacaggagcaggggccactggaacaggcggtatttgaggagcccaacacaggaatacatccacgcggacacacgacattattgttgcgaaagacagcagtcgggcggctgagcaggagccaacaattagtgttgacagacattgcactctgccaaagtccccggggcaatttgaaggcttgttctacacacacgcacacacgtgcacagctgtcagtgggtgtgcacacccatatagccaaacacgcccaatccatgtactcgcatataatttgagttccctccgtgtcgtgtcaaactgctgcgaaatttatgtttagtgcaaagtgcctacagagtgccacacagaaaacgggttttttttcgcccaatagctcggcttgtattacagtgggtattacgacaagtgcgacagctcacggtgattaagtggccagcgaaaatgaagaacatttttctacaatcctccatcccacatgctgtattgtaaaaaccattatatgacatttttgttgttttttttttttttttattattgtaaatgcaagcagctggaacggcgggtgctatctcaaaatgtcggcagccttgtcatgctggccgagatgcactccaggcataacattccagctggctacttcgaaaacatctttgagtgtggtccagaattaacataataataacgagttgcgtcagagttttctgggtttcctcttgagcacactgaatttgattcatcacatccaatctgaagttcctccccagcttcttcacggctttgtcttttggatgtagctctcgggcagccaagatcatcctctccaaacgatcctctacaacgagcatcttcgtcataccactcgaactcacgggaacttgattcattgcatccaatctcaagttcctccctagctgcttcacggctttgtcttttggatgtagctctcgggctgtctaggccatcccctccaaacgatcctctacgacgagcatcttcgtcataccactcaaactcacgggaacttgattcattgcatccaatctcaagttcctccctagctgcttcacggctttgtcttttggatgtagctctcgggctgtctaggccatcccctccaaacgatcctctacgacgagcatcttcgtcataccactcaaactcacgggaacttgattcattgcatccaatctcaagttcctccctagctgcttcacggctttgtcttttggatgtagctctcgggcagccaagatcatcctctccaaacgatcctctacgacgagcatcttcgtcataccactcaaactcactggaatttgattcattgcatccaatctcaagttcctccctagcttcttcacggctttgtctttcagatgtagctctcggcgagccttgatcatcgcctccaatcgattctctacgacgacgattctcgttatacaaatcgagctcatgggaatccgccctcatcaacgataggctatagaaaatgtacgcgaagaatataaccagggggccaaacaagtaaaaaagtgttagaagaatatcgaaaatttgccacattcttattttcagaaatgtatttataatgctttttagaagctaccggcttgactgtgagaagacgaatgaaatgtgaaactttctgttcaagtgacatcaaatgacaattggattgaaatcaatcagcctacttagaataaaaaattttataaatacaattactttgcagatattttagtggcagctcttatttaaagtcagttaattatatatttgctgcaataattatgagattaaacagctttcaatttataaccgcttaaatggattaattaaacttggccaagaagtcaacattattaacatgtccaaattgctgtatgctccaaaggagtctgggcagcgaaatgtgggtggctgtgtgtgtggtggtggcttttgaggaggcggaggagatggtggtggaggaggcggattgggtggccggtggtcgccccatcttgcatatgctaaacaatttggggttttggtgcagctgctcgcaacgacctcaggagcagccgcagtcaaaattcgcccgaccgccacccactcattaccacaagcagctgcatgtgcaagtaatgtttaataaggatggaaacggggttcagaatgtgtgggtggaacgaagggggggttggtgctagctggtgtttccgccaaaagggcggagggcaaatagtccttcactcaagcgattggccaatttgcgtgcatatgtttgtgttttgtgctgcctagcccatgttaatgaagtgctatgtggtgaaccgaagtgtttttccaaatccgctaagatttgctctacactttctaatagggttattcaaactgttagacttttgatattgatattggccatataacatatgatatcaccactatagattgctcattttgaccttgtttaaaaacctacttgctcgaagctgtgtcaatttaatattgaaattgaaatagacaatgccagtggcacgagtcgctctcttggaaaatttacaaaacatggtgcttgccttgaaaacaaagtggcacaaaaatgacatcacacaaaagaggatttat

SEQ ID NO: 5273 - DNA, 980 bp, DROSOPHILA
gccggtagcttctaaaaagcattataaatacatttctgaaaataagaatgtggcaaattttcgatattcttctaacacttttttacttgtttggccccctggttatattcttcgcgtacattttctatagcctatcgttgatgagggcggattcccatgagctcgatttgtataacgagaatcgtcgtcgtagagaatcgattggaggcgatgatcaaggctcgccgagagctacatctgaaagacaaagccgtgaagaagctagggaggaacttgagattggatgcaatgaatcaaattccagtgagtttgagtggtatgacgaagatgctcgtcgtagaggatcgtttggagaggatgatcttggctgcccgagagctacatccaaaagacaaagccgtgaagcagctagggaggaacttgagattggatgcaatgaatcaagttcccgtgagtttgagtggtatgacgaagatgctcgtcgtagaggatcgtttggaggggatggcctagacagcccgagagctacatccaaaagacaaagccgtgaagcagctagggaggaacttgagattggatgcaatgaatcaagttcccgtgagtttgagtggtatgacgaagatgctcgtcgtagaggatcgtttggaggggatggcctagacagcccgagagctacatccaaaagacaaagccgtgaagcagctagggaggaacttgagattggatgcaatgaatcaagttcccgtgagttcgagtggtatgacgaagatgctcgttgtagaggatcgtttggagaggatgatcttggctgcccgagagctacatccaaaagacaaagccgtgaagaagctggggaggaacttcagattggatgtgatgaatcaaattcagtgtgctcaagaggaaacccagaaaactctgacgcaactcgttattattatgttaattctggaccacactcaaagatgttttcgaagtag

SEQ ID NO: 5274 - protein, 310 aa, DROSOPHILA
MWQIFDILLTLFYLFGPLVIFFAYIFYSLSLMRADSHELDLYNENRRRRESIGGDDQGSPRATSERQSREEAREELEIGCNESNSSEFEWYDEDARRRGSFGEDDLGCPRATSKRQSREAAREELEIGCNESSSREFEWYDEDARRRGSFGGDGLDSPRATSKRQSREAAREELEIGCNESSSREFEWYDEDARRRGSFGGDGLDSPRATSKRQSREAAREELEIGCNESSSREFEWYDEDARCRGSFGEDDLGCPRATSKRQSREEAGEELQIGCDESNSVCSRGNPENSDATRYYYVNSGPHSKMFSK

SEQ ID NO: 5275 - DNA, 4742 bp, DROSOPHILA
cgcgccactgctggttgcgctcatagatgttggccaggtggaaacgtatgccagccacttgctcttcgaacgagatgacgcgcggattgaccttttccagggtgaagtgagaaagcatcttggacagatcgtcaggcaacttgctcagctcgctgcccacgtcgttaaggatctgccgcgagatcaccaggctgacgtgctcgtttacaatggcctccacaaagagccggagcccatcgatcagctcttggccggtgttcgtcagcacagtcttcagcagctggcggtacttgtccgcctggtccttgtgcgtgccagtgaagttgatcaggcccatcagctggctacgcagagctgccgtcgagatgccgtagtttgcggccatattcacttctatacccaattacttcgcactagctaaaaacaacaacgcaagctcatccctgttatcgatagctcgcaaatccggccgggacagtgcaggacgcctagcttttatctagctggtgttggaaaatgttcgatggtgatactcagcttacaaatttagttcgcaatttatattttatttattattacctatctatctatgacttctttccatagataggttttgagtaaagaccaaaccacatgaaaatgttgacataaaaaaatgtatatctgaggataaaatttaaatattacataacataatataacatatttaaaatactatctgcaaagcgcaagactcttaccaaggcttacatttgttctactcgtattatcttccaataaaatatttatggaataaaatatgccaataaaatattggcagtatttcctttcagcattcgatttttaaaggaaggcctataatgattcggtaaggtttaaaattcacttaatgcttacacttgtacatactttcccaataaattatttaaaattggcgcttcaatccaagctgcagtctatcggtgactgcattcttgaaatatcgatacaaaaatgacagtcggtgcgctgcagtaaacagtgaaaaaatatacttgtgtcgagtccaattggactgcgaaaactgcattaaacaaagaggtcaaagacaatctgcaagtggtagtagctagagaattactagaaactcgagatattcagtgcaaagaccaatccattcggatccttgtggaaaagggtggaggccaggcccacacatacatacactttcagcagcagcgcagctcgccgagtgaagtggaaaatgtatccaaaggagtccaatggccgtttttgcgagcagatatgaacggaaattgccaattgacgacacccaggcgctgagctgcgagataaccgccgtccaggaggtcgccggacatacggtagctagatcgcgagggggcagagctgctgaccccagcgaaaaatcaataattgttgatgatttcatgcaggcggcgaatgtgactgtgtgtgtgtctgcttgcaggagtacctgctgcgcgtgtggaggggcgccagcaacaagaactactggaccgttttgcgccgctataatgacttcgaccgactggacaagtctctccgcgtctccggcatcgagctgccgctgcctcgcaaacgcatctttggtaacatgcgcccggagttcatagctgaacggaagcaagccctgcaagagtacataaacgccgtactaatgaatcccatattggcatcctcgctgccagccaagcgctttgtggatcccgagagttactcgcagtcctttcacggtgagttaatttgctagtgaagaagaaggtcccctaatcgatgtcctccaattatcttcagaccatgccgtgcagaatgctatgctctgcctgcgcaacgacactacgtggtcgctgggtggaagtatgggtgccataggctggcgcctccggaagcactactttaaggtcactacaaagccgccggagaagagcagcaacaagcaactggttaagagcggttcacagacccatcagagcaaacatttcgccgctgggagcagcaatggcagcggtcactccatcgacgccggaaccttggatcccgggtcagaggtggtggctgagtggctggagtacggacccgacaagtttatcgacgaaaaagaaatcgggggcataatgaaaagcctgatgggcctgcagcatccgcacatcgagcccgttctcctggcagcccacaccgaaaacggttgcctggtcataagaaagtcagtagctcacgttgtctaacttatacattatataacttaatatatatatccacttagattccacaagcatggtactttaaaggatgttttgtgcatggccgcgaatccaaagaatacatttcttagcaagtacggcaatcccaaggggcgcactgcgctttcaatgaaacaagtggctacatatgggaagcagattctagaggccctaatatttttgcactcgaagggatacgcatatggtaagatgaatccctattgaaagctactttttatttaataaatgaaaacattttaaggtcatctacattccggaaacatagtgatagtcgacgattgtgttaagctactggacatcgagaactttttgctgggcgttccagcgttttaccggccatttttcatgcagcacagtaaaatccatgccatcgagaccattgatgtttactgttttggtcatgtcctcttcgaaatggccatgggttatcctctgcaggagtctgtcgtgcgccagatcaccgaatgtcccgaagcgctgagtaagttttttttttgtttttttgagataactaatttctaaacttgttatttttttagaatgtcttctggagagcattctttccaaggaagcttgcaaagctggcctgccgactctggagcaattgttgggtcacagattcttcttgcaatacgcttcaaccgagagcgccggcgccgctgccaatgctgaaaagccgtactttaagctatcattgaacgccaaggagctgcttaagcaggcggctatcaagagcgaaaaccgcctgcgggacgaacagaagtctgtgaagaaccaaaagcgcattgtgcgtgtccaggaactgatgagctccgaggaggagaagcggaagtccaagcagaaagccgttagttacccaaaacccaaagcccgaacacttcacgtagtttaatcttacacagctcattttggtttctttttcgtttatttcaatgcttacgtatagaaactagagcacaaacagtcgaagctaaagcagcaaagttcaatccaaacaaacaatggacgcttgtcgcttgtggctgcgactgcagcagcagcttcctcaagcaccacggtggttggcgagttatgtgggaccgactccttcaaccgctccgacagcacacccgaggagcccaccacactggccggcatcaaatgtagttattcaaatcagatcacagcttcaaattagtagtttgttggcttatttgttcgaacttacatgactcacttccgatctcgtcttcctttcagcaccgccgctcactccggggccacacttgggcagcatatatcagcaggaattgccgtcgacgactggcgcaccggtggaacggcagtcctccacaccgaacatgctgtctgaggatgcggagggcggtgatggcgacgagccaacacgctccgctcttctggagtccatctgcaagtttaaccgcggatcgctgcgcaaagtgcgatccaacgactagctgcggaactgtgggacgaataaatattacaatttttggaccaaatgtggcgttatgaaataacgataccatcaaaaataacttgaactaatcgaattccaaaagctacattttagaggcatattaagaaacagaatactagcagatcgaagacaccgctgagcatagaatagtcccaaaacaatccagcaattactatatgtattaacgaaacccactgattataattattgcatcttatacgtgtccaccatacattgcatacgatttatcggctaaaaagcatgtgtctatttatgtaagcaacaagttacatgtcactcacttgcgatcagattcccgatcgcaactaaagctttacctatgtgtccactacacgactgatactaactttggtacgaatatcttaaatgaaaaatggaaacaaagtatctaaatctaaaaacaaaaatctagaacacgaatgaaacgacatacagagaaatttaaactttccaatatttacataagtctgcaccaaaatttgcacgagacgagacgagatgctattcttttatatggcccactggccaacatatagtacatggatgttagatgtattaagaagtcgttcctcggtgttgtgctatctccaccagcgcggttttatcgccaatttttagtagttgtactgcaggttttgtaactgaatttgagtttttatatatttcgaagagccacgaatgtttcaaaaacactcaactgttcgttaacgtctagacatactcggagtcctggactcaaacaagtggaagcaacaggacaaagacaaggaaatgtggccaagaattcgcactgttattgttttactttttatagataatttattaggtgtgtatttaaccgaatccgagcgtatcgagtatatttatatttaaatatgtgtatatagatgtaattgatgttttgtggccacaagagcaccaccacccagtaataacgtaaatatcgtaacatggat

SEQ ID NO: 5276 - DNA, 2238 bp, DROSOPHILA
tcggtgcgctgcagtaaacagtgaaaaaatatacttgtgtcgagtccaattggactgcgaaaactgcattaaacaaagaggtcaaagacaatctgcaagtggtagtagctagagaattactagaaactcgagatattcagtgcaaagaccaatccattcggatccttgtggaaaagggtggaggccaggcccacacatacatacactttcagcagcagcgcagctcgccgagtgaagtggaaaatgtatccaaaggagtccaatggccgtttttgcgagcagatatgaacggaaattgccaattgacgacacccaggcgctgagctgcgagataaccgccgtccaggaggtcgccggacatacggcggcgaatgtgactgtgtgtgtgtctgcttgcaggagtacctgctgcgcgtgtggaggggcgccagcaacaagaactactggaccgttttgcgccgctataatgacttcgaccgactggacaagtctctccgcgtctccggcatcgagctgccgctgcctcgcaaacgcatctttggtaacatgcgcccggagttcatagctgaacggaagcaagccctgcaagagtacataaacgccgtactaatgaatcccatattggcatcctcgctgccagccaagcgctttgtggatcccgagagttactcgcagtcctttcacgaccatgccgtgcagaatgctatgctctgcctgcgcaacgacactacgtggtcgctgggtggaagtatgggtgccataggctggcgcctccggaagcactactttaaggtcactacaaagccgccggagaagagcagcaacaagcaactggttaagagcggttcacagacccatcagagcaaacatttcgccgctgggagcagcaatggcagcggtcactccatcgacgccggaaccttggatcccgggtcagaggtggtggctgagtggctggagtacggacccgacaagtttatcgacgaaaaagaaatcgggggcataatgaaaagcctgatgggcctgcagcatccgcacatcgagcccgttctcctggcagcccacaccgaaaacggttgcctggtcataagaaaattccacaagcatggtactttaaaggatgttttgtgcatggccgcgaatccaaagaatacatttcttagcaagtacggcaatcccaaggggcgcactgcgctttcaatgaaacaagtggctacatatgggaagcagattctagaggccctaatatttttgcactcgaagggatacgcatatggtcatctacattccggaaacatagtgatagtcgacgattgtgttaagctactggacatcgagaactttttgctgggcgttccagcgttttaccggccatttttcatgcagcacagtaaaatccatgccatcgagaccattgatgtttactgttttggtcatgtcctcttcgaaatggccatgggttatcctctgcaggagtctgtcgtgcgccagatcaccgaatgtcccgaagcgctgaaatgtcttctggagagcattctttccaaggaagcttgcaaagctggcctgccgactctggagcaattgttgggtcacagattcttcttgcaatacgcttcaaccgagagcgccggcgccgctgccaatgctgaaaagccgtactttaagctatcattgaacgccaaggagctgcttaagcaggcggctatcaagagcgaaaaccgcctgcgggacgaacagaagtctgtgaagaaccaaaagcgcattgtgcgtgtccaggaactgatgagctccgaggaggagaagcggaagtccaagcagaaagccaaactagagcacaaacagtcgaagctaaagcagcaaagttcaatccaaacaaacaatggacgcttgtcgcttgtggctgcgactgcagcagcagcttcctcaagcaccacggtggttggcgagttatgtgggaccgactccttcaaccgctccgacagcacacccgaggagcccaccacactggccggcatcaaatcaccgccgctcactccggggccacacttgggcagcatatatcagcaggaattgccgtcgacgactggcgcaccggtggaacggcagtcctccacaccgaacatgctgtctgaggatgcggagggcggtgatggcgacgagccaacacgctccgctcttctggagtccatctgcaagtttaaccgcggatcgctgcgcaaagtgcgatccaacgactag

SEQ ID NO: 5277 - protein, 563 aa, DROSOPHILA
MRPEFIAERKQALQEYINAVLMNPILASSLPAKRFVDPESYSQSFHDHAVQNAMLCLRNDTTWSLGGSMGAIGWRLRKHYFKVTTKPPEKSSNKQLVKSGSQTHQSKHFAAGSSNGSGHSIDAGTLDPGSEVVAEWLEYGPDKFIDEKEIGGIMKSLMGLQHPHIEPVLLAAHTENGCLVIRKFHKHGTLKDVLCMAANPKNTFLSKYGNPKGRTALSMKQVATYGKQILEALIFLHSKGYAYGHLHSGNIVIVDDCVKLLDIENFLLGVPAFYRPFFMQHSKIHAIETIDVYCFGHVLFEMAMGYPLQESVVRQITECPEALKCLLESILSKEACKAGLPTLEQLLGHRFFLQYASTESAGAAANAEKPYFKLSLNAKELLKQAAIKSENRLRDEQKSVKNQKRIVRVQELMSSEEEKRKSKQKAKLEHKQSKLKQQSSIQTNNGRLSLVAATAAAASSSTTVVGELCGTDSFNRSDSTPEEPTTLAGIKSPPLTPGPHLGSIYQQELPSTTGAPVERQSSTPNMLSEDAEGGDGDEPTRSALLESICKFNRGSLRKVRSND

SEQ ID NO: 5278 - DNA, 4326 bp, DROSOPHILA
acaggataaactctcgctgactgcctccaacctgcaatcactcaacaatgactttgtgaacaacaccaatgcttccggcagtcaattgggaagtctcggcaaacccaatgagcactactaccacagctaccgcaaaaacattccgctggatcccatttactacaataccaacggtctaggagcgctggaggaaccaccgagccttccaccgccaccacctctgccatctgcagctggagcctcaatcctgcacgcgggcggtggaggccactacaaccccagttaccaacactccacgacgcacctaaacgacgttggtcacgctcccgatgaagtatacaacaatcgaccgccctcggtgcgctccagttactcgaattttcatggctcacggccactctccaccgcttacgggaatgccactggtgagaatgtattcgctggactgaacggagccagcgccagcccaccgcaggctccttgtacgccacccctctaccaacagcatcccatgcaactacagcagcaccaacagcagcagtatcctccaccgccgccaatggatccggcgcctgcttacgtcagcaccatgtcgttctccaaaagaactgcctctcgggaaagcattcgctcaatggcctttctcaacaacggcccgcccgcctacaatctgaattaccacacgccgcccgactcggagacgaccatgtaatttggttcgccctttgtctttaccgtcgcacatggatcttgaactataacacaatcatcatcaagccatcagcccatgcccaacacatattatatcttgtgcaacaagccaaggctaccacttggtgctttaaccacatggatagcatatacttgatcagtaaaataacgatatctgtagtgcttaatttatacgtaagtttctgtcgttttaccaaagtgcctttgtaaataaatacttaaaataatggatcggttatttaaatatcagaaaatattgttaatacttgattgtttatgttcatttatatttcttcttaggtaattggcttatagttttatacctgtagataagtacgtgctgtacttggtatcttagtcccttcgacacactgtaagatgtacgaaaacttaggaaactgcaaaagttggatatttgctccaatacttacattcatctgcatcccagcccggctcgatgtccagttgcttgttgcgctccttcagccacgtgaaaagtggggcaaagtactcaaggataccgcgtccgctcaactttcgttcaccggtggctatctccatgacatcccgccaatgtcgagtggctcccagctgcatcatgtcgcgaatcttttttcctgcttctttgctgtcgtagaaatcgcaattgtgaagtgggaaattgggatcaccgggcttgtactggccacttgccaggcaaaaggaacggtagaactggaatcccaggatctcggccaggaattttctgtgggtcccggggaatatgaaattcatgattatcaaaaacaaattatggaaactgacttggtattggaggtttccggatttagtcctcgatagaacttgaaatccacatcaaagtccttgttaagacgttgtaatggcggctgaactccggcgaatttgtcctggaggccccagtaagcgcagttatagtcctttactccgattcgcccgtccattacgtccacgaggaatttgtcattgatgaagtactggggcacggcgatcaaggtgtgcacacccatgcgaaacaggcggttaagggactgctcctccgtaaggctgtcgttcagaaggatgtggagacggtgcagatggcgtggagtccctgaagccagaataactgtttccgctatggcagctccaaatccaggacatggctccgtgtcgagaccaaagggtagttgcatcttgtagaggtggtactgcagttcagccatcgttccgtgaatctgcatcatcttcttgtagtctagtttggggcagtagcgcagcgccacgtccggcggaaagtaatatacctgcgacttgcactcagctccgccctcctcgtcgttcatccggcgcgaaaagcggtcgtaaaagatactgtcaccgaaaagttgtttctattagttctattagcacaattttatattttacgcgtgtgtatataatatttatataatataacctagttttttggaattactgtttaaaatggaaatacctgcttacaattttgaaacctgtagagcatatatacttacttcggcataaccattaagcccaacgattcaaaaaactcggcagctttgcggttgattttgacgggcgtcaccaggacctcctccagacgccgatgaacggagggcaactgatgctgtctgccctggtgcggtgtgcgaaagaactggtgaggataccagtcctgcgacaggatctggtccataatgggagcggagatggcgccatcgctctttgtgtccgcctttgggtaggcagcttgcacctcgcgacgcaaataggcgtgcagttctcgatatagcggcattatctcccacacgaccgcctccatttcagcttgaaagttctccgtgtcgtagttaaggtaccacgtgcgcgagggcgtcacatgcccgttgtaagtggcagcgatccggagaagcctaacgtagccgatgaacgtgttcttggccacgtccttctcgttaatggccctgcgccaggccttccagttgatgaccagatcctcgtatagcttggtgtgcatgtttttgttcatgatctgcgggtacatggccagcgaaccacgggcggagcagtcctcgtaagggcagaccaggggtccgttgacaaagttatggatctgacgtagaaggtccttggcctgctcgtagtcctttggccgcagtccctgcagctgcaacttggccattcgctgcacgcgcctacgaagaagtgggtcattcaattcagccactgacacaacgctgagattgcccgctaagtcgtaaaatagtcgataggtctccgcctctacctccagcttggagttgagaacctgtccgcccagaggtgactttcctttggccgtgagctgcacaaagatcctgcggttcagactccacacgtggcgcatgcggtctttggctctatcaagtatctgcttggtagccagttcatagctggactggccgattccgaaggtcacggagagcagaaggattagcgatactcctaaaaaaggcaaccgcattttgccttcgctggcttccgtttcgccttgataaggttatcggagtgctttcgaatgcgacttgggatttgcttccgactctgacgaaagctcgagcagaactgagtccagactgccagtcgagccgcaggcttatcaatctaagtccggggcattgagcttatctgtaattgggaaagaaacccagctagcgatctctccaagcaaacgttgcgtatacgttacgagcttggcattatttatacgctgagtgtgccagcccgaggcggaaatcgcagtgggcacggcggggaagacatccttacaccataatagactgattaacagctgctggttttgttagccagtggcccatattcaagcaaaatcattttgacatattccttccgaagaagagacagcggaggtagtcctttgccccgcggtgcaccagcggagcattcggaatttaaatcggagaaatatggggaagttcgtcgttcgtgttgcatgtggcacggcatttgtttatgccggctgacctacaagcaaacgtgagggcgcagggggactctgctcacgaaggcgagcgtgagagcatttcccgcacgagtccttttcgagagaatagggggaagttcgcgtgtgtattttttcatcgctctgcatcgtggtcgccctgcagattacgtcaaacggaaaggaaacccgttagccgagctcagtctccgacaaaccttagaaccgagcagtcgccatgcaagcgcacgtatttacagtggcccagtgtcatagtgtcctagtatgaagtgaaaaaatcaaggaatatggtgaaaagtgaaaagtgaaaggcagtaaaaagcctgaaagggcatggaacatagcgcggaactcgcacccctacagccgcacagtgaagcgcgttaccatcacaagtgcattattcggtgcgatgaaaattcttcagcgcccaaaaatagagtgaaatgtgtgctgcatattgttgttgctgctactgagttgcttaagggagggggagaggccacgacggaaactaacctacattttcgcgctctttcgcacgcttttgctga

SEQ ID NO: 5279 - DNA, 2046 bp, DROSOPHILA
agcaaatcccaagtcgcattcgaaagcactccgataaccttatcaaggcgaaacggaagccagcgaaggcaaaatgcggttgccttttttaggagtatcgctaatccttctgctctccgtgaccttcggaatcggccagtccagctatgaactggctaccaagcagatacttgatagagccaaagaccgcatgcgccacgtgtggagtctgaaccgcaggatctttgtgcagctcacggccaaaggaaagtcacctctgggcggacaggttctcaactccaagctggaggtagaggcggagacctatcgactattttacgacttagcgggcaatctcagcgttgtgtcagtggctgaattgaatgacccacttcttcgtaggcgcgtgcagcgaatggccaagttgcagctgcagggactgcggccaaaggactacgagcaggccaaggaccttctacgtcagatccataactttgtcaacggacccctggtctgcccttacgaggactgctccgcccgtggttcgctggccatgtacccgcagatcatgaacaaaaacatgcacaccaagctatacgaggatctggtcatcaactggaaggcctggcgcagggccattaacgagaaggacgtggccaagaacacgttcatcggctacgttaggcttctccggatcgctgccacttacaacgggcatgtgacgccctcgcgcacgtggtaccttaactacgacacggagaactttcaagctgaaatggaggcggtcgtgtgggagataatgccgctatatcgagaactgcacgcctatttgcgtcgcgaggtgcaagctgcctacccaaaggcggacacaaagagcgatggcgccatctccgctcccattatggaccagatcctgtcgcaggactggtatcctcaccagttctttcgcacaccgcaccagggcagacagcatcagttgccctccgttcatcggcgtctggaggaggtcctggtgacgcccgtcaaaatcaaccgcaaagctgccgagttttttgaatcgttgggcttaatggttatgccgaatatcttttacgaccgcttttcgcgccggatgaacgacgaggagggcggagctgagtgcaagtcgcaggtatattactttccgccggacgtggcgctgcgctactgccccaaactagactacaagaagatgatgcagattcacggaacgatggctgaactgcagtaccacctctacaagatgcaactaccctttggtctcgacacggagccatgtcctggatttggagctgccatagcggaaacagttattctggcttcagggactccacgccatctgcaccgtctccacatccttctgaacgacagccttacggaggagcagtcccttaaccgcctgtttcgcatgggtgtgcacaccttgatcgccgtgccccagtacttcatcaatgacaaattcctcgtggacgtaatggacgggcgaatcggagtaaaggactataactgcgcttactggggcctccaggacaaattcgccggagttcagccgccattacaacgtcttaacaaggactttgatgtggatttcaagttctatcgaggactaaatccggaaacctccaataccaaaaaattcctggccgagatcctgggattccagttctaccgttccttttgcctggcaagtggccagtacaagcccggtgatcccaatttcccacttcacaattgcgatttctacgacagcaaagaagcaggaaaaaagattcgcgacatgatgcagctgggagccactcgacattggcgggatgtcatggagatagccaccggtgaacgaaagttgagcggacgcggtatccttgagtactttgccccacttttcacgtggctgaaggagcgcaacaagcaactggacatcgagccgggctgggatgcagatgaattgtgtcgaagggactaagataccaagtacagcacgtacttatctacaggtataaaactataagccaattacctaagaagaaatataaatgaacataaacaatc

SEQ ID NO: 5280 - protein, 628 aa, DROSOPHILA
MRLPFLGVSLILLLSVTFGIGQSSYELATKQILDRAKDRMRHVWSLNRRIFVQLTAKGKSPLGGQVLNSKLEVEAETYRLFYDLAGNLSVVSVAELNDPLLRRRVQRMAKLQLQGLRPKDYEQAKDLLRQIHNFVNGPLVCPYEDCSARGSLAMYPQIMNKNMHTKLYEDLVINWKAWRRAINEKDVAKNTFIGYVRLLRIAATYNGHVTPSRTWYLNYDTENFQAEMEAVVWEIMPLYRELHAYLRREVQAAYPKADTKSDGAISAPIMDQILSQDWYPHQFFRTPHQGRQHQLPSVHRRLEEVLVTPVKINRKAAEFFESLGLMVMPNIFYDRFSRRMNDEEGGAECKSQVYYFPPDVALRYCPKLDYKKMMQIHGTMAELQYHLYKMQLPFGLDTEPCPGFGAAIAETVILASGTPRHLHRLHILLNDSLTEEQSLNRLFRMGVHTLIAVPQYFINDKFLVDVMDGRIGVKDYNCAYWGLQDKFAGVQPPLQRLNKDFDVDFKFYRGLNPETSNTKKFLAEILGFQFYRSFCLASGQYKPGDPNFPLHNCDFYDSKEAGKKIRDMMQLGATRHWRDVMEIATGERKLSGRGILEYFAPLFTWLKERNKQLDIEPGWDADELCRRD

SEQ ID NO: 5281 - DNA, 9795 bp, DROSOPHILA
tcatactcactggctgccaacccctactctactctgactactttggttctggttttggatcttggctgatgctaggttctaactttaagtacgattcttagtattgctcactggatacactgtagatacaccgcagatacagccgtcctgcggcggcacaacaacaagaaaacaaacgctaatgcagctacttacgactaggaggatgattagtggcaaggggttaaggagcgggttaatcacaactggctgggaaactgaaagtggccgacaagcgcatctacttaacctagatgatggtcctacgcggcccagggtcaatcacattgcggagtaggttctacacagagagatgcgatttggtcaaaaactaagcttaaacgaccgcgatgttatcttatcaattaaaacgaaaaaaatggaatcaacatttttatagacccatttaaagagctatcatcttttttcaccgaaatacttaaggaaataatatgcatgcttagtaaaggaacactacactaggtcttaagaaatgattatcaagaagtaaacatttggcaccccgaggcgaatactgatactggtagtttttagaaaactttgctgataccgaaaactcgcgaattaagataaattctaacattgcacaaatttcttagtttacattgtaaattttgtctacttctaggcagagcacaatgtgcctgcaattttctccgtgttgttgattctgctaagttcaggaaaatgactagctatgtgaacttgacttgaggagggagggggaggttcgtatcgtgacttatctagcgttttaccctaatgcatttgattgctttaagctgatgattggtcagttgcacacgcgctattctggggcagattttgtgggcgtgtcgtaaaataattgcttggtgtttcgcttctaattgacgaggacttggacttggatttgaagtgtggaccgtgtacagagtggacaatggacagggcatcttatttattcggtgccattcgcaggcgcctgctgctcctcttcctgggaatcgccgagggaaagcctcgacttgcccgctgtttccatcgatttccaggtgcctccactggtggcctgctgcagcgaaatgcgaggtatggacttgcagctgcccaagatagaggtgctatctccgggacggtcctcggattcggccagggcgctgagactgcaagtgggcggcaggatgcggtgtggaaagcgtggcgaaccccttaccctttcccttaaactgggtggctgctgcaccaccgaaggtctccggttgctgggcaattggaagttcaccttggtctccagcagtttcacatactttccacccaacgtttggtccccctgttcaccgccagaaatagtggggataggcaggaaattcggatccttggtaaggtgatccaggtgagtaccgcttttggtcaatgaacccctatggatgggctttaggtggttaccattcgggtgggaggacgcctctgagggaatggaatcctgatttggattattgtatatggcattgcaggacgccgtttgagaggagggaatcaggcgggtgaacagtcccatgtgcgatttaaaggccgccttcagacccttttggtccgccaagctggcggtggatcccttgttgctcgaagtggtgcgagaaaatatccctcgtaatcggtttatcaagcccgtcttagcctccgtggcctgctggtgggctaaacggaggttaatcaagtcctgtgcaggcaggcaggcctcctctaattggggctgggaggcaaaggtaacagaacgcctcatcgggatctgcatgtactctgctgacggccaactggcccgtggaatcacaggaggcagcacggaaagcaggagattgggcagtattcccgagatacttggagttctgtttttacttgcagccggagtctgcgagatgccactggttaccgtcagttctggctttagatgacctcccccagttaagagtgatgtggacgacgaagttgtggtggaggtggtggttagtcccgactcgagtagcctctccagctttcgaatctcggcgtccagagcctggatttccttcttatagaccctgttttgcacctccactcgatactgcagttctcggcgatcatcgaccacgaatcggcgtgtgttgcactccatcttaaggcccatactgtggataaccggatcgataatatcgtctgagggagaaggagagttcccaaaggattaggacacaactttataaaggttctagaaattaggagactagaacttaaaagtatttcctaagtgagcaagatcttattgcaccttcaagcgctacttacttcttgcccaaatatcatggagttttgggatgaaaagcagacaaagggttgcagtggtgctggttaaaatcagagctgtgattgtgatgaaggccagggtgactcgctccgaaatcaagttggccagcaccacgacgatggcgctggtgatgaccacactgtatacagacactccgatgtactgcgagtcattgagagcaggtatttttacgtggcgcgtctcccaggccatatagacacccaccacaagaagaaggcctttgtaggcgtacaggacactcaaccacgtttgcgtgtgctgcgaacggcaaacttcaacctaaaatagatagatagatagatattcatagattctaaatgaattaatactttttcaacataattaaaagtaatctgataatttgaagcatattaatatttttcttacctgaggctggtaaacgacacttctatcagtcgcactgatctcgagcgtcaggttgtgaagatggcgctccattggatcggtgaccacccaaagggttacgagcagcgcatccaccagaagcaatccgccgacgagcaagatcagttgaatgtcctgcagcatcttgtccttgaaaacgctgccggtacgagtgaatatccgatgcactctgtaggtcttggcaaacatcgatccaaaggccaacgagaatccggcggagagcagatagacgcgggcctggtgagcatgataagcggatgacggggaagttcaggttagggagaaagtactgtagtagcagcagcaaagtaacacactaagtgtcatgtcaggcagacccaaagaaaacaagccggcggcaacaatgggggaaacaagtcatcaatggaccacaattctcagagtgcttgagactttgttgtgcgtttcaaatttatgcaaataaaggaatatcacaaaagttgtaaatttccgtgtcatgtgtttgcatttccctgccacaagcctcaacaaaacaaaaacaagcaggcaactggaaaagcggaacgacagtagaagtggttacagaaacagaaacaacagcgaccagcaaatttcccaggagtggcgttcgaggcagttgttaagggggtcaaagtggaaaggcgcagatcgggatagaagaaagctcgtcaaacttgacttgacttctggcttaaagagcagcagatttgcagcgaaaccgaacggctatttatagccagcaggggcagtcgtgtatcttgaaaagacacgcggaataatcaatattcagtttatataatccactttaaaataatagaaattaacaaaaaattgccacaattatcagtaatttttatacttcgcaggctattttatcgccatcttcgtgtatacgaatacgacaattagttcaagcaatatttctttcagtgaataaataaagcaaacacatgagcgcgactcgaaagttaccagcctgaaactgaaagtcatatttgatgaggaccccacatgcttgcttacacacagaagcccgtcaaagtcaaacaaagacggctgagaggaaaggcggatgagaatgcggattcggataggaatggcgatagggatggggatgtcggagccgaaggataacaactcaccgtgcagaccgttgcgaaagagtcctccgccgagggcagcgtcgagtggtccaagcccaaaaggatgacggtggcgtacacaaagatgcagcccactgcggtgatgttgctcagcttcgggctggaaagtttaattgccctgtggagtgagaagggggatggtcatggttataagctgaggcgccgcaatcctttgcagagaaagtgcagagtaaccgtagaatgcgaaacatatatacgaactcaactaacgatgggtcagaaatacagctggaaagccaagcaattacttcacttcaaaaaccgaaacaagtcacatgtgtaatgggttcaatgggttgagcaccgaaagcagttaactcatcatggaatataaagaaacagcccgcacaaattctcttttatatggccactaaatattttatagtcgtttaatgaaaaataatatattcaaacaatcagggcccataaaaagagtaagccaataatttatgtacttatcgccttacttcagcttccgaaagtgcagattgaacgccaggaaggcgatggccagagcgattcccacgctggagagggtggcgatggtgtagaaggccagtggagcgatggtcgccacccgcagcttgaacacccgcttggcgatgggtacctgcccgctgtgccacttcaccggccggcagcggggacaccggaagtccagggcatccgtggccggatagtagagggccaccggttccagcaaaccgcgctggatttgatagaaggcagtggtgccaacgcgatctgggccgctgaaggaaacggggccctaccaaaaagagaaatactcgtgatgaactagatttaagaaccttaggatcaaagttaaatgggttggatgatttcagttgaaagagataactcaccgacactcccaggaagtggagcttgcccatttgctgcaggaactcccaggccatgtcgctgcgggtgtaatcgaatccgtccagcttcgactgctcctcgttccgccgccagtgctcctcagcggctctcaaggccagggcgatggcccacacggcgtcgtaggtttgcggcgcgtactgcgagatcgcctccggaaagaggtgccctccgctggtgcctcccacgccccttctcctccgccgacgagagtcagattgcgttgcagcgatactgatcctggaaccataaccggagccaaatccatcctggccgtggaactgggcggattgcttgcgcagctgggagttgaacatgtgattgttctgcgaagtggaaacgcgattaaacaagcctcgaatgccgcagaaatgtcgccagtaatgagattgcctatggcagctaccactcctgccccaatttcatgaccagcactaaaagagccataaaaacgcgtctgcgatggtgaatgcgaatgcgatgacaggccggacttagggggcttcgcacttggcaatcaccatcgccatcgccattgctgaaaccatcgcgaaacgcaatcgcagcctcgggattgtctaatcaaataaatcatttcatttcggacacgcacagcaagacggacaagacaggacaacgagaaggacaagatagtcgtctctgaataaaaaaaaaaaaaaaaaaaaacggggaataaaagtttcggcaattctggaaaatgttgcttgaagctgcctttgagagttgggttcaatccaatttggatcccgaaatttatatgcatgtataacttaacaacaatctattcttgaaattcatctttacgttaatctcatactgtcatgaaattaatttatttattttccctttaatattgaatgatattttctcgcagtgcacctcctcaacttaccagtccactatagctgacgttatttccaacgatgctgttgtgcgttgagaccacgatgaggttctcgacggccagctgcagttcgtggttagagcaggcggtgcgctggtccggccaccacggagcccccatgctctcgtggaggatccaggcgtagtccgccccgaacattcgaagcctgtaggcctcgcacaggatctggggggccagctcctgcgagaagctgccgatgatgatgcgcgtgtccgtctcctgtggcgatacgaacgaaacggaacggcatgtgcccatttgtcatttgtcatccttcgattagcacaagtgccaatccacactcaaaaaaaatgggtaacaatcatcatgctgatagagggtctctaggcgatgtggtctgctaatgaaacatttatccatgcggactggacgaacaaaaaacttgaagataaactcagagaaataagttaacgtaaaaaacgtaattataatcatacatatgaaccttttttttaaaaacttactaaattaagttgccaggcaaataaattggtctatttaaatattccccaaatacgttcattttcatatttgttcatgcataagcttttaatataaacagaacagcgctagcaccattttaatttaaacattttcgaaaattgaaatttagttaaatttaatgttggtttttcaaacaaatattcataaatgtttacgtttatacgtttgcgtatacgagtataaaataaaacgaaaatgtgtatttaaatggccatttgttgctcaccctaagtagcagcagctgctccttgaagtcggtggccgcaaaggtgatggtggcggcacaggatatgttggccgcctccagttcggtgaccaggttgttcaccgccagcgagtgaacctcctcgttctgcgagaaagtggtcaccgtgccccagccaaacttccgaatgaaagcgatgcgcgccggattgtgtgaggagtccggggccaccgtcctgtagaagtaggggaactcccgcctgtcgctcaacgccggcgatgtggaaccgaaggatacctttcatcgaacgaaatcgttagactatctctaccgtacatggggtcgcttaaaatgcaagacacgcatcaagaaatccagccctctaggtcatgtgtcttcccagtttccccactcatttaacacacgcaccgccgaaatgaaacttcaaaggccaaatgcaaatgctctaagtgaatttgtggacctcataatttgtgggctgtggaaatgtttatggctcaaaggtttatggggtgctggaatcggctggattccgcagcatttatgctaatcgagctacgcacgtgagttgattagatttttgagaaattgcccgatacgaggagttggttggatgaaccgagcgagctggattatttgcattttaatcagtcgcagatgactcacctgcacgatgttccagtagggcaccaccttcgccaggctctcggtgacctccgagcaggccgatcccagcagcatcaccatcctcgtcgagggctgtgtgtagatggcgtggaagaagcgatccacgcccactccaggatcacactgattgtcggagaagaaatgtgtgaagaaacggaggagcaaaggacaccacatcagagatgagtaatagagggggcagggaaaatagcagtggcagaggccgttgctcgctgactcgtttcgacgcaataaaaaggcaacatgatggcgcaataaacatttttaaaatgtcgacttttagagaggcacagccggagatgcggctccagatatgacagtctgtttaaggtcgatgtgcatatgcatacacttaaaaaaatcgtttgaaaacctagttcactaagtgctgacatcacagtcgaggtattacgtattgacggtttaatttatcagaaactaaactactattatgcattttcttttttttaccatcaattaattgtagctttaatacactactgcaccaagttaaaaatgattgcaggtaaatagtttacattgttggtaacttagtcagtggcattgcttttcttcagtgacagtgttctgtacatttgcgtgccccatcaaaaccggcaacgactcatcgcaataaaagcgcgaaagacggaaggttgatgacatatttgcctctcttttagggccacagccgcagctgctatccgcactgttcttgttgttgcagattttcttattaagttttaatgttgcacgcgctactgaatgaaaattcaatttcgtaatggaacagcgacgcctagaagtggcgcccaacgtggggcatacggttacgccacgtagaaatgacattctcacctgagtatcgttggtcacgagctcgagggtgtagcccggcagcaggcgcttgcggttgatgtgctccacggccatggtggcagctcccaattcgctcagaccatccggacgtggtccccgcgatgtggacagctcaaagagtccgagcagcacgattttgccatgattgcgctgcatttcggccggcgacatgcggcgttcgctttcgaacacctggttgaccttcaagtatcgctgcctggggggcagattgaggaggtggtgggcgtgggaggcattggtgcttccgggcagattgctgtgcgaattgaggcgctgctgccggcgtttgactttcgtccgtttgtacttccaatcggagcgcggtggaatcggagtcccccctgcagtcacagtcgatgccgattctccgggtggcgagctggatgggctggatgtgctaattgaggcagcacctggcctaattgcctcgtagcccagggcctgcagctcggctgatgactccatggcagccgctgccgacgttgcccaggcaagggccaggactagcctcagtcccacggccggccatggaccgtatctggtcccttggaccggttgaattatgcgcatcccgtcggcaatggccaatggcccattaatcaccaaggcatttgaatcgtcggctatcagaggctgcagcaacaaacaaacacgagccacacagcacaggacaccggaatatatatcgcctttttatgcactctgccgacaggatacgcttatcgtttctcttccgacgagcggctcttccttctgctccctcctcttgtatcggcgtcaattttatcgcctttttattggcctcacttttgctcgcattttgtatctttttgcacattcactctgcacagcagtcgaccataaaagtatgcaatgcaaaggactttctcgataggtccgattgacaggattgggtaacacgggaaaaaactacacgccattcgctaactttcagtcacttttcgtagaaaaaaatgcttatttttattatgcactgtttattaaggattaacacaatttaggtgaatatttattagtattttgctgtagtatgtgattttattaaaatgtaatttgaatctacatatgtatatatatgtatatatgtgaaaacattgattttttcatgagaatgtgaaagggaatgttaatggaaataccgaaacaaatgtctagggaggcataaaaaggcatttcacaccaatttggcagtcgaaaggattatgacgaaggcttcgatgatatggacacaccgcgccgctcacgtctcgtcccatgacttgttatgtgcctgccacttggccattattttttatgctaatggccaaacattttgcgctttcattgcgggcttttggactactttttgtcgagtctcacgcgccacagatttctgtggcgaacgtttttctctgtatgcgcgcgtatgcataattgtttcaagattaccaacttgcagtccctttgccgctttcccgcttttccaccgcccacttgcctgcacctaagcccacttcatagacgctttccttcgcgctttctgcttttcccacagcacgcttttcgctgt

SEQ ID NO: 5282 - DNA, 3918 bp, DROSOPHILA
atgcgcataattcaaccggtccaagggaccagatacggtccatggccggccgtgggactgaggctagtcctggcccttgcctgggcaacgtcggcagcggctgccatggagtcatcagccgagctgcaggccctgggctacgaggcaattaggccaggtgctgcctcaattagcacatccagcccatccagctcgccacccggagaatcggcatcgactgtgactgcaggggggactccgattccaccgcgctccgattggaagtacaaacggacgaaagtcaaacgccggcagcagcgcctcaattcgcacagcaatctgcccggaagcaccaatgcctcccacgcccaccacctcctcaatctgccccccaggcagcgatacttgaaggtcaaccaggtgttcgaaagcgaacgccgcatgtcgccggccgaaatgcagcgcaatcatggcaaaatcgtgctgctcggactctttgagctgtccacatcgcggggaccacgtccggatggtctgagcgaattgggagctgccaccatggccgtggagcacatcaaccgcaagcgcctgctgccgggctacaccctcgagctcgtgaccaacgatactcagtgtgatcctggagtgggcgtggatcgcttcttccacgccatctacacacagccctcgacgaggatggtgatgctgctgggatcggcctgctcggaggtcaccgagagcctggcgaaggtggtgccctactggaacatcgtgcaggtatccttcggttccacatcgccggcgttgagcgacaggcgggagttcccctacttctacaggacggtggccccggactcctcacacaatccggcgcgcatcgctttcattcggaagtttggctggggcacggtgaccactttctcgcagaacgaggaggttcactcgctggcggtgaacaacctggtcaccgaactggaggcggccaacatatcctgtgccgccaccatcacctttgcggccaccgacttcaaggagcagctgctgctacttagggagacggacacgcgcatcatcatcggcagcttctcgcaggagctggccccccagatcctgtgcgaggcctacaggcttcgaatgttcggggcggactacgcctggatcctccacgagagcatgggggctccgtggtggccggaccagcgcaccgcctgctctaaccacgaactgcagctggccgtcgagaacctcatcgtggtctcaacgcacaacagcatcgttggaaataacgtcagctatagtggactgaacaatcacatgttcaactcccagctgcgcaagcaatccgcccagttccacggccaggatggatttggctccggttatggttccaggatcagtatcgctgcaacgcaatctgactctcgtcggcggaggagaaggggcgtgggaggcaccagcggagggcacctctttccggaggcgatctcgcagtacgcgccgcaaacctacgacgccgtgtgggccatcgccctggccttgagagccgctgaggagcactggcggcggaacgaggagcagtcgaagctggacggattcgattacacccgcagcgacatggcctgggagttcctgcagcaaatgggcaagctccacttcctgggagtgtcgggccccgtttccttcagcggcccagatcgcgttggcaccactgccttctatcaaatccagcgcggtttgctggaaccggtggccctctactatccggccacggatgccctggacttccggtgtccccgctgccggccggtgaagtggcacagcgggcaggtacccatcgccaagcgggtgttcaagctgcgggtggcgaccatcgctccactggccttctacaccatcgccaccctctccagcgtgggaatcgctctggccatcgccttcctggcgttcaatctgcactttcggaagctgaaggcaattaaactttccagcccgaagctgagcaacatcaccgcagtgggctgcatctttgtgtacgccaccgtcatccttttgggcttggaccactcgacgctgccctcggcggaggactctttcgcaacggtctgcacggcccgcgtctatctgctctccgccggattctcgttggcctttggatcgatgtttgccaagacctacagagtgcatcggatattcactcgtaccggcagcgttttcaaggacaagatgctgcaggacattcaactgatcttgctcgtcggcggattgcttctggtggatgcgctgctcgtaaccctttgggtggtcaccgatccaatggagcgccatcttcacaacctgacgctcgagatcagtgcgactgatagaagtgtcgtttaccagcctcaggttgaagtttgccgttcgcagcacacgcaaacgtggttgagtgtcctgtacgcctacaaaggccttcttcttgtggtgggtgtctatatggcctgggagacgcgccacgtaaaaatacctgctctcaatgactcgcagtacatcggagtgtctgtatacagtgtggtcatcaccagcgccatcgtcgtggtgctggccaacttgatttcggagcgagtcaccctggccttcatcacaatcacagctctgattttaaccagcaccactgcaaccctttgtctgcttttcatcccaaaactccatgatatttgggcaagaaacgatattatcgatccggttatccacagtatgggccttaagatggagtgcaacacacgccgattcgtggtcgatgatcgccgagaactgcagtatcgagtggaggtgcaaaacagggtctataagaaggaaatccaggctctggacgccgagattcgaaagctggagaggctactcgagtcgggactaaccaccacctccaccacaacttcgtcgtccacatcactcttaactgggggaggtcatctaaagccagaactgacggtaaccagtggcatctcgcagactccggctgcaagtaaaaacagaactccaagtatctcgggaatactgcccaatctcctgctttccgtgctgcctcctgtgattccacgggccagttggccgtcagcagagtacatgcagatcccgatgaggcgttctgttacctttgcctcccagccccaattagaggaggcctgcctgcctgcacaggacttgattaacctccgtttagcccaccagcaggccacggaggctaagacgggcttgataaaccgattacgagggatattttctcgcaccacttcgagcaacaagggatccaccgccagcttggcggaccaaaagggtctgaaggcggcctttaaatcgcacatgggactgttcacccgcctgattccctcctctcaaacggcgtcctgcaatgccatatacaataatccaaatcaggattccattccctcagaggcgtcctcccacccgaatggtaaccacctaaagcccatccataggggttcattgaccaaaagcggtactcacctggatcaccttaccaaggatccgaatttcctgcctatccccactatttctggcggtgaacagggggaccaaacgttgggtggaaagtatgtgaaactgctggagaccaaggtgaacttccaattgcccagcaaccggagaccttcggtggtgcagcagccacccagtttaagggaaagggtaaggggttcgccacgctttccacaccgcatcctgccgcccacttgcagtctcagcgccctggccgaatccgaggaccgtcccggagatagcacctctatcttgggcagctgcaagtccatacctcgcatttcgctgcagcaggccaccagtggaggcacctggaaatcgatggaaacagcgggcaagtcgaggctttccctcggcgattcccaggaagaggagcagcaggcgcctgcgaatggcaccgaataa

SEQ ID NO: 5283 - protein, 1305 aa, DROSOPHILA
MRIIQPVQGTRYGPWPAVGLRLVLALAWATSAAAAMESSAELQALGYEAIRPGAASISTSSPSSSPPGESASTVTAGGTPIPPRSDWKYKRTKVKRRQQRLNSHSNLPGSTNASHAHHLLNLPPRQRYLKVNQVFESERRMSPAEMQRNHGKIVLLGLFELSTSRGPRPDGLSELGAATMAVEHINRKRLLPGYTLELVTNDTQCDPGVGVDRFFHAIYTQPSTRMVMLLGSACSEVTESLAKVVPYWNIVQVSFGSTSPALSDRREFPYFYRTVAPDSSHNPARIAFIRKFGWGTVTTFSQNEEVHSLAVNNLVTELEAANISCAATITFAATDFKEQLLLLRETDTRIIIGSFSQELAPQILCEAYRLRMFGADYAWILHESMGAPWWPDQRTACSNHELQLAVENLIVVSTHNSIVGNNVSYSGLNNHMFNSQLRKQSAQFHGQDGFGSGYGSRISIAATQSDSRRRRRRGVGGTSGGHLFPEAISQYAPQTYDAVWAIALALRAAEEHWRRNEEQSKLDGFDYTRSDMAWEFLQQMGKLHFLGVSGPVSFSGPDRVGTTAFYQIQRGLLEPVALYYPATDALDFRCPRCRPVKWHSGQVPIAKRVFKLRVATIAPLAFYTIATLSSVGIALAIAFLAFNLHFRKLKAIKLSSPKLSNITAVGCIFVYATVILLGLDHSTLPSAEDSFATVCTARVYLLSAGFSLAFGSMFAKTYRVHRIFTRTGSVFKDKMLQDIQLILLVGGLLLVDALLVTLWVVTDPMERHLHNLTLEISATDRSVVYQPQVEVCRSQHTQTWLSVLYAYKGLLLVVGVYMAWETRHVKIPALNDSQYIGVSVYSVVITSAIVVVLANLISERVTLAFITITALILTSTTATLCLLFIPKLHDIWARNDIIDPVIHSMGLKMECNTRRFVVDDRRELQYRVEVQNRVYKKEIQALDAEIRKLERLLESGLTTTSTTTSSSTSLLTGGGHLKPELTVTSGISQTPAASKNRTPSISGILPNLLLSVLPPVIPRASWPSAEYMQIPMRRSVTFASQPQLEEACLPAQDLINLRLAHQQATEAKTGLINRLRGIFSRTTSSNKGSTASLADQKGLKAAFKSHMGLFTRLIPSSQTASCNAIYNNPNQDSIPSEASSHPNGNHLKPIHRGSLTKSGTHLDHLTKDPNFLPIPTISGGEQGDQTLGGKYVKLLETKVNFQLPSNRRPSVVQQPPSLRERVRGSPRFPHRILPPTCSLSALAESEDRPGDSTSILGSCKSIPRISLQQATSGGTWKSMETAGKSRLSLGDSQEEEQQAPANGTE

SEQ ID NO: 5284 - DNA, 5916 bp, DROSOPHILA
cggtggcaaatggagccgctgcctgaaaggttatgcaaacgtttggtctcacaattgggaacagtgaaaagtgtcaagtctattgacttgactattgtaccaaccatgtagcatggcatcggtgccctggatttgcatgcattttgcagcagattcctgttattttttactatatttaagccaaaaacacgcagtgccatcctttcaattttgcggaagaagaagagaataaacatatgtttcagtcggttaaagttggatggtcggtgttggaaaacacacaagctttcagctgatttttggcgcccatttaaaaatttttttatttgtatttttaatttattaagctataaaaccacaactttcttacaatgttataagacggtgaaaattacttcatttttgagataagtattataataataattccttttatactttacaggaaattctaaaaaaaattgtcctaaataaatcaggtaatagacgctatgaatttttgatttaattgtatttttattatttatattttttgttttaattatcaaaaattttttgaatccacctcctaattaatcccaacaatcagttaattctgatgaaaaaattgtttatttactttaccgttgtccacctttacaaatgcttttattgactatactttttaaacactctttcaatgctgatattttcaaatggaaatttaaacgaacacaaatcaaaggaacagaacatgcaatgaaaacctttcaacagctaattatagttatttgatgtttaacgctatataattagttataaataattgcctaggcttagcgttgataaaaggttttattcgcattgtgggatgtaatgcagctatcagaattctgttatatatatcaatagtatctcgccgatttacattctctcatcatcattccatcctcccttgtggtatttggtcgcagtacaatttatatatatttaaagcaattatttaataataatgccaagcctatttccacgcctgcttgagcaatttacgcgacgctaaatgcttaacaatcaacgagcctgatgtgagcgcgactagcactatggaaatgagaatataatcaaagtcctccttcagcaagtcgaacgtctttgatggcgccacgcgcgtaacgaacaaatctgtcaaataaaaatggtttacagtgctttaaccaaaatcgcgtttgataaatctcccttacctaagcccgtagcaacgactagacaggtactctccaagccactgggcgcggtgtaaatattacgcagacgggcaaccgtctggttgtaatttatgtggctctctgttggcaaaggcagctcgggtatgtaggggatggctccttcttcacgtccctgagtcgtggatgcgataggacgtcggggatccagcaaatgccacggcatttccacaatggaaccactggcagtgccgactagaattaatgacaaatggttagcatcctatttggcgttcaaattactttcgttaatgctcactaagcacatgcttgttggtgattccgcgctccgtgatagtttcccgcagagcctcaactattgtgggcagtatataagactggcgctccacgaggggcattggcggagcttgcaaggaactccaaacactgctgtttgcctgactcttgccctcgtacagttcgattgtggctgtagcaagtaaataaagtttagtaaatataggtacttgtcaatggctatcgctgttgtaacttactaatctctgtgcgacgcaatttctcgttgaagtaggagtaggcaagccagttttcggagtggacaatgctcagtggtgcacggaccttacgatgcgtcatggtgaaaaccacagagccggagaccacatcaaccagatacaaatttagcacggctatggagtaagtgccatttaaatgaatgcttaattacacgaagcgcatgcagactcacatttgtgtgtggaatccggtgcctgtgtgacgaaagccactagattagggttgatgtacttgtacagcaccgatcgatcgcccagcacacgtccctgggagtggacatgctcgatgggattcttgccggcaacgccgataatctgctgctcggaattgtggccgcccaggcgagcattccagatgtgcgtgctggacagttgctaacggaaatggtttaataagttaagtgctttcatattaaaaggctgcattacttaccccgcccgcatatttaacaaagtagccggccagctctgcagttttcaaatcggcggtgtacagatacatgccatcagcctgtacgtgcatgtaaagattttcaactctattgatatatcatagaattttatatcttaccagtggggccgcatgttcgggataaacatgtaccttattcgaagcatccagtaacagaatgcccttcagaaagtccttttccgtttctcccagcaacgaaagctgcttaattctgtagtccagctgaacaaggccaccttcggctactttgccggtaataggattaaaacgatagagcacaccattgccgctgacctataaacgattagaattagcgtgggaactatgcgatttgtcagtcagacctacagcattcttgcccaaaatagtgcacaacggctgaagtggaaagtgtttggccgagcgctggacaatcagacgcatctgttcgtcgttagcgaatccaataacattgggaagatgcagctgccagtgatgtttcccagagacattgtcaatgccaaaaatctttccagcacgcgtcagtaaaaccagcatcttgtggaggccaaaggagtctctgaccaagccggctcgctgggtgtctgtaggtggaggacccagtccgataacatgaaggaacaagctccgaatctgaacagcttgagtggtgatgcgacgcaaaaaggcactggcaatgtctcctgtttacgtggtgaaaacataaatattagtaaagaacaatttaatatgatctttaaacattaacgatataccaaagatatttcatattttagtttacattggaaattaattattggacagtaaaaaagtaaaagtaatacacttagctttaaactagcgaagcatgcttgaatttgttagtaaacattcgtttttagattagtggtacgttcaataaacattaaaaaaaaaaacacaaaattaaaagtgataaacatgtaacaaacaatattgcatgattagtttgctgtgaacgttcacttactctcaaaacttgtgaaatccccttttggtatgaattttcaataataaattttatgagttcaccttaaagtagtgcataagtcaagtacactcaccggccttgcccttcatctcgttctccaatgtgccctcagtatcggcaagcggtagatccacaaactgcgagtcgatcacatttgccagcgactcctcgcgcgaccaacgaacgcgtccatgctgcactgccacgatggactccgaggtgctgctaaacaaaaacagacagttcttgccctcgccattgcgcttctgcttacagtcgaagttgctcagcgacggagtgccaaaatgctcggggaatggcagactctgctccaactccgctgccggtgcacagttatccaaatacagagcattgatcctgaggatctgttcatacgcacagggaaagaaacaattagttttcacatagaaatagtagaatagaacagtaaatataagtttaaacgtactccagaggacagatctgcataggccaagactttgcgatagttaaagctgcccacggcgaagctggagcttcgcagatcaccgcagatcgattggtccttgttgacactaattggcttcccatccacaatcacaacaccattcagaccctatagaaatgtttggacgaattataacttcacttacaacaatctattacttcactttcaataaaagcaatagcaaagttttttcctcaccgtcaaggcctgagtttttcccttcggctccgcctcgagcgaagtacggattacttgaccgcttttggaaacgagatccaaactaatcaactgctttccgtccgtacaaacgtagaaggtgccgctaagggtgcagctctctgaggtgatccaaggagctattaccttgctggtgctgccagtgctgtggcccgagctggcgaaatacgccgtcacctcgaggtggctccgccaggcaggcagcacgtgatatagcacggatttgctgtagatccacatggcgtcctgggcccgctccgtgttcatgggcatgatggaccactcccactcaagggcacccatattggtgttccagccgcgcaccaaagcaggagcgtgtccctgaacggtgagcatgtcgaagcccatgttgctgcccatcggagcggcggccgtgtcgctgctgtcatcggcgaatccgctcacctggagcagcttgacgtcgccgcgcggcttctgctcgagcacctgccgccacaccaattcgccggtctttacgcacagactggccaccactccctcataggtggtgaccagaatccgcggctgaaaatggttgaggtcgacgcgagactgcttcagtgctcccacattgacgcctcgcctgcaaaagccgcacatatccgccgtattagcgccgggtcaatggtcagatatcgtaccacactcaccagtcgaactttttgatctggtcttcgtagagcgccgagcaggtgcccaataggagcgccagcgaaagtgcgggcagtaaccacttctcctgcatgtcgtccgccttgcttgctgaccttcgactagctcgatctctgattgttcaacttttgacgtatttttatgttataaattagtagaaatccacatcaattcgtgttttccgtcatggcaaaagggatgagaagacgaaattggagcagggttggctgacgattgccttatcgatagttcagcggactcacatccgatattcaaagcagtgcggctcatcccctttcaacgtacggcaaacccattcggtcttcacctttatgattaaatttgttggtaaaaagattaaaaaataaaatgccttgccattttgcggtatacagggcttatatttctgcagatgcggctgcagtgtgaaccattttaaatattcgtcgtgctcgcagcgataactgtgacgtgaatgccatcactagcggtgccccatctaactcccatctctaatgagcatttagtgtcttcaaaagaagttgtatttttctggaaaaatcgcattgaaatgtttgaaaagaagagcgacaaggttaagcaagcggagcacaaggcccgggatgatggcgtagagctggagagccagtttatcatgcgcgtgccgaaggtaagccatacatagcacaaacaaacatcacaacaagccgtgcaaattgacggattctccgcaggaactggcggacacggtccatgaggcaataaatgctggcaccattaaggaccggctgaccatccaactggatccggatctgaggtacggtgaagtgcgaatagatgatcagatactgtacacgaaactcgtggatttgcccaccgtcgtcgagagctacaagaccattgacaacaagagcttctacaagtcggcagacatctgccaaatactcatttgcaaggaggagcgggaggacgagacggaaaaggagtcgcccaacaagaacaaaaagaaggaccccaacaaggtggacaaaaaatacctctttccgcacggcatcacaccgccgtgcaagaatgtgagaaaacgacgattccgcaaaactctgaagaaaaagaatgtcgaagctcccgagattgagaaggaagtgaaacatctgctgcgcattgacaacgaggctgtcagagttgactatgaaatcata

SEQ ID NO: 5285 - DNA, 2874 bp, DROSOPHILA
tcccttttgccatgacggaaaacacgaattgatgtggatttctactaatttataacataaaaatacgtcaaaagttgaacaatcagagatcgagctagtcgaaggtcagcaagcaaggcggacgacatgcaggagaagtggttactgcccgcactttcgctggcgctcctattgggcacctgctcggcgctctacgaagaccagatcaaaaagttcgactggcgaggcgtcaatgtgggagcactgaagcagtctcgcgtcgacctcaaccattttcagccgcggattctggtcaccacctatgagggagtggtggccagtctgtgcgtaaagaccggcgaattggtgtggcggcaggtgctcgagcagaagccgcgcggcgacgtcaagctgctccaggtgagcggattcgccgatgacagcagcgacacggccgccgctccgatgggcagcaacatgggcttcgacatgctcaccgttcagggacacgctcctgctttggtgcgcggctggaacaccaatatgggtgcccttgagtgggagtggtccatcatgcccatgaacacggagcgggcccaggacgccatgtggatctacagcaaatccgtgctatatcacgtgctgcctgcctggcggagccacctcgaggtgacggcgtatttcgccagctcgggccacagcactggcagcaccagcaaggtaatagctccttggatcacctcagagagctgcacccttagcggcaccttctacgtttgtacggacggaaagcagttgattagtttggatctcgtttccaaaagcggtcaagtaatccgtacttcgctcgaggcggagccgaagggaaaaactcaggccttgacgggtctgaatggtgttgtgattgtggatgggaagccaattagtgtcaacaaggaccaatcgatctgcggtgatctgcgaagctccagcttcgccgtgggcagctttaactatcgcaaagtcttggcctatgcagatctgtcctctggaatcctcaggatcaatgctctgtatttggataactgtgcaccggcagcggagttggagcagagtctgccattccccgagcattttggcactccgtcgctgagcaacttcgactgtaagcagaagcgcaatggcgagggcaagaactgtctgtttttgtttagcagcacctcggagtccatcgtggcagtgcagcatggacgcgttcgttggtcgcgcgaggagtcgctggcaaatgtgatcgactcgcagtttgtggatctaccgcttgccgatactgagggcacattggagaacgagatgaagggcaaggccggggatttcacaagttttgagagagacattgccagtgcctttttgcgtcgcatcaccactcaagctgttcagattcggagcttgttccttcatgttatcggactgggtcctccacctacagacacccagcgagccggcttggtcagagactcctttggcctccacaagatgctggttttactgacgcgtgctggaaagatttttggcattgacaatgtctctgggaaacatcactggcagctgcatcttcccaatgttattggattcgctaacgacgaacagatgcgtctgattgtccagcgctcggccaaacactttccacttcagccgttgtgcactattttgggcaagaatgctgtcagcggcaatggtgtgctctatcgttttaatcctattaccggcaaagtagccgaaggtggccttgttcagctggactacagaattaagcagctttcgttgctgggagaaacggaaaaggactttctgaagggcattctgttactggatgcttcgaataaggtacatgtttatcccgaacatgcggccccactggctgatggcatgtatctgtacaccgccgatttgaaaactgcagagctggccggctactttgttaaatatgcgggcgggcaactgtccagcacgcacatctggaatgctcgcctgggcggccacaattccgagcagcagattatcggcgttgccggcaagaatcccatcgagcatgtccactcccagggacgtgtgctgggcgatcgatcggtgctgtacaagtacatcaaccctaatctagtggctttcgtcacacaggcaccggattccacacacaaatccgtgctaaatttgtatctggttgatgtggtctccggctctgtggttttcaccatgacgcatcgtaaggtccgtgcaccactgagcattgtccactccgaaaactggcttgcctactcctacttcaacgagaaattgcgtcgcacagagattaccacaatcgaactgtacgagggcaagagtcaggcaaacagcagtgtttggagttccttgcaagctccgccaatgcccctcgtggagcgccagtcttatatactgcccacaatagttgaggctctgcgggaaactatcacggagcgcggaatcaccaacaagcatgtgcttatcggcactgccagtggttccattgtggaaatgccgtggcatttgctggatccccgacgtcctatcgcatccacgactcagggacgtgaagaaggagccatcccctacatacccgagctgcctttgccaacagagagccacataaattacaaccagacggttgcccgtctgcgtaatatttacaccgcgcccagtggcttggagagtacctgtctagtcgttgctacgggcttagatttgttcgttacgcgcgtggcgccatcaaagacgttcgacttgctgaaggaggactttgattatattctcatttccatagtgctagtcgcgctcacatcaggctcgttgattgttaagcatttagcgtcgcgtaaattgctcaagcaggcgtggaaatag

SEQ ID NO: 5286 - protein, 915 aa, DROSOPHILA
MQEKWLLPALSLALLLGTCSALYEDQIKKFDWRGVNVGALKQSRVDLNHFQPRILVTTYEGVVASLCVKTGELVWRQVLEQKPRGDVKLLQVSGFADDSSDTAAAPMGSNMGFDMLTVQGHAPALVRGWNTNMGALEWEWSIMPMNTERAQDAMWIYSKSVLYHVLPAWRSHLEVTAYFASSGHSTGSTSKVIAPWITSESCTLSGTFYVCTDGKQLISLDLVSKSGQVIRTSLEAEPKGKTQALTGLNGVVIVDGKPISVNKDQSICGDLRSSSFAVGSFNYRKVLAYADLSSGILRINALYLDNCAPAAELEQSLPFPEHFGTPSLSNFDCKQKRNGEGKNCLFLFSSTSESIVAVQHGRVRWSREESLANVIDSQFVDLPLADTEGTLENEMKGKAGDFTSFERDIASAFLRRITTQAVQIRSLFLHVIGLGPPPTDTQRAGLVRDSFGLHKMLVLLTRAGKIFGIDNVSGKHHWQLHLPNVIGFANDEQMRLIVQRSAKHFPLQPLCTILGKNAVSGNGVLYRFNPITGKVAEGGLVQLDYRIKQLSLLGETEKDFLKGILLLDASNKVHVYPEHAAPLADGMYLYTADLKTAELAGYFVKYAGGQLSSTHIWNARLGGHNSEQQIIGVAGKNPIEHVHSQGRVLGDRSVLYKYINPNLVAFVTQAPDSTHKSVLNLYLVDVVSGSVVFTMTHRKVRAPLSIVHSENWLAYSYFNEKLRRTEITTIELYEGKSQANSSVWSSLQAPPMPLVERQSYILPTIVEALRETITERGITNKHVLIGTASGSIVEMPWHLLDPRRPIASTTQGREEGAIPYIPELPLPTESHINYNQTVARLRNIYTAPSGLESTCLVVATGLDLFVTRVAPSKTFDLLKEDFDYILISIVLVALTSGSLIVKHLASRKLLKQAWK

SEQ ID NO: 5287 - DNA, 36383 bp, DROSOPHILA
cccccgttttttaaccctagctgagtgagcggtatctgatagtcgaggaagtctctcttgttttacataattttattagttttctaaaagtttatcgatttcgctaacaagtttttgccacgctcacacttgaaaaatcggttgatattttcttaaatattattagtcttctaaatttctatcgatatgccaaacaactttttggcacgcccactctaacgccttaaaaccgtccaaaattgccacgcccccttctttgaaaatttttttctcatttaatttcccaatatattgtatatcacactagctgagtaacgggtatctgatagtcggggaactcgactatagcattctgtcttgttttagttttgtattactcttgtaaattagtcttttaaatttacagtcacatttaaatttacagtgccacgccattaaacccatgttttttttttatttttatcagtcttgtaaatttctattaattcccagaaaaacttttttcctcgcccgcccttactcgtacaaaccgcccatagatattttttgtgccaatttctatcgataggatgttgaatgttgttagcctattaacgggtaactgatagtcgaaggtcttgttttcttgtaaatttgtattttgagaaaaaacttgctttgagaaaaaactttccactatagtcgtaaaactcgactttggcctcttctcttgttttttttttttgtaattgtttggcatggtctttgattgtaagatcaattaatttaagagctgcaaaggatacattttttttgtcctccatgtccaactgaaaatttactgaaaataatagtaagacgtaatttttttacggtataatttattataagtgtattgcgtccgtcaagaatctatatttcgataataaatagtaaataaaacaatttattttaatatcttacttattttgtcttattttaggaagtggtaatagctagttcattatctgtaaccagcggaatgctcaaccttatgaaaaattgtcccaaggaagccgctcatctcagaaaagaacttttaattgctgcccgtcatatatttgctacagatttacgtcaaagtaagttttaaaaaaaggagtaaaacaactcctaacgaggaaaaaacaagggagaattctatagtccagttccccaactgttactcaactagtgcaaatgccaacgaaatttcatcaattttctgggatgtcgataaatattggggaatcaaataaaaaaatgttaaaatttaaactttaaacaataaataaattagtcaattattaaaactcaattagaaaaattatcaacacatttttcaaaagtgtggccgtctcacgccgctgcgtctttgtctctagaatctgtatgctgattcacaaccatctagcttttttggtacatgatatcacgacgttgtatatgtatatgtattatttatttggaaacgcttccttctgccttttgtatacttttcagcgaatctagtactccctctttcatttcataaaaataatacagacatacaaagttaatagctaatatttataaaatgaataaaaatatgcgacctgtttgatgcaaaattgattttttaggcacgacgtggggggacacttaagaatcgatttctactttcaatgtcttcacatatttttcacacgtcccaagctgcatactctaatgaatatattcaatcaatcgtaaggcttactatgccttatgcaatctttgaccaaaaataattcgcataaacgttttggaagaaaaatccgattttgtgtagtagagaatcatgttattcatgatttagatcagcatatcgtaaaatttagtttgaaaatacaagttttaataatatattatctgggtcgagaataagaattgtaacccctgctaattcaaagtatatatccctttttcttaaagtaaaagggtatactaggctcgttcgaaagtatgtaacaggcagaaagaagcgtttccgaccatataaaatttatatattcttgataaggatcaacagccgagtcgttctgaccctgtccgtccgtataaacgtcgcgatctcaggaactataaaagctagaaggttgagattaagtatgcagacaccagagacatggacgcaacgcaagtttgttgacccatgttgccacgcccacaaaccgaccaaaactgcaacgcccacacttttgaaaaatgttttcatatttttattagtcttgtaaatttgtatcgatttgctaaaaaaccttttgccacgcccaatcatacgcccaaaaacagccaaacattggccacgcccctcgaccattacaacaacttcacatcaataatgtgctttgggacaaaaagaaattaggaggagacagacgttgtcgatttcttaaaactactacataataacctattatcgaaatttatgttaccttccattactcatttaatggtggtaaaaatttaatttaaaatgttttgttgattcttactgaattcttactattatatttactcttaaacttttttgtagaatttattccatcaatcgaacaattgtttgatgaggatttgcttattggaaaaggagttacattggattctattcggccattggcgtattcaactttagctgacctagctcaccacgttcgccaaagcctaaatatagacgttttaataaaggcagtgaatctcttttcaaaaaatgttcatgatgaatcacttgctgtgggaatacaaactatgtcatgcaagcttttgttaaatctagttgattgtttacgtcatcacagtgaaacagaaccacaaagatcaaaagctctactctcaaaactgttaaaagtgtttgtaaaaaaatttgaaactatagctaaaattcagcttccattaataattcaaaagtggtaagtaagtcggtgcatatatttttacagtagcataagaacaacattgttcaatccatagtggtgcgatcattgttttctaaagttgacagtaagatatttatctaacctatttaatttttgtataagggttataacgagttttacaaatgattgaatataagtgcaaataggttaagtacagaacttaaaaaacatgtgagttccctgacttttagtctgcttactacttaaaaagcaaaagtttttttttggcaaaccgatagatattaagaacattaaaaaaaattaacataaaaacattttcaaaaagtagtggcgtggcagttttgggcggtctgtatcgtatcatgttattctaatgcctttatcaatactatgaccagaagtagttcgcaaaaacgttttggaagaaattgtcgaattttgagtaaatcatgtttaatcagcttagcttttcgtaaaatttagctcaaaaaagttttaaaaagatttttgctgggctgagaaaaactaattgaccacaatgggagaatttttgaaaaacatcaaaacttaaaaaaaactttttggatatttgccattttctactggcattttgactttatcaaaaatggtttagtctaagacgggttttcattggtggtgggggggggggggcgtgtggattgtgctcgtcccgaatgcgtcgattttgcttgttgacatagccattcatccaaaaatgcatctcgtcgtaaaacaggcgaaatacgctgaacttttctcgaactgaagacccattttcataaaacaatttgtaacgaactgattttctatgtctgctcgctagctcagagagtttgtgcgttcgtctcaccaaacctatgatttgtgtgactgcccgacccaggaaaagcaaagggttcttattatagtcgttttattctacaaacttatggataactcctccggcgatctcgctgctcctgcggcgttctcctggaacgccttgcctccgttgtcctgtatgctccttgacagggacgacaagtcgggtgcatcgtccacgggcgaggcaacactcgacctgggaacatctttgccgaccatgactccactgtccctttcgaacacaccacgtccttgtcgtctcctctggaataccacctgccagtcggtatgggtttaggatattatggggcaaggtatatgtccacgggcgaggcaacgctcggcctgggaccacctgtaccgaccactgactccactgacccttacgaacacgccaagttcttgccttcccttctgaaggtccctctgccggccgtaacgggtttaggatgttatggtgcagggtgtatcgtccacgggcgaggcaacgctcggcctgggacgacctttgctggccactgactccactgaccctcttcacatggtgatcgtccttccgtgtcctttgggcatcttgcagcccgacactgtttattcctttccgacttgtccgcgcgttctctctcccgaactcctttcttcattctccggatcactatcttcttccgagcgcggtctggctgactgaatgaatcctactcctccgccttcagactccgttctgactgcgcgctgaccgcgcaacttgcgccggtactctcctcgactatcctcgcgtccgaacggctcctcgcgtgttgaggctgactgcctcgagctgcacttgcgccgtccctttataggccgcgggaatcccgttatttccccttttgcgcacggcccgctcgggtacacggtccaacagttgtaccgttagttcacggtgcgtcctctttgtgcacgcaccgttaccggtcgacctctgtgtccttggtcaactggagtccaaggtccagagcggtacctttagttcacggtgcgtcgtctttgtgcctgtccgacgtccgtaccgttaccgttcgaccgtttaattcacggtctctccgctttgccctggccgccttgcatcgcggcggttgctgggaaactcccctacacgagatttgtggggagttttaagactcttcacaataggcataggctggttagatgggtctctgagagcaacatgtcaacttttttatctttcaagaccctagcgagatcaagtttgtttgagacgccattcgcattccacaaactgtacgaagggaggacatttttttattttgaatgtcgacatgcaaatagttgtactaaggcatacgtaagatcctgcattgttgttctcatgaacaacatcgttacttggaatgattacataattttttcaatggcacttgtgggttgttgaaggtctgtctggcacggctcgacgttgccggcgcttttgagaactctattgtggacgcaggaccttccgtttccgattttagggcactagcaaatgaaacacccggtatggtgcttactggaggaagagggtatcaattgccgaagcaattcgtttgttcatgcgactcttaagatccccggaaattggcacacaatgtacacatttggatcaagtttattagccgggcaagtgccagatggtagaaagggtacaatatgtgtggccatattcttggcagtcggagcattgtactggactattacgcttatgtggttcttctacagtaattttacggtgtaataagaattggagattgtaaattgggtacagtttttttctctttaatgtttggctagtgggtctagctcaacccaaccgctctggggcttcttatctttattaagaatattaatatctggtttaaccttaaagcccttttcgtgaagtgcattcgtaacttcattgggtgtgacatcaggctcaatatcttttagtaccacttgcagcccttactgcttttgagttggtacgtgtaatattttttccgtttttgtttaaaaacttcgaaaccgcatgaaactggtttcggttttgacctgaagcttagtttcttgaatttttccgcttcttagaggtataacgtgacatttgttgtttgcgatattattattattattatcagaactattttatttgctagcgttcgtagtaatctcttggatattggtgaaggctttggtttttagatatcctatctgtcgttttattagcttcctcgcttgcgttttctgctagcgtgcaaacatgtttttattgttggtagtagtagtttttatttcgctaccacaattttttttggctctattacctgttgtacgttgcggactccgttgacgttttgcaaaaacgtagcgatccagtctgcatgaccgaattcgggcggccacttggattgtaggcttgcctacaatggttaacggagtatgtgtgtaatttgttgttggttgcggcattgtggatttccaagattttggaactgttcttggcaacgacggagagcaagagttcgctctctggtcttgaaagggcttgagcgtttccgtagaaacgaacgagaaatacgcgttgtttttgattgaagagagccgacgctcgtctatttaacgttgacgttgctcacgaatttcgtttttcattttaatttcacagattttgtgatttacttattagttgattatacattagttggagagcagcacgaaatacgtctgcactcgctgaatgcctaatacgcctaacgtggtaccgttaccgcgggcgagaaatttctatctcagcgttctcggctagtcgtaaaaggcgactaaagggtggaaggaggagccctcatggactacactgatggacgggggtgcgacctggcctcacatcctgctcatcgaagtcataccttgacaggcagtcccggtgagcatgcgaggactcaagagctcgcggagcctttgttttagtacgtaggcataattccaatagggcttatgaatcgtgcatgccacctacggacggtaggtggtatctttaaaagattttaatttttctaccgtaagtcgaataaaataaaaaaataaaaacaccggagcattaatgacattaccaactcgtcgtagcggctgataacaaagaattcacccgtgttcacgtctctcaattttgatcggaatcattgtgagaagtccacttgaatgactgtcgattggacttcggagtgaaatggtggagacgtgtttcattcattgtcatatatctacgaaaaaactattgttaattcacttgaatatctcctaaaactggtccgtgtcatcaactcgtcattggttttggtcgaaatatttcgtgatggacacgttcaatgatatctttggagtctcagctatctcatacaatttcagtttacaggcattctatatcattttggagatttttttgatgttttcgcggctcatttaactacgtttaaaattatcataccaatccttgatgggtgatttcctgggatagtgtccgggaagccaagtttttgcatcaagtgtattttttcccttacgtgtaaacaaccaagctggtcctctactcaatatcaccagcaaaacaaaagttactgcttgcgtatgtaggcgtgatcaaagaatgcaacaagagtgggagttatccctgtacagaagggcacgaaagctcgactatgtttcgacgcccgcaaagaaaatattcggaccattaaagatacatactcattgccacatattgactttattaagtggactataggattcgaatgaaaattggaaaataccactgggatacaaaaacatatattcaatgtagacaaaagtatgttttgttttaggaggttgatatatccgcaggcacgatgcgtaaatccggattataagggattttcccaagaaaaattcctttcggccgtctgaattcgaattccttgccgatcctatccagaagtatcgctgcttcacccttgtcacgtttctgcagtgctgtggttttccgtgagtatttgttggatctcctcttctgcacagcttccatggttgtaggtccttctcgtcgacgctgagtttatacagcctgtccccttatagtcgatacttcagttcgctcgtcttattttccatgtctcttctctttccatcgtttccttcgttccaccgcgctcagcttcctattggcgaacgatatcacgtgctctaattcccgtcctgcatcaagacagactgcccctacgccaaaatcactggtagattacctttcattaaaatagaccccggtcgggtaccgtgaatgctgtgtactatcgagtaccctattccatcagtatctgccaatataccgatttcagactatggtgcttatgaactttgcctctcttaacggttccagaataaagttcatactatgtaggtactggataggcatctttttctgttttgtcgtttaataagcgatagtctatgctaattctgcactcgttgtgctttattggtttgtcatcctgcaggtatatctaatgttcctaagcccgcttatgttctcaaatacttgcctttgtttgtccaggatgtgtatcctcctcggatggttctgcctccatgtcttccggcctgtccacttcttcttctgttcgccctgttccgttgtctgcagttccagatttccgcatctcgaaccgctgtgtgctcctgtcagaaaatctattcccaacaggattccccccgtaaccttctccagtattagaaacggtactgtgaaaactttggctccaaatcgtattctcgcctcgaacatgcccatcggccttggcctagatccgttggtcagcgtaatctctgtcctggttctggtttatttgtcaaaccgagtcgctctagccgtctgcccgactgtccgtataaacgtcgatatctcaggaattagaaaagctagaaggttgggattcagcatacagattctaaagacacggccactagacgcccacaaaccacacataactgtcacgcccgcactttttaaaaatgtgtttatattttatctgtgttagtaaatatctatcaatttaaaaaaaaaaaagttaccacgcccactctgacgccctaaagacgacaaaccgtccgcaaactagctgagtaacaggtatctgatagtcggggaactcgactatagaattctctcctgatttgatatgtgttcgtttgttatattcattattttttttacttactagcttttttatcacgttcatagggacaccagatcctgtttatttaatgtactaacatttattggccttttattttttctttaaagcaaagggcacgcattttctggagcattggtaaattcatctggcaacgcttccttatcacacattaacgcgccagatctaaaagacgtacgtattaaagaaagtgatgcaaaacatatgctaagagttatgttattttaggacatatccaacatccaagtatctgcatctggatcacaatggatatattccgtcaatgtcgctgaatttcgaagcttagtaaaaacccttgttggtggagtaaaaacaataacttggggtttttttaactcaaaggtaaaagcattttcttgcttagttttttgtttactacttttgtattcagtttcagctaactgataccaaactggccaaccatgaaaaaatttttggacctgaaatcgtatgttcttacatcgacttggtttactatgcgatggaggctctagatatatacactataaacgttaatccaaatcaacagagaacgtctgggttgatttccagaagtaaagaagaaaaagaagtcttggagcattttagtggcatagtaagtaatgcaacggaatactttggtatttttttaacgttctgcacaatgatcaaaagggataatgtttccccttgcctccaaatataaatgaattttttatacccgttactcgtagagtaaaagggtatactagattcggtgaaaagtatgtaacaggcagaagcgtttcagacttcataaagtatatctattcatgatcaggatcaatagcctagtcgatctagccatgtccgtctgtccgtttaaaagctagaaggattcagcatacagattctagagacagagcaaatttgttgacccatgttgcgacgcccacaaagcgcacaaaactgtcacgcccacacttccgaaaaataaggtgatattttttgacattttttttacacttgtaaatcgatttaaaattttctcattttataccccaatatctcgctcgtcgcatgcgactcttcagctccttatagaccatgtagtttgccgtatggatacctctgcagtttccacattttttcttttgggggtctgctttattagcggggcagtttaaggaattgtgaaagtctccgcaggctacgcagtatgacgaagtatgtcttggtgcatctataatcctggcagtgcattgtacaggaccgttgcgtttgtggctcttccacggtgatccatcgatgcaagatggacggcagcttgaaaattgcatatccttcgcttttttaaggctttgctatctggttcgagcacgatcttaaagtgtggttgtggcgtttttgatatgtgtagatattctttttagtttcctccaggtttaaaagctagaaggattcagcatacagattctagagacagagcaaatttgttgacccatgttgcgacgcccacaaagcgcacaaaactgtcacgcccacacttccgaaaaataaggtgatattttttgacattttttttacacttgtaaatcgatttaaaattttctcattttataccccaatatctcgctcgtcgcatgcgactcttcagctccttatagaccatgtagtttgccgtatggatacctctgcagtttccacattttttcttttgggggtctgctttattagcggggcagtttaaggaattgtgaaagtctccgcaggctacgcagtatgacgaagtatgtcttggtgcatctataatcctggcagtgcattgtacaggaccgttgcgtttgtggctcttccacggtgatccatcgatgcaagatggacggcagcttgaaaattgcatatccttcgcttttttaaggctttgctatctggttcgagcacgatcttaaagtgtggttgtggcgtttttgatatgtgtagatattctttttagtttcctccaggtatttggacacagttcgaaagtgttctgcgcattactatctatatgccacttccactagctgagtgggtatctgatagtcggggaactcgactttagcgttctccctggttggagttttatttaacgatttatgtctttaaaattatcgtttgcgttgatgtatagtttgtatttgttactgaaagctccaaaaccttgacgagcaagcatttaattatatatataagctcttagcaagggctcttttccttcggtaaccgaagtatagtaatattataaatatatttactcattgcttgtttttatttatttaacagtttttaatgatgcactcccaaaactttcaagaaatattttctactacgattaattttttggtggaaaggatctacaaaaatcagtccttacaagtgatagcgaactcctttttagcaaatcctactacttcacctctgtttgccactgttctagtggaatatcttttgaacaaaatggaagaaatgggatcaaacttggaacgctccaacttgtatctacgattattcaagttggtattcggcagcgtaagtctttttccagtcgaaaatgaacagatgttgcgtccacatcttcataaaatagtcaatagatccatggaattggctttgatatcggaggagccgtataactattttttacttctgagggcattgtttagatcgattggaggaggaagccatgacctattataccaagagtttctgccacttttaccaaacttattagaaggattaaatcgcctacagagtggatttcataagcagcacatgcgagatcttttcgtggaactttgccttacagttccggtccgcttgtcatctttactgccctatttaccaatgttgatggacccattagtttctgcgttaaacggatctccaacattaataagtcaggtatttacatgtctttaaatttacaattattttttgcattatattttgataaactctcatgtgtttgtttttaattataattcattttacatttttaaagccggcagttttaaaactatgtaaaaacaagagataccgctatagtcgggttttttcgaccgttgtttagctaatgaaaatatgaaagcgaaattttatactattaatactacgaccacatatgtggtcgtaagacaatttttctctacaaatcgatagaaatttacaaaactgatataaaagaaaaaacgtacaatttgccaaaagttttgggcggtttgtgggcgtgcaaaatgagtaaacaaacttgcgctgcgtcgcaagaattctttttatggtcttcatacttttcaactaatgtgagagtactagataaaaagagagattgcgcaatctcttctttttatcccctgagcaaaggacacggtctgcatgactgcatacgtgtcttaccatgcgaacattgcccagtactgttcaggttccaaagcttcgtcacagctgcagcataacattccatctccgtcaggtatgacatcgggaattcttctccttctctttgcagttctacagcctcgtatgctcttacacctgcttgatcaagcttatgcttcttaattcgacccttttcatactctcatgcagtggagcagcagtttgtggtatcgtcctgtcatccccagggactttctcatttacttaccggaaatggagtgtgaaactctgcaatatactccagcttggtattaacatgtacgaacctcgttcattaacgttaacgagcctctcgagcgacctgcgtctgggcctagtataaacgaatagcgtcggccgaaaatataatttccgttctccgagtctatagagtctggacaatctcgaaagacctgccttagcttcggcaagcgaatagctgtatggaaactatcatccatcaacccccttgaactgtgacgggtacgagcagccagccggtaccataaccgattattatgcttgctacctcgttaaccaccgagctcatcctggatttgaaaactcgaacgacctggcttaccctagttaggcgggcagcgtcggtcatgagatttatccgtatattatttttatatttttttttgcgcgcaagtcaaatgtcttgcctacacttcctacccgaacgaccgaggggcgctgtcgtgtattgtactgctcgattcgggagaagatagatgcgttatcgaaaagagtacagaaacggagaaatatataaatataaataaatattagagagatttatacgttatttaatagaatgtattagaaaagttaataatgattgctttaagagtgttgatcttataagaactgctacggccaaacggtcgcgtttgaatttcaactagctgatattacggatatctgatggttggagaactcgactatagcattctctcttgttttattttattttctgttttctatgtatatagaaaaatatcaaaaatcaaactaatatcttttaattttaacgaaaactatttaatttccacaactttttttttagggcctgcgaaccttagagctttgcgttgacaatttgcagccagactttttatatgatcatatacaaccagtaagagctgctttaatgcaagcattgtggaaaactttaagaaatcaggataacgccgctttggttgcctttcgcgttctaggaaaatttggtggcggcaatcgaaaaatgatggtggagccacaagctttgtcgtatattataaacgacaagcccaccatttccattgtaacttattttcaggaatacgaaacaccaatagattttcctgttgatgaagcgattaagtccgcctttagagcattgggatcaaattctactgaccagttttataggaggcaaagctgggaagtaatcaggtgcttcttagctgcttttattagtttggatgatgaaaaacatatgctgctgaaactttttacacatgtagattttgttgaaaataaaattatgaattggtctacgtttcaacataaagccgggaacgaaactgtacgagaaactcatcagacagccctcataggtatgttggttgcatcagcaacaaaggacttgcgtgattcagtgtgcccagtaatggccgctgttgtgaggcattatactatggtagctattgcacagcaggccggaccttttccacaaaaaggctaccaagccactcatggaattgaccccatgatattaatagatgctttagcctcttgcatgggtcatgaagaaaaggagttatgcaaacccggaatagcttgtatgggtattatacttgacactgcaacaaatattatgggtaataaagacagagcgtgtaaattgcccataatacagtatctagcagaaaaaatggtatccttatgctatgatcggccatggtactcaaaagtaggcggttgccaagcaattcaatttttatgcaaacatatgtctttgcgagccctttttcaaaatctctttaattttttaaaagctttcatgtttgtattaatggacctagagggagacgtttctaatggggctattgaaataacaaaaagttatatgaaaagcatgttggaaatttgtttaacgccaataaatgaatgttataagaatatagatctaaaggacttacaagccaaagccacttatgaagttattcacgaattagtgcggcacatcacaagccctaataccattgttagagaagaatctatggtactacttaaacatattggtacaatacaatccaaaaccgtttctgaagttatggatcctcataaagacgttctcgctgacattataccgccaaagaagcatttattgagacatcaacccgcaaatgcgcaaatcggacttatggatggcaatacattctgcacaactttggagccaagactttttacaattggtaagctaaataaatttcttaaaaaggatttcgtttataacatttatacccgttactcgtatagtaaaaggcagaaggaagcatttccgactacataaagtactgcatatatattcttgatcaagatcaatagccaagtcgatctagccatgcccatctgtccctatgaaggtctagatctcaggaactataaaagctgccacactgagtaacgggtatctgatagtcggaaaactcgacattatcattctctcttgtatttatttgcactttacaaacaattaacttaattctgagttttcttgttagaagaccatcaaagacaactttttaaccagcgattttatttaataattttcagatttgacgaatacctaccacaaattattttttcacgagttacttacactaagtgaagccgaagatgccactttagcaaagttggactgttacaaaaacgttccgaatcttataccacttaggactagtgcgttgcgagctttagcagcatgccactatataagtgatatcggatacaaagaaaaaataataaatataatttttaaagtaatggaaagtgataaatcagaacttcagacaactgcgtttcattgcatgaagcattttataactggagttactctggaaaaagaaaaggtatgcttttgtatgatatttgaacgcaaatattgtcaatttcaaaataaacacataaccgtttaaaattttatcattattgaaaacatattcaaatttatggcaaccgataaaaccgacagattgaattaaatgttaccaaatagtctagtttccttaattcttaaaaatcaaacataatagttataaaaactattgctgagctaagcttagattggttcatagagttcgagttcgtatttctgacgagcaataattgctctacagtctgaacatctgaactgacaggccttgttggtggcactgtggccaaaccgttttacactttgtctggttggaggtttagctttgaatcgttgcttccttaaaataggcacgctggcgctctctttcatcctgccgtcttgcttttcatccaaattctatttctccaaacggatctctgcatttgtacgtaattaattattgtaattatccaattcctcatagtatatatgatcaattttcgatcgatatgatcaatcgagtagatatagccgtgtccgtctgtcagtccgtttaaaagtaataaaagttagaaggttgagattcaacatacgcaaactcccgcacaaaactgccacgcccactcttttgaaatatgtgtgttcatcttgattcacatttgtatttgtcttgtaaatttctatcgatttgacaaaaagccctaaagacgccaaaccggtcacgcccacacttttgaacaattttaaaattttttctcattttattccccaatattttttgatatcccagaaaaataataaaattaaaagtaataatcacattcacactagctatatattgggtacctgattgccggaaactcgactttatcattctcccttgttttctctagttttttgtgctttaaggcatttttctttacactcgtcataaatgaataattaaattttgtatatttttttttcaggtacaatctgcaatgcgcccactgctattaaaattgggcgaccacagaaatttatcgataccagcaataaaacgcttatcttactttactcagatctttcctcaaatgttcaatgagaagttaagtgagcaaattttgcaacattgctctaaaattatggaaatatttgttagtgaatacaaatccacaagtccaaacgttaatttttttgcatcatcgaaaggtggagaatatgaacagaaaattgtcatactaatcgaaatgtttttctatatatcagcatcagtaaaatacattgaaaagctgtgccaacttgttttaaaaacggaaaaaaacttaatgattgaggcatcgagtccatatcgagaagccctaattaagtttcttcaacgatttccaacagaaactgtggatttatttttaacggaatctcttatgatagatccgcaatggaatcgtctttttatatacttgttgaaacacgaaacgggagtatcatttcgagcagttattaaaagtagtcggtataataatttaatacattatttaaatacacacacagaatttccagaagcactcaaatatgaaattcagcaccaagccgttttaataatttttacattaatggaatcagacgatcaatggataccaacacgacaagatattgttgacgcccttaaaaattgttggcagaattatttaagtacattaagctctgaagacgttctgtgtgacttatggcatttgattggaaaaatacttttgcattatttttctaacaatacaaatgacattgaactgctgtttcaattattacgtgctttatgcttccgatttataccggatgtctatttcctgcgggacttcttgcaacacacagtagcacaaagttttacggttaactggaaacgaaacgcattcttttactttgttgaaaactttaataacagctttctttcagaagagctaaaggcaaaaataataacagcagtcataataccctgttttgctgtaagtttcgataaaggtgaaggaaataaactaattggggctcctccgaccccgtatcaagaagatgaaaaaaatattgtgtccgtttttattaataaagtgtttgacccagataaacagtatgatgatgcagtaagaattgctctattacaactagcatgcttattggtagaacgtgcatctcagcacatacatgacggagatgctaataataagcgccaaggcaataagcttagacgactcatgacctttgcctggccctgtttgctgagtaaaagttcagtggatcctactgcacgataccacggtcacttattactttcgcatataatcgcaagattggccattcacaagaaaatagttttacaagtatttcattccttgttgaaaggacacgcattagaggccagatctattgttaaacaggcacttgatgttctaacgccagctatgccgttgcgaatggaggatggaaatactatgctaacacactggacaaaaaaaattatagttgaagaaggtcacgctatgcagcagttatttcatattttgcagctcattattcgtcattataaagtaagaaaaaatgtttgttttaaaacaaccgtgtaattagttgattattattgcaggtgtattttccggttcgacatcaactagtgcaacacttgattaactatatgcagcgccttgggtttcctcctactgcatctattgaacataaaaaacttgctgtggacttagcagaagttattataaaatgggaacttcatcgtattaaggatgatcgtgaaactaaaacagatggaaccgaagaggagttaatacaggaaagctcagtaaaacgatcagggatcgatttagtagaaactcgaaaaaagtcattcgatattataagagaaacaacagtccaaggaaagtaaaaaaaattatcacaatctatttatacccatttcttgtagagtaaaagaaaagcctagatgtgttgacaagaggtaggatgaagcgttttcgaccatataaagtatattcttgatcatgatcaatagccgagccaatatggccatgacctctgtccgtccgtccgtatgaacgcgctaataaagcaagatttgaaaaaagacatgcggattcaagaggaagacgcagcgcaagtcctaatgttgccacgatttctctaacgcccaccaaacgaccaaaaatgccaccccacaagaatgctaagtcgagttccccgacttttagatacctgatattcagctagtgggaaatcaaacgcgaaatttcatcaggtttctggaatatcgatagaaaaaaaaaaattgttcaaaagggtgggcagctttagtgcgttaaagtgggcgtgacaaaaagttttctggcaaatcgatagaaatgtacatgtctaataaaattatgaaaaactatcgaccaaatttttaaaaatgtgagcttggtagttttggggggttttaggtcgttagagtgggcgtggcaaacagtttttttttttagcaaatcggtagaaatttacaagacaaacaacataatgaaaaatatcgacaaatttttcagaaatgtgcgcgtgacagttttgagcggtggcgtggcaacatagatcaacaaacattcgctgcgtctatgtctgtatgctaaatctcaaccttctagcttttatagttcctgagttcgagacagacagacgaacggacggacatgaccagatcgattcagctatttatcctgatcaagaatatttataccttatatgatcggaatagcttccttctacctgttacatacattcaacgaatatagaataccatacccattttactctatgattaacgggtataataatcaaactgtatccatatttatttgaaagatgtagaaatcaaaatatattaactcacccagcaaatagtgtaacaagagttatacattatttagctacttgatttgtcctctatcttattcatttcataatctatttactatttatcaagtgtttattatatgtacataatatagctctatataaagtaatgaaacgaacaaacaatataactttataagaactgataataaatattatatttttttcttttttatataggagtgggatcacataccaagcctgatgacatactgcgatcaatagataaatcctattgtgatacggttttaaatttcttgatacgtttagcatgtcaggttaatgacccgcaagccccaatactttcgccaggagaaagtttgtctcgaaggtatgttttgatgttgtacccatttcttatatttatactaaaaatgccgcgcacagcaataaaaaaatcctttataaaattattgttatcgatgcttattatttatttttttgacgttaagtacgattactactgaatcattgtcttgaaatatcaacactaaggaacaaattgaattcttcctaccttatattacaaacgatctacaagcacaacagattgactgttttacttagcgtcggtctgacaattaaggcccggcgtggcccgagcacgaaagctagtcccaaaaaaaaagcccgaggcccgcacgatttttttttggcaaggctctgcccaagccaagcacgaacaaattaaaaataaaacaatgaaatttttttaatttaaagtatgtcggttttctgatatttatatttctaatattttgtacacaaagttagtggaatcaactaaataaacttattatttattacagttatagtgctttaaacataatttatgacaagtttttatttataaaaataaaattttttctaaattataactttttaaacgtgtacgaaggatttaagaagaggccaacataatgtgccgttgatggtgcacatcttttatgtaaagaatttaacgtattattttgcagctgaattatgatttcagaatcgagcatttcagtggtgcacatctttaataatttctcccgaccacaaacaaaatatgtgcatgataggttgcgtatcggcactaagtacctccgaacaatctttaaacggctttaaaaaatgcagtaagctgtcgattgagcttatctctttctaataaaattactttaatttcttctttcactgatttaatgctgtctaacataataaacaccgagttccaacgcctacgtatttcttgctttaacgtcttagacacagacagtgcgatttggtagcaaaagtgataggcaaaatgcgataaatatgagaaacactgaaaactatcgattgtgacaaattcgatttaacaagttagattctgacaaaccagttcaactttaggttctgtttttgggcattcgggcctgatttcggactttcaaacctgcggtttttttttcgtaggcccgggcccgaacgaagcctgcacgaacaacgaatgtgaggcccgaacccgatttttgtggcaaaggcccgcgggctacgaaaaaaagcccggcccgcgcccacctctacttgggggtgacattgaaataagaagaataaataaataatagataatagataatagataataataagaataagaagtactgtattttcatcagaattcacttagttgtcaattattggtggagtcaagcgggtgtttcctcttcagacgtcttaggaattgactattgtctaggaggttgatggccaggttgttggggtggttgttcagttttcttgtttacctttcgctgagacgggagatctcccgttttacccatggaattccaagttctttctttggttataagaatggacttttgaatttattctcaagaatttattttggagccgctgaattataatacgatttgatacgtttgccgtgccccacagctgacctataggtcaaaattgctttgtaaacgagaaatttgagattttccctaagtttggatctctccgtacgaagagaggatcgagaccatctagttgtctttggactattgctgatgctttctaggatctttggcggaggctagaaaggcgttgtcatcggaatatgtggctactgggaagttccgtgagatggtgagaagggcgaagggggaactgggaaggtgggacttgattttgatatggagtccatggtgccagattctgtcaaacggctgtttgacatccatcaaaacggcacagcagtactccttcttttcgaacgcctttacaatgcgctcaacaagccggtggcattgctcagttgttcaatggttgaaaacaaactgatgggcagggatcagtacggcctcgtacagtacaaacactgttctgcggttaagagtggaggagagtggggttacattttccgtgctgatccatcgacgcgatccggacctggtgagttgcttttttggggaatcgatctcctctggtgcgagcggctttattggcggaccagaagcacgtggactgcctacgaatagggataatgtgcagaatatcagcaaaagcttcttctcttttgggctcagatcgacatctggaatcgtccgcttttcggatgggtgacatctttttcacaggtatcgtgacattccacaggttgtgctgttgctctcaaggttccaactcctcaaggaatatttggaaggagtcctgctgtagcttatcctttagttcctcgatagcgcgattaagcgctgccttgtcacgagggccgagatatcaggaaacacatttcctctctagtttctccctcaaatgaactatatttgtgtacctgttactcgtagtgaaaatgagtgtactagttaggtatagttcgttgaaaagtatgtaacaggcagaaggaagcgtttccgaccatataaacaatatatattcttgatcaggatctatagccgattcgatctggccatgagatctcagaaacatttaaagctaaaaggtcgagattcagagcatacaggttctagagaaatagacgcagcgcaaatttattgactcatgttgccaagcccactctaacatcctaaatccgcctaatcggtcccgcccacaattttttaatttttttcttattttattccccaatatctatcgatctcccagaaaaatgatgaaatttcgcgttggctttgacatctcttgtttctcatgcgttcgcctgtgtaatatcgatcatccactcagaggtttaatccttttactggcataagaatatactgcttaattgaattcgttgagcttaaacttattctatagacagacacgcagcgcatattaccactctaacgcccacaaaccgcaaaaaactgtcacgcccacacttttgaaaaacgtgttgatatttttttcacatatttattagtcttgtaaatttctatcgatttgcaaaaaaaaaaatttccacgcacactctagtgctctaaaacagctcaaaactgccacgcccatatttttgaaaaacttttcgatctttttcataaaatcggtttgcaaaaaactttgccactcccactctaatggcctaaagccgccgaaccgaacacgaccacaatttttaaattttttctcatattattccttaatatcaaaaaaaaaaaggaaaaaaaataaaattcgccttcccatttgcactagctgagtaacacccggggaactcgactatagcattctctcttgtttattattactgtaccccaggaatttcttcttattattgtttatcttcaaattatattcgctaatacgatccaaatctttaagcgatcatttcctgtcttagtcgcaatatacgatccctattcattacttggttatctttctaaaatctgaaaacgtttctgaaataaatagttggattacagcagggccattcttcgatttcaatccaaaatcctcaaatactaatattgaccttgaggggtaacgaatgctatgtactgcacggattttcctggacttctatttcatgaaatccgcttttaaaatcaattacagaaaagcaacaattcaatactccagacaatcattaataataaggagcaaagggaaattatctttgacgatacgcttgtttaaacctcggtagtcatgaggtggggcgctaacgtatttcgtttttcttaagcaaatcagcaatgatttctttagccctctcaaagttagaaaaacgtcttggagaacaggaaaacggaatgttccttatatcaaatgaatcttttaatgatggcccaatgccaaccaaaaatctttgcgcatcgctgacagtatctaaaatttctccattaaaccgagttatgattctgacttaaattaaaggatttgtgaatatttatacttaacttacttgttgtgttaatttaattggtaacaagggaggaatcgttggatttcaaccattatcttcagcgagtctcgacccattaataaagggagtggtaatacagtattgccaactatatttaaggatgattcttaaaactccccacaaaggtgcaggagagagctgcatagcaacagcgaagaaggccggaatggaggttaagggcagccaggtcaaacgggaaatagtggaacttggagccttgcaaagcgggaagaccgtgaactaacgttaccacgcttgatcttggactcaaggcggccaagggcccagaggtcgaacggtaacgctgctgactgtggacgatgacgaagaggagtaacgtccgcaccatgaactaacggtacattcgttggaccttgtacccgagtgggccgaacgggcgcaaaaggggaattaacgggattctcgcggcccataaagggccgcctcggtcagcaagagatcagcaagtgagaacggcagtcagttagaacacgcaagtgaaagtggcagtcagttggaactcgcaagtgagaacggcagtgagctagaaaacgcatgtatgaacgcgcagacagtgaataaggagtacgggagtgagaacacgtagtcagccgttagagaaacggactcgaataaccagtaactcgtaaccgcgttaggaggacgcatactgcaggtgacgcagccgagccagacggcgatccacacgacaaggacacagcaaaatatgaggttagaaaggacagtgaagcctttggtcgtcaaaggtggttcaaggacgacgcggaacagcattagaggaatgacaaaggactaaccgcacagcagacgacgaagtattgaggagtcatttagcgaagtgggctgacaataaagctaatctaatctgaaaccatgtcatctccttggtcgggcaatcgaacaaacaatatgtttgatgggacaaacaaacaaacagaaaaatgattaaatttcgctatcgcatctgcacaatctgaataactggggtctggtagtttgggcaactcgactatagcattctctcttgcttgtgatttcatttgtgatttaatttatggaaccaattttttttcaattatgatattaaaaccaataactttattttcaggtgcgttatgctattaaaaatggcgatgcgtcccgagatctggcctcaaccatttgatattaagcttaattggcttgataaagttcttgctacagtggaaacccctcatcacaacttaaacaacatatgtactggaatagattttttaacatttttaactactatactaagtccagatcagttggtgtcaattatacgaccggttcaacgaggcctgtccttgtgtataattcatcaaaatacacgaattgtgcggttaatgcatatgtttttgacgcgaataatggcaatttttccacctgacacccaacacaagcatgaagatcttgatttgttatataccgctgttagtaaaatgatcgctgaaaacctaacaagttacgaaaagagtccacaaccgaatgcttcttcgctttttggtaccttaatgattttgaaagcgtgcactactaataatgcaagttatattgatcgaattttagtccagtttataagggttctgaatcatcttacaagggatcatattaacaccattggtggtaacactgttattagccaatctcctgattcaaatgctttacctttagaactcttagttctctctttggaattaatcaagaataggatctttgtaatgagtgtggaaatcagaaaacttttcataggcaccattttggttagtcttatagaaaagagcacggaggtaaaaattataaaatgtataattaaaatgctggatgaatggattaaaacgaaagagccaaatgttatgacacaagttccttctattcgcgaaaagtcggccttgctggtaaagttaatgcaaaacgttgaaaagaaatttactgatgaaatagagcttaatatacaattcttggaaatcataaattttatatatagagatgaaattcttaaacaaactgagttaacaaacaaactagagggagcttttttaaacggattacgttttcaaaatccaaacgtacgctcgaaattttttgagattttagactcatcaatgcggcgtagacttcacgatcgattgttatatataatttgttcccaagcttgggacacaattggttcccattattggataaaacaatgcattgaattgcttattttaacagccaatacaatgatgcaaattcaatgttcaaatgaacaatttaaaatacccagcattacttcagtcattccagtgaattcatcagaaacacaggaaaattcctttgtatccttcttatcctctcattccgaatcttttgacattatacaaactgttgatgataaagacgacgtgtatgatatcgatttaaatgctgatcgcaaagaagattgtcaacaaatactaccaaatcgacgtgttactcttgttgaactagtttacaagcaagctgaatttttagaagcaaaccgaaatattaggaccgaccagatgcttgtcgccacatctcagctatgtcatattgatacacagttagctcaaagcgtatggttatctatgtttccacgtatttggagtatattcactgaagatcaaaggtgtaatatcacaaaagaactgattccctttttatcgtctggaactaacgttaatcaaaaagactgccatccaagtacattaaatacttttgtagagagtttaactaaatgtgcgccacccatatatattccacctaatttattagcatacctaggcaaatctcataacctatggcatagagctatacttgttttagaagatatggccgttaatcaatcaatgcaatccaaggatattgatggcggtgaaaatcaattctctgacttggatgtacaacaatcaaataatatatttgattcactttcaaaaatgtattcttcgatgcatgaggaagatctttgggctggcctatggcttaaatttgcacactacccggaaacaaatatagctgtttcgtatgagcaaatgggatttttcgaagaagcccaaggtgcctatgatctagcaatgaccaaatttaaacaagatctaagtaatggtgtagttaatacatatgttaatagtgaattattattgtgggaaaatcactggatgcgatgtgctaaagaattgaaccaatgggacattttactggactatgcccaaactaataaggacaaaaatatgtttttgattctggaaagttcgtggcgcgtacctgattggaatttgatgaaaatcgcactggctaaaacagaacaatgctatttaaaacactacggctttaaaatcaacctttacaaagggtatttgagtattctccaccaagaagaaaggcaaacaggcaatatcgaacgatatgttgaaattgcatccagcttatgcattcgtgaatggcgtcgattgccgaacatagtttcacatattcatttgccatatcttcaagcatcacaacaaattatggagcttcatgaagcaagtcaaatccatcagggacttgctcaatcgcgcaacaattcacttcacgatatgaaagctatcgtgaaaacttggcgtaatcgtttacctattatttctgatgacttatcgcattggagtgacatatttacatggagacaacatcactaccaaataataacacaacacctagaacaacaatcggatcaaggaagtacaatgctaggagttcacgcatcagcacaagctataatttcttttggaaaaatagctcggaaacacaatttgactggtgtttgtcaggagacgttgtccaggatatatacaattccgtctgttcctatcgtggattgttttcaggtaattaagttaaaaatatttggttcatcagatccccaaaatcagatctgcaaatagagtgtggaagcgacagcattttgttctgatttttctattaaagaccgagaaattttatttattatacccgttactcgtagagtaaaagggtatactagattcgttgaaaagtatgtaacaagcagaaggaagcgtttttgaccatatgatcaggatcaatagccaagtcgatctagccatgtccgtctgtccatgttaacgtcgagatctcaggcactataaaagcttgaggttgagattcagcatacagattttaaagacgcggcgcaagtttgttgacccatgttgcccacaaacttcctaaaacatacacatttttgaaaaattgttggatatattttcagaatttttttagtcacttaaatttctttcgattttttgaacaatttttaatttttttctttttttatgccccaatacctatcgatatcccagaaaaattatacaattttgcgttcgcattcacactagctgagtaacgagtatctgttagtcggggaactcgactatagtattctctctttttatttgtttttcgggtagaagaataaaagtatttatcatgtggaagtgtttattaattaatatttttgtattatcttaaagtgaaaagtctgtataacatctatactttctaccttagcacgtacatatgtatgtggcattctgctgtcatacgtttgtttggttcatgtttaggactgtcgtcaacctgttataatgtatttaagtttcctatgaatatgccaacattatttttcttcaccgaattttacgtataataataatgtaataataataattataatataataattctataataatctaatctataataatttcttaaatttgcagaaaattcggcagcaagtaaaatgctacctgcaaatgccctcaacatctggaaaaaatgaaattaatgaagccttggaagtaattgagtccacgaatttaaaatacttcactggtgaaatgaatgctgaattttacgctctaaaggggctattattagcacaaattggaagatcagaagaggctggaaaatcatttagtgttgctgctcagcttcatgatggtcttaccaaagcctgggcaatgtggggtgactatatggaacaaatatttttaaaagaaaggaaaatcacattagccgtcgatgctttaatttgttatttacaagcaagcagaaatcaaattgaaagcaaaacccgaaaatatattgcaaaagttttgtggtttctgtcttatgataataatactaaaatcctcataagcactttagaaaagcatgtggcaggcattccaccctcttattggctaccatggattcctcagttgctctgttgcttagaacagttcgaaggggatgttatattaaatctcttaagccaagtaagtaaaacaaatgccgtgtttatgtctcatttatgtacatatgtcccattttagaattaggactcagtatagtttcgttcccttaatagctatactgtttatgttaacattttcgcggcttttacaacaccatcattgcgttagagtaaataattttcgtgcaattccattaaatagttttccccttggcgttgatgacgtccgcgagcgattatgtatgcgaaatttttgcgatattttggcatcgaagttaaaccaccttctatagtatcaattttggcgcagagaataggcaaataatcaatactccgtagcattatttatattatttatgatcacatcgatagacagtagacatgtagtgaaaggaaggaggaagaagaaaacgtttatatatgtgtatatgcacatatgtacatatgtgtatgtgtactaacctgcatgtatttctaaaatatatacaaataatctcttctattttgtaattaatttagattggacgcctttatcctcaagcggtatatttcccgattcggactttatatttgactttaaaaatcgaacaacgcgaaaaacataaaactgctgaacaggctgtaaaaagttcatgctcggtaagtatattatttcgtatttgtacatttttttatgttcaataattgtttatgtactttgaaagacatatacttttattttaatcttaaaaatgtcagaacatcgcatagctaaatttgttttcattttaactttgaaaataaattgaataattaaataaattagatgagagaggcaaaataaagagcattcgagaattcctattttttgtaaccgttagtcgtagaggaaaagtaggtagaaaaagacgctctcaatttcattttctcattaggacagtcttgacagtcttctgtccgtttttattaaactaaagtggaaccataccatatatgattaagataaggtattcagaacgatgtcaaaggcaaaagatttgagactcatctgccgtatatcttttatatcggtgtggataaatactttttaataatggcaataagcaaaataattattgaaatgctccgaattttccttattatcgataatattccggattcatatagacgtgaagtataatgattatgacgtgctagaagcacgaaggacgtcatttgcgcttttgtctctggaatctgtattctgaatctcaaccttttagtttttatagttccggagatctcgacgttaatacggacagacagacttggcacgatcgactcgtctattgatcttgatcaataatataaagggtgtggcagcataacttccttttttaaaatgcggttatttgatgacaagcggagcgctagtggtcctgctcaagagggggctactgcaaagttttgtctcgacacagttcagtcgccatcatgcgttgaaatagtgaggtgcctgcctttgccgttgaggcctacttttgttcggctgttcggttatcaaaacacagcgtgcatttcggaatcgctttaatttagccccgttggctcccgtcccagaccgcaagtcaattgttacatgggtcacttcattcaggcaaactgcaagtgcgacaaaacgaagaactggagtccctcgatccataagatcacctcagaacattgaagctgtgaaatcgttatcattgcgatatccacggcgttctgcgcgcaaacacccatctgcccttggactctccaatcgcgttctgtgagaagaattcttcatgatgatcttctatttcatccgtaaaagatggcgatagtgcaggaactttcagaacatgacttcaattctcggatgagcgccttatctcaattagggctgatttggaatggccagcacgctctcacgatctatccccttgtgattttatatgggtttttttgaaatcccgtgtttatatgaatcgtccaagaaccctacaagatttgaaaacaaacatccaagaagaaattgccaacataaaagaaatcggtttatggaaaaagaaatctaaataaaaactttaaacatgtacctacattataaaaataaataaatattttccataccatttcaacgaatctagtatacccttttgctctacaagttacgtgtttaactatggtcgaatttctcaactatcagataccctacccgaacgttttcaagtaggaaacttttaaagttagagaccggtttgagtaaataaattagtagtgacctctactgaacgcgttttaatatgcttagaaaatttccaaaatattcatttttctacattttttaagattaagttgttagataactaaatatttcattattttattatttttagaacatcgatggaactactttaagctttggaaggggagcaagtcacggaaacattccatcaataaatcccattaaagcaactccgcccatgtggcgctgctctaaggtgatgcaattacagagagaagtacatccaacaatattaagttcattggaaggaattgtagaccaaatggtttggtttagagaaagctggacagaggaagttcttcgacaactacgccaaggcctaattaaatgctatgccatagcctttgaaaaaagggatactgttcaacattctaccataacacctcacacgttgcattttgtcaaaaagctgggttctacgtttggcattggaatagaaaatgttccgggatcagtaacctcctcaatttctaattcagcagcctcggagtctcttgctcgacgcgcccaagttacttttcaagatccagtatttcaaaaaatgaaggagcaattcactaatgacttcgatttttcaaaacctggtgccatgaaattgcacaacttgatatcaaaattaaaaacatggataaaagtcctggagactaaagttaaaaaattacccacgtcctttttgatagaagacaagtgtaggtttttatcaaactttagtcagaagacagctgaggttgaacttcctggagaattgttaattcccttatcatctcattattatgtaagaatcgcaagattcatgccgcgtgtggaaattgtacaaaaaaataacacagcagcgcgtaggttatatataagaggtactaacgggaaaatctatccgtaccttgtagttcttgattcaggtttgggagatgctcgccgagaggaaagagttttgcagttaaaacgcatgttgaattactatttagaaaaacaaaaagagacaagtcgaagatttcttaacataacggtaccaagggttgtcccgatatcgccccaaatgagattggcagaagataacccaaacagtatttcattgttaaaaatatttaaaaaatgctgtcaaagtatgcaggttgactacgacatgccaatagttaagtattatgaccgtctttctgaagtacaggcaagaggcactccaactacacataccctattgagagaaatattctctgaaattcaatggactatggtcccaaaaacattactaaagcattgggctttgaaaacattcttggcggctactgacttttggcatttccgaaaaatggtaagcaatttgcaatttttattattattattattaagaccaacatttttgaaaatgtaatatttcaaggttgttagactacatttttaattctctttatatttgtgtcctaagtccggaattctcaaacacgtcgaggtgaaattcgaatgtcatcagcattgatattgcgaagattttttagagcaatggcacaaaaagtgcaaccagcttacgggactaattaaacggcacttttcagatgctattattaatcctgatcaaacgataaaaaccattttttaatggaaaatatttatttttaaaagatggcctaaaaactggacgtgggcaaaagaaactaatttgtgggcacatttcccaacttcttttagctttataggctagttactttaaaccaaattgacttacctaggagtcgtgttaccttagaaattcggacgttggtaacgatttactttgtataataacaaggtaaagaaagtgttatatatttcctttctctgctccaagaattgttaagctactttgagtttggcaagggaaaaaatttgagttatcctctactatgggtagggtatgttgttaaatagaatagctggagtagttaagaggctagctggtcatgcctagctggagtgcgatttctgtagcacaaccattgactagcaaatcgatcaatatacaatatataaagtatttatttatgctatgtaatgtgaaggtaagattgtttaggcatactcagttataatatacacgatggaatttgctttttttcctggattgacgcccatattaaaagggtaaatagatccgtttctaaaattggtcgtatcgctataagaaatgttcatcgtttgcatttgcgtaaggcacaaccttttactcctacccgtgcaaagggtattattattatcaataagtaatttcgctttaaatttaattaaacagctttgacaaaccatttatagcaaaaaactttattgtccgaaaattttggcgtccgtttctatgaaaaatctcagttttccaaagacagacaactatagtaaaactatcagataccctttatcgatacagataaaaaaaatgtcttagcttcaaaatggaagtgcagaaacatcgatgttattgatctttcaaagcctttcccatttccgagcgcgcttaaactgcactgtgctcccgctctctcgcactctcacacaaaatataaagttctaagcgtgcagagtgctttctagcggtacatttgacatcccgatgcaagttttgattttgtgtttttgcatcgaattgactaaatatggatattaatgttttctgcttttaaaacaaatgcctcagttttgattttgtgtttttgcatcgaactgacaaaatatggatactaatgttgtctgcttttaaaacaaatgcctcatggttataaagcctgagcaggcaaaaatgaattttttggctatgtgataaaagtgtagttattttaatgcgttggaacgcttgaaattaggctacacagaaaaaaaccattagaatcgttctgatacttttaactgtggcaaaactgcgctaaggacattttcaaatgttcaatcattttccgcatacataacatatacaaactattaatatgaaatatttatgagcaaatgttaaaaacttaaatagaatctccacttgtatataacgaaatatccagacaccccaatgaccgctatgatccatatttattacatttagctgttttagcttcacgacgttcgcgcttcatccgaaatatcgcatattgcggtgacccacctttgtgttacctgatgacttaattttttaactaaccgcgtctttgtgcagaatatacattttttaaatgttaattttttaattcaataacgtctattaacatgttctattcattttttagcttaccctgcagttggctttggcatttttatgcgaacacgctttgaatcttactcgactgaatgcggatatgatgtaccttcatcaagactcaggacttatgaacatatcttattttaagtttgatgtaaatgatgataagtgccagcttaatcaacaccgacctgtaccatttcgcctgactccgaatgttggtgaattcataacacattttggaataactggacctttatctgcagcaattgtggcaacggctcggtgttttattcaaccaaattacaaattaagctcaatattacaaaccattttaagagatgaaataatagccctgcaaaaaaaaggattcagagaatgtaaactaatcgaaggctctgaagaccgttattccgatggaaattgtatggagcactcagtaaacattgtgaattcagcggtggatatcataatgacgcgttttaataaaatatcttattttgatagcattgaaaataagaagatttccgtgctcgttcaatcggcaactaacattgataatctttgtcgtatggatcctgcttggcatccctggctataatattgcaaatgttactctaaaaaccaaataaaatgatattttgtattgcagccatatgtatttaattcataaggcagattctcaatagtacattttataatactggtcatgtccttgggcatttgggatgggcatttgatgttaagactccactttgacagcataagctcgccgtactaggaacgtttccctgatccttggaggataaatggtatagaagcgcataaaaaataccacaattaaatcatatacccggtactcagctaatggaaatgtgaacgcgtaagttcataattttctgggatattatcgatagatattaaaaaacaaaatgggaaataattttttgaaatcgttcaaaattgtgagcgtgcccggcttgggcgttttgtatgtgtaaggaggggcgtgaccaaagtttatttgatatgccgaatgaaattgggaagacaaacaagaaacggaacgcttcttctgcctgctacatacgaatctattatatccttttacgctactagtaacgagtaaaataaagggtgcggataataagctaacctcgacgtctcccagccgagtggtgggcagacgctgcatgggtcgatcatgcggcggcctagaaggtcctcgagcccgtgtccagcacaacaatggctgtcggcaggatatggacacttttcttctgcggccgagcgatcgttggcgactgtggctcgggacggagaccgggagagggacatcggacgaggtgcagcgtgctgacccgctttgcgtgtcggaggtggcatcgatgccactgtcggatctgaacggagttcctcatgcatgtggagtagggtgtggttattccctccacacttcttgcatccctctttgctgcggaagtctcctcctgagtgccgatgggcgaggcagtttgggcagtacttatggcacgaggacgaggagccatttcagaaaattttgtgttgttttgtacagcgagacgtgcggttctcaacaa

SEQ ID NO: 5288 - DNA, 10308 bp, DROSOPHILA
atgctcaaccttatgaaaaattgtcccaaggaagccgctcatctcagaaaagaacttttaattgctgcccgtcatatatttgctacagatttacgtcaaaaatttattccatcaatcgaacaattgtttgatgaggatttgcttattggaaaaggagttacattggattctattcggccattggcgtattcaactttagctgacctagctcaccacgttcgccaaagcctaaatatagacgttttaataaaggcagtgaatctcttttcaaaaaatgttcatgatgaatcacttgctgtgggaatacaaactatgtcatgcaagcttttgttaaatctagttgattgtttacgtcatcacagtgaaacagaaccacaaagatcaaaagctctactctcaaaactgttaaaagtgtttgtaaaaaaatttgaaactatagctaaaattcagcttccattaataattcaaaagtgcaaagggcacgcattttctggagcattggtaaattcatctggcaacgcttccttatcacacattaacgcgccagatctaaaagacgacatatccaacatccaagtatctgcatctggatcacaatggatatattccgtcaatgtcgctgaatttcgaagcttagtaaaaacccttgttggtggagtaaaaacaataacttggggtttttttaactcaaagtttcagctaactgataccaaactggccaaccatgaaaaaatttttggacctgaaatcgtatgttcttacatcgacttggtttactatgcgatggaggctctagatatatacactataaacgttaatccaaatcaacagagaacgtctgggttgatttccagaagtaaagaagaaaaagaagtcttggagcattttagtggcatatttttaatgatgcactcccaaaactttcaagaaatattttctactacgattaattttttggtggaaaggatctacaaaaatcagtccttacaagtgatagcgaactcctttttagcaaatcctactacttcacctctgtttgccactgttctagtggaatatcttttgaacaaaatggaagaaatgggatcaaacttggaacgctccaacttgtatctacgattattcaagttggtattcggcagcgtaagtctttttccagtcgaaaatgaacagatgttgcgtccacatcttcataaaatagtcaatagatccatggaattggctttgatatcggaggagccgtataactattttttacttctgagggcattgtttagatcgattggaggaggaagccatgacctattataccaagagtttctgccacttttaccaaacttattagaaggattaaatcgcctacagagtggatttcataagcagcacatgcgagatcttttcgtggaactttgccttacagttccggtccgcttgtcatctttactgccctatttaccaatgttgatggacccattagtttctgcgttaaacggatctccaacattaataagtcagggcctgcgaaccttagagctttgcgttgacaatttgcagccagactttttatatgatcatatacaaccagtaagagctgctttaatgcaagcattgtggaaaactttaagaaatcaggataacgccgctttggttgcctttcgcgttctaggaaaatttggtggcggcaatcgaaaaatgatggtggagccacaagctttgtcgtatattataaacgacaagcccaccatttccattgtaacttattttcaggaatacgaaacaccaatagattttcctgttgatgaagcgattaagtccgcctttagagcattgggatcaaattctactgaccagttttataggaggcaaagctgggaagtaatcaggtgcttcttagctgcttttattagtttggatgatgaaaaacatatgctgctgaaactttttacacatgtagattttgttgaaaataaaattatgaattggtctacgtttcaacataaagccgggaacgaaactgtacgagaaactcatcagacagccctcataggtatgttggttgcatcagcaacaaaggacttgcgtgattcagtgtgcccagtaatggccgctgttgtgaggcattatactatggtagctattgcacagcaggccggaccttttccacaaaaaggctaccaagccactcatggaattgaccccatgatattaatagatgctttagcctcttgcatgggtcatgaagaaaaggagttatgcaaacccggaatagcttgtatgggtattatacttgacactgcaacaaatattatgggtaataaagacagagcgtgtaaattgcccataatacagtatctagcagaaaaaatggtatccttatgctatgatcggccatggtactcaaaagtaggcggttgccaagcaattcaatttttatgcaaacatatgtctttgcgagccctttttcaaaatctctttaattttttaaaagctttcatgtttgtattaatggacctagagggagacgtttctaatggggctattgaaataacaaaaagttatatgaaaagcatgttggaaatttgtttaacgccaataaatgaatgttataagaatatagatctaaaggacttacaagccaaagccacttatgaagttattcacgaattagtgcggcacatcacaagccctaataccattgttagagaagaatctatggtactacttaaacatattggtacaatacaatccaaaaccgtttctgaagttatggatcctcataaagacgttctcgctgacattataccgccaaagaagcatttattgagacatcaacccgcaaatgcgcaaatcggacttatggatggcaatacattctgcacaactttggagccaagactttttacaattgatttgacgaatacctaccacaaattattttttcacgagttacttacactaagtgaagccgaagatgccactttagcaaagttggactgttacaaaaacgttccgaatcttataccacttaggactagtgcgttgcgagctttagcagcatgccactatataagtgatatcggatacaaagaaaaaataataaatataatttttaaagtaatggaaagtgataaatcagaacttcagacaactgcgtttcattgcatgaagcattttataactggagttactctggaaaaagaaaaggtacaatctgcaatgcgcccactgctattaaaattgggcgaccacagaaatttatcgataccagcaataaaacgcttatcttactttactcagatctttcctcaaatgttcaatgagaagttaagtgagcaaattttgcaacattgctctaaaattatggaaatatttgttagtgaatacaaatccacaagtccaaacgttaatttttttgcatcatcgaaaggtggagaatatgaacagaaaattgtcatactaatcgaaatgtttttctatatatcagcatcagtaaaatacattgaaaagctgtgccaacttgttttaaaaacggaaaaaaacttaatgattgaggcatcgagtccatatcgagaagccctaattaagtttcttcaacgatttccaacagaaactgtggatttatttttaacggaatctcttatgatagatccgcaatggaatcgtctttttatatacttgttgaaacacgaaacgggagtatcatttcgagcagttattaaaagtagtcggtataataatttaatacattatttaaatacacacacagaatttccagaagcactcaaatatgaaattcagcaccaagccgttttaataatttttacattaatggaatcagacgatcaatggataccaacacgacaagatattgttgacgcccttaaaaattgttggcagaattatttaagtacattaagctctgaagacgttctgtgtgacttatggcatttgattggaaaaatacttttgcattatttttctaacaatacaaatgacattgaactgctgtttcaattattacgtgctttatgcttccgatttataccggatgtctatttcctgcgggacttcttgcaacacacagtagcacaaagttttacggttaactggaaacgaaacgcattcttttactttgttgaaaactttaataacagctttctttcagaagagctaaaggcaaaaataataacagcagtcataataccctgttttgctgtaagtttcgataaaggtgaaggaaataaactaattggggctcctccgaccccgtatcaagaagatgaaaaaaatattgtgtccgtttttattaataaagtgtttgacccagataaacagtatgatgatgcagtaagaattgctctattacaactagcatgcttattggtagaacgtgcatctcagcacatacatgacggagatgctaataataagcgccaaggcaataagcttagacgactcatgacctttgcctggccctgtttgctgagtaaaagttcagtggatcctactgcacgataccacggtcacttattactttcgcatataatcgcaagattggccattcacaagaaaatagttttacaagtatttcattccttgttgaaaggacacgcattagaggccagatctattgttaaacaggcacttgatgttctaacgccagctatgccgttgcgaatggaggatggaaatactatgctaacacactggacaaaaaaaattatagttgaagaaggtcacgctatgcagcagttatttcatattttgcagctcattattcgtcattataaagtgtattttccggttcgacatcaactagtgcaacacttgattaactatatgcagcgccttgggtttcctcctactgcatctattgaacataaaaaacttgctgtggacttagcagaagttattataaaatgggaacttcatcgtattaaggatgatcgtgaaactaaaacagatggaaccgaagaggagttaatacaggaaagctcagtaaaacgatcagggatcgatttagtagaaactcgaaaaaagtcattcgatattataagagaaacaacagtccaaggaaagtgcgttatgctattaaaaatggcgatgcgtcccgagatctggcctcaaccatttgatattaagcttaattggcttgataaagttcttgctacagtggaaacccctcatcacaacttaaacaacatatgtactggaatagattttttaacatttttaactactatactaagtccagatcagttggtgtcaattatacgaccggttcaacgaggcctgtccttgtgtataattcatcaaaatacacgaattgtgcggttaatgcatatgtttttgacgcgaataatggcaatttttccacctgacacccaacacaagcatgaagatcttgatttgttatataccgctgttagtaaaatgatcgctgaaaacctaacaagttacgaaaagagtccacaaccgaatgcttcttcgctttttggtaccttaatgattttgaaagcgtgcactactaataatgcaagttatattgatcgaattttagtccagtttataagggttctgaatcatcttacaagggatcatattaacaccattggtggtaacactgttattagccaatctcctgattcaaatgctttacctttagaactcttagttctctctttggaattaatcaagaataggatctttgtaatgagtgtggaaatcagaaaacttttcataggcaccattttggttagtcttatagaaaagagcacggaggtaaaaattataaaatgtataattaaaatgctggatgaatggattaaaacgaaagagccaaatgttatgacacaagttccttctattcgcgaaaagtcggccttgctggtaaagttaatgcaaaacgttgaaaagaaatttactgatgaaatagagcttaatatacaattcttggaaatcataaattttatatatagagatgaaattcttaaacaaactgagttaacaaacaaactagagggagcttttttaaacggattacgttttcaaaatccaaacgtacgctcgaaattttttgagattttagactcatcaatgcggcgtagacttcacgatcgattgttatatataatttgttcccaagcttgggacacaattggttcccattattggataaaacaatgcattgaattgcttattttaacagccaatacaatgatgcaaattcaatgttcaaatgaacaatttaaaatacccagcattacttcagtcattccagtgaattcatcagaaacacaggaaaattcctttgtatccttcttatcctctcattccgaatcttttgacattatacaaactgttgatgataaagacgacgtgtatgatatcgatttaaatgctgatcgcaaagaagattgtcaacaaatactaccaaatcgacgtgttactcttgttgaactagtttacaagcaagctgaatttttagaagcaaaccgaaatattaggaccgaccagatgcttgtcgccacatctcagctatgtcatattgatacacagttagctcaaagcgtatggttatctatgtttccacgtatttggagtatattcactgaagatcaaaggtgtaatatcacaaaagaactgattccctttttatcgtctggaactaacgttaatcaaaaagactgccatccaagtacattaaatacttttgtagagagtttaactaaatgtgcgccacccatatatattccacctaatttattagcatacctaggcaaatctcataacctatggcatagagctatacttgttttagaagatatggccgttaatcaatcaatgcaatccaaggatattgatggcggtgaaaatcaattctctgacttggatgtacaacaatcaaataatatatttgattcactttcaaaaatgtattcttcgatgcatgaggaagatctttgggctggcctatggcttaaatttgcacactacccggaaacaaatatagctgtttcgtatgagcaaatgggatttttcgaagaagcccaaggtgcctatgatctagcaatgaccaaatttaaacaagatctaagtaatggtgtagttaatacatatgttaatagtgaattattattgtgggaaaatcactggatgcgatgtgctaaagaattgaaccaatgggacattttactggactatgcccaaactaataaggacaaaaatatgtttttgattctggaaagttcgtggcgcgtacctgattggaatttgatgaaaatcgcactggctaaaacagaacaatgctatttaaaacactacggctttaaaatcaacctttacaaagggtatttgagtattctccaccaagaagaaaggcaaacaggcaatatcgaacgatatgttgaaattgcatccagcttatgcattcgtgaatggcgtcgattgccgaacatagtttcacatattcatttgccatatcttcaagcatcacaacaaattatggagcttcatgaagcaagtcaaatccatcagggacttgctcaatcgcgcaacaattcacttcacgatatgaaagctatcgtgaaaacttggcgtaatcgtttacctattatttctgatgacttatcgcattggagtgacatatttacatggagacaacatcactaccaaataataacacaacacctagaacaacaatcggatcaaggaagtacaatgctaggagttcacgcatcagcacaagctataatttcttttggaaaaatagctcggaaacacaatttgactggtgtttgtcaggagacgttgtccaggatatatacaattccgtctgttcctatcgtggattgttttcagaaaattcggcagcaagtaaaatgctacctgcaaatgccctcaacatctggaaaaaatgaaattaatgaagccttggaagtaattgagtccacgaatttaaaatacttcactggtgaaatgaatgctgaattttacgctctaaaggggctattattagcacaaattggaagatcagaagaggctggaaaatcatttagtgttgctgctcagcttcatgatggtcttaccaaagcctgggcaatgtggggtgactatatggaacaaatatttttaaaagaaaggaaaatcacattagccgtcgatgctttaatttgttatttacaagcaagcagaaatcaaattgaaagcaaaacccgaaaatatattgcaaaagttttgtggtttctgtcttatgataataatactaaaatcctcataagcactttagaaaagcatgtggcaggcattccaccctcttattggctaccatggattcctcagttgctctgttgcttagaacagttcgaaggggatgttatattaaatctcttaagccaaattggacgcctttatcctcaagcggtatatttcccgattcggactttatatttgactttaaaaatcgaacaacgcgaaaaacataaaactgctgaacaggctgtaaaaagttcatgctcgaacatcgatggaactactttaagctttggaaggggagcaagtcacggaaacattccatcaataaatcccattaaagcaactccgcccatgtggcgctgctctaaggtgatgcaattacagagagaagtacatccaacaatattaagttcattggaaggaattgtagaccaaatggtttggtttagagaaagctggacagaggaagttcttcgacaactacgccaaggcctaattaaatgctatgccatagcctttgaaaaaagggatactgttcaacattctaccataacacctcacacgttgcattttgtcaaaaagctgggttctacgtttggcattggaatagaaaatgttccgggatcagtaacctcctcaatttctaattcagcagcctcggagtctcttgctcgacgcgcccaagttacttttcaagatccagtatttcaaaaaatgaaggagcaattcactaatgacttcgatttttcaaaacctggtgccatgaaattgcacaacttgatatcaaaattaaaaacatggataaaagtcctggagactaaagttaaaaaattacccacgtcctttttgatagaagacaagtgtaggtttttatcaaactttagtcagaagacagctgaggttgaacttcctggagaattgttaattcccttatcatctcattattatgtaagaatcgcaagattcatgccgcgtgtggaaattgtacaaaaaaataacacagcagcgcgtaggttatatataagaggtactaacgggaaaatctatccgtaccttgtagttcttgattcaggtttgggagatgctcgccgagaggaaagagttttgcagttaaaacgcatgttgaattactatttagaaaaacaaaaagagacaagtcgaagatttcttaacataacggtaccaagggttgtcccgatatcgccccaaatgagattggcagaagataacccaaacagtatttcattgttaaaaatatttaaaaaatgctgtcaaagtatgcaggttgactacgacatgccaatagttaagtattatgaccgtctttctgaagtacaggcaagaggcactccaactacacataccctattgagagaaatattctctgaaattcaatggactatggtcccaaaaacattactaaagcattgggctttgaaaacattcttggcggctactgacttttggcatttccgaaaaatgcttaccctgcagttggctttggcatttttatgcgaacacgctttgaatcttactcgactgaatgcggatatgatgtaccttcatcaagactcaggacttatgaacatatcttattttaagtttgatgtaaatgatgataagtgccagcttaatcaacaccgacctgtaccatttcgcctgactccgaatgttggtgaattcataacacattttggaataactggacctttatctgcagcaattgtggcaacggctcggtgttttattcaaccaaattacaaattaagctcaatattacaaaccattttaagagatgaaataatagccctgcaaaaaaaaggattcagagaatgtaaactaatcgaaggctctgaagaccgttattccgatggaaattgtatggagcactcagtaaacattgtgaattcagcggtggatatcataatgacgcgttttaataaaatatcttattttgatagcattgaaaataagaagatttccgtgctcgttcaatcggcaactaacattgataatctttgtcgtatggatcctgcttggcatccctggctataa

SEQ ID NO: 5289 - protein, 3435 aa, DROSOPHILA
MLNLMKNCPKEAAHLRKELLIAARHIFATDLRQKFIPSIEQLFDEDLLIGKGVTLDSIRPLAYSTLADLAHHVRQSLNIDVLIKAVNLFSKNVHDESLAVGIQTMSCKLLLNLVDCLRHHSETEPQRSKALLSKLLKVFVKKFETIAKIQLPLIIQKCKGHAFSGALVNSSGNASLSHINAPDLKDDISNIQVSASGSQWIYSVNVAEFRSLVKTLVGGVKTITWGFFNSKFQLTDTKLANHEKIFGPEIVCSYIDLVYYAMEALDIYTINVNPNQQRTSGLISRSKEEKEVLEHFSGIFLMMHSQNFQEIFSTTINFLVERIYKNQSLQVIANSFLANPTTSPLFATVLVEYLLNKMEEMGSNLERSNLYLRLFKLVFGSVSLFPVENEQMLRPHLHKIVNRSMELALISEEPYNYFLLLRALFRSIGGGSHDLLYQEFLPLLPNLLEGLNRLQSGFHKQHMRDLFVELCLTVPVRLSSLLPYLPMLMDPLVSALNGSPTLISQGLRTLELCVDNLQPDFLYDHIQPVRAALMQALWKTLRNQDNAALVAFRVLGKFGGGNRKMMVEPQALSYIINDKPTISIVTYFQEYETPIDFPVDEAIKSAFRALGSNSTDQFYRRQSWEVIRCFLAAFISLDDEKHMLLKLFTHVDFVENKIMNWSTFQHKAGNETVRETHQTALIGMLVASATKDLRDSVCPVMAAVVRHYTMVAIAQQAGPFPQKGYQATHGIDPMILIDALASCMGHEEKELCKPGIACMGIILDTATNIMGNKDRACKLPIIQYLAEKMVSLCYDRPWYSKVGGCQAIQFLCKHMSLRALFQNLFNFLKAFMFVLMDLEGDVSNGAIEITKSYMKSMLEICLTPINECYKNIDLKDLQAKATYEVIHELVRHITSPNTIVREESMVLLKHIGTIQSKTVSEVMDPHKDVLADIIPPKKHLLRHQPANAQIGLMDGNTFCTTLEPRLFTIDLTNTYHKLFFHELLTLSEAEDATLAKLDCYKNVPNLIPLRTSALRALAACHYISDIGYKEKIINIIFKVMESDKSELQTTAFHCMKHFITGVTLEKEKVQSAMRPLLLKLGDHRNLSIPAIKRLSYFTQIFPQMFNEKLSEQILQHCSKIMEIFVSEYKSTSPNVNFFASSKGGEYEQKIVILIEMFFYISASVKYIEKLCQLVLKTEKNLMIEASSPYREALIKFLQRFPTETVDLFLTESLMIDPQWNRLFIYLLKHETGVSFRAVIKSSRYNNLIHYLNTHTEFPEALKYEIQHQAVLIIFTLMESDDQWIPTRQDIVDALKNCWQNYLSTLSSEDVLCDLWHLIGKILLHYFSNNTNDIELLFQLLRALCFRFIPDVYFLRDFLQHTVAQSFTVNWKRNAFFYFVENFNNSFLSEELKAKIITAVIIPCFAVSFDKGEGNKLIGAPPTPYQEDEKNIVSVFINKVFDPDKQYDDAVRIALLQLACLLVERASQHIHDGDANNKRQGNKLRRLMTFAWPCLLSKSSVDPTARYHGHLLLSHIIARLAIHKKIVLQVFHSLLKGHALEARSIVKQALDVLTPAMPLRMEDGNTMLTHWTKKIIVEEGHAMQQLFHILQLIIRHYKVYFPVRHQLVQHLINYMQRLGFPPTASIEHKKLAVDLAEVIIKWELHRIKDDRETKTDGTEEELIQESSVKRSGIDLVETRKKSFDIIRETTVQGKCVMLLKMAMRPEIWPQPFDIKLNWLDKVLATVETPHHNLNNICTGIDFLTFLTTILSPDQLVSIIRPVQRGLSLCIIHQNTRIVRLMHMFLTRIMAIFPPDTQHKHEDLDLLYTAVSKMIAENLTSYEKSPQPNASSLFGTLMILKACTTNNASYIDRILVQFIRVLNHLTRDHINTIGGNTVISQSPDSNALPLELLVLSLELIKNRIFVMSVEIRKLFIGTILVSLIEKSTEVKIIKCIIKMLDEWIKTKEPNVMTQVPSIREKSALLVKLMQNVEKKFTDEIELNIQFLEIINFIYRDEILKQTELTNKLEGAFLNGLRFQNPNVRSKFFEILDSSMRRRLHDRLLYIICSQAWDTIGSHYWIKQCIELLILTANTMMQIQCSNEQFKIPSITSVIPVNSSETQENSFVSFLSSHSESFDIIQTVDDKDDVYDIDLNADRKEDCQQILPNRRVTLVELVYKQAEFLEANRNIRTDQMLVATSQLCHIDTQLAQSVWLSMFPRIWSIFTEDQRCNITKELIPFLSSGTNVNQKDCHPSTLNTFVESLTKCAPPIYIPPNLLAYLGKSHNLWHRAILVLEDMAVNQSMQSKDIDGGENQFSDLDVQQSNNIFDSLSKMYSSMHEEDLWAGLWLKFAHYPETNIAVSYEQMGFFEEAQGAYDLAMTKFKQDLSNGVVNTYVNSELLLWENHWMRCAKELNQWDILLDYAQTNKDKNMFLILESSWRVPDWNLMKIALAKTEQCYLKHYGFKINLYKGYLSILHQEERQTGNIERYVEIASSLCIREWRRLPNIVSHIHLPYLQASQQIMELHEASQIHQGLAQSRNNSLHDMKAIVKTWRNRLPIISDDLSHWSDIFTWRQHHYQIITQHLEQQSDQGSTMLGVHASAQAIISFGKIARKHNLTGVCQETLSRIYTIPSVPIVDCFQKIRQQVKCYLQMPSTSGKNEINEALEVIESTNLKYFTGEMNAEFYALKGLLLAQIGRSEEAGKSFSVAAQLHDGLTKAWAMWGDYMEQIFLKERKITLAVDALICYLQASRNQIESKTRKYIAKVLWFLSYDNNTKILISTLEKHVAGIPPSYWLPWIPQLLCCLEQFEGDVILNLLSQIGRLYPQAVYFPIRTLYLTLKIEQREKHKTAEQAVKSSCSNIDGTTLSFGRGASHGNIPSINPIKATPPMWRCSKVMQLQREVHPTILSSLEGIVDQMVWFRESWTEEVLRQLRQGLIKCYAIAFEKRDTVQHSTITPHTLHFVKKLGSTFGIGIENVPGSVTSSISNSAASESLARRAQVTFQDPVFQKMKEQFTNDFDFSKPGAMKLHNLISKLKTWIKVLETKVKKLPTSFLIEDKCRFLSNFSQKTAEVELPGELLIPLSSHYYVRIARFMPRVEIVQKNNTAARRLYIRGTNGKIYPYLVVLDSGLGDARREERVLQLKRMLNYYLEKQKETSRRFLNITVPRVVPISPQMRLAEDNPNSISLLKIFKKCCQSMQVDYDMPIVKYYDRLSEVQARGTPTTHTLLREIFSEIQWTMVPKTLLKHWALKTFLAATDFWHFRKMLTLQLALAFLCEHALNLTRLNADMMYLHQDSGLMNISYFKFDVNDDKCQLNQHRPVPFRLTPNVGEFITHFGITGPLSAAIVATARCFIQPNYKLSSILQTILRDEIIALQKKGFRECKLIEGSEDRYSDGNCMEHSVNIVNSAVDIIMTRFNKISYFDSIENKKISVLVQSATNIDNLCRMDPAWHPWL

SEQ ID NO: 5290 - DNA, 4190 bp, DROSOPHILA
cgcaaacaaacggtcggaaatgaaacggaaattctcatttatggcgcccttgacgccatttccagtttccagtttggtcgctatctatgcggccctgacaagttggcactgctcgctgatttctgatgcagattgcgattgcaggccctgattgcagcagccatgagatttatggtccatatagcccgtgctgacccagtagctgatagcaaaactggaccagaaaagcatgctagtcaaagtcccagttacagtcacagtcacagtcgcagttggcagaatgcccccctgctcaacacaagcgttcaccttggggtttcgattgcggtttttggggctgctggactggcattgccgtaaattagtttttacacctgaccgactgggagcagcacgttctttgatccctcgaagggtttgcctcgacgaagcagatgtattttaattgtgctccaatcacatgtctagacaacagaacgagagctatttatttgtggaatgtgcacgcttgtgtaaatacgaaaaggtcctgccatcgctttatgacacacaaaagaggaaaaaggtagggagccgaaatctaatttgaaaagtactaacccgtaacgagccaagagccatatatcaaaagaagctgctaacccaaggaatttacgagccaacaccccaaatatgttaaccataaaattgttctgagagcggaaggaaaaggttcaagagccacctatatgtatatgtatgtagttccactttaagaaggctcccttataaaataggtattaaaaagagaagagtaggctaggcggtaagggttcgttattagattttgaacgattgtcagtagcccctcaaactcacactcgacaataaattacagaggcaacatctggtcatcattcgcttgtgaactggaaatcaagaaaaatatatataatctgaaaatcctaaaaaaaatacatcttttataaatcgagagctgtataatccgttgccaccagacatggatcgcatcaaaattggcgagcagctcctcttccagaggagtgacgggcgtgtccatcaggtggtctgcactgccaagaacctggaacgggattccatcacgggcgaatggaccgagggcacggtggtgaagggtaaggaagtgccattgagcacgctgattggcatcaaccatcatatattcgcggagaatcaaccgccgatatcgaagccaccgagctccttgctgccgaagcctcgaggctcgagtccgaccggaggacctaagacccacactggaaatccgtatgcagagcgcatgagagtacaggacggtcgcagtaaaattgccaccagaaagacggatcctgcagcggtcggagcgggaaatcatgagctgggtagagcgcacacccctcgtgtgccagccggtaggccggaccgggatgccagccccacccaaggtcgcaagtcacagggtggcaacaatagcaaccaacgcttttccagtgtagtgagggaggtgaatcgcatgaaggagcagagggagaagcgaagggctcgccaggcggaacagctccaggagaaggatgcactgcgtcgcaataatccggggaatcccaactgggaggtgtcggtgatgctgcgccaataccgctccaccttgatcttttctccacttcgatgcctggatcccaatggaggcactgttcagcaaattacggtgtgtgtgcgaaaacgacccatgagtcgcaaggaggagaactccaagaacctggacatcatcacagttcccagtgccgacagcctgatcgtccatgagttgcgcctcaaggtggatctcaccaagttcctggagcaccacaaattccgtttcgactacacgttcgacgaggagtgctccaatgcgctggtctacgatcacactgctcgtccgttgatcagaaccatgttcgagggcggcaatgccacttgtttcgcttacggacaaactggcagcggaaaaacgcacaccatgggcggagaattcttcggaaaggttcaggattgcggtaccgggatctacgccatggcagctcgcgatgtcttcgaggaggtatcgcgcccggagtaccggcaaatgggtgccaagattacgtgcagcttcttcgaaatctatggcaccaaggtgttcgatctcttgctacccaacaagcccatgctgcgggtcctagaggatgccaggcagcaggtcgtggtggtgggcctaacggagatgccggtgaccaaagtggaggatgtcctgagactgattgagcacggcagcaaagagcgcacttccggccaaacatcggcgaacgccaagtcatcgcgttcccacgccgtctttcaaatagcactccactttcccgattcctggggcccacacggcaagtgctcctttgtggacttggcgggcaatgaacgcggggcggatacgcaatccgccgatcgtcaaactcgcatcgagggagccgagatcaataaatctctgctggccctcaaggagtgcattcgagccctcagccggcagtcgagtcaccttcccttccgtggctccaagttgacccaagtgctgcgcgactcctttgtcggcggcaagaagaacaagacctgcatgattgccatgatatcgccatccatgagctgcgtggagaatacgctcaacactctacgttacgcagacagggttaaggagctcatagccaaggaagacgaacacttgcagtccgtggaaggggatggagagaagtctcccgatctcaacgaggaatcagagccagaaatgatggccgacgaggagggcgatgaggagccggaggatgaggacaatcagcatctaaccatatcctcggaggaggcaagctcctacaacaacatgagttatgacatgagctttaaccacaccctcaacattctgggtccctcaaggaacgtggatatccaagaggtggccgagcagcacgcacttttggtagagaatctagagacttacgctcacaatttccggcaactgaaaacggataaggaaatagagcagtacacgcaaaattcagaaagcgcattgatgaaactgctagcaatggtgaatagaacgcgggatgtaacgcacaattacaacactcagaaattattgaaggaagaaaaccaaaatgcatataagaagggcgagctggatgaatccgagtagatattcgcccaccacctactaataatcctagcatatgaatttattttctaccactctgtatcttttcaatagcgtttggaagacccccgaatggcttagatttcgattcgataaacaagcagttaatgaaaattcaagcgtgaattgagttcctttcatttttcagtcacccagtcccccagtcccaactgcactcaagtttcacttgagctcgccgaggtaaaataaaaacttttcacccgcccctccccaacggacttttctttttgtgcagcttcccccaacttgctgtatgagtttccacagctcgctgatacaaatttatgaccgtccaaagtgtaatcaacaacatgcggcaagcgagcggtggccaacaaaaggaactgaacctttgggttggatttgttaacttggttaactggcaatattcccggcagcatatgtaacagatccgaaagaagccgcacgaagtgcgaaagaaacgatgccaaacttttctcggccataaagcaaaaagtggaggttacgtgtgagttaaagaggtaccaacttggttagctcctttgtaatgttccccttatattggtccctagttttattgcattcactttatggtctaaaaccctggggatagtaaactatggctggtggtaactcatttcgaatgatgttatggctgacttatcaatgtggtgaaaaccttgctaatacattcttagggtaacattacccaatattaatcttgcttatcaatttcaaatatttttaacccgtcatcccaaaggttagcctaagtgacgtatattgaactttgcccacaatcttgtaaatatttggcacattacaattacttcaaattctattccaaatgtctagcaaattgtttaccgactcgtgaactcgctgaattcctgccaaactttaaagatgacgatgatgaaagtgaaccacaagcagctgtagactgtagattttctgctccctccgcaaaacgaccgat

SEQ ID NO: 5291 - DNA, 2190 bp, DROSOPHILA
atggatcgcatcaaaattggcgagcagctcctcttccagaggagtgacgggcgtgtccatcaggtggtctgcactgccaagaacctggaacgggattccatcacgggcgaatggaccgagggcacggtggtgaagggtaaggaagtgccattgagcacgctgattggcatcaaccatcatatattcgcggagaatcaaccgccgatatcgaagccaccgagctccttgctgccgaagcctcgaggctcgagtccgaccggaggacctaagacccacactggaaatccgtatgcagagcgcatgagagtacaggacggtcgcagtaaaattgccaccagaaagacggatcctgcagcggtcggagcgggaaatcatgagctgggtagagcgcacacccctcgtgtgccagccggtaggccggaccgggatgccagccccacccaaggtcgcaagtcacagggtggcaacaatagcaaccaacgcttttccagtgtagtgagggaggtgaatcgcatgaaggagcagagggagaagcgaagggctcgccaggcggaacagctccaggagaaggatgcactgcgtcgcaataatccggggaatcccaactgggaggtgtcggtgatgctgcgccaataccgctccaccttgatcttttctccacttcgatgcctggatcccaatggaggcactgttcagcaaattacggtgtgtgtgcgaaaacgacccatgagtcgcaaggaggagaactccaagaacctggacatcatcacagttcccagtgccgacagcctgatcgtccatgagttgcgcctcaaggtggatctcaccaagttcctggagcaccacaaattccgtttcgactacacgttcgacgaggagtgctccaatgcgctggtctacgatcacactgctcgtccgttgatcagaaccatgttcgagggcggcaatgccacttgtttcgcttacggacaaactggcagcggaaaaacgcacaccatgggcggagaattcttcggaaaggttcaggattgcggtaccgggatctacgccatggcagctcgcgatgtcttcgaggaggtatcgcgcccggagtaccggcaaatgggtgccaagattacgtgcagcttcttcgaaatctatggcaccaaggtgttcgatctcttgctacccaacaagcccatgctgcgggtcctagaggatgccaggcagcaggtcgtggtggtgggcctaacggagatgccggtgaccaaagtggaggatgtcctgagactgattgagcacggcagcaaagagcgcacttccggccaaacatcggcgaacgccaagtcatcgcgttcccacgccgtctttcaaatagcactccactttcccgattcctggggcccacacggcaagtgctcctttgtggacttggcgggcaatgaacgcggggcggatacgcaatccgccgatcgtcaaactcgcatcgagggagccgagatcaataaatctctgctggccctcaaggagtgcattcgagccctcagccggcagtcgagtcaccttcccttccgtggctccaagttgacccaagtgctgcgcgactcctttgtcggcggcaagaagaacaagacctgcatgattgccatgatatcgccatccatgagctgcgtggagaatacgctcaacactctacgttacgcagacagggttaaggagctcatagccaaggaagacgaacacttgcagtccgtggaaggggatggagagaagtctcccgatctcaacgaggaatcagagccagaaatgatggccgacgaggagggcgatgaggagccggaggatgaggacaatcagcatctaaccatatcctcggaggaggcaagctcctacaacaacatgagttatgacatgagctttaaccacaccctcaacattctgggtccctcaaggaacgtggatatccaagaggtggccgagcagcacgcacttttggtagagaatctagagacttacgctcacaatttccggcaactgaaaacggataaggaaatagagcagtacacgcaaaattcagaaagcgcattgatgaaactgctagcaatggtgaatagaacgcgggatgtaacgcacaattacaacactcagaaattattgaaggaagaaaaccaaaatgcatataagaagggcgagctggatgaatccgagtag

SEQ ID NO: 5292 - protein, 729 aa, DROSOPHILA
MDRIKIGEQLLFQRSDGRVHQVVCTAKNLERDSITGEWTEGTVVKGKEVPLSTLIGINHHIFAENQPPISKPPSSLLPKPRGSSPTGGPKTHTGNPYAERMRVQDGRSKIATRKTDPAAVGAGNHELGRAHTPRVPAGRPDRDASPTQGRKSQGGNNSNQRFSSVVREVNRMKEQREKRRARQAEQLQEKDALRRNNPGNPNWEVSVMLRQYRSTLIFSPLRCLDPNGGTVQQITVCVRKRPMSRKEENSKNLDIITVPSADSLIVHELRLKVDLTKFLEHHKFRFDYTFDEECSNALVYDHTARPLIRTMFEGGNATCFAYGQTGSGKTHTMGGEFFGKVQDCGTGIYAMAARDVFEEVSRPEYRQMGAKITCSFFEIYGTKVFDLLLPNKPMLRVLEDARQQVVVVGLTEMPVTKVEDVLRLIEHGSKERTSGQTSANAKSSRSHAVFQIALHFPDSWGPHGKCSFVDLAGNERGADTQSADRQTRIEGAEINKSLLALKECIRALSRQSSHLPFRGSKLTQVLRDSFVGGKKNKTCMIAMISPSMSCVENTLNTLRYADRVKELIAKEDEHLQSVEGDGEKSPDLNEESEPEMMADEEGDEEPEDEDNQHLTISSEEASSYNNMSYDMSFNHTLNILGPSRNVDIQEVAEQHALLVENLETYAHNFRQLKTDKEIEQYTQNSESALMKLLAMVNRTRDVTHNYNTQKLLKEENQNAYKKGELDESE

SEQ ID NO: 5293 - DNA, 3834 bp, DROSOPHILA
ctatcgcaagcgaggctttcagccggacggtgataatcctctttaccctcgacgagcccaaggaacaggggagtcattgggactatcgctgaccctggatgtccaggcggatgcctactactgctcctcatccagcagcattggcttcaagatcgccctgcatagcccgaatgaatcgccgaatgtccgggagaccggagtcctattggcacccggaatggagaccaagttgcgcatagatccgtcgaaaattcttaccgagaagcatctacgcaatgtggaccgtcggagcaggcgttgtttattccacaatgagctaaaacttcgctggttcgcccactacacccagagaaattgtgtggccgagtgcctttccggctggctaatccgccactgcggctgtgtgaccttctatatgcccagattgaatgcgaacgatactatatgcccactgcacaagagggaatgtgtggagcttattcgatttagaaccataatagcgatggaatcatgtcttgacgagtgcctgccatcgtgtttcgatctcagtttcagcgcaattgcctattcgacgagaatatcgctggacggctttagggagacaccttcgaatggtggttggaactttaccgatgcctatgtggagcgcagcgtagcggtggtgaatatgtattttaaggacccaacattccgagcaaacaaacagaccgaattcataggcttttccgattttctatgtgagttttcaatttacctgttgttttttctcagacaagaattcacacaaattgcgtacaatcctgcagctggcgttggaggtcttatgggattattcctcggcttcagctttctatccattgcagagtgtgtgtacttcgccttgattcgtccctgtcgcacttgctcggagattcgacaacttaatcagccaagggtgcatcaaatgaacttaaagaggagtccgactcctggcaacatcagatacatttcagcagccgattggtttcaggccgaattggcacatcagcagcccaataacaggcagcactttaatcctgcttaaacttagcaatagtaacactaatctagatgaggtcccagtatttggtcacgaattggtttttaggcaaagccaaattggtaggacgttcgtagttcagagcaaattgtttggccttcgactgtaattcgtcgtcgaaaatctagaagagcaaaatgtttatattaatcaatattaaaaaaaatcattcgatttcttcacttacattgcattcctttctgtccaagaggggtgctaagtcgaattccattacgggcagcgatgagttaataaaccgtgccgcattggccacctctggtacaacgtgtttctgcagcaacgtaatttcccacagcgaactgtttatggcctccgatttgacgggatccgtttctgtttgattgtaaggatcgctgacctcatcgactgcatggctggcgcgaatcaatttctgcaatccagtatgtctcaatagcagattgcaaacgaatcgaatcataataacagcatcttcggtcggcgattgaagggccaggcgagcgagacgcttaacgaatgccgccaccagattctcgggcaaatgggtggaggtcagaaagatatcggccaagtaaaacaggcgtgccttgtacttgttgtggaacatccgtggatagaacatattgtacagcttctcatacacatccggataggtgatattctgcttttgcataagcgtaaagattccctgaagagccagcaaggcaatggggccatctgaaaacataaaacgagtcgttagaaaggatcggttcagtttcggaaaactaaataccaaccaaactgatggagggagtccatgagaaagtcggtcagctggatgggatcgttcaggtggttgattacgcgctccagaagcaccacaagtatttgacgatgcagtttctcgtccacttcgttgccctttgccataatagtcgcccagagattattcagtcttttgcgatttaactcgtagttaaaagtctgctttttggcgctttccacgtggtaatctgccgtgctcagcacagactttcccatatccaagaggtttacaatggatagaaagttcatggccttaatggggctgtccttgaagtcttcatcgggcactaaggatttcaattgcgtcagggttatctctaatacatcgagatttttgcaatatttcccatagtttgccagcgctgttgtgggcgttgtatcgctatttattagggtttccagcatgccgcgaatccagtaggtgggccaacccttgttgggtgctatgggatgcttggcctccactttgatgagctgcatgcacacttttacagcaaccgaacactgcgagtcaaccagtagattctcgatgagaagcaaccaagtttcctcgtacagttttttgattttgagaccctgcttttcggtgccgtcgattgcctttcgttttagcagattcttgaatatcacctcgagtgtattcatcacctcgccagctggcatattatcgggcgtattcttctgcgtgcagataataataatttcatttaactcattaagttaattattaatttgttaaacttaccagcaattgtacgaatcccttgagcgttttgatgtccacttgctcggcatttagcagggaattggccttggactgcagcttcttcttagccaaagacttgccggtgtcatcgttcactttcacagttaagggtttcattttcggtttggcaaatgtacgctaaaacatattaattatgcgcaacaaacaaaaataagatgaatttatgccgcgtgcttccacagagttgccagatcagcggagaacgctaaacagaaggtatttttaaaccagatttttgtgtggtattttttagttacaacccagagttggtcatataccacgcttgggcctatcgatattttgcacgcgctggcagttcaaaaaataccatcactagggcgccaagcggaaaataaaatttaagaaataaacatatttataataataaacatattaaacataactgtgaattttatttaatgtaagttctcgaaagataaatattttttgtgtatttaactaattcagctgcgatattaatttaaaacaatacttctttgcaaacgttttcattcacaacgaaattcactcaagtttgagtctcactcagcgcttttgcgctcaaattcgctttcgtctctcaaacgaagccgctttgtttacaaatattttgttgctcctttgggaatttgcatgcgcgcctgttgcgttcttttcgatttcgttgggaacactgaaaattaacttgaagtgaatctaatttcaaattccgcatatggaaaaaacatataattaattataaataaatgttttaaataaattttgtttatacttcaatttttatattttaaggcaaaaatatattagccatattagtgcattcttatcttaaaaattgtttataatatttgaacatgttgacatgctgattccataattgttttcatttaaaaataaaatttataaataataaaatcccaactctttttgttgttgtgattgcgagtactgtaatatttcatgaaataataaaataaagattctaaaatatgctgagtttttttgtcgtaggcggccacgttcgaaaacgctcaactcgagtcgcgcatccttcgggtccttcggctgtgacttcgtcctgtgttttggttttgcgcccacttgcgactgtttcgatttggatggcgcgtagttcgctggcgaatgtcctgaccgacggttg

SEQ ID NO: 5294 - DNA, 1645 bp, DROSOPHILA
aattcatcttatttttgtttgttgcgcataattaatatgttttagcgtacatttgccaaaccgaaaatgaaacccttaactgtgaaagtgaacgatgacaccggcaagtctttggctaagaagaagctgcagtccaaggccaattccctgctaaatgccgagcaagtggacatcaaaacgctcaagggattcgtacaattgctgaagaatacgcccgataatatgccagctggcgaggtgatgaatacactcgaggtgatattcaagaatctgctaaaacgaaaggcaatcgacggcaccgaaaagcagggtctcaaaatcaaaaaactgtacgaggaaacttggttgcttctcatcgagaatctactggttgactcgcagtgttcggttgctgtaaaagtgtgcatgcagctcatcaaagtggaggccaagcatcccatagcacccaacaagggttggcccacctactggattcgcggcatgctggaaaccctaataaatagcgatacaacgcccacaacagcgctggcaaactatgggaaatattgcaaaaatctcgatgtattagagataaccctgacgcaattgaaatccttagtgcccgatgaagacttcaaggacagccccattaaggccatgaactttctatccattgtaaacctcttggatatgggaaagtctgtgctgagcacggcagattaccacgtggaaagcgccaaaaagcagacttttaactacgagttaaatcgcaaaagactgaataatctctgggcgactattatggcaaagggcaacgaagtggacgagaaactgcatcgtcaaatacttgtggtgcttctggagcgcgtaatcaaccacctgaacgatcccatccagctgaccgactttctcatggactccctccatcagtttgatggccccattgccttgctggctcttcagggaatctttacgcttatgcaaaagcagaatatcacctatccggatgtgtatgagaagctgtacaatatgttctatccacggatgttccacaacaagtacaaggcacgcctgttttacttggccgatatctttctgacctccacccatttgcccgagaatctggtggcggcattcgttaagcgtctcgctcgcctggcccttcaatcgccgaccgaagatgctgttattatgattcgattcgtttgcaatctgctattgagacatactggattgcagaaattgattcgcgccagccatgcagtcgatgaggtcagcgatccttacaatcaaacagaaacggatcccgtcaaatcggaggccataaacagttcgctgtgggaaattacgttgctgcagaaacacgttgtaccagaggtggccaatgcggcacggtttattaactcatcgctgcccgtaatggaattcgacttagcacccctcttggacagaaaggaatgcaatattttcgacgacgaattacagtcgaaggccaaacaatttgctctgaactacgaacgtcctaccaatttggctttgcctaaaaaccaattcgtgaccaaatactgggacctcatctagattagtgttactattgctaagtttaagcaggattaaagtgctgcctgttattgggctgctgatgtgccaattcggcctgaaacca

SEQ ID NO: 5295 - protein, 497 aa, DROSOPHILA
MKPLTVKVNDDTGKSLAKKKLQSKANSLLNAEQVDIKTLKGFVQLLKNTPDNMPAGEVMNTLEVIFKNLLKRKAIDGTEKQGLKIKKLYEETWLLLIENLLVDSQCSVAVKVCMQLIKVEAKHPIAPNKGWPTYWIRGMLETLINSDTTPTTALANYGKYCKNLDVLEITLTQLKSLVPDEDFKDSPIKAMNFLSIVNLLDMGKSVLSTADYHVESAKKQTFNYELNRKRLNNLWATIMAKGNEVDEKLHRQILVVLLERVINHLNDPIQLTDFLMDSLHQFDGPIALLALQGIFTLMQKQNITYPDVYEKLYNMFYPRMFHNKYKARLFYLADIFLTSTHLPENLVAAFVKRLARLALQSPTEDAVIMIRFVCNLLLRHTGLQKLIRASHAVDEVSDPYNQTETDPVKSEAINSSLWEITLLQKHVVPEVANAARFINSSLPVMEFDLAPLLDRKECNIFDDELQSKAKQFALNYERPTNLALPKNQFVTKYWDLI

SEQ ID NO: 5296 - DNA, 7041 bp, DROSOPHILA
cggatcggcggatctgccggcgccagtcggaaagcaaaagagagcggccatccgtgaatcacttgcccaaaagcgtccgcgtcctcagctatgtatgaaatcagaggcatttccaggaagccagcgaaactcggaacaatcgaaagagcaatcagttggcgaactgatataaactaaatcgaaaacgtcaccgacgtcaagcaattggatatttagatcccaaatataattaccatatatggatatggaatggtttagttttataaatactgacccttaactggaacttgtcacgaagtaaaatgcgcacaaggatgaactgcggataggaggcttgtagagaaaaccatgtatcactcgattatgacataactatttattatttatatttatatcttctatctatatatatcttatatcattctgggagcgaccttttgccaaatatcggaacagagataaactgatattccaagtaggcatggcatggaccacagacaactaacgactcatgcccgatttcccagaagaatgacgcggcaaaggcaacaagacaacaaatccaaataggaggggaatcgatgaatgaatgaattttcgttggcccccaaacgaccttccacccgagccaccccctgtggcccacacacaaggctggggaactccgtcggcttcccgccgatcgacgatcgctgtgctcaatggacgggtgactcatacggactaggccagtttcacgacgtcatgcttaaggttgttatttgctttgcgagcgagcgataagtgggcactgcggagagcgaaagctcgcgagccgagtggcaaacgccgccggcaaactggtcccgagcagccagtgcccctcgaagtcagccggttggtcatggggcagccgagtcggcgagagagcgccaagtggaaagctcatgggagccgacttcgtcatggctttatcactgttcgccggcgctgatcattagttcgtcactcgccaagtgggtcggatcagggccagagcgatcgaagatcggcgatctggagtggaatacggcgctactcttaacccgatcggcggatctgtaatcggtcgatgcaataacggttattaaacgtttccaatcgcaaactttccgcgaaagatttccgcgatttgcggcacgtggaaagcctgccgctgactccacttgtccggtcagcaggtgaaataccctgactatctcgggtgaatcatccagccagacgaacacacatcctaaatccgtttcaaccggttgcaggctaccaataaacgcaataatgcgaaagtgtgattcctagaatattatgattaaacagggccaaagtgaagtgaatattctagtagtgcaaaagggcgccaaaaacataaacaataaagtgtaattaagtgcacttaccaaaaatcaagctggtataatgaaatcttagtgaaaatcaaacaataagcaaatatagattagatgaatttatatgccaaccgaataatgtcaaagaaaagtgaaacggtaaagctaccaaaagtctttagctaatagctgatattgcactttcgaagtgggagcaggaacatcccagcttaatggccattctacagaatagccgccagagccacaagcaactcccaatcatcagccagacgattcgcagtgcttggtgccaacagaggccgattaatgccatgcatcaggatgtccggcaaaaaagcatcggatccggaaacgagaccaaactggaagcgaaggagacggaagttcccaccaacagaagaagacgcagaaggcgttgcagcagtagctccaccagcgactcaagcgcatcctcatattcctcaacagactcggattccgggtcctccaccagcagcagtagcataagaagccaattacccgccctcaacttgccagtgcccctcccgctggcgacacccactccgcccgccgtttcatcgcctcaccaggcgccatctcctcgaaggaactccagcgactccaaccggagcgtctctcccgtggaggtgcccgtggatccgcacgcttggacgcccgaggacattgccagctgggtgagatgggcgacgcgcaagttcaaactggacccggagccggatatcgacaggtttcccaaggatgcccaggagctgtgcgatctgtctcgcgcggacttctgggtctgtgcaggatcaaggcgcggaggcatgctcctggcgcagcacttcgcgatcagcttataccacgccaccggacgggagacgagtccgatgctcaacgacgacgaaccaagtgagtgcctaagatagagcttatttgaagagggatttcaaatcctagcctatgtcctcttatggcttagtctttgaattcctatttctgaagtgccaacccttccagaatcgagtaaaactacttaaacggagccacatttttctcactgtcccaagctaatctcgggccacataaatctgcagagtccagagattgaactgcttggtaattgggttcacgtgctattcccagcggagcgattgtccgactctcgaatcctttgtggtcaggcatcaattgaatccttttgcctccgtcgccggccaaatggccactgattaagatgccttcgtgctgatacggctgtaacttatgtgctccattgattgtttctcccacacttctccggatgtcttgataaggaggaaaagtggccgaaggtgcgggaaatccccttttaattacctttcgctcgagttggccaactttctccgagactccattaacgtaagtcgttgggaaaatctctgcgcgacagcagcaaagtatgcaacacttttccagttattaactggcgatgactgccaacgcaaaggcgatgggcgttggggggggatggggggggggcgtgtcagggccttgtgggtggtcgcgtcaagtgatgaacttaataataaacgatgtaaatatgataatttctcgcaggatgtggcatctaataataaaatcaaaataatcccacgccagcgacaaaagtcgccgagtcaagtttcagcttggcggaaaaagtgggctgaaggtcgggtggtttggatggcttggatagctgagatgggttgggtggtttgtccgtgacaacagctctgcgggtggtcagcttttgggcacaggaaaatattcattcgtcgcatccttcctgtggcaggaagagcaagtgcagggcgggcaaagccccctgattcgggtctggcatatgctggtggatgggtgttccatggactacacatacatgccttgatcccgggagcaggcgacgtcgatttaattgatttgttttttatgccaaccaggattacgcgtcgtcgccgtcacgcagattacatttgttgtgggctacggttgtggctcccatgtctgagtcaccgccccctttacagggtacaaactggatcaaagccattccctgttcacaatgccacagccaccaatagtacgtaccttgaggaacataccaatgaaaccattagtcatatgatttcccaaaaactcggatatatttccccacgcaaacagaatacttttctggttccatcatccatcggacgcgcccctgccaccttataatatatccagccactcgcaactgggtatgcattagtcgaaacgctgcaaaagaacaagttgcttatcgtgtgcgaaggggtgggtgctggttgagtggctgcacgtggcctctgactttgcgacttccctggcaaatgccgaagcggcatttaccaccagctgcgcaggtgagccgtaatcgtgcccggagcttcgactgcttcgcggatgcccatgctcccatccaagatgccagatgccaggcatccgtccggtgctaaggagcgaaatccggccagcgcttctggctaaagtttcagtcggcgaatggctctcgtcctaaacggttgacgcgctcccggcatagaccttcattgatggtcatagaacaatccaatcgggtcaaaggtcaatccaacgcagcattcaaagcaaacctaaactataatagctaaccaaatagaaagaaattgcttacaagcttacaatttctaactgcaaagtgtaaaatgcgattgattattttaagaaataatccaaatgctgatgtgacttaatcgaagatatttactaaagtttaaaacggaaatagtttagtgacttgcacttgcaatttctgaaaaagacttttgcgaccatgagcgtcagcgtggacgtgggcgtcatgtggcgcctctcggaggacttcaaccggcgctttggcctccggatgcagccggccccgccagttgggcagcacccccatccgcaccacggtgccgtgcaccaccactaccaccaccaccaccagcaccaccagcatccgcacacctcgatgatcttcaatggtaagagcgccgaaattcataggaatttccgctgggcaaatgccagccgccaggcgaagaatgagcggcacgaggagattgctcaatggcagccacgagatctctggcatttccggcgaccggtggcggggccccaagaaatatgaatgaacgaatggcacgggatggtgggtccaacggtccgacattgtctagaagtgggaactgtgtcttttagccggcgcgttgctcgatcggcggatgagtcaccttgattatggcttcgtgctgttgcggcggcactttgaccagggatttcccctgtggaggtgcatagacctcgggatgtgggaatgtccccatgggcagtaaacaggaaaatttatctcccttgcgccccatagatgcatgccactcagtttgcagtctatacatatgcatgcaaatcaaatatcttgaacttttaagttcgtgtttctcacattttagcacttgaatttcaatataatatttcaactgatgcccgttttcttcgtgtgcatcgtgagatccaggatttatgcccgtttgcggttgactttctgtgaatccgcgctggcttatggcattcagcccacttggcactcttgccacgtcgcggctccccgccagaaatctcgtttggctgggctggcgtttcgttcgcgatgttctcctctcgctcgctcttggcatctcttcggccaagtatctgtatctgtacatgtatctgtatctgtatttgtatctgtatctgtttttgcgagtattcgccactaatgccccgtcctccgcttctctctctttcagatccgtaccagctgctgaacgctgcctcgcaccgattggttgcccaaggctcagggggccaaatccagctgtggcagtttctgctggagctgctcgctgattcgtccaacgcgaacgccatcagctgggagggccaatcgggcgagttccggctcatcgacccggacgaggtggccaggcggtggggcgagcgcaaggccaaaccgaacatgaactacgacaagctgagccgggcactcaggtgggtactctcgtctccgggcacagcgattcacgatgtgaagcaaatttgtatgtttgtgcattttctgttcgcaggtactactacgacaagaacatcatgaccaaggtgcacggaaagcggtatgcctacaagtttgacttccacggtctgatggccgcatgccaggctcaggcgcagggaggagatccggcctccagtatgctgggttcctacaatcaccacgccggcggtgcgatgcagttgggccgccacccgccgccactgcaccaccatccacagcactcacatccgcaccaccagctggggcagccccactttctgcacccgcaccactcgtcgcccgcctcgaacagctccagcctgggattcccctcgtcctcgacggcctcttcgcaggcctcgcccggccaggcgcccgcctcctcctccgcctccacttcgaattttactgctccattccaaggtgggacagccggcgtagacccggccaggacgtccacatcttctgcgggaaactacgaccagggcccggtcactcccaccacaaatgcattcaactgagcacgccgcaaccccaatttgtcgccggggttgtaagttccgatggggcaggaggatgcgcaggaccacccactgcggcgcagcaaagagcggagagccaccctgcatcccagccacccatccacccatccacccagtcccccagctattgggggtcagagcttcggccgtaaaaaaggtcattttgtgtaattccagctactttgggttaattgaggaattgtgatagcccgtagcatcgcagagcaatactcggaaacgagagccaatttgttacttagcctgttatccttcgcttctagttgtaagcagacattcggcagaggtcctttattccatacgaggtctcatcattaaataattataagttcgcacacacattaaatacatgaaatcgcaaatgcaaaactagttcagagtgcgcactggcttgggatgtggccttgagtctcgagcatccctacacggagcacctgatggccagaatgaggaaggccaggctgaaggaaacgaaggaaatgcggtccacggcggtggccagcagcgcccagtcgaactggttggccttggcgcccggcacctcggtgtggttgatgcccagcggactggactcctgctcgtccgcctcctcgtacgggtgctcgtccatctccttggtcttctccgcctgcgactcgccggtggtgctgaacaccgagagcagcagccacgtgcccaggtgcccgtgcaacagctttctcagcgcctccggcaggcgcctcttgtgcttgcctgtggccaggtacagaactagaacctcgacgatggtggagacgctcagatacagcaggctggtgctgtagaagattactgcaattataggaatgcccggtgagtggtcggtaagttcggtaatattctgcgatgtttagggtacttagcatctagttttcagaactgaactgatgaaatggcaatggggagcactcacccacaagtggagtattgttggacagcactg

SEQ ID NO: 5297 - DNA, 2025 bp, DROSOPHILA
tcggatcagggccagagcgatcgaagatcggcgatctggagtggaatacggcgctactcttaacccgatcggcggatctgtaatcggtcgatgcaataacggttattaaacgtttccaatcgcaaactttccgcgaaagatttccgcgatttgcggcacgtggaaagcctgccgctgactccacttgtccggtcagcaggtgaaataccctgactatctcgggtgaatcatccagccagacgaacacacatcctaaatccgtttcaaccggttgcaggctaccaataaacgcaataatgcgaaagtgtgattcctagaatattatgattaaacagggccaaagtgaagtgaatattctagtagtgcaaaagggcgccaaaaacataaacaataaagtgtaattaagtgcacttaccaaaaatcaagctggtataatgaaatcttagtgaaaatcaaacaataagcaaatatagattagatgaatttatatgccaaccgaataatgtcaaagaaaagtgaaacggtaaagctaccaaaagtctttagctaatagctgatattgcactttcgaagtgggagcaggaacatcccagcttaatggccattctacagaatagccgccagagccacaagcaactcccaatcatcagccagacgattcgcagtgcttggtgccaacagaggccgattaatgccatgcatcaggatgtccggcaaaaaagcatcggatccggaaacgagaccaaactggaagcgaaggagacggaagttcccaccaacagaagaagacgcagaaggcgttgcagcagtagctccaccagcgactcaagcgcatcctcatattcctcaacagactcggattccgggtcctccaccagcagcagtagcataagaagccaattacccgccctcaacttgccagtgcccctcccgctggcgacacccactccgcccgccgtttcatcgcctcaccaggcgccatctcctcgaaggaactccagcgactccaaccggagcgtctctcccgtggaggtgcccgtggatccgcacgcttggacgcccgaggacattgccagctgggtgagatgggcgacgcgcaagttcaaactggacccggagccggatatcgacaggtttcccaaggatgcccaggagctgtgcgatctgtctcgcgcggacttctgggtctgtgcaggatcaaggcgcggaggcatgctcctggcgcagcacttcgcgatcagcttataccacgccaccggacgggagacgagtccgatgctcaacgacgacgaaccaaatccgtaccagctgctgaacgctgcctcgcaccgattggttgcccaaggctcagggggccaaatccagctgtggcagtttctgctggagctgctcgctgattcgtccaacgcgaacgccatcagctgggagggccaatcgggcgagttccggctcatcgacccggacgaggtggccaggcggtggggcgagcgcaaggccaaaccgaacatgaactacgacaagctgagccgggcactcaggtactactacgacaagaacatcatgaccaaggtgcacggaaagcggtatgcctacaagtttgacttccacggtctgatggccgcatgccaggctcaggcgcagggaggagatccggcctccagtatgctgggttcctacaatcaccacgccggcggtgcgatgcagttgggccgccacccgccgccactgcaccaccatccacagcactcacatccgcaccaccagctggggcagccccactttctgcacccgcaccactcgtcgcccgcctcgaacagctccagcctgggattcccctcgtcctcgacggcctcttcgcaggcctcgcccggccaggcgcccgcctcctcctccgcctccacttcgaattttactgctccattccaaggtgggacagccggcgtagacccggccaggacgtccacatcttctgcgggaaactacgaccagggcccggtcactcccaccacaaatgcattcaactga

SEQ ID NO: 5298 - protein, 475 aa, DROSOPHILA
MAILQNSRQSHKQLPIISQTIRSAWCQQRPINAMHQDVRQKSIGSGNETKLEAKETEVPTNRRRRRRRCSSSSTSDSSASSYSSTDSDSGSSTSSSSIRSQLPALNLPVPLPLATPTPPAVSSPHQAPSPRRNSSDSNRSVSPVEVPVDPHAWTPEDIASWVRWATRKFKLDPEPDIDRFPKDAQELCDLSRADFWVCAGSRRGGMLLAQHFAISLYHATGRETSPMLNDDEPNPYQLLNAASHRLVAQGSGGQIQLWQFLLELLADSSNANAISWEGQSGEFRLIDPDEVARRWGERKAKPNMNYDKLSRALRYYYDKNIMTKVHGKRYAYKFDFHGLMAACQAQAQGGDPASSMLGSYNHHAGGAMQLGRHPPPLHHHPQHSHPHHQLGQPHFLHPHHSSPASNSSSLGFPSSSTASSQASPGQAPASSSASTSNFTAPFQGGTAGVDPARTSTSSAGNYDQGPVTPTTNAFN

SEQ ID NO: 5299 - DNA, 3838 bp, DROSOPHILA
ctatcgcaagcgaggctttcagccggacggtgataatcctctttaccctcgacgagcccaaggaacaggggagtcattgggactatcgctgaccctggatgtccaggcggatgcctactactgctcctcatccagcagcattggcttcaagatcgccctgcatagcccgaatgaatcgccgaatgtccgggagaccggagtcctattggcacccggaatggagaccaagttgcgcatagatccgtcgaaaattcttaccgagaagcatctacgcaatgtggaccgtcggagcaggcgttgtttattccacaatgagctaaaacttcgctggttcgcccactacacccagagaaattgtgtggccgagtgcctttccggctggctaatccgccactgcggctgtgtgaccttctatatgcccagattgaatgcgaacgatactatatgcccactgcacaagagggaatgtgtggagcttattcgatttagaaccataatagcgatggaatcatgtcttgacgagtgcctgccatcgtgtttcgatctcagtttcagcgcaattgcctattcgacgagaatatcgctggacggctttagggagacaccttcgaatggtggttggaactttaccgatgcctatgtggagcgcagcgtagcggtggtgaatatgtattttaaggacccaacattccgagcaaacaaacagaccgaattcataggcttttccgattttctatgtgagttttcaatttacctgttgttttttctcagacaagaattcacacaaattgcgtacaatcctgcagctggcgttggaggtcttatgggattattcctcggcttcagctttctatccattgcagagtgtgtgtacttcgccttgattcgtccctgtcgcacttgctcggagattcgacaacttaatcagccaagggtgcatcaaatgaacttaaagaggagtccgactcctggcaacatcagatacatttcagcagccgattggtttcaggccgaattggcacatcagcagcccaataacaggcagcactttaatcctgcttaaacttagcaatagtaacactaatctagatgaggtcccagtatttggtcacgaattggtttttaggcaaagccaaattggtaggacgttcgtagttcagagcaaattgtttggccttcgactgtaattcgtcgtcgaaaatctagaagagcaaaatgtttatattaatcaatattaaaaaaaatcattcgatttcttcacttacattgcattcctttctgtccaagaggggtgctaagtcgaattccattacgggcagcgatgagttaataaaccgtgccgcattggccacctctggtacaacgtgtttctgcagcaacgtaatttcccacagcgaactgtttatggcctccgatttgacgggatccgtttctgtttgattgtaaggatcgctgacctcatcgactgcatggctggcgcgaatcaatttctgcaatccagtatgtctcaatagcagattgcaaacgaatcgaatcataataacagcatcttcggtcggcgattgaagggccaggcgagcgagacgcttaacgaatgccgccaccagattctcgggcaaatgggtggaggtcagaaagatatcggccaagtaaaacaggcgtgccttgtacttgttgtggaacatccgtggatagaacatattgtacagcttctcatacacatccggataggtgatattctgcttttgcataagcgtaaagattccctgaagagccagcaaggcaatggggccatctgaaaacataaaacgagtcgttagaaaggatcggttcagtttcggaaaactaaataccaaccaaactgatggagggagtccatgagaaagtcggtcagctggatgggatcgttcaggtggttgattacgcgctccagaagcaccacaagtatttgacgatgcagtttctcgtccacttcgttgccctttgccataatagtcgcccagagattattcagtcttttgcgatttaactcgtagttaaaagtctgctttttggcgctttccacgtggtaatctgccgtgctcagcacagactttcccatatccaagaggtttacaatggatagaaagttcatggccttaatggggctgtccttgaagtcttcatcgggcactaaggatttcaattgcgtcagggttatctctaatacatcgagatttttgcaatatttcccatagtttgccagcgctgttgtgggcgttgtatcgctatttattagggtttccagcatgccgcgaatccagtaggtgggccaacccttgttgggtgctatgggatgcttggcctccactttgatgagctgcatgcacacttttacagcaaccgaacactgcgagtcaaccagtagattctcgatgagaagcaaccaagtttcctcgtacagttttttgattttgagaccctgcttttcggtgccgtcgattgcctttcgttttagcagattcttgaatatcacctcgagtgtattcatcacctcgccagctggcatattatcgggcgtattcttctgcgtgcagataataataatttcatttaactcattaagttaattattaatttgttaaacttaccagcaattgtacgaatcccttgagcgttttgatgtccacttgctcggcatttagcagggaattggccttggactgcagcttcttcttagccaaagacttgccggtgtcatcgttcactttcacagttaagggtttcattttcggtttggcaaatgtacgctaaaacatattaattatgcgcaacaaacaaaaataagatgaatttatgccgcgtgcttccacagagttgccagatcagcggagaacgctaaacagaaggtatttttaaaccagatttttgtgtggtattttttagttacaacccagagttggtcatataccacgcttgggcctatcgatattttgcacgcgctggcagttcaaaaaataccatcactagggcgccaagcggaaaataaaatttaagaaataaacatatttataataataaacatattaaacataactgtgaattttatttaatgtaagttctcgaaagataaatattttttgtgtatttaactaattcagctgcgatattaatttaaaacaatacttctttgcaaacgttttcattcacaacgaaattcactcaagtttgagtctcactcagcgcttttgcgctcaaattcgctttcgtctctcaaacgaagccgctttgtttacaaatattttgttgctcctttgggaatttgcatgcgcgcctgttgcgttcttttcgatttcgttgggaacactgaaaattaacttgaagtgaatctaatttcaaattccgcatatggaaaaaacatataattaattataaataaatgttttaaataaattttgtttatacttcaatttttatattttaaggcaaaaatatattagccatattagtgcattcttatcttaaaaattgtttataatatttgaacatgttgacatgctgattccataattgttttcatttaaaaataaaatttataaataataaaatcccaactctttttgttgttgtgattgcgagtactgtaatatttcatgaaataataaaataaagattctaaaatatgctgagtttttttgtcgtaggcggccacgttcgaaaacgctcaactcgagtcgcgcatccttcgggtccttcggctgtgacttcgtcctgtgttttggttttgcgcccacttgcgactgtttcgatttggatggcgcgtagttcgctggcgaatgtcctgaccgacggttgtgtg

SEQ ID NO: 5300 - DNA, 1646 bp, DROSOPHILA
cataaattcatcttatttttgtttgttgcgcataattaatatgttttagcgtacatttgccaaaccgaaaatgaaacccttaactgtgaaagtgaacgatgacaccggcaagtctttggctaagaagaagctgcagtccaaggccaattccctgctaaatgccgagcaagtggacatcaaaacgctcaagggattcgtacaattgctgaatacgcccgataatatgccagctggcgaggtgatgaatacactcgaggtgatattcaagaatctgctaaaacgaaaggcaatcgacggcaccgaaaagcagggtctcaaaatcaaaaaactgtacgaggaaacttggttgcttctcatcgagaatctactggttgactcgcagtgttcggttgctgtaaaagtgtgcatgcagctcatcaaagtggaggccaagcatcccatagcacccaacaagggttggcccacctactggattcgcggcatgctggaaaccctaataaatagcgatacaacgcccacaacagcgctggcaaactatgggaaatattgcaaaaatctcgatgtattagagataaccctgacgcaattgaaatccttagtgcccgatgaagacttcaaggacagccccattaaggccatgaactttctatccattgtaaacctcttggatatgggaaagtctgtgctgagcacggcagattaccacgtggaaagcgccaaaaagcagacttttaactacgagttaaatcgcaaaagactgaataatctctgggcgactattatggcaaagggcaacgaagtggacgagaaactgcatcgtcaaatacttgtggtgcttctggagcgcgtaatcaaccacctgaacgatcccatccagctgaccgactttctcatggactccctccatcagtttgatggccccattgccttgctggctcttcagggaatctttacgcttatgcaaaagcagaatatcacctatccggatgtgtatgagaagctgtacaatatgttctatccacggatgttccacaacaagtacaaggcacgcctgttttacttggccgatatctttctgacctccacccatttgcccgagaatctggtggcggcattcgttaagcgtctcgctcgcctggcccttcaatcgccgaccgaagatgctgttattatgattcgattcgtttgcaatctgctattgagacatactggattgcagaaattgattcgcgccagccatgcagtcgatgaggtcagcgatccttacaatcaaacagaaacggatcccgtcaaatcggaggccataaacagttcgctgtgggaaattacgttgctgcagaaacacgttgtaccagaggtggccaatgcggcacggtttattaactcatcgctgcccgtaatggaattcgacttagcacccctcttggacagaaaggaatgcaatattttcgacgacgaattacagtcgaaggccaaacaatttgctctgaactacgaacgtcctaccaatttggctttgcctaaaaaccaattcgtgaccaaatactgggacctcatctagattagtgttactattgctaagtttaagcaggattaaagtgctgcctgttattgggctgctgatgtgccaattcggcctgaaacca

SEQ ID NO: 5301 - protein, 496 aa, DROSOPHILA
MKPLTVKVNDDTGKSLAKKKLQSKANSLLNAEQVDIKTLKGFVQLLNTPDNMPAGEVMNTLEVIFKNLLKRKAIDGTEKQGLKIKKLYEETWLLLIENLLVDSQCSVAVKVCMQLIKVEAKHPIAPNKGWPTYWIRGMLETLINSDTTPTTALANYGKYCKNLDVLEITLTQLKSLVPDEDFKDSPIKAMNFLSIVNLLDMGKSVLSTADYHVESAKKQTFNYELNRKRLNNLWATIMAKGNEVDEKLHRQILVVLLERVINHLNDPIQLTDFLMDSLHQFDGPIALLALQGIFTLMQKQNITYPDVYEKLYNMFYPRMFHNKYKARLFYLADIFLTSTHLPENLVAAFVKRLARLALQSPTEDAVIMIRFVCNLLLRHTGLQKLIRASHAVDEVSDPYNQTETDPVKSEAINSSLWEITLLQKHVVPEVANAARFINSSLPVMEFDLAPLLDRKECNIFDDELQSKAKQFALNYERPTNLALPKNQFVTKYWDLI

SEQ ID NO: 5302 - DNA, 4284 bp, DROSOPHILA
ctccttcaaccttcgccgcagctcgtagtcctggggcaggatgtcacacagcaggtagtacttttcgttcttggcgtacttgccatcgggcagctgatccaggaacattgtggtgcaatattgctcgaattcgtgggctaaaatgggtaacaattattaaattttcagggtagggttgctgattctctcactgtgaaactccttttcccagtactggaggtagtcctccagaagcgctatatcctccacatcggcgatgaccagtcggtgctccatatacaaatgcgccaggcagtcatctttatctgacggaaatatgtacaccttgtcgcatttcaggcacttgatggccgtgttcttggagggcttgagtttcgaactgccagtgatctcctccagcgaggaatcccctcctgaaacagccacctcgtgctccatttgtttacgttctcctggtgctccacgaataagtgtgaccgcaggtgcttagcggcaaaatactgtttgcgagataagcttaattatgacgtacactggaaacaattgaaaatttaatgaatttaatttaatgcacaaaaaaaattaaataaatacttacaactgtcttatgaagactaaataatcaaaaaatgatattcagtattttcgatgtagacaacacgtactggaaatgttaatatccttataggatattatacgattcaaatatttgtaacttatctgtgaattaaaattctgaaacttacaaatacattgttcgttaagttttcaacagactatgatgaatcagcagcatcttatcggttaaaaatgtttttttcggaactctgtgattcaatgcttatactatggcaatagttaaaaattcttaagttagtaatattttagattgttttttggggttgacgaacttgagatgttcgccatgtaaccatagggcatttcggctgctgggtataaaaggagctgatagttgggtggggacgtgcagttgagaatcagcaactgctcgctaaaggtcctcctaatcgcgaatccatcgaaaatggccgacaagaagaatctgctccttctgttcgatcatcccacggagcccgtgttcatggacaagggtggcaatggcaccgtcttcgacgtgcccgactcctacgtgaccgatcgctacaatcagatgtgcaagaaggtccagcggcgcgtgagcagcgcgtccgagaagaacgttcaagtcaaggagatcgccataccggatctcagttgctccatgagactgggccgctcggagcagttctcgatcttcctgaagtcccaccgcaagatggccagccacctgatcgagatcttcaccaaaatgcagaccgtggatgagctgcagagcgtggcggtgtacgccagggatcgcgtcaatccggtgctcttcaactacgccttgtcggtggccctgctccaccgtccggacaccaaggacctcgaactgcccgcctttgcgcagaccttcccggatcgctttatcgactcgaagatgcttcgcagcatgcgcgaggagtcctttgtggtggagcgctccgccgcccgcctgcccgtcgtcagttcggtcaagtacaccgcctccgatctcgatgtggagcaccggctgtggtacttccgcgaggacctgggcgtcaacctgcaccactggcactggcatctggtctatcccatagaggcgcccgaccgcagcatcgtggacaaggaccgtcgtggcgagctgttctactatatgcaccagcagatcattgcccgctacaatgccgagcggctgagcaaccacatggcccgggtgcagccgttcaacaacctggacgaaccaattgccgagggctacttccccaagatggactcgctggtggccagtagggcgtatcctccgcgcttcgataacacccggctgagcgatgtggaccggcctaacaaccagttgagggttggcatcgatgatatgaagcgctggcgcgaacgcatctacgaggccatccatcagggctacgttttggatgtgagtggggagctctccgattccaggagtacatgcatccaacaactaattggttattttttagacgaacaatgaaaagatcgtgctggatgacgctaagggcatcgacatcctgggcaacatcatcgaggcttccgatctgacgcccaacagtacgctggtaaggaatctaagtgataatctgtagatcacctttccatgtatattatttccatctgcagtacggcgacttccacaacatggggcacatactgattgcctactcacacgatccgaccaacaagcacctggagtacgcgggcgtgatgggcgacgcctccaccgcgatgcgcgatccgatcttctacaagtggcacgccttcatcgacaatatgttccaggagcacaaacgtctgctttctccctatgagaagcaagagctcagctttccggacgttcgcgtcgagagcatccaggtggagagccagggtcaggtcaacaggctgaccaccttctggcaggagtccgatgtggacatgtcccgtggccttgattttgtgccgcgcggccatgtcctcgctcggttcacccatctgcagcaccacgaattcagctacaccatcaaggtggagaactccagcgaggccacgcggtatggctacgtgcgcatcttcctggcgcccaagctggatgatcgcaatgcacccatgctgctggagcaacagcgcctgatgatggtggagctggacaagttcgtggttaccatgcctcccggcagccatacgatcacccggaactccacggagtcgagtgtcaccattccgttcgagcgcaccttccgcaacctggacaagctggaggagctgcagaacttcttgtgcggctgcggttggccccagcacatgctgattccgaagggtcggcccgagggtctgcgcttcgagctcttcgtcatggtttccaactacgaagaggataaggtaaggtgtctttagagtatactgcgaatgcctcctgatcccaatcctctttccttgtgcaggttgaccagacggtcgcagattgcggctgcagcatcgccgcttcctactgcggcctgcgcgatcgcctctatccggatcgcaagtccatgggcttccccttcgatcgcaagccgcgtcgaggctccgagatcctggagaacttcctgacgcccaacatgtgcgccgtggaggtcatcattacccacgaggaccgcaccgagaagcttcgcgaggtaccagctcgctcctgaataagagaagcatcttgttatggccagtttcattttttggcttaaagagaagccactaataacggtctatagctttctcgctgtgtagaaaataccaaataaattaatgaaatactatcagatgccaaaataccagtttaccgttggaactccccgcgaacggtcacactgtgctgcggttgggggcggaattgaatttatttgcaaacaaaaatcgaaacacgggagctcgacgttagcgtaagtgttacggccaccgattcagctgctggccaattaaaatatcatcgatgttgcacacagatacgccgcacagacactcacgcacacacgcaccgcctgggagcaagattcgagcccagaatctcaatttgatcaatttagcattctggccatttgacaatacaaattgagactcgtctgcactgggtacaaagttcagtccgtgtgcattggcctgtgcctgtgtgcgtgcattcgggcgtgtgtgcctgtgtgagtctgtgtgtgcagtacgcaaatgagaggagaaaaagcaagaaaccactgccaatcatttttcagtctgtgtccaaagcgcttgtgtgaaagtattctgattcgcccgcccgcccgtgaaagtgttttctgcaattttccgcatccgcattcgcatcacaatggctgcgcacttttttcgcactgcattttacgcaacggcggccagaaaatcgatgagtctgcccttcgccggccggacagccgcaactctagccgtgggcctatcattcggtggtaaatccctgtcctcccgcatctcaccgacttatttataacttttgcattgcccaccatccccaccgccatcgccactcccaatataccaacgcacgcgagtagcgcaaaatagccgggcagccgtgccgtacgagaatgcctacgcggacagcttcttcgggggctgccagacgcagggactgctccagcggattccccagaccggatacatccagcccccgct

SEQ ID NO: 5303 - DNA, 2097 bp, DROSOPHILA
agcaactgctcgctaaaggtcctcctaatcgcgaatccatcgaaaatggccgacaagaagaatctgctccttctgttcgatcatcccacggagcccgtgttcatggacaagggtggcaatggcaccgtcttcgacgtgcccgactcctacgtgaccgatcgctacaatcagatgtgcaagaaggtccagcggcgcgtgagcagcgcgtccgagaagaacgttcaagtcaaggagatcgccataccggatctcagttgctccatgagactgggccgctcggagcagttctcgatcttcctgaagtcccaccgcaagatggccagccacctgatcgagatcttcaccaaaatgcagaccgtggatgagctgcagagcgtggcggtgtacgccagggatcgcgtcaatccggtgctcttcaactacgccttgtcggtggccctgctccaccgtccggacaccaaggacctcgaactgcccgcctttgcgcagaccttcccggatcgctttatcgactcgaagatgcttcgcagcatgcgcgaggagtcctttgtggtggagcgctccgccgcccgcctgcccgtcgtcagttcggtcaagtacaccgcctccgatctcgatgtggagcaccggctgtggtacttccgcgaggacctgggcgtcaacctgcaccactggcactggcatctggtctatcccatagaggcgcccgaccgcagcatcgtggacaaggaccgtcgtggcgagctgttctactatatgcaccagcagatcattgcccgctacaatgccgagcggctgagcaaccacatggcccgggtgcagccgttcaacaacctggacgaaccaattgccgagggctacttccccaagatggactcgctggtggccagtagggcgtatcctccgcgcttcgataacacccggctgagcgatgtggaccggcctaacaaccagttgagggttggcatcgatgatatgaagcgctggcgcgaacgcatctacgaggccatccatcagggctacgttttggatacgaacaatgaaaagatcgtgctggatgacgctaagggcatcgacatcctgggcaacatcatcgaggcttccgatctgacgcccaacagtacgctgtacggcgacttccacaacatggggcacatactgattgcctactcacacgatccgaccaacaagcacctggagtacgcgggcgtgatgggcgacgcctccaccgcgatgcgcgatccgatcttctacaagtggcacgccttcatcgacaatatgttccaggagcacaaacgtctgctttctccctatgagaagcaagagctcagctttccggacgttcgcgtcgagagcatccaggtggagagccagggtcaggtcaacaggctgaccaccttctggcaggagtccgatgtggacatgtcccgtggccttgattttgtgccgcgcggccatgtcctcgctcggttcacccatctgcagcaccacgaattcagctacaccatcaaggtggagaactccagcgaggccacgcggtatggctacgtgcgcatcttcctggcgcccaagctggatgatcgcaatgcacccatgctgctggagcaacagcgcctgatgatggtggagctggacaagttcgtggttaccatgcctcccggcagccatacgatcacccggaactccacggagtcgagtgtcaccattccgttcgagcgcaccttccgcaacctggacaagctggaggagctgcagaacttcttgtgcggctgcggttggccccagcacatgctgattccgaagggtcggcccgagggtctgcgcttcgagctcttcgtcatggtttccaactacgaagaggataaggttgaccagacggtcgcagattgcggctgcagcatcgccgcttcctactgcggcctgcgcgatcgcctctatccggatcgcaagtccatgggcttccccttcgatcgcaagccgcgtcgaggctccgagatcctggagaacttcctgacgcccaacatgtgcgccgtggaggtcatcattacccacgaggaccgcaccgagaagcttcgcgaggtaccagctcgctcctga

SEQ ID NO: 5304 - protein, 683 aa, DROSOPHILA
MADKKNLLLLFDHPTEPVFMDKGGNGTVFDVPDSYVTDRYNQMCKKVQRRVSSASEKNVQVKEIAIPDLSCSMRLGRSEQFSIFLKSHRKMASHLIEIFTKMQTVDELQSVAVYARDRVNPVLFNYALSVALLHRPDTKDLELPAFAQTFPDRFIDSKMLRSMREESFVVERSAARLPVVSSVKYTASDLDVEHRLWYFREDLGVNLHHWHWHLVYPIEAPDRSIVDKDRRGELFYYMHQQIIARYNAERLSNHMARVQPFNNLDEPIAEGYFPKMDSLVASRAYPPRFDNTRLSDVDRPNNQLRVGIDDMKRWRERIYEAIHQGYVLDTNNEKIVLDDAKGIDILGNIIEASDLTPNSTLYGDFHNMGHILIAYSHDPTNKHLEYAGVMGDASTAMRDPIFYKWHAFIDNMFQEHKRLLSPYEKQELSFPDVRVESIQVESQGQVNRLTTFWQESDVDMSRGLDFVPRGHVLARFTHLQHHEFSYTIKVENSSEATRYGYVRIFLAPKLDDRNAPMLLEQQRLMMVELDKFVVTMPPGSHTITRNSTESSVTIPFERTFRNLDKLEELQNFLCGCGWPQHMLIPKGRPEGLRFELFVMVSNYEEDKVDQTVADCGCSIAASYCGLRDRLYPDRKSMGFPFDRKPRRGSEILENFLTPNMCAVEVIITHEDRTEKLREVPARS

SEQ ID NO: 5305 - DNA, 2826 bp, DROSOPHILA
ttaattattcaattcacaacgtcgactgctattcgagttgttaagtaaaaaacagagtcgccgcgattaagaagaacaagcagcggcacacgaagaagaagaggaaaacgttgacgtgttgattcgaccgggcgatagcaatcgataaaacaatcgagagactgtcacttgggaaggcaggcgctgccacatcgcactgaagtgaccgccacaatttaaatacttattgtgtgcaattaaattctttttgtacaaaatttcgtgattaattgcaaaacaccaaatgaaaaccatacactaaatgattatgacccttacttggtttaaggtcaatgtaagagcaggaagatttttcctactcattgaaaatctgaagttataacatatgtagttggcaattccaagtttttttctttcaggcagcaagtcaacccacatattgatagctcagcattcccgcgatgaccgaatttttgaacgaaagtgctgacacgttattaaactatactttgtatactctttttcttgagattattgacacgatgagtaagttatattacaattcgatagaataaaaattaactaaaattaaatcacctaacacgcttaacgttaaatttgttgtaatgcgaattgtcctgaaaaaattacaaaacccaaactagataacaattctttttttcaacaattatctttaaattaaaattgaataggttccaacttccaaacgtatagggtattgaaagagttaaattaagttttctgctcgcatcgccaactcacctattcacgttaaaaagaaataggtgactggaaaacgatcgaatctagcgaatttaaatggaatcgcttcaaatgcagaatagcacaaagtgaacccaccgagtatccaagcacagcagactgcaattgggcaatattcttggtgaatttgtaaatttcgctgatctgtttttctcttggccatataaaacccgtcccgtttcaaaaaaccatagtcttaattctgtgagctatgtgtggacgacgactgctgttcttggcggcctttggctgccttttggccaacgcgttttcgcttccggcgaccaggaatgaggagttcgacgacggtttccccgaatccgagttcgactacgaggagaggcacactagggaaattccggcacaggcctatgccccaccgatcgtttacaattcgcagtcaagctactcgccggcgaaggaccaaggatattctgctcctgccgccccggtttattcgcctgccgcaccatcgtattcagcgcctgctgctccgtcgtattcggcacccgctgcacccagctattcagcaccagcagcacccagctattcagcacctgctgctccatcgtattcagcgcctgcagcacccagctattcagcacctgcatcctccagctattcagcgcctgctgctccgtcgtattcggcacccgctgcacccagctattcagcgcctgcagcacccagctattcagcacctgcatcctccagctattcagcgcctgctgctccgtcgtattcggcacccgctgcacccagctactcagcgcctgcggcacccagctattcagcaccagcagcacccagctattcagcacctgctgctccatcgtattcagcacccgcagcacccagctactctgcgccttctgccccatcgtattcagcgcaaaagacatcctcgtactcggctcctgccgccccaagctaccatgctccggcagctccagcatcgtcgtattcagcaccggctggtccttcatattcggctcctgctgcaccctcatattcagctccatcttactcagcgcctgcctcaagttattcggcactcaaggctccatcttattcagctccagccgctccatcttactccggcacctgcaagctccctcatattcctcttctgcttctccttcatattcatcgcctgcatcgtcatcttattcagcgccagctgctccgacttactcagcccctaaggctcagtcgtactccgctccagccgctccatcttactcagctcctgctgctccatcttactcagctccagcatcttcatcttattcggcacctgctgctccatcttactcagctcctgctgctccatcttactcagctcctgcatcttcatcttattcggcacctgctgctccatcttactcagctccggctgctccatcttactcagctcctgctgctccatcttactcagctcctgccgctccatcgtattcagcacctgcatcatctggatattcagcagcgcgagcgtattcagcgggctctgcagcaccagcttctggctattcagcgccaaagacttcttccggttactcagcgcctgcttcgtctggatcaccagctgcttcatcgtactcagctcctgcatcctcgaccgcatcctctggctattcagcgcccgcgtcgaagtcatcgggttacgctcgctccgaaatggatcatcagatccttggtatggcgaggaccgctggcggctacggatcagccgctccttctgcagcttatggtgcagcctctctcccctcaccgccgtgtcccaaaaactatgtgttcagctgctcgagcgtttttactccagcaccgtgcagtcagggatatggttactgaatgcaaatccaaagctcctggccaaactgacttgaaaacgagattaataaaaagcgaattatgtgtgaaacgaattgagtttacctttttatgccaaacaacttaggtcacagagatatttcgacccacgcagtccattgagatatgcaagcttttgatcccgaaaac

SEQ ID NO: 5306 - DNA, 747 bp, DROSOPHILA
atggagctgaatatgagggtgcagcaggagccgaatatgaaggaccagccggtgctgaatacgacgatgctggagctgccggagcatggtagcttggggcggcaggagccgagtacgaggatgtcttttgcgctgaatacgatggggcagaaggcgcagagtagctgggtgctgcgggtgctgaatacgatggagcagcaggtgctgaatagctgggtgctgctggtgctgaatagctgggtgccgcaggcgctgagtagctgggtgcagcgggtgccgaatacgacggagcagcaggcgctgaatagctggaggatgcaggtgctgaatagctgggtgctgcaggcgctgaatagctgggtgcagcgggtgccgaatacgacggagcagcaggcgctgaatagctggaggatgcaggtgctgaatagctgggtgctgcaggcgctgaatacgatggagcagcaggtgctgaatagctgggtgctgctggtgctgaatagctgggtgcagcgggtgccgaatacgacggagcagcaggcgctgaatacgatggtgcggcaggcgaataaaccggggcggcaggagcagaatatccttggtccttcgccggcgatcgaactcggattcggggaaaccgtcgtcgaactcctcattcctggtcgccggaagcgaaaacgcgttggccaaaaggcagccaaaggccgccaagaacagcagtcgtcgtccacacatagctcacagaattaa

SEQ ID NO: 5307 - protein, 248 aa, DROSOPHILA
MELNMRVQQEPNMKDQPVLNTTMLELPEHGSLGRQEPSTRMSFALNTMGQKAQSSWVLRVLNTMEQQVLNSWVLLVLNSWVPQALSSWVQRVPNTTEQQALNSWRMQVLNSWVLQALNSWVQRVPNTTEQQALNSWRMQVLNSWVLQALNTMEQQVLNSWVLLVLNSWVQRVPNTTEQQALNTMVRQANKPGRQEQNILGPSPAIELGFGETVVELLIPGRRKRKRVGQKAAKGRQEQQSSSTHSSQN

SEQ ID NO: 5308 - DNA, 5206 bp, DROSOPHILA
ccagtcaagatggtccgccgccgctgcagttgatccagccccaggtcctaacatgggtgctgcctgcgcagtcagttcccatttccatcgctacagttgattgtaacagaaacagggtgaagccgactggtgccattcatcccttcatactgccgaaacccactgcgaaagaattaaacaagaccagtaaaagacccgagcctattttggtcagttgcaacccacctaataacgagcccagtagcgccagtctgacgcccacctcacagctgcccatcaaggagcgattgaaggccattatccacagcaataataacagacgaagtttctccacaccgcccaaggctgcgaaagcaaaggatcgcagtcgggacgaggattgtatggagcgacgaagagcagcagcctctcgttaccgtaacaagatgcgaaacgagcataaggacctcatcaaacagaacgcccagctgcagcaggagaatcaagaactgcacgaaagaatttccagattagaaaaggaactgcagcagcacaggagtcacagcagcttagctggcggtaagctttaataaaccattcctgaagttaagttaatttattttcgtttatagtggtggccgaccagctgcggattccaccatccagtatacacttgctcatcaatgtgcccaacgtgttagtgccttcgtccgccagcaacgcaagcgcggccaagaaataaccaatatgccttgtttatttattttctagtgccatgtacataatcctagccttgtagtttattcgtacaaaaaagcctcagttaagttaaattccttctgtactccaatgttttgtctgtggttatgatttccgtaaactctctctgtatctcaaaaatggaattctcgatatccaccagctggggactaaattgcacagatgatgttgctggagttcgcagctgttccatggtcatctgttcggaagaaagtagacttaggagatcacagaatacaatctaaaatcttttatcacatacatcacgcaagtttttctgcagctgatcacgctgatagcaaagtttctggattttgtcgtaatacttctgtgccagtggagcaccctccgtatccgagtagtagcgctgggcaaggagctccatctcctggttacgaatttcatcttcggccagctgcatttcttggttgtgacgccgacgctcacgctcaatactgtgcatcagcaggtccatgtccttctccatctccagaattttgcgtcgctgctcagactcctgtaacttagtgatgacctcgctcttgcgccgacgcacctccatttggtaggtgagcagcattttccgttggcaggtgatgcgctcttcctcgcgatggattgtgtcctggtaaactctctccatttctttgaggcggcgagcgtgctcctcttgcttaagtcctgtttcaaggcgttccataattttaacctcctccaactcaagatggcgaattcgggcatcgatttcctggttgtgcttgatcaacgatactgcttgatactcctgctcatcgatccactcgctgggatatttgagaaactttggatacacacccttcggaatggggctgaagtgtgtcatgaaacgctgtgggtgaagtgcaagcgcacatttggacattagtttgcgcgccttggaaagaagtttgctgatgtccacagggttctgatcgtggaagaagaagaggactgatcgcttgtctggcagccgcaagattatctctcgattaatcaaattgtaggccactacaagaaagactggaaaccagggtggttccgaaaatatgttgtcccacagcgatagccactgctcctcttcaaggacctcggaaaaggcagtgctcagaaggggccaggcaaaatctttaggcaacatctcctgggatttataaaacttgcaaagctgttcgtcacagtgctgcaggatattttcgcacatggccagataattggagggcggcagcggatgaaattcgaaacacagctgaaaatgattcaatacaagggtagcgattaactcaaagcaaaccagactattcttgggcattcgcttcacaaacggaaaaatcaggtgtggcataaaatctgcgtgagctaagaccttgcaccattgagcaaggcaactccaaatcttaatcacaacacggcgttggtgatcgttgcgaatcttaagcttcttggcccgatttctgaccaggagaggtgcccccagtttgatcagttcctggaattgaggcccattgcagggcaggtctaagagggatgtccaaattaggtacctgtacttttcaggatagcaaccgtactccttgagcatggtttttaggcgctgcggattgagcagatctcgcagttctttgctaacgcctccaccgacgctgcagggcggcagaggattcggttgtttgaaagtggacttcacctggctgaggcagcggatctgagcttgcagggcgttaaaaatgcggcacgtggaccacacattgacttctccgcagcgagacgttacactcaacagcttgccatcccgactcagactcaaacttcgtgcattggagcgctgcacaattagcttgtgatccgtattggctaaatccagcatgaccgcttggtttctggtggtgattccaaacactatgcgctcctttggctgcgagaggaaagccatttggtggagagtaaagtccgtcaagcggtacatcttttccagatcaaaagaggccacgctcagcaataaaagatagccatccaaggtactaaggcacatcttgttgccgtcgggggtgaagcagtagctgagtagcattccatcggcaaagtcgtagtgctggcagtcaaacgtcaagtcctcctccaagtcactgtcatccgggcttcggagaactatttccggtatagattctgcggctggtagcagtctcagtttgcgattcctggccttgataggctggcccatccgcaaagtgctcaatgaatgcgaggaccacacatgcagagaatcgttagaaaaccctataaagaactggtccgagtggggcaggaaggcagcgaacttcagcgtgtagcgcgactgatcgaaatccagctgatgggaaacctccagagtatggagattcaccagaagtgcatcgctgccgaaacgcatcagagcgatagaggagcgtgcattctgcaggctattgctccaactcaattcctcaagcgctgcgcttcccacttctccgtcgaccccaagaattgagttgtccacgtctatggtgaaaatgtggcccgttttattgcctacaatgtagtcgctaccgtgcagaggggatggccgaatgagcttggccttgggcatccggaatcccagccgccagtagcgtttgcgtacaaagtcaaagacgaaaacattgccactgggaaataaaaaagactgtttaaaagagtattacgttattgtttcccctgtcaaccttaccgcttgtctattaccaccagcttgttgctaagttcgttgaagcagcaggcggcaatctggatgcgcagtgcctgacctgcttccttgatcgtgtggtgaacggttaggacgttcctggaattcgcaaacttcgttggcaacaactccgcaatgtgcctagagcgcatactcacccagattcgctttgcttcagcttaaaagggtacttgcgcataggagcattgctcaaaagcacactgcgcgctgcctcaggctgcgtgagcgacacatcagaatctcccgtgtctgaatcctgatctgtgaatagctccaactcctcctccgtgaagtcctcctccacgtcagtgttgacatctctatcgtcctgcatcgagttctcgatgccatgaagggccaccgaaggaatacccgtgatctgttccttcttgatttcagattttataatcctgtccatgttatgggctcaaatgaggtgtaactccatttgtcaaaggacgtgtactttcgccaatgaaaaaaggaacgccacaccgctattcatttatccagcaaggatatttacaaatttgtatatttaacaactgaatgcttgttcctagttccagtgcagccaaatgaacaccatccaggctattttttttcgactataaatatttccagttcaattaagtgagtgaaaactgagagctaatccctccttgatacgccagtggagagaattactgcttatggaatagtggtttagatatcgatatcgaaccagcaaaaagaaccggaaccagacaatgtctactacgtcagtttattttgtttgcgtttatctggatacatttgattatatgagatttgttgatgactgcggataagcgaacagcatgcgtgcttacggataaatggccgtaaccctaggacccagtgcatcggtgatattcctgcgccggttactagcctagtgagcttgtgaactacaaatcccctctagaacatggatccgtatggctcgtcatcgcgcatggcgtaccagaagatggtgccgtagttaataatgttacttattatcgtcaggatactcgccgtccaggtgatctgttaagaatgacatcgcgtgtttaacactcttaaaatcccaatagctccgtgtgtccacttaccaccaatgcgtgggctaggacgatgggcagggcgaaggcactcagcaccattcccgcggtaaggaagtgagcaaactccgatttcggattggtctcatttccaggagttgtcctcctggcaatgaagactggaagaactgacagcacgtagaacagcaaaacgaagaagggatagaaaatctttgtcgtgggcacggcgcaggccaggatcaggaaggtaacaccaatgcatgtaagaaaggcgcagatgaagaggctgcacaaagaggggaatcattatcagacggttggctgcaggagtgggtgtagttgtagacatacgctgtgtgatggtttcaaaagaggcgtgtagcgggttccagttggtgttgatgtaggcgaagaatgtaagccattagatttgctagagactgttgtgcataattaccctttaaggtggccattgtatttgtttataatttttcctttgtcgctcctaaaaatgactcagatgtgtagttccagatgaaccagttcatcagtatgaccgaaacatgaccattcaaaattatttaaa

SEQ ID NO: 5309 - DNA, 3035 bp, DROSOPHILA
gcgtatcaaggagggattagctctcagttttcactcacttaattgaactggaaatatttatagtcgaaaaaaaatagcctggatggtgttcatttggctgcactggaactaggaacaagcattcagttgttaaatatacaaatttgtaaatatccttgctggataaatgaatagcggtgtggcgttccttttttcattggcgaaagtacacgtcctttgacaaatggagttacacctcatttgagcccataacatggacaggattataaaatctgaaatcaagaaggaacagatcacgggtattccttcggtggcccttcatggcatcgagaactcgatgcaggacgatagagatgtcaacactgacgtggaggaggacttcacggaggaggagttggagctattcacagatcaggattcagacacgggagattctgatgtgtcgctcacgcagcctgaggcagcgcgcagtgtgcttttgagcaatgctcctatgcgcaagtacccttttaagctgaagcaaagcgaatctgggaacgtcctaaccgttcaccacacgatcaaggaagcaggtcaggcactgcgcatccagattgccgcctgctgcttcaacgaacttagcaacaagctggtggtaatagacaagcgtggcaatgttttcgtctttgactttgtacgcaaacgctactggcggctgggattccggatgcccaaggccaagctcattcggccatcccctctgcacggtagcgactacattgtaggcaataaaacgggccacattttcaccatagacgtggacaactcaattcttggggtcgacggagaagtgggaagcgcagcgcttgaggaattgagttggagcaatagcctgcagaatgcacgctcctctatcgctctgatgcgtttcggcagcgatgcacttctggtgaatctccatactctggaggtttcccatcagctggatttcgatcagtcgcgctacacgctgaagttcgctgccttcctgccccactcggaccagttctttatagggttttctaacgattctctgcatgtgtggtcctcgcattcattgagcactttgcggatgggccagcctatcaaggccaggaatcgcaaactgagactgctaccagccgcagaatctataccggaaatagttctccgaagcccggatgacagtgacttggaggaggacttgacgtttgactgccagcactacgactttgccgatggaatgctactcagctactgcttcacccccgacggcaacaagatgtgccttagtaccttggatggctatcttttattgctgagcgtggcctcttttgatctggaaaagatgtaccgcttgacggactttactctccaccaaatggctttcctctcgcagccaaaggagcgcatagtgtttggaatcaccaccagaaaccaagcggtcatgctggatttagccaatacggatcacaagctaattgtgcagcgctccaatgcacgaagtttgagtctgagtcgggatggcaagctgttgagtgtaacgtctcgctgcggagaagtcaatgtgtggtccacgtgccgcatttttaacgccctgcaagctcagatccgctgcctcagccaggtgaagtccactttcaaacaaccgaatcctctgccgccctgcagcgtcggtggaggcgttagcaaagaactgcgagatctgctcaatccgcagcgcctaaaaaccatgctcaaggagtacggttgctatcctgaaaagtacaggtacctaatttggacatccctcttagacctgccctgcaatgggcctcaattccaggaactgatcaaactgggggcacctctcctggtcagaaatcgggccaagaagcttaagattcgcaacgatcaccaacgccgtgttgtgattaagatttggagttgccttgctcaatggtgcaaggtcttagctcacgcagattttatgccacacctgatttttccgtttgtgaagcgaatgcccaagaatagtctggtttgctttgagttaatcgctacccttgtattgaatcattttcagctgtgtttcgaatttcatccgctgccgccctccaattatctggccatgtgcgaaaatatcctgcagcactgtgacgaacagctttgcaagttttataaatcccaggagatgttgcctaaagattttgcctggccccttctgagcactgccttttccgaggtccttgaagaggagcagtggctatcgctgtgggacaacatattttcggaaccaccctggtttccagtctttcttgtagtggcctacaatttgattaatcgagagataatcttgcggctgccagacaagcgatcagtcctcttcttcttccacgatcagaaccctgtggacatcagcaaacttctttccaaggcgcgcaaactaatgtccaaatgtgcgcttgcacttcacccacagcgtttcatgacacacttcagccccattccgaagggagtatcaagcagtatcgttgatcaagcacaaccaggaaatcgatgcccgaattcgccatcttgagttggaggaggttaaaattatggaacgccttgaaacaggacttaagcaagaggagcacgctcgccgcctcaaagaaatggagagagtttaccaggacacaatccatcgcgaggaagagcgcatcacctgccaacggaaaatgctgctcacctaccaaatggaggtgcgtcggcgcaagagcgaggtcatcactaagttacaggagtctgagcagcgacgcaaaattctggagatggagaaggacatggacctgctgatgcacagtattgagcgtgagcgtcggcgtcacaaccaagaaatgcagctggccgaagatgaaattcgtaaccaggagatggagctccttgcccagcgctactactcggatacggagggtgctccactggcacagaagtattacgacaaaatccagaaactttgctatcagcgtgatcagctgcagaaaaacttgcgtgatgtatgtgataaaagattttag

SEQ ID NO: 5310 - protein, 767 aa, DROSOPHILA
MDRIIKSEIKKEQITGIPSVALHGIENSMQDDRDVNTDVEEDFTEEELELFTDQDSDTGDSDVSLTQPEAARSVLLSNAPMRKYPFKLKQSESGNVLTVHHTIKEAGQALRIQIAACCFNELSNKLVVIDKRGNVFVFDFVRKRYWRLGFRMPKAKLIRPSPLHGSDYIVGNKTGHIFTIDVDNSILGVDGEVGSAALEELSWSNSLQNARSSIALMRFGSDALLVNLHTLEVSHQLDFDQSRYTLKFAAFLPHSDQFFIGFSNDSLHVWSSHSLSTLRMGQPIKARNRKLRLLPAAESIPEIVLRSPDDSDLEEDLTFDCQHYDFADGMLLSYCFTPDGNKMCLSTLDGYLLLLSVASFDLEKMYRLTDFTLHQMAFLSQPKERIVFGITTRNQAVMLDLANTDHKLIVQRSNARSLSLSRDGKLLSVTSRCGEVNVWSTCRIFNALQAQIRCLSQVKSTFKQPNPLPPCSVGGGVSKELRDLLNPQRLKTMLKEYGCYPEKYRYLIWTSLLDLPCNGPQFQELIKLGAPLLVRNRAKKLKIRNDHQRRVVIKIWSCLAQWCKVLAHADFMPHLIFPFVKRMPKNSLVCFELIATLVLNHFQLCFEFHPLPPSNYLAMCENILQHCDEQLCKFYKSQEMLPKDFAWPLLSTAFSEVLEEEQWLSLWDNIFSEPPWFPVFLVVAYNLINREIILRLPDKRSVLFFFHDQNPVDISKLLSKARKLMSKCALALHPQRFMTHFSPIPKGVSSSIVDQAQPGNRCPNSPS

SEQ ID NO: 5311 - DNA, 4282 bp, DROSOPHILA
gccagtaaatcacaaccgaaagccgctgttaaaacacgagcctgccccggaaaactcggaaaactctgttggtggttgctttggcttgggttttcggttaggttattgggtccttgggtctccagcgttttctttttgcacgatggcagacggtggttgcaacagccgctggcaggacacgtgcaacacccggaatcgaaggtgggggggggggggtgtcggtgaaagtggacggtatggggtgactgacagacagcagcatcagaatccgcaggaacttagagccggagggcatttcctagtaactgacactccccacaagatttgattatggatggagatcggggaaagtgcggaactccttcaatgctcgttaaatgcgcccaaaagagattcatattcgaggagttaactttccggcctcatacatatatcagctacttcccacctgcctttcgcgaattcaattttcttgcccttttcgcaaacaaaatataacctaatttgattgggttattcacatagttattcttaggggtttgtccgatagggggatcgaaggccttgaaggcacttttaacaaaaattaaatggcgcattgagcaacaatgctgcgttttatcatgaataacatacactgaagtttatcactttaaaaaaaggttttgaattcaaaactagagcgcttttgtatacaatctgctttctccctattcttatactataattcatttcatttttaaacgcaaaccgacataagtgtcaagagtttacagcacgacgtcttggtcgataagacatccactacccattcaaatcaacaaatgacgcaattctttagtatttggtgttccaagggcatatgttctgtaagggatctcgtatcagttgtttggcacattttatttacaaacaattgtttagcgcaccaaaagtgtaaagcaataaagtcatgaatgtgagcacaaaattatcgttgcaatttatccggaaagtgggcgttgcatattttcttttattcgattcttgcatacacatttagaaacatcctatacaataggcacagtcctaagcgtttgttttggtatcactggggattaccctcatagatcggtcctatgtcgtatgtccacgcccatttcctcgaaatactctacatcgtcgttatcggagtcgcataacggctgatcatccatgctgtttcttttccgttgcttcttcagactatcgaatgccttcttgaatctcacagccttttcgctgctggtctttgatccagtgattggtattatccagcgattaacgacgttggccagaactaccaccagaacaatggcgaggagcaggtaaagtactactaaagctggattgggggtacttccgctcgtgtccatgtgaccctcgatgtcctgaggatcaacgttccaagtgatgcgcttccgtgttttcattgtggtgttgatgcctaggttatcatattaattttcttttaacgcaatcataaaaaaaaggcttaagtcttacctgtagtcttttcggtactggaagtagggatcattattgttgttttctttgttgtaaacacatttattgtagttgttgtcgttggtgttgttgaagttgtagacgttgtagaagttgtagactttggtgtggttgaagtcgttgttgttggcttcggcgttgttgaagttgttgtcggttttttagtggttgttgttcgctttgtagttgtggcctttgttgttgttgtggttgtggttggccttttagttgttgttgtacttgtagtagttgtgcttgtggttgttgttgtcgttgacttcctcgtagtgcttgtgcttgttgatgtgaccgttgggggcagggaactaatatcatcctcggtcgtggtgagcagctcctttgtgcactcctccaaatagtttaggcaacaagtctcatccgaaaggcactcgtcattacacccacatcccatgactataccattgttggttatattggaggccgagattgatgttccgcatcgacctgaacaactcatcatatcgtagaccagtggttgctcgttgctgcctgtcggagccgttggttctgtggtggtgctaaatccgtttgtgccacactcactgcctgtcattagctttacatcatcgatggcaatatctccgaattgggatcttgcatccgttgccgtgaatatcacctggaagtcctcttgcatctcgtcaatgctgatcgtgtgctctagccactgggttccctgctgaccagatatctcaaatttgctgcaactaagataaaacagaaacagaagcaatcagtataattgttgccatgctttcggaattttttgccacttttatctcattgcctgcgacctttaatctaaaacctcttccgctccggcaaaactcacttggctctgaacctattccacatggttgccattggcatcgaaacgggtttaacggacaccaccagattatccacaccagcgccaaacatgaagtagtggaatcgaaagcagcaggcggtcttcagggtgagggatctgggatagatcggcgatagcagatggtagcttccataagcccccatttgggtttccatgcgcatgtaatgaccaccggattcgtttttaaacgtgtgatcgtggcggggtcccgttcttagggagtgaatatcggataccgtgctgactcgcttccagggtcgtcggaaggttgtctccgcctcccaaccgcactgatcctcgctctcgaaatcgcaagaatgatctcttgtgtggttgctccttcgacacgatcccagctgggtgctccatctttctccatcgcagtaggcagtgcgaccaccgaccaagacatagccatcgtggcacacgacatccgcccttagggaaagattttcgacgtgtccgttctccggatcctcgggcctcgcacatcccctaccttatgttgaaaaaatgcaagaaactcagtaaaaccattagattatatcgattttgtggctcttactggcacagaatggtttttcgcctcgaaggcgaccatctcgatcgcaagtttgcattactgttccctgcaaagtgtagccgcgattgcatctgaatctcaccacatttctctgtcgataatttatacttccattatccaaatctattgatctttcacatcgtccatgaatgtgacctatacaatatatcacaatcacagccagagtccagaaaaattccattccgcagagatattacgaacttaatgtatagatacggtcgaaggctgtcaaaagactgagagtccgattgcagctcgacatcactcggagcaacgaagagcgggactcatacaattacaagatggttgaagtcgaagagcagataaccgctatattgttcattcttaattcactcttaattttatacaaatatatataaatatagatttaaatcgcgtcttattttcttgcgctgcacttataaacgttttttaaacttatactatgggtaaatcttataagcccaaaatgataatagattttacaactcgtccttgttaagaatgtggttcattggtttcagattttataaattttacatcgtcgataccaatgtctccatggagagaacttgggtccacgactgtgaagaccacctggaagtccgactccatctcgtcgatggagatggactggcttttccagtttgggccttgatcgccagacacggtgagtttggtgcagctggagaataacataagatgtatttaaagcattttaaagtgatttggatagatcgcttacatatttctgaaactattccacatatcctcgaccgccattgaagagggtttcacggagatcgtcaggtttcttacttccgaaccaaacataaagagttcgaactgaaaccataaggaatggcccaccgtgaggttcctgggatagatcggcgatatgaagtggtaggttctggaagcgtgtacctgcgattgcaagcgaataaagtgtccttcgacgtcgctctggaatgtgtgatcctgttgcaggcacttttctttgagaaaatctgccgcagcacttattcgcttccatggttggggtatggctttgctggccctccaaccgcacatatcctcacgttcgaagtcacaggaatggtcaccgacgctgttggccaactgacaggttcccagcttgatgatccacttcgttccattgcagtaggtaaaggaatttccgctaagaacaaattcatcatcgcattcgatttccgcct

SEQ ID NO: 5312 - DNA, 2032 bp, DROSOPHILA
gaccgtatctatacattaagttcgtaatatctctgcggaatggaatttttctggactctggctgtgattgtgatatattgtataggtcacattcatggacgatgtgaaagatcaatagatttggataatggaagtataaattatcgacagagaaatgtggtgagattcagatgcaatcgcggctacactttgcagggaacagtaatgcaaacttgcgatcgagatggtcgccttcgaggcgaaaaaccattctgtgccagtaggggatgtgcgaggcccgaggatccggagaacggacacgtcgaaaatctttccctaagggcggatgtcgtgtgccacgatggctatgtcttggtcggtggtcgcactgcctactgcgatggagaaagatggagcacccagctgggatcgtgtcgaaggagcaaccacacaagagatcattcttgcgatttcgagagcgaggatcagtgcggttgggaggcggagacaaccttccgacgaccctggaagcgagtcagcacggtatccgatattcactccctaagaacgggaccccgccacgatcacacgtttaaaaacgaatccggtggtcattacatgcgcatggaaacccaaatgggggcttatggaagctaccatctgctatcgccgatctatcccagatccctcaccctgaagaccgcctgctgctttcgattccactacttcatgtttggcgctggtgtggataatctggtggtgtccgttaaacccgtttcgatgccaatggcaaccatgtggaataggttcagagccaattgcagcaaatttgagatatctggtcagcagggaacccagtggctagagcacacgatcagcattgacgagatgcaagaggacttccaggtgatattcacggcaacggatgcaagatcccaattcggagatattgccatcgatgatgtaaagctaatgacaggcagtgagtgtggcacaaacggatttagcaccaccacagaaccaacggctccgacaggcagcaacgagcaaccactggtctacgatatgatgagttgttcaggtcgatgcggaacatcaatctcggcctccaatataaccaacaatggtatagtcatgggatgtgggtgtaatgacgagtgcctttcggatgagacttgttgcctaaactatttggaggagtgcacaaaggagctgctcaccacgaccgaggatgatattagttccctgcccccaacggtcacatcaacaagcacaagcactacgaggaagtcaacgacaacaacaaccacaagcacaactactacaagtacaacaacaactaaaaggccaaccacaaccacaacaacaacaaaggccacaactacaaagcgaacaacaaccactaaaaaaccgacaacaacttcaacaacgccgaagccaacaacaacgacttcaaccacaccaaagtctacaacttctacaacgtctacaacttcaacaacaccaacgacaacaactacaataaatgtgtttacaacaaagaaaacaacaataatgatccctacttccagtaccgaaaagactacaggcatcaacaccacaatgaaaacacggaagcgcatcacttggaacgttgatcctcaggacatcgagggtcacatggacacgagcggaagtacccccaatccagctttagtagtactttacctgctcctcgccattgttctggtggtagttctggccaacgtcgttaatcgctggataataccaatcactggatcaaagaccagcagcgaaaaggctgtgagattcaagaaggcattcgatagtctgaagaagcaacggaaaagaaacagcatggatgatcagccgttatgcgactccgataacgacgatgtagagtatttcgaggaaatgggcgtggacatacgacataggaccgatctatgagggtaatccccagtgataccaaaacaaacgcttaggactgtgcctattgtataggatgtttctaaatgtgtatgcaagaatcgaataaaagaaaatatgcaac

SEQ ID NO: 5313 - protein, 629 aa, DROSOPHILA
MEFFWTLAVIVIYCIGHIHGRCERSIDLDNGSINYRQRNVVRFRCNRGYTLQGTVMQTCDRDGRLRGEKPFCASRGCARPEDPENGHVENLSLRADVVCHDGYVLVGGRTAYCDGERWSTQLGSCRRSNHTRDHSCDFESEDQCGWEAETTFRRPWKRVSTVSDIHSLRTGPRHDHTFKNESGGHYMRMETQMGAYGSYHLLSPIYPRSLTLKTACCFRFHYFMFGAGVDNLVVSVKPVSMPMATMWNRFRANCSKFEISGQQGTQWLEHTISIDEMQEDFQVIFTATDARSQFGDIAIDDVKLMTGSECGTNGFSTTTEPTAPTGSNEQPLVYDMMSCSGRCGTSISASNITNNGIVMGCGCNDECLSDETCCLNYLEECTKELLTTTEDDISSLPPTVTSTSTSTTRKSTTTTTTSTTTTSTTTTKRPTTTTTTTKATTTKRTTTTKKPTTTSTTPKPTTTTSTTPKSTTSTTSTTSTTPTTTTTINVFTTKKTTIMIPTSSTEKTTGINTTMKTRKRITWNVDPQDIEGHMDTSGSTPNPALVVLYLLLAIVLVVVLANVVNRWIIPITGSKTSSEKAVRFKKAFDSLKKQRKRNSMDDQPLCDSDNDDVEYFEEMGVDIRHRTDL

SEQ ID NO: 5314 - DNA, 4579 bp, DROSOPHILA
atttacggctattaaattatgatctcttgacgtaagagcctgcgtaagactacagttcggactccttaagaatctgcgtccattcttttgttttccatctttatttgcggtcggcagtctagcggcactcttgtcgtaggtgtcgctaatcgtcaccctcgagctgtctccagaagccccaaaagatctgaagatctgaagagtaaagcgcgaagagagtgtggcgcagaattcttcgcacttgttgtttttgcaattacaaattgagaatatggtcttcgttttgcctatttcaccggccacttttgtaagggttacttggctcgttggtctaggggtatgattttcgcttcgggtgcgagaggtcccgggttcaattcccggacgagcccaggttcttctgataacccacgttttttttatccccccgatatatatatttttgccttcctttgccaagcgcgtgataagcgaattttgggatcgttatcgcttcgttgagttgcaatttcgggttcgctcgacgggaactcagttgtttaagagtgcgatctctgggtaactgactcacctggttgcggattttctgacgaacaggaagacgaaccacgaggaacagcgtgcgaacgcataatgagatcgaggaagtgactcacaatcgaggaagtaggggaaacagagtttgcacaaaggtctgttcgctgcattgtacacagacagacgattctagagtaattaattcccggttggaacaaaaagtgactctttatcttcaaaaaacatacgggactagttcaaatatttaatagtaaacaaaccaattactaagctcatcatttgctttatatatattgctttatatatattagaagtgtgatattatagttaggccaaagtattgtcaggagaaagatgtcagaatttatagggcctgacgaatccggctagtttaagccgtacaacagccacgccttgtgggctagcctgcccctagctgagtatgaagtttggcaagacctacgagtcccacctgacgatcgagtggcgccagcagtatatgcgatatggggtaagctgaataattgtgtaattgatatatatacagatatatatatatctgtatgtggacctacccaatctaatcacgccgccaataggatctcaaggagctgatcaaacaaggcgtggagaacgccccctctccgcttacttcctcggactacgaagttcaggcctattataaggccttcgaggaaacctttctcaccgaatgccaatcggaactgaccggggtgaacaatttctttcttgaaaaactcctggaggcccgacgcaagcatggccatctgaagcttcagcttttggcctattcccgggaacccggacacaccggcagtgattcctcgctttcccagcgagccgagaggagccaaaaaaagcttatgacaactcgccagttaagatacgcctatgccgagttctatctaagtctggttctcatccaaaactatcagtcgctgaacgagacgggtttccgtaagatctgcaagaagtacgacaagaatatgcgatccgtagctgctggcaggtggtttgtagagaacgtgctggatgccccctttacggatgtacgtctattgcagcgcatgaccatcgaggtggaggatctatatacgacccatctggcgaatggggatcgctcgttggctatggaaaagctaagagttccgcctttgggcgagcccactcctccatcgatggtctttcgtgcgggaatcgctctcggcatgctaatcatgctgctcgtggccaccgccatcagttgtaggttgttgtgcgaatgcattgctttcctcatccataaatgcccagtagtccacataatctatgccacaactcgatgtattgcttagggcgcttaatttagcaactaatctcttgaagaatagtcagtcggtatccatctcaatggatatatatatactggtcatttttggcttgtaggacatgcaccggaatataatttgattcgccctgttcccaattcccaatttcttagactggaaacgagctccattggaggaccacactccgggtctgatgcgcctctttcgcggcccattcacctgggtgatcttcaacttttacatggccgccaatgtggccggatggcagcaggccggagtcaatcacattcttatcttcgaaatagaccccagaagtcatctgcagccggccacatttctagaaattgcctgcacctttggcattctttgggccctgtccatgttggggttcctgtacaacgacttgataggcgtctcggatccctatgtattcccactgggactcatcctgatcatggttggcctgctggtggtgcctctgcctataatgaactggcctgccaggtggtggaccattaagctggtgggtcgcgtcatcaccgctccactgcactacgtgggatttgccgacttctggatgggcgatcagatgaattcgctggtgtcctgcattgtggatcactattatacagtaaggttctatgcgataagttggctgcgatatgatcgggtgaacaactgctttgaaccggatgtgatggtcccgattaccatgtgcctgcccggttggtttcgatttgctcagtgcctgcgaagattcagggacagtggttccaagtcgatgagctacctgatcaatgcgggaaagtactcaactacatttttggtcgtcctgttctccacgctgcgcaggaattcggagggtaatcgttgtccgccaatgaatcgaaatcctgtctaaaatcctaaccacaaatcctaaaaccctgaaaccttcgcccgcaggtggatatgccaatacgttcagcaacccctacacctggctattcctctcgagctgcgtggtggccaccatctactgctatttgtgggatgttattcgcgactttgggctcttcaggattatgcgcggcgagcgtatattccttcgaaagcaattggtttatccgcaggccttctactactttgtaatcgtagagaatctggtgttgcggctcttttgggccgttgagttcaccatcctttatcacaatctgatgactccctataatatgaggaccatttccagtatcctggagatcactaggtgagcggagttggggacggggggacacacgagtgatttaacttaaaacaccactttaataattcggaaaaacgcctttcaatttggtttttatagcttcaaagctttaccgtctgaattgtgaagattctaagaaagttgaatgcgttttttccaactagttcaatgagttggtcaaacagcgtccacattttgttgagtgtagtatgcccctttgcccgcagacgcttcatatggaactacgtccgtctcgagaacgaacacttgttcaactgcggaaacttccgcgccacaagggacatccatttggctgccctgaatcctcgccaggagcgaatgctggagagcatgatggacgagtcggatggcgtgtcgaatcgccgcaaatcgaacgagcgaattcgcctggggaaggagtacttctaaaggcagctgctgatctttatttccccgtcgtcgtctttaattaattcatttgtgcaaaatacaagtcagatggaaaggctgagagacagggcgactggagaaagggagcacgaggagcacgcgccaaaccggttgaccagctgcacccaaaagttgcaattcccccggactcccttctccatatgtacatacatacatattatatttatagagatatatcgcctggtcaggtaacaatcgtcattgcttgaaaggaggagcagagcggagtcaagagcaagggggggagggatcctcgtgtcgagctcccgatctcggatcagcaacggcttcgagcaagctgttcgacaatctcttaattgactctcatcgagctttgattggccacataattagccaagagaaagagagtataaggaaccctgggatgatcaccggtcacccattctaatctggagaaaggcattctaataacaggaatgtttcggttgcatcagctcattaatatagactctgattgcttgaaaatcattttatcaaactatattttgtaggcttaaaaattgtaattgtttaaatatttgtataccatttgtgcatcttccttttctgaatcttttaatcggataaaatcattgctttcaatgtaaatagagaacttaatgcatttgggtttgaatagtttatggcattactatcttatctattgccagagtttattgatttatttctaatctaatattgacttttggaaacaaaatcctgactaataggcttatctaaaagttaaggatttttcttgcgaagaccttttgtttgggcattaaaacctgaggcaacccaatatcggataagcgagaacaaaggatggaagaaattcccttgatcctctttctctgttttttgtgtaatttgatatggaatcgaattccttcatctgaggatagttgatgcaaagaagaaggcaatcaggcggtcaagctatcgataaacgcactta

SEQ ID NO: 5315 - DNA, 1950 bp, DROSOPHILA
atgaagtttggcaagacctacgagtcccacctgacgatcgagtggcgccagcagtatatgcgatatggggatctcaaggagctgatcaaacaaggcgtggagaacgccccctctccgcttacttcctcggactacgaagttcaggcctattataaggccttcgaggaaacctttctcaccgaatgccaatcggaactgaccggggtgaacaatttctttcttgaaaaactcctggaggcccgacgcaagcatggccatctgaagcttcagcttttggcctattcccgggaacccggacacaccggcagtgattcctcgctttcccagcgagccgagaggagccaaaaaaagcttatgacaactcgccagttaagatacgcctatgccgagttctatctaagtctggttctcatccaaaactatcagtcgctgaacgagacgggtttccgtaagatctgcaagaagtacgacaagaatatgcgatccgtagctgctggcaggtggtttgtagagaacgtgctggatgccccctttacggatgtacgtctattgcagcgcatgaccatcgaggtggaggatctatatacgacccatctggcgaatggggatcgctcgttggctatggaaaagctaagagttccgcctttgggcgagcccactcctccatcgatggtctttcgtgcgggaatcgctctcggcatgctaatcatgctgctcgtggccaccgccatcagttactggaaacgagctccattggaggaccacactccgggtctgatgcgcctctttcgcggcccattcacctgggtgatcttcaacttttacatggccgccaatgtggccggatggcagcaggccggagtcaatcacattcttatcttcgaaatagaccccagaagtcatctgcagccggccacatttctagaaattgcctgcacctttggcattctttgggccctgtccatgttggggttcctgtacaacgacttgataggcgtctcggatccctatgtattcccactgggactcatcctgatcatggttggcctgctggtggtgcctctgcctataatgaactggcctgccaggtggtggaccattaagctggtgggtcgcgtcatcaccgctccactgcactacgtgggatttgccgacttctggatgggcgatcagatgaattcgctggtgtcctgcattgtggatcactattatacagtaaggttctatgcgataagttggctgcgatatgatcgggtgaacaactgctttgaaccggatgtgatggtcccgattaccatgtgcctgcccggttggtttcgatttgctcagtgcctgcgaagattcagggacagtggttccaagtcgatgagctacctgatcaatgcgggaaagtactcaactacatttttggtcgtcctgttctccacgctgcgcaggaattcggagggtggatatgccaatacgttcagcaacccctacacctggctattcctctcgagctgcgtggtggccaccatctactgctatttgtgggatgttattcgcgactttgggctcttcaggattatgcgcggcgagcgtatattccttcgaaagcaattggtttatccgcaggccttctactactttgtaatcgtagagaatctggtgttgcggctcttttgggccgttgagttcaccatcctttatcacaatctgatgactccctataatatgaggaccatttccagtatcctggagatcactagacgcttcatatggaactacgtccgtctcgagaacgaacacttgttcaactgcggaaacttccgcgccacaagggacatccatttggctgccctgaatcctcgccaggagcgaatgctggagagcatgatggacgagtcggatggcgtgtcgaatcgccgcaaatcgaacgagcgaattcgcctggggaaggagtacttctaa

SEQ ID NO: 5316 - protein, 649 aa, DROSOPHILA
MKFGKTYESHLTIEWRQQYMRYGDLKELIKQGVENAPSPLTSSDYEVQAYYKAFEETFLTECQSELTGVNNFFLEKLLEARRKHGHLKLQLLAYSREPGHTGSDSSLSQRAERSQKKLMTTRQLRYAYAEFYLSLVLIQNYQSLNETGFRKICKKYDKNMRSVAAGRWFVENVLDAPFTDVRLLQRMTIEVEDLYTTHLANGDRSLAMEKLRVPPLGEPTPPSMVFRAGIALGMLIMLLVATAISYWKRAPLEDHTPGLMRLFRGPFTWVIFNFYMAANVAGWQQAGVNHILIFEIDPRSHLQPATFLEIACTFGILWALSMLGFLYNDLIGVSDPYVFPLGLILIMVGLLVVPLPIMNWPARWWTIKLVGRVITAPLHYVGFADFWMGDQMNSLVSCIVDHYYTVRFYAISWLRYDRVNNCFEPDVMVPITMCLPGWFRFAQCLRRFRDSGSKSMSYLINAGKYSTTFLVVLFSTLRRNSEGGYANTFSNPYTWLFLSSCVVATIYCYLWDVIRDFGLFRIMRGERIFLRKQLVYPQAFYYFVIVENLVLRLFWAVEFTILYHNLMTPYNMRTISSILEITRRFIWNYVRLENEHLFNCGNFRATRDIHLAALNPRQERMLESMMDESDGVSNRRKSNERIRLGKEYF

SEQ ID NO: 5317 - DNA, 3519 bp, DROSOPHILA
gtaaagttcctgatcctcgttgtttttgtacatcataaagtccggattctgctcgtcgccgaagatgggaacgaagctgccaaagctgagagtctgcttgaggtgctggtccggacggcgtcccagctggataaccttgctgtacagatcggcatctgcctggagggcacgatcgaaatccttccagtggacgaacttcacctgctcgctgggaatagcgttgttgtcaagcagctcaaggagcgtattcgagttgacgggctgcaccacgttaagttcctgctccttcgctggggattcccctgcgggtaagcgccgcttgcttggactcgtttccaaatcccatagccacgccagcagaggagtaacagagctctgaaaacagttcatggtttaaaaatatcctttaagaaagcccatgggtataacttacgtgctcactgcgtcctatgcgaggaatggtctttaggttctttatggcaaagttctcgcctcgcttgcccagccgcggtacgttcttggtgatctttaggaagaatcctggactactgtcgtctgcctggcttatggccacaagacccaccaagagcgaaacagacaggactgttatgattctcatgctgatgcgactgaagcttcacctgactcctgctccacaattggtggcctttatatagcgagatccacccgcatcttgcgtggaatagaaatgcgggtgactccaggaattagcattatcgatcggaaagtgcaaagcagataaaactgaactaacctgacctaaatgcctggccataattaagtgcatacatacacattacattacttacatttgtataagaactaaattttatagtacataccacttgcgtatgtaaatgcttgtcttttctcttatatacgttttataaattaaaattagtttattttcccaaaacagggctttaccaactaaatgattcggtacaattttttttaaataaataaatatacaaagtatttctgatctgctgctaaatcagagagctttgcgcccactgagcaacctctgtgggaagggcctggtatcgctgcatacagtggtgaatctggctgtatgtcagcgccagcttatgcatctcaaactctttctgcaccttacctacgccccctccagctccaccggtgagcggcatgatcagctctgcgatgcgtaaatgctcgaaggccttcaggacaatggaccgctccacggcctgcattgtggtggacactttggcaaacttggaaaagcgcgcgtaaatgatctcgaagttgaaggaatcgcgatcgtaaatctgcgaatggtgcttgatggcgatgatcaggcacagctctaggactgagagcccgcaaagcagctctatcttgtcgtcgccctcaaactgtgatcccactgcagccattttttcggctgtgatgtggggagattgcggtcggagatgtgccaccaggcggaataggaagttcttgagataggcctcgctaatgtcgaagtcatggagcgcttggagggtgcttcttgcctgctgagtggccaggactttgcatatttgcttgttccaggcatcgcgtagtctgggcgaaaagccgtactccccggggtcaaaatggttgcgggagaagtaaagtgcccccgactggatgttttgtaggttatagattttctccgccgccagcaacagtgaattgccggtcgggagggacagtagatccctgcacaggtcaacgtaatcctcaaagcgccgcaagctgggaaagagaaagacctgccggtgcgagaaacgcgacttgacccgcttctccagcagctcgatcacgtcgaggcgacaggtaacgccaagtacacagatgggcgcctgggctgactgggagacgtcgaagaggttgtagagcagggtctggttgtggtgagcacagaagaggtcgaactcctcgagaataaagatcacgctcttggaatgcttgccacccgccttgaggcattgcagcaggaaggcgaggttctcggcgaacgatccgaacactttcccatccgcagcgttctccagctgcatctgcacagtgatggacttcagggccactcggtcgtccgtgtgcagattaccgtccaggtggacgatgagagtgttttccccgaacgatttattgggcagcaaatcggccagcacggagttgatgagctaaagaatttgaaagcatagattactggattggtttcccggtaaggcctgcactcataccgttgtctttccggatccccgcggcccaaggagcagcaaggagttggattcccccatttcagctgtgcgttgcagcaataggcgcacattggaccgctcctttgcgtagcccctcaaggtggtgtagtctcgctggaggcgctccttcaggaagcgcctgatgctgaccagctccctatccgcctccggcattttcgctctcggatcggaactcctttattcctccttatttattagttaaatggacgcacagatagtttggatttctgccagtaattaagtcgcgccaaaaaacgtcaacaatgcattggggatggaacaaaaccgatattggttcatttaatgtacggtggtttggaactctgatactactcagtgttgccttaagccgcctgaaaaatatattcgtgccacaaaccaatacgatctaatttctgcggctttagcacattttgaaatatcaacattttagttcatacaaaatggacctacgattgaggaatatgtacaatagtaactctataaataacaatcaattatacatataaacatctttaaaaatatgaacaaatttctttattaatcgcatagtcgttggcattttgagggtcaatttgctggaataggtttatttggaatgctgtgtattttaaatgtccattaaaataagttattaaacactcaatggattctcagagattatttaatatcggctggcaatttcataacagcaatggatcgagtaatcacaattaataacttttggaatgcttcagcttttggcactcggtattgtggttattgtgatccagacctctttaggaatgagcggattgtggacttttctgctgatttttatgtctccgatggcagtaagaatcgaatgcgtatggctaatagatggcactatagaataattgatatccaaagatccgaggacacttcgaattcaataatgtagtctgcctcgtgcgcgacaggatgtttatggactttgagtactgttacttgaagtccgtgaaccgcacctacaagtacctttcgctaaaaacaaagatgttccgcctgcccgtcgacaactgcgaggtaagagtatagaactgtgtcggtctcacaccacccgaccatcttccagaccagattccagctgaggatgcgcgagaacaggcgagtcctgtacaactttgatttcaaggtggactcctgcaagttcatgcgcgaccgcaagcacgtgatcgccaactgggtctaccagacc

SEQ ID NO: 5318 - DNA, 1459 bp, DROSOPHILA
actatctgtgcgtccatttaactaataaataaggaggaataaaggagttccgatccgagagcgaaaatgccggaggcggatagggagctggtcagcatcaggcgcttcctgaaggagcgcctccagcgagactacaccaccttgaggggctacgcaaaggagcggtccaatgtgcgcctattgctgcaacgcacagctgaaatgggggaatccaactccttgctgctccttgggccgcggggatccggaaagacaacgctcatcaactccgtgctggccgatttgctgcccaataaatcgttcggggaaaacactctcatcgtccacctggacggtaatctgcacacggacgaccgagtggccctgaagtccatcactgtgcagatgcagctggagaacgctgcggatgggaaagtgttcggatcgttcgccgagaacctcgccttcctgctgcaatgcctcaaggcgggtggcaagcattccaagagcgtgatctttattctcgaggagttcgacctcttctgtgctcaccacaaccagaccctgctctacaacctcttcgacgtctcccagtcagcccaggcgcccatctgtgtacttggcgttacctgtcgcctcgacgtgatcgagctgctggagaagcgggtcaagtcgcgtttctcgcaccggcaggtctttctctttcccagcttgcggcgctttgaggattacgttgacctgtgcagggatctactgtccctcccgaccggcaattcactgttgctggcggcggagaaaatctataacctacaaaacatccagtcgggggcactttacttctcccgcaaccattttgaccccggggagtacggcttttcgcccagactacgcgatgcctggaacaagcaaatatgcaaagtcctggccactcagcaggcaagaagcaccctccaagcgctccatgacttcgacattagcgaggcctatctcaagaacttcctattccgcctggtggcacatctccgaccgcaatctccccacatcacagccgaaaaaatggctgcagtgggatcacagtttgagggcgacgacaagatagagctgctttgcgggctctcagtcctagagctgtgcctgatcatcgccatcaagcaccattcgcagatttacgatcgcgattccttcaacttcgagatcatttacgcgcgcttttccaagtttgccaaagtgtccaccacaatgcaggccgtggagcggtccattgtcctgaaggccttcgagcatttacgcatcgcagagctgatcatgccgctcaccggtggagctggagggggcgtaggtaaggtgcagaaagagtttgagatgcataagctggcgctgacatacagccagattcaccactgtatgcagcgataccaggcccttcccacagaggttgctcagtgggcgcaaagctctctgatttagcagcagatcagaa

SEQ ID NO: 5319 - protein, 459 aa, DROSOPHILA
MPEADRELVSIRRFLKERLQRDYTTLRGYAKERSNVRLLLQRTAEMGESNSLLLLGPRGSGKTTLINSVLADLLPNKSFGENTLIVHLDGNLHTDDRVALKSITVQMQLENAADGKVFGSFAENLAFLLQCLKAGGKHSKSVIFILEEFDLFCAHHNQTLLYNLFDVSQSAQAPICVLGVTCRLDVIELLEKRVKSRFSHRQVFLFPSLRRFEDYVDLCRDLLSLPTGNSLLLAAEKIYNLQNIQSGALYFSRNHFDPGEYGFSPRLRDAWNKQICKVLATQQARSTLQALHDFDISEAYLKNFLFRLVAHLRPQSPHITAEKMAAVGSQFEGDDKIELLCGLSVLELCLIIAIKHHSQIYDRDSFNFEIIYARFSKFAKVSTTMQAVERSIVLKAFEHLRIAELIMPLTGGAGGGVGKVQKEFEMHKLALTYSQIHHCMQRYQALPTEVAQWAQSSLI

SEQ ID NO: 5320 - DNA, 5721 bp, DROSOPHILA
tcactgaccgaagtctgcgttttcagcattgcatacacacacacactcggacacacacacattggcacttttaatcatttatcaatatttaagcgactaaggcgaaaaactaactgtgcacagagggagccccaagaacaaatcctttgtttgcacggaacacggagcacaaatagaggcacagatacacggaaaaacggccgcagaaagcaccaactcttctcgcacacatacacttgcgcaaataggcatgtagttagttgtaagccaaaccgcagcgtagaaaaattctttgggaaaaagacaataaaaaaaagaaaaacaacaaaataatatacgctcacagctgcgaaaattgtgacacggagaattaaattctgttccacgcacgcccgcccgctttaccttttttttaccaacaacaaattagcgatccacggatggcgatacgttggtcatcgatgaatcagtccgccgatgtttatgcgtgtatcggcatatcgatggttgcgcaagtatcgctacaggtcttaacaagtccatcacctctcagtgaatacacgaaccatacgtagctgtacacgctccgcagctagcgagggcacaagccaaagtaaggactacttctgggtgggaaatttaaaaattggttgtaattattaaatgtcagcattatctacttgtgacacaacgcgctatgaatggaacgaaaatgccaatccgcgtacaacacaatgcaaactttatttgttatgtttcgctccttacgatttccgatttattacgatcttatctcggcaattaactcatcccgcccaattcgtttcgctactttcgctacaatagatcaataagatatagtggatatacatatagaggggaccgtgtgagtacttcttcaagtcttgtatttcctatgcggaatggtatggaaatggaaaatggtttttacattaagttacggtttacattattttgtgtttttttttttgtgtgttttgttttcgattagaagtagcataatttaaccccgactttagctaaaaaaaatcatagaaataaagacgccccgtttcgcgaccatttgccgtctttttccccctgtgtaacccccgatgtgaatcctccttcgaatcctaagacaggcacttggcttcctgctgctacggatgctcgtaatccctctagtttggctccttagagctcactgtgcggtgtcttggtttcctcctcggcaggcgttggagtgatctcatctacgggctcctgctcctgctgctcctcctttgtcgcctgttcctgctgctgctcggcgtcctccgatttggtgtcatcgccactgccggaggccaccacctcctcctccttcttcttctccttttcagcagcgggcttcaccttgggcttccagatcttgatcttgttaaccaagtacttgacctcgcggtccagcaggctcattttgtccgttatatccttgacggtcaggcggatatccgcgttcttggccaacttcttctgcgccgccgtctccgtcttgagccatgcattggtttcggttatcactttgtccagcgtgtcgatctccacctgggtaaagacgtccttctcgggattggtgtccttggtgagattgcggccagtgaccaggaacttttcggcgccatcaatcatgcccttgagtgctttgatagcctctggtcgctcctcgtgttcccagtggcgagccaaaaagacgttggatagcttcttcagttgcgccagcttttcctcgtagatctctgctttgggatcctccagatcctcatacagccattcacccaaagtgctgcattcggcaagcaatttctccttctcctcggcggtagcacacttagcgtacgactcctcgtccagtttctgttgcacctcgattatgtgggcttcgagggcattaaaagctgattccaagcggacacgttgctcctcagctttgttaatggcggccagtttggccactgattgatcatacgcggaaccgaccagaggaacaacaaactgcgtttgggactcatacgtcaccggggacttgaccgtaacaagcttgattgtttcgtttttggcttcggtatcttgttttgtgctctcctcagacttttgctccttgctagcatcctcttccttggccttttcattatcttctgatttagatggctcttcgcctgcattagctgcctcttcctgttccgaattgtccttcttctcctcaccctccttggtaaacaatttactcaaagtgctgccaaacttggacaaagtgctgtcttcatcagcatcgtcctcaggcttttgtttctcgtacacgtactcaactcctgtgcagcggaaaatgccagagtcatccaggtagaagtaagccttgatgcccttgttatccaccagttcctttttcgatttctccagcagctccttcacctgcttcagctgcaccttggtcacgttcaagctgcccagagcggcaatctcctccttgctataacgatccaaatcggcgtagttgacatagaactcaaaatcgtcggtgtgcttgttgaaggtaatgaccttcttttggggataggggttcattagggcaaacagggcacgtttcacctgctttacggcagcaccatcgcctggatcccgttcgaaggacacttgcagggggaacagcgtggcatccttgaccacaaacttcttcactttgaagccggccgataagtcggctgccttataaactgcacccatagtggcggattcatcggcattcagatttttacccagctcctgtttaatgacagctttgatggtttcctgcacacgtggaactcgggtgccgcctccgaacaaaatcacctggttgatcacgtccagactgaggtgcgacgaggccaatgcttcttccaatggttttgtggccctgggccaaagatcctcgcagagttgctccagcttctcacgagtgacgggcaatttaaagtcaatgtcctctatcaggttttcgatttgagcgaagaactccgtattggcggacaggacattctttagtcgtcctgcttccttgaaaagtttggccagtgctcggggactggtggtcacatcggttttagtcttctttagggcattaaactcctgcgccagataatcacgcaatcttagttgaatctccaggcctcccagagtgcgatcataaccaacgccaaggacctgcaccaccgggttgatctccctggtttgtttatccttcaccaactgatagctgaccacagcggctgaggttttgtaggcgcccatatcgtagaagaggaaatactgggccgtttcgttgatttcgccgcgatggaagacgccgtagtttagagccaccgccgcatagtcgttgattagctggagtaccttaagattggccaactgggcggcggacaagagagcttccctttcggcttggccaaagtaaccgggcacggttaggacgcactcggttattggctgctgtacggattcctgggcgaactgcttggccttgaccagcaattgagcaaccagttcctccacggagaattcatcggtgtcgcttttgcggaagaccacggtgttgcgctccggatcacccacaatgttgtagtatgggaagcgtttcctaaaagcgattgatttagagataagtcgatgggacgcaacaatgacgtggcccaaagcaaaccaaccacttacctatacaaatccacaatgggattatcgatggtcttgcccagcaaatccagaagatagccataggccgagttgggatccttgataccaattgtttgtgcatcctcgccaatggttcgcgttccatcgcggaaggctaggatcgcgggcgtcttgcgcttggactcgcgattcagggcgatttccataggcactccaggcgacacaacgcccactttcatccactcgctgcccagatccacggacatcacggcggctccctgggaaagggcaatccccgccagcagggcgctcaaaaggagcacgagtttcatggtctgtgcggttgaaaggtgttcaaattaaagcattgtgcacaggattagataccccattaagtactccatatgtatttaccctctgcattgtaagatctttctagaaagaccaacgatttaacttaaaaggctaacattatacaaaaattcaccaactacttttacctatatttcttagctgcattaataacacaagaattagttgggttttcaacagttttaacagataatttgtgggacgaaaagtacgtctggcttatgcgaggaaacctgtgttcatgtggcagcggaaatagtgtttaactcgtacatagatctatatagtttaccggtgaaattactggggagaaatggcttttaaaaagtcttcacggaaaatcagtgaagagagcattaaccttttacttccacaattcttccgcgattctttcacttctttttttttgcaacgcaagcagctgtctgcgccccgtcaccctccctctgcctatcctaactcttccatccttccagccaagtaccgctttccacttacgtgtcccgtttcgttcgtcgcttccagctgtcctttgccactcgcactctccaatcgacttttattcagaagtcacctatttattaattattcaattcacaacgtcgactgctattcgagttgttaagtaaaaaacagagtcgccgcgattaagaagaacaagcagcggcacacgaagaagaagaggaaaacgttgacgtgttgattcgaccgggcgatagcaatcgataaaacaatcgagagactgtcacttgggaaggcaggcgctgccacatcgcactgaagtgaccgccacaatttaaatacttattgtgtgcaattaaattctttttgtacaaaatttcgtgattaattgcaaaacaccaaatgaaaaccatacactaaatgattatgacccttacttggtttaaggtcaatgtaagagcaggaagatttttcctactcattgaaaatctgaagttataacatatgtagttggcaattccaagtttttttctttcaggcagcaagtcaacccacatattgatagctcagcattcccgcgatgaccgaatttttgaacgaaagtgctgacacgttattaaactatactttgtatactctttttcttgagattattgacacgatgagtaagttatattacaattcgatagaataaaaattaactaaaattaaatcacctaacacgcttaacgttaaatttgttgtaatgcgaattgtcctgaaaaaattacaaaacccaaactagataacaattctttttttcaacaattatctttaaattaaaattgaataggttccaacttccaaacgtatagggtattgaaagagttaaattaagttttctgctcgcatcgccaactcacctattcacgttaaaaagaaataggtgactggaaaacgatcgaatctagcgaatttaaatggaatcgcttcaaatgcagaatagcacaaagtgaacccaccgagtatccaagcacagcagactgcaattgggcaatattcttggtgaatttgtaaatttcgctgatctgtttttctcttggccatataaaacccgtcccgtttcaaaaaaccatagtcttaattctgtgagctatgtgtggacgacgactgctgttcttggcggcctttggctgc

SEQ ID NO: 5321 - DNA, 3112 bp, DROSOPHILA
ctctgttttttacttaacaactcgaatagcagtcgacgttgtgaattgaataattaataaataggtgacttctgaataaaagtcgattggagagtgcgagtggcaaaggacagctggaagcgacgaacgaaacgggacacaccatgaaactcgtgctccttttgagcgccctgctggcggggattgccctttcccagggagccgccgtgatgtccgtggatctgggcagcgagtggatgaaagtgggcgttgtgtcgcctggagtgcctatggaaatcgccctgaatcgcgagtccaagcgcaagacgcccgcgatcctagccttccgcgatggaacgcgaaccattggcgaggatgcacaaacaattggtatcaaggatcccaactcggcctatggctatcttctggatttgctgggcaagaccatcgataatcccattgtggatttgtataggaaacgcttcccatactacaacattgtgggtgatccggagcgcaacaccgtggtcttccgcaaaagcgacaccgatgaattctccgtggaggaactggttgctcaattgctggtcaaggccaagcagttcgcccaggaatccgtacagcagccaataaccgagtgcgtcctaaccgtgcccggttactttggccaagccgaaagggaagctctcttgtccgccgcccagttggccaatcttaaggtactccagctaatcaacgactatgcggcggtggctctaaactacggcgtcttccatcgcggcgaaatcaacgaaacggcccagtatttcctcttctacgatatgggcgcctacaaaacctcagccgctgtggtcagctatcagttggtgaaggataaacaaaccagggagatcaacccggtggtgcaggtccttggcgttggttatgatcgcactctgggaggcctggagattcaactaagattgcgtgattatctggcgcaggagtttaatgccctaaagaagactaaaaccgatgtgaccaccagtccccgagcactggccaaacttttcaaggaagcaggacgactaaagaatgtcctgtccgccaatacggagttcttcgctcaaatcgaaaacctgatagaggacattgactttaaattgcccgtcactcgtgagaagctggagcaactctgcgaggatctttggcccagggccacaaaaccattggaagaagcattggcctcgtcgcacctcagtctggacgtgatcaaccaggtgattttgttcggaggcggcacccgagttccacgtgtgcaggaaaccatcaaagctgtcattaaacaggagctgggtaaaaatctgaatgccgatgaatccgccactatgggtgcagtttataaggcagccgacttatcggccggcttcaaagtgaagaagtttgtggtcaaggatgccacgctgttccccctgcaagtgtccttcgaacgggatccaggcgatggtgctgccgtaaagcaggtgaaacgtgccctgtttgccctaatgaacccctatccccaaaagaaggtcattaccttcaacaagcacaccgacgattttgagttctatgtcaactacgccgatttggatcgttatagcaaggaggagattgccgctctgggcagcttgaacgtgaccaaggtgcagctgaagcaggtgaaggagctgctggagaaatcgaaaaaggaactggtggataacaagggcatcaaggcttacttctacctggatgactctggcattttccgctgcacaggagttgagtacgtgtacgagaaacaaaagcctgaggacgatgctgatgaagacagcactttgtccaagtttggcagcactttgagtaaattgtttaccaaggagggtgaggagaagaaggacaattcggaacaggaagaggcagctaatgcaggcgaagagccatctaaatcagaagataatgaaaaggccaaggaagaggatgctagcaaggagcaaaagtctgaggagagcacaaaacaagataccgaagccaaaaacgaaacaatcaagcttgttacggtcaagtccccggtgacgtatgagtcccaaacgcagtttgttgttcctctggtcggttccgcgtatgatcaatcagtggccaaactggccgccattaacaaagctgaggagcaacgtgtccgcttggaatcagcttttaatgccctcgaagcccacataatcgaggtgcaacagaaactggacgaggagtcgtacgctaagtgtgctaccgccgaggagaaggagaaattgcttgccgaatgcagcactttgggtgaatggctgtatgaggatctggaggatcccaaagcagagatctacgaggaaaagctggcgcaactgaagaagctatccaacgtctttttggctcgccactgggaacacgaggagcgaccagaggctatcaaagcactcaagggcatgattgatggcgccgaaaagttcctggtcactggccgcaatctcaccaaggacaccaatcccgagaaggacgtctttacccaggtggagatcgacacgctggacaaagtgataaccgaaaccaatgcatggctcaagacggagacggcggcgcagaagaagttggccaagaacgcggatatccgcctgaccgtcaaggatataacggacaaaatgagcctgctggaccgcgaggtcaagtacttggttaacaagatcaagatctggaagcccaaggtgaagcccgctgctgaaaaggagaagaagaaggaggaggaggtggtggcctccggcagtggcgatgacaccaaatcggaggacgccgagcagcagcaggaacaggcgacaaaggaggagcagcaggagcaggagcccgtagatgagatcactccaacgcctgccgaggaggaaaccaagacaccgcacagtgagctctaaggagccaaactagagggattacgagcatccgtagcagcaggaagccaagtgcctgtcttaggattcgaaggaggattcacatcgggggttacacagggggaaaaagacggcaaatggtcgcgaaacggggcgtctttatttctatgattttttttagctaaagtcggggttaaattatgctacttctaatcgaaaac

SEQ ID NO: 5322 - protein, 923 aa, DROSOPHILA
MKLVLLLSALLAGIALSQGAAVMSVDLGSEWMKVGVVSPGVPMEIALNRESKRKTPAILAFRDGTRTIGEDAQTIGIKDPNSAYGYLLDLLGKTIDNPIVDLYRKRFPYYNIVGDPERNTVVFRKSDTDEFSVEELVAQLLVKAKQFAQESVQQPITECVLTVPGYFGQAEREALLSAAQLANLKVLQLINDYAAVALNYGVFHRGEINETAQYFLFYDMGAYKTSAAVVSYQLVKDKQTREINPVVQVLGVGYDRTLGGLEIQLRLRDYLAQEFNALKKTKTDVTTSPRALAKLFKEAGRLKNVLSANTEFFAQIENLIEDIDFKLPVTREKLEQLCEDLWPRATKPLEEALASSHLSLDVINQVILFGGGTRVPRVQETIKAVIKQELGKNLNADESATMGAVYKAADLSAGFKVKKFVVKDATLFPLQVSFERDPGDGAAVKQVKRALFALMNPYPQKKVITFNKHTDDFEFYVNYADLDRYSKEEIAALGSLNVTKVQLKQVKELLEKSKKELVDNKGIKAYFYLDDSGIFRCTGVEYVYEKQKPEDDADEDSTLSKFGSTLSKLFTKEGEEKKDNSEQEEAANAGEEPSKSEDNEKAKEEDASKEQKSEESTKQDTEAKNETIKLVTVKSPVTYESQTQFVVPLVGSAYDQSVAKLAAINKAEEQRVRLESAFNALEAHIIEVQQKLDEESYAKCATAEEKEKLLAECSTLGEWLYEDLEDPKAEIYEEKLAQLKKLSNVFLARHWEHEERPEAIKALKGMIDGAEKFLVTGRNLTKDTNPEKDVFTQVEIDTLDKVITETNAWLKTETAAQKKLAKNADIRLTVKDITDKMSLLDREVKYLVNKIKIWKPKVKPAAEKEKKKEEEVVASGSGDDTKSEDAEQQQEQATKEEQQEQEPVDEITPTPAEEETKTPHSEL

SEQ ID NO: 5323 - DNA, 2447 bp, DROSOPHILA
taaacttggtcagacaaaaaggaaaccagcgagtccagtccagtccagcacatggtcaaatatttaaattggcatcgtaatcagcgtggctcgattttatgattgctctggcccatcgccatcaccctttcgaatatcctggcactccccagcggccattaggcacatgcgaccgtttcggagtcacgcgccgtgccacatggacacacacaagtggacttcttcggacaaggtttaacagccgactttctggcgctgcgttgagtaagccaaaggaatttggttgggaatttcaagtggtgccgcctaggcgtagggaaaacgcgactgggttgggctctttcgaaaggggttcgtggttaatttgtgccttcaatttggaattcctagcttcgcatggcggtaacaaattcgttgaaggagatctttccatctttgtcctgatcaatgtcctggaacaactcgcgcaagtcctcttcggacatcttctcgcccaggttggtcatcaccattctgatctcgttaattgtaaagctgttcacttcgctgcgatcgaagattttgaaggcctgctttaggcacaccagactgttctgctcctccagccgtttgctcatcacgtatagaaagtccttgaactgcacctgcccaccgaagtcggcgttactttcgttggccaggtcgtagatctccgcctcggtgagactctctccaagggcccgcattactccgccgagctgttggacggaaacccatccggaccgttccttgtcatacaaactgaatgcttctcgaatttcttcaatctgggcctcggtcaaactgccgctcattgtttccaaagtgattttcttttttttttttttttttgtagtggactaatgtttcatgtgcttttgtcagtgtgaacataaagaatttaaactgaacacagacagaacgccgactttttgttggatagaaatcaagccagccttctatacgagtactcacatggaggctatcgcattgtcatcatgttgacgaactcctcgtaattcaagtgattgtcctgatccaagtcgtactcgcgtatcatttcttccaactcgtcgtcgctgagctttacgcccagcgcggtgaacacattttttagctcggtggtggtaatgtagccattgttatccttgtcgaaaattcggaaagcttcgcgcagctcgtcctcatggttggtgtcgcgcatcttgcgcagaatcacattgcagaactccggagccacgatggatccgtttccctccgaatccacctcattgatcatggactgaacctcggcgtcgttgggctggcgacccagggcgcgaatcaccaccgccatctctttagatgttatggcgccctcgttgtccttgtccaaaatacggaaagtgtcaaggatcaggactcgctcctcatgcgaaatatcctccatcttaactggtatattatagtttctcggaagagttgtatattgctctgtttatatgtaggtgtcaactgatgtttggatgaaacaaggtcctgacattgaactcagtgaaatgtgaaaaatggtaaaatgaacatcccccggtggcttcactgcgctgcacagtgcacaacaccgaatggcacaaaatcaatatgctcgttatataagcgcagtgccgcacggacagagttgattgattcgaatgtccttgggcgaggaggccttgcagctgatcggtttcaattgcgacccagcaacggacgtcagctagtatctttcgttgttcgttaacaaaacagaaggagagtgccgttcgaggaaagttaaggagtaagaatgtgtacaatcaccgtcattgttccaacgcacactcaagaaaaaaaaggctcatcttttcgctattcgaaatacaagaactcaacagaagtttgcaacgccaaaatatttgtgtagaatgaaaacaacattagtgaacttttatagttcccgagatctcgacgttcatacggacggacaggcagacggaaggacagacgggcttatccagatcgactagtgatctggatgaataactcctttagcttcacgagtaactggtataaaaatgtaaatgtaagattttgttcttgattgcttaaacttattcgtaagttttgctatacattaaataatctatctatgaatcagcataccatactattcatacttaacaagagtgttttgagtgtactgccatacaagtgtagtggttgctatcggcacagaaaggttgtcatgcgatttgggtttggcgcctagcctgcaactttggcggctgcctttttgccgcaggttaattccagtgcttctccccctcggccctttcacctgaccgcagtgggacacacctgacaccggtttttggctgccggaggagtggtagtgcccgggggggtgggcagagaatgcggcacgctttact

SEQ ID NO: 5324 - DNA, 447 bp, DROSOPHILA
atggaggatatttcgcatgaggagcgagtcctgatccttgacactttccgtattttggacaaggacaacgagggcgccataacatctaaagagatggcggtggtgattcgcgccctgggtcgccagcccaacgacgccgaggttcagtccatgatcaatgaggtggattcggagggaaacggatccatcgtggctccggagttctgcaatgtgattctgcgcaagatgcgcgacaccaaccatgaggacgagctgcgcgaagctttccgaattttcgacaaggataacaatggctacattaccaccaccgagctaaaaaatgtgttcaccgcgctgggcgtaaagctcagcgacgacgagttggaagaaatgatacgcgagtacgacttggatcaggacaatcacttgaattacgaggagttcgtcaacatgatgacaatgcgatag

SEQ ID NO: 5325 - protein, 148 aa, DROSOPHILA
MEDISHEERVLILDTFRILDKDNEGAITSKEMAVVIRALGRQPNDAEVQSMINEVDSEGNGSIVAPEFCNVILRKMRDTNHEDELREAFRIFDKDNNGYITTTELKNVFTALGVKLSDDELEEMIREYDLDQDNHLNYEEFVNMMTMR

SEQ ID NO: 5326 - DNA, 8303 bp, DROSOPHILA
catcaacgtacgtgtttgcaacaataatgactttttaatcatttttagcaacacaattgtgctctgtgcatatcagcctgcatttaataattttaggccaactcattgttcgtgtcgggttgccgttgctttggccaacaattgtaattgacagcagaaaaggcaaaggcgtttacagatctcagccatatgtcgcatatggcgtcattcttgtacccctaaagccccgccgatgccctggtagctccattagcttggacctgcggctccaggtctcgggttccatcgagtggcacttcattttcgaggcgtcagcggttgtcaggcggcaacattagaccgttctgccgctgtaccgctcggcgcttaccgctcaccgcttaccgcatttaccgctttagcactgcacatgcaatttgctgtttttagctttgcagcttagcagttttgagaaaccgctgactgacttttctggggctggagaactttgtctcgatggcttggaatatggaccggtttgttttgctggcgaaactttcgattggccgcaaatgaggtcgagagcaggccaaaagcgaaagtcaagtccagtcgagttgcgtttaaggcttagggtgtgccaaatgatggttaaaaacctgtcgcagctgttatcgtactagtactcgatcgatatgccaagaagtgctcgtctcgtacctaccattaattgcctcgaatcgctacttaacttcctctttaattgctgggggttgcagattgcaaattgtcgttttttgggggctgactttgcactttagttcgcacttccgctggctgacttcccccttttttttatttgcattttcgagctgactagagtaaaaaaacacttaacaccctgcctggccaaaacttgagaactgcataaaccggcgagtggagaggtaaaagctaagcaattttgtaaaaccatttccacagtgccatgttgtgactctgattaccggataacagcaagatgatcaagttccgctacaaaaggaaagaacccacgaatgtggtgggcgtagcagccccaactgcaggagcagcagcattgggatcaggagcatccagcaccccgggcacatccccaacatcacctgtttccgttcccgttcccgttcaagcccaccatccccatccccagttggggcacctgatcagcaacaatggaggcaccctgccaaggagtagtccccgcaaattaatcctggatggagccgacaagtcggccacattgacccgccagcagtcgaagcagaagtcggtcagtgccttggccaaagtggccagcagcgtggaattggccgtaatgggctataatagcactggcaatggcaatagcaatggtcatatcaacagcgcgggaaattcggagagggatcggtgcatcaatgcggttatcgtaagtttagggaataatttaacatgggggaagctctaaatgatcaacttttattagtctaaagccagaaatgaaacgcacacaagtattcacatattttgtttattatttagtaatctaatgtaacttaggaaatactttatattaaatagcttacataatcactcagcattgtctttcgaaatattcctcactatagtcactgttccatgttgaagtcttctaaccaacttgtgctcttcctgcaacaggaacttttccagcagctgcagaccagttctgagcccgccttgtgcccggagccactgcgtcgggctttggccagtggtccattggctggacggcgattcccactcggctgcttgggcgatgcagccgaatgcttcgagctccttctccaccgcgtccactcgcacatttcgccggatgacggcgactcctgcgaatcctccgcctgcattgcccaccgaagattcgccatgcgcgtcatcgagcagagcgtctgcaagtgcggagccaattcggagcagctgcccttcacccaggtaagcaatggatgcatttaacgagaatcttatagaataggattcttaatgaagccattaatcaaagcaaagcgacagcaatacgttgggcaaagctaattttatggagtatacttaattttaatggaatatatagagttcgctttaaagtttttagtgtcatttaccctttttttgtttttaatgcgtattaaatcattgtacaacgttttcgcaagtgtagtcaacccgtttgtctgtttctccgattgaagccatgaaccgcagatacaatcgccgatcgaatcagagccaaactcgtggcgtgggttccaccagtttggatccgagcacctgcaacatacgatgttgcacttgccaagtcttgagtgtgatgaatgtcttgtcttgaatgtccgccacttgtctctctgtccgagaacagttactggcgcgactattaccgatctgtgcggtgcaaacgggttatgggacattgccgtgcacatgcagattgtctgcgaaaagctgctcggaccagttggtcccttaaaaggggccatataatcgatggctaatgcggccatataatctcggggtgacgtcagcgcgtgcctggagagtcgcagtgggcgtatcacttccgtcttgaccatattccgctggtaactaattgtcttgtgttctccaatctcacacagatggtgcactacgtctctgcctcggctctgacctcccagaaaagtctggcactgcagtcccatcagcaactgagttttggccagcttttaagggccgccggcaacatgggcgacatacgcgattgtccggtgagttgtcaacttaactattatccatactggcagttgaactcatattgtaactcttctgaatcccaaaacagaacacctgcggcgccaagattggaatttgtcgtgcgctgcttaaccgaccagaagtggtgtccattggcatcgtttgggactctgagcgaccggcggcggatcaggttcatgccgtcctaaaggcagtgggcaccagcctgcgtctgggtgacgtttttcaccaggtcagcgagccacgatgggcccagcagacccagcacgagctggttggcatcgtttcctactacggcaaacactacaccaccttcttcttccacacgaagctcaaggtgtgggtctacttcgatgatgcgaacgttaaggaggtggggcccagttgggagggcgtggtggacaaatgcagccggggaagatatcagccactcctgctgctgtacgccgttccccagcagcctacggtgggcaacggcgtaggtatcggtcacgtggatgtggccatgccggcgagtgctccatcgatagctggctcagtggttcgcagggcagttacgcccagtccggagaagcccagcttgggcaacacaaggagggccatcacccccactccgctgaggacaccacccaacgactatcagaacctgagtgtgattcaaaagaatatctttccgagcaatctggcaatgggtacggatgaaacggatgcctacattagccgcaagacggttgaacatgtgctgagtgcccagtaccagaatttgagcgtaatccaggacaagattggaggcggcaatggagtcggtgtcggccaacagagtgtggataaggatggaggctttctgagccgaaagcccattgaggcagtgctgagtgcccaactggcgcggaggcagcacctccagcttcaacgcagccacagtgcggagtcaagctccggccacgcctcctccaacggcagttctccgcccagcgatggactgaccatgccggagcacctgaatcagccacgtcgtcgcgactcgggcaattggtcaggcgatcgaaacagcgctagttcggccagttccacgacgctggataatccctacctgtacatggtggccaagcggggtgtggcagcagtgccacagagccccacgcgacatggtttgccatatgacccgggctacgattcgttttcgctaagctccacggactcatatccgccgaagcatgcgctaaatccacagctggctaaaatcccggaagcagccatgggcgtcgttccaaacggaggagcaatgccccatggacatggcaacggacagctggccttgtctggggactgcgagaagctgtgccacgaggcggaccagttgctggaaaagtcccgactggtggaggagtcacatgatctggaaacagccctggtgctctgcaatgcggctgctgggcgggcacgagccgctatggatgccccgtatagcaatccgcacacgatgacctttgcccggatgaagcacaatacttgcgtgatgcgggcccgtagtctgcaccggcggattctggtggagaagggagctgaaacagaggctatgcccgaactgaagcacatgcgcgaaggaagcacgagtagtgtgaagcatgtgcgccagaatagcaaggatcgcacgttagagaaggagcagcagcagctgcagttccagcaaatacagcagatccagcagattcatcagatccagcagcagatcccagccagcatcgaaatatatgccacgctcccgaagcgcaagagtcctctgaaggccttggcctctgcgtctgcgtgcgatgacaacgcaatcgagtacgagcaggagaagcaactggccaccagtccgggaaaaccggagcgcgagagtcgctcgctgttcgggcgcaaggacaaagagaaggagaagcggagtcgcagcgaggatcgcaacaagctaacccgtgagttctcgctcaccgaaacgcttctagtgaatgccaaggatacgctgaagaagcataaggaggacaaggacgagaagaaggagaaggacaagagcggcaaaaagcagcacaaaatcagacgcaagctgttaatgggcgggctcattcgtcgcaagaatcgctccatgccggatctcacagaggcggtggatgactcgacggccaatgccggcataacgcaccatccacattatcctgcacagggcgtaactacggcgggcactctcttgggtacctccgtagacgacagtgccgttggattgggcaaacacggccacggcatgagcggctacatctctgagggacacttcgactactcgggttccgggtcggcctcaaattcgggagccggcagcaatccaaatccgaatctggagaggagcaagctgatgcgcaagagcttccacggcagcggcaggcagttgacaatggtaccgaaagtggctccaccgccgcccatgcgaaccagctccactttgaccccacagcagcaacaacaacaacaacagcaatttcaccatgaggccaacttgtccaacctctcggccatgagttcaaacacctcgattagcgaggattcctgccagacgatcatcaccacttgcgcacaggtgcactcggagcagagtccactaaaggatctgcaaatgctggtcgctcaggacgagctgccactgccgccgccaatggaacttcctccgtacccaagtccaccgcactcctcctgccattcgcggcaggctagcgaagatttcccgccgccaccaccgccggaactggatctggagccactcaaccagcaactgagccagctgcaggcactggaggcggccagtaagcagcagcgccagcaactcgagtccctcgagggcaccaccagcattttggcccagctgcagcagcgccagcacctgctcaagctgagaaaggagcaggccaatcacccgggagcagccaccacggatgccacctggctgaaggagctgcaggcgaaacaggcaaacgatttgagagccatgcaacgtaagctggaggcctcgtcgccatcaagtgtcagggacttgactcatcgtttcgagcaaacctccattcgatcctacgcctcgcaggagctattgtcccagccgggacagagtcagcagctggggcagctgcgcacccagatgaatgggctgccaaacggcaatgcaaaaatggatgtagatgaggtggacgctatgccagcggtgagaaactctctgcccgccgcactcagcgcccaccaattgctgcccaagcctaagtacgaaatgacccaatcgcagattgcagaggagattcgcgaagtggagttgctgaacacgatggtacagcagacactgaatcagaacggagctgccgcactacctaagcgggtaaagaaaaagagcgtctccttttgcgaccaggtgatcctggttgccacagccggaaacgaggaggacgatgactttatacccaatcccatactggagcgggtcctgcggactgcccagcatcccaacgaaaaagtcactgctcaaatgatccagcagcagcagcagaacatgatgcgattgcaaacagaagcgcagccgcggcaacagcaggtgcagcagctgcaacaaccatcacccatgttgggcagaccagcaggagccacagcagatatgcagcgatacgtccagaggatgcagcaacaacagcagcagcagcaacaacagcagcagcaacaacagcagcagcagcaacaacagcagcaacaacagcagcagcaacagcagcagcagcagcaacaccaggagttgtaccgccagcagcagctacatcgcactagtatgagcggcatagccagccagcaacacttgcagcaattggatgcacagtacaccaccatgccgcgtcccttgcatcattcacagcttggtagctactctgtgaccttgcagaaacaccagcaacttcagcagcaacagcaacagcagcaacagcagcaggccccgcagcagctcagcttgggctactttagcaatggcagtgttgcgacttcagagcaagtcccgctgccttcgccctaccagcgggtgcccctgccacatggataccagcctgcagcagcaggaccctactacccgctacccaatgcccagcaacatctgcagcagcaacagctgatggctaagcccgtgcagaaaaaggtgagctttgagccaggaactaaaggcgaagccgattgcttgcccccaccaccgccgccgccgcaaaagaacggcttgcccgagacgggatctgcaggatcaggacaccctggagcagcacccggggcaagtggagcgggcggcaccacatcggccggcatcaccgccattcccacccgcgtctacaacaatgccattgtaaaggcttcggccaaagccgttgagtgcaatttgtgccgcaagcggcatgtgatcgcaccggcggtatattgcaccaactgcgagtactacctgcagatgctgaaccagcgcagatgatgatgattcgacactcgaccatcgaccatctctagtgcaactttctagccgtacatggaacccgttaatctcaagcattaaaatgctgccacgtcgccaataaggagccgccaaggatgtacatagcatgcttacaaatacatagataggtgtaaggatataaagtggtgccagctaacaggcgaattgcatggacccggactcaaggatcaggcggaatgcggaaacggaggggaaacacagtccttctatggttctacatgagaagttcccgctgtgacacataacccacccactaacccacccatcaccacccacatcaatgccaatgttcccaagcacacgcacacaagcatattgtacacgcccattcatacctacacatatacttgcccaggaatcgtgctaaagcttagcgatgcagcggcaccaccgaatgggattgcagtgaagtccagccgctgcaacgcttacgaactgcacagtgccacccgtcgccccattggacatcgatcgcttgactaactccacattttttaaacacccaaagcctgaccagtcgtccgcctccataaaccacattagtgctttttgtttcgacatcgaattttatttacatttttttacctaagctaactaaatacgatttatttctctgtgtgagacgccagcagtttgaaacttggtcgttgagcttccttgtgcgtgctgttgtccaacgacactcgcacttccattttttttacatattttttttttgtataatttttaattttactctaaatcagttaaggcatttatttttgtattgtcgtacttaattatgttaagaatattttttgtgtcttgcatttaaacgaatacgtgtatttttagtgttaatatagctcttacatataacataaattttttacgattttattttgctataacattattaaaagatactttgcagcatatgaacaacgaaataagagatgtcgagcatccacaagaatgg

SEQ ID NO: 5327 - DNA, 5286 bp, DROSOPHILA
atgatcaagttccgctacaaaaggaaagaacccacgaatgtggtgggcgtagcagccccaactgcaggagcagcagcattgggatcaggagcatccagcaccccgggcacatccccaacatcacctgtttccgttcccgttcccgttcaagcccaccatccccatccccagttggggcacctgatcagcaacaatggaggcaccctgccaaggagtagtccccgcaaattaatcctggatggagccgacaagtcggccacattgacccgccagcagtcgaagcagaagtcggtcagtgccttggccaaagtggccagcagcgtggaattggccgtaatgggctataatagcactggcaatggcaatagcaatggtcatatcaacagcgcgggaaattcggagagggatcggtgcatcaatgcggttatccagctgcagaccagttctgagcccgccttgtgcccggagccactgcgtcgggctttggccagtggtccattggctggacggcgattcccactcggctgcttgggcgatgcagccgaatgcttcgagctccttctccaccgcgtccactcgcacatttcgccggatgacggcgactcctgcgaatcctccgcctgcattgcccaccgaagattcgccatgcgcgtcatcgagcagagcgtctgcaagtgcggagccaattcggagcagctgcccttcacccagatggtgcactacgtctctgcctcggctctgacctcccagaaaagtctggcactgcagtcccatcagcaactgagttttggccagcttttaagggccgccggcaacatgggcgacatacgcgattgtccgaacacctgcggcgccaagattggaatttgtcgtgcgctgcttaaccgaccagaagtggtgtccattggcatcgtttgggactctgagcgaccggcggcggatcaggttcatgccgtcctaaaggcagtgggcaccagcctgcgtctgggtgacgtttttcaccaggtcagcgagccacgatgggcccagcagacccagcacgagctggttggcatcgtttcctactacggcaaacactacaccaccttcttcttccacacgaagctcaaggtgtgggtctacttcgatgatgcgaacgttaaggaggtggggcccagttgggagggcgtggtggacaaatgcagccggggaagatatcagccactcctgctgctgtacgccgttccccagcagcctacggtgggcaacggcgtaggtatcggtcacgtggatgtggccatgccggcgagtgctccatcgatagctggctcagtggttcgcagggcagttacgcccagtccggagaagcccagcttgggcaacacaaggagggccatcacccccactccgctgaggacaccacccaacgactatcagaacctgagtgtgattcaaaagaatatctttccgagcaatctggcaatgggtacggatgaaacggatgcctacattagccgcaagacggttgaacatgtgctgagtgcccagtaccagaatttgagcgtaatccaggacaagattggaggcggcaatggagtcggtgtcggccaacagagtgtggataaggatggaggctttctgagccgaaagcccattgaggcagtgctgagtgcccaactggcgcggaggcagcacctccagcttcaacgcagccacagtgcggagtcaagctccggccacgcctcctccaacggcagttctccgcccagcgatggactgaccatgccggagcacctgaatcagccacgtcgtcgcgactcgggcaattggtcaggcgatcgaaacagcgctagttcggccagttccacgacgctggataatccctacctgtacatggtggccaagcggggtgtggcagcagtgccacagagccccacgcgacatggtttgccatatgacccgggctacgattcgttttcgctaagctccacggactcatatccgccgaagcatgcgctaaatccacagctggctaaaatcccggaagcagccatgggcgtcgttccaaacggaggagcaatgccccatggacatggcaacggacagctggccttgtctggggactgcgagaagctgtgccacgaggcggaccagttgctggaaaagtcccgactggtggaggagtcacatgatctggaaacagccctggtgctctgcaatgcggctgctgggcgggcacgagccgctatggatgccccgtatagcaatccgcacacgatgacctttgcccggatgaagcacaatacttgcgtgatgcgggcccgtagtctgcaccggcggattctggtggagaagggagctgaaacagaggctatgcccgaactgaagcacatgcgcgaaggaagcacgagtagtgtgaagcatgtgcgccagaatagcaaggatcgcacgttagagaaggagcagcagcagctgcagttccagcaaatacagcagatccagcagattcatcagatccagcagcagatcccagccagcatcgaaatatatgccacgctcccgaagcgcaagagtcctctgaaggccttggcctctgcgtctgcgtgcgatgacaacgcaatcgagtacgagcaggagaagcaactggccaccagtccgggaaaaccggagcgcgagagtcgctcgctgttcgggcgcaaggacaaagagaaggagaagcggagtcgcagcgaggatcgcaacaagctaacccgtgagttctcgctcaccgaaacgcttctagtgaatgccaaggatacgctgaagaagcataaggaggacaaggacgagaagaaggagaaggacaagagcggcaaaaagcagcacaaaatcagacgcaagctgttaatgggcgggctcattcgtcgcaagaatcgctccatgccggatctcacagaggcggtggatgactcgacggccaatgccggcataacgcaccatccacattatcctgcacagggcgtaactacggcgggcactctcttgggtacctccgtagacgacagtgccgttggattgggcaaacacggccacggcatgagcggctacatctctgagggacacttcgactactcgggttccgggtcggcctcaaattcgggagccggcagcaatccaaatccgaatctggagaggagcaagctgatgcgcaagagcttccacggcagcggcaggcagttgacaatggtaccgaaagtggctccaccgccgcccatgcgaaccagctccactttgaccccacagcagcaacaacaacaacaacagcaatttcaccatgaggccaacttgtccaacctctcggccatgagttcaaacacctcgattagcgaggattcctgccagacgatcatcaccacttgcgcacaggtgcactcggagcagagtccactaaaggatctgcaaatgctggtcgctcaggacgagctgccactgccgccgccaatggaacttcctccgtacccaagtccaccgcactcctcctgccattcgcggcaggctagcgaagatttcccgccgccaccaccgccggaactggatctggagccactcaaccagcaactgagccagctgcaggcactggaggcggccagtaagcagcagcgccagcaactcgagtccctcgagggcaccaccagcattttggcccagctgcagcagcgccagcacctgctcaagctgagaaaggagcaggccaatcacccgggagcagccaccacggatgccacctggctgaaggagctgcaggcgaaacaggcaaacgatttgagagccatgcaacgtaagctggaggcctcgtcgccatcaagtgtcagggacttgactcatcgtttcgagcaaacctccattcgatcctacgcctcgcaggagctattgtcccagccgggacagagtcagcagctggggcagctgcgcacccagatgaatgggctgccaaacggcaatgcaaaaatggatgtagatgaggtggacgctatgccagcggtgagaaactctctgcccgccgcactcagcgcccaccaattgctgcccaagcctaagtacgaaatgacccaatcgcagattgcagaggagattcgcgaagtggagttgctgaacacgatggtacagcagacactgaatcagaacggagctgccgcactacctaagcgggtaaagaaaaagagcgtctccttttgcgaccaggtgatcctggttgccacagccggaaacgaggaggacgatgactttatacccaatcccatactggagcgggtcctgcggactgcccagcatcccaacgaaaaagtcactgctcaaatgatccagcagcagcagcagaacatgatgcgattgcaaacagaagcgcagccgcggcaacagcaggtgcagcagctgcaacaaccatcacccatgttgggcagaccagcaggagccacagcagatatgcagcgatacgtccagaggatgcagcaacaacagcagcagcagcaacaacagcagcagcaacaacagcagcagcagcaacaacagcagcaacaacagcagcagcaacagcagcagcagcagcaacaccaggagttgtaccgccagcagcagctacatcgcactagtatgagcggcatagccagccagcaacacttgcagcaattggatgcacagtacaccaccatgccgcgtcccttgcatcattcacagcttggtagctactctgtgaccttgcagaaacaccagcaacttcagcagcaacagcaacagcagcaacagcagcaggccccgcagcagctcagcttgggctactttagcaatggcagtgttgcgacttcagagcaagtcccgctgccttcgccctaccagcgggtgcccctgccacatggataccagcctgcagcagcaggaccctactacccgctacccaatgcccagcaacatctgcagcagcaacagctgatggctaagcccgtgcagaaaaaggtgagctttgagccaggaactaaaggcgaagccgattgcttgcccccaccaccgccgccgccgcaaaagaacggcttgcccgagacgggatctgcaggatcaggacaccctggagcagcacccggggcaagtggagcgggcggcaccacatcggccggcatcaccgccattcccacccgcgtctacaacaatgccattgtaaaggcttcggccaaagccgttgagtgcaatttgtgccgcaagcggcatgtgatcgcaccggcggtatattgcaccaactgcgagtactacctgcagatgctgaaccagcgcagatga

SEQ ID NO: 5328 - protein, 1761 aa, DROSOPHILA
MIKFRYKRKEPTNVVGVAAPTAGAAALGSGASSTPGTSPTSPVSVPVPVQAHHPHPQLGHLISNNGGTLPRSSPRKLILDGADKSATLTRQQSKQKSVSALAKVASSVELAVMGYNSTGNGNSNGHINSAGNSERDRCINAVIQLQTSSEPALCPEPLRRALASGPLAGRRFPLGCLGDAAECFELLLHRVHSHISPDDGDSCESSACIAHRRFAMRVIEQSVCKCGANSEQLPFTQMVHYVSASALTSQKSLALQSHQQLSFGQLLRAAGNMGDIRDCPNTCGAKIGICRALLNRPEVVSIGIVWDSERPAADQVHAVLKAVGTSLRLGDVFHQVSEPRWAQQTQHELVGIVSYYGKHYTTFFFHTKLKVWVYFDDANVKEVGPSWEGVVDKCSRGRYQPLLLLYAVPQQPTVGNGVGIGHVDVAMPASAPSIAGSVVRRAVTPSPEKPSLGNTRRAITPTPLRTPPNDYQNLSVIQKNIFPSNLAMGTDETDAYISRKTVEHVLSAQYQNLSVIQDKIGGGNGVGVGQQSVDKDGGFLSRKPIEAVLSAQLARRQHLQLQRSHSAESSSGHASSNGSSPPSDGLTMPEHLNQPRRRDSGNWSGDRNSASSASSTTLDNPYLYMVAKRGVAAVPQSPTRHGLPYDPGYDSFSLSSTDSYPPKHALNPQLAKIPEAAMGVVPNGGAMPHGHGNGQLALSGDCEKLCHEADQLLEKSRLVEESHDLETALVLCNAAAGRARAAMDAPYSNPHTMTFARMKHNTCVMRARSLHRRILVEKGAETEAMPELKHMREGSTSSVKHVRQNSKDRTLEKEQQQLQFQQIQQIQQIHQIQQQIPASIEIYATLPKRKSPLKALASASACDDNAIEYEQEKQLATSPGKPERESRSLFGRKDKEKEKRSRSEDRNKLTREFSLTETLLVNAKDTLKKHKEDKDEKKEKDKSGKKQHKIRRKLLMGGLIRRKNRSMPDLTEAVDDSTANAGITHHPHYPAQGVTTAGTLLGTSVDDSAVGLGKHGHGMSGYISEGHFDYSGSGSASNSGAGSNPNPNLERSKLMRKSFHGSGRQLTMVPKVAPPPPMRTSSTLTPQQQQQQQQQFHHEANLSNLSAMSSNTSISEDSCQTIITTCAQVHSEQSPLKDLQMLVAQDELPLPPPMELPPYPSPPHSSCHSRQASEDFPPPPPPELDLEPLNQQLSQLQALEAASKQQRQQLESLEGTTSILAQLQQRQHLLKLRKEQANHPGAATTDATWLKELQAKQANDLRAMQRKLEASSPSSVRDLTHRFEQTSIRSYASQELLSQPGQSQQLGQLRTQMNGLPNGNAKMDVDEVDAMPAVRNSLPAALSAHQLLPKPKYEMTQSQIAEEIREVELLNTMVQQTLNQNGAAALPKRVKKKSVSFCDQVILVATAGNEEDDDFIPNPILERVLRTAQHPNEKVTAQMIQQQQQNMMRLQTEAQPRQQQVQQLQQPSPMLGRPAGATADMQRYVQRMQQQQQQQQQQQQQQQQQQQQQQQQQQQQQQQQQQHQELYRQQQLHRTSMSGIASQQHLQQLDAQYTTMPRPLHHSQLGSYSVTLQKHQQLQQQQQQQQQQQAPQQLSLGYFSNGSVATSEQVPLPSPYQRVPLPHGYQPAAAGPYYPLPNAQQHLQQQQLMAKPVQKKVSFEPGTKGEADCLPPPPPPPQKNGLPETGSAGSGHPGAAPGASGAGGTTSAGITAIPTRVYNNAIVKASAKAVECNLCRKRHVIAPAVYCTNCEYYLQMLNQRR

SEQ ID NO: 5329 - DNA, 3084 bp, DROSOPHILA
gaccaagcgcttgatagatttcattcgcgcaaatgcgggcaaagagcaaataaagacatacattgctcttcactcctactctcaaatgctaatgttcccatatggttacaccaaggagcgggtgtccaactacgatgacctgcaggagttcggcaagaaggcatcggcagcaatcaaagcggagaacggtagggattacgtgagtggtagtctgtttgagaccatctatccgtcgagcggcggcagcatggattgggcgcattcagaggcgggtattccgattgcctacaccttcgagctgcgtggtccgccagacagccaggacttgttcattctgcccgccgtggagatccagcccacggccagcgaagccttcactgccattcgtgccatcgtagaggcggcggccgagaagggctactacaagtaagcacaatgatattatgagcaagcattttgtacgttcaacgatatattactttatctttttaaaaataaacacacgtaaacgcgaaaggcaatgttgtggttacactttatagcattaaacgataaggatcaggcgggtatgtcgcttgtgcgtgatatatggtcagattagggtaattctaccccagtaaaattacggtttaacggccctggtgatgtggtttctaggcgagagccgaggatcgaatatggcctctatctgtacttgacaatctgcaagataaataatttgagtaccttatatactttgcgctaaaaagttgatttataccattttccattagaaacaggcagcgatcgtaaagaataatgctctccaccagcggagccatcattaatcgaagtgtgtagaatgagactatccgttgccagttggccaaatctgtttccgtctgctggttacttagagttcggctgtccagtgcttcaaagcgagtaccctgtacggctttctggaaatatctgcaaaaattggtttagaagtgtatatatgtctttggaattggtcttcttactggtgaaacgtcatgccgggtgagtactttacatttcgcagggcacagtggcgaagctctggaaactgatgcactattattcgctcggcggcggctcttagggagtgtatgcggagatgttggtaatcccccatcctcagacgatcgtgatacacctccatagcgtgacaggagatctcacgggcctcgtagctgagttggcattcgtttttatctttgagttcactgctcaacgggtacccatggacatgctccctgggatgggtggactgggtagtcatcttctggtagcaacagcccacaaaattgaggaacttggcctgcgggcagccgagaaacatgcgcatcagtgtcgggcccagattgccacagggatgcaggcctatcacaccaaatcggaaattgtcgtctgttagctgcagggcctgccgaatgctggataggaactgctctggcttagtgctgctctccaagcgatgtgtaaggtgtactggtcgctgaaagtgtgtggtttcatcctctgataggtgttttgctgccatggactccagctttaaatcaatttcccttgcttgctgattgagatcgggttgcatctcatagcagcacactcgtagtccatacccgtagcccaaaacacgtgctaggtgaccgacaccagccccaaagtcgacaataaagtccacaggagttttttgttgactcagggcacagatttcggccattcgaatgatttcatggtgcttctttggcttaacccgctttaggaacacgtattttagcttggggtgatcaagaagtgagcaaggaagggagttctaagtgaagaaagatattttaaactgattttgatacaaatactgacgggattttaccaacatcaggcgggtgctttggtacacggctgacgcagagtttcctaagctcctcttgcaggttcttcagatccaatggccatgtcagctgggtattatgattctcatttttgagcaaatctccaaggttctccagaggaatgctttctaagtgcttttgccaattccctggaagtttactccaatgatcgtctatgaagaagtcctataaataagaattttatactcatgaaagtcttacaaataaaaatcgcaataaaaaaaaggcgcaaagcaaaggaggcgaaaatacatgatcaacatgaggtatccaaggaacacacgtcgcagtaggaagcccaattctggttatatatggtgcccatggaaaaaagattcaggaggtgtaccaggaggtgtatcaataggtttacccacaacaaaacttctccagcattactcaacgtgcaatctcaatattcaatattaatttggatggaaacactataacttcattaagccgcacgaatattgtagacaacaaagctaacattttaacaaagctaacttaccagtacataggcatccaacagccattcatatttctttaacaattccaaacctctttcgagtttttctcttacaatcaacatgtttaacaaagaaataataaatattcgtacatcaaaacattactatcctatacgcgtatgtacatcgtttttcatagtcgagttttcaaccatgggcggagtccgcaatttcgatagtcgactacaaaagttaaaaatggtatgttgacaacaataaatttttcctcgatattattttaactcagtatattcaaaaatataaatatataaaaatatcaagttttaaattctttttggaattttgcggaacttgaaaacacggaataagttcacagtctcccgactattcgattggcattaaaatcagcggttcacccgtcatcgatgttcttgcagcccgctttcccacctctatcaccaacgaatttgcataaaaaactttcagcgagctaaaagcgcgcacggcgttaccgattctggtgcagttcgctagcttttccgcattatttcgtcctgtgaaatttagttgcccctggcatatgtaccgtgtccgcttaagagagctggtgaatacggaaaacgaagttccctattatcgacgacgagcgctcgagaagtcttttttgaactgcg

SEQ ID NO: 5330 - DNA, 1027 bp, DROSOPHILA
gacttcttcatagacgatcattggagtaaacttccagggaattggcaaaagcacttagaaagcattcctctggagaaccttggagatttgctcaaaaatgagaatcataatacccagctgacatggccattggatctgaagaacctgcaagaggagcttaggaaactctgcgtcagccgtgtaccaaagcacccgcctgatgttgaactcccttccttgctcacttcttgatcaccccaagctaaaatacgtgttcctaaagcgggttaagccaaagaagcaccatgaaatcattcgaatggccgaaatctgtgccctgagtcaacaaaaaactcctgtggactttattgtcgactttggggctggtgtcggtcacctagcacgtgttttgggctacgggtatggactacgagtgtgctgctatgagatgcaacccgatctcaatcagcaagcaagggaaattgatttaaagctggagtccatggcagcaaaacacctatcagaggatgaaaccacacactttcagcgaccagtacaccttacacatcgcttggagagcagcactaagccagagcagttcctatccagcattcggcaggccctgcagctaacagacgacaatttccgatttggtgtgataggcctgcatccctgtggcaatctgggcccgacactgatgcgcatgtttctcggctgcccgcaggccaagttcctcaattttgtgggctgttgctaccagaagatgactacccagtccacccatcccagggagcatgtccatgggtacccgttgagcagtgaactcaaagataaaaacgaatgccaactcagctacgaggcccgtgagatctcctgtcacgctatggaggtgtatcacgatcgtctgaggatgggggattaccaacatctccgcatacactccctaagagccgccgccgagcgaataatagtgcatcagtttccagagcttcgccactgtgccctgcgaaatgtaaagtactcacccggcatgacgtttcaccagtaa

SEQ ID NO: 5331 - protein, 275 aa, DROSOPHILA
MLNSLPCSLLDHPKLKYVFLKRVKPKKHHEIIRMAEICALSQQKTPVDFIVDFGAGVGHLARVLGYGYGLRVCCYEMQPDLNQQAREIDLKLESMAAKHLSEDETTHFQRPVHLTHRLESSTKPEQFLSSIRQALQLTDDNFRFGVIGLHPCGNLGPTLMRMFLGCPQAKFLNFVGCCYQKMTTQSTHPREHVHGYPLSSELKDKNECQLSYEAREISCHAMEVYHDRLRMGDYQHLRIHSLRAAAERIIVHQFPELRHCALRNVKYSPGMTFHQ

SEQ ID NO: 5332 - DNA, 9744 bp, DROSOPHILA
tagtgaagaagaaggtcccctaatcgatgtcctccaattatcttcagaccatgccgtgcagaatgctatgctctgcctgcgcaacgacactacgtggtcgctgggtggaagtatgggtgccataggctggcgcctccggaagcactactttaaggtcactacaaagccgccggagaagagcagcaacaagcaactggttaagagcggttcacagacccatcagagcaaacatttcgccgctgggagcagcaatggcagcggtcactccatcgacgccggaaccttggatcccgggtcagaggtggtggctgagtggctggagtacggacccgacaagtttatcgacgaaaaagaaatcgggggcataatgaaaagcctgatgggcctgcagcatccgcacatcgagcccgttctcctggcagcccacaccgaaaacggttgcctggtcataagaaagtcagtagctcacgttgtctaacttatacattatataacttaatatatatatccacttagattccacaagcatggtactttaaaggatgttttgtgcatggccgcgaatccaaagaatacatttcttagcaagtacggcaatcccaaggggcgcactgcgctttcaatgaaacaagtggctacatatgggaagcagattctagaggccctaatatttttgcactcgaagggatacgcatatggtaagatgaatccctattgaaagctactttttatttaataaatgaaaacattttaaggtcatctacattccggaaacatagtgatagtcgacgattgtgttaagctactggacatcgagaactttttgctgggcgttccagcgttttaccggccatttttcatgcagcacagtaaaatccatgccatcgagaccattgatgtttactgttttggtcatgtcctcttcgaaatggccatgggttatcctctgcaggagtctgtcgtgcgccagatcaccgaatgtcccgaagcgctgagtaagttttttttttgtttttttgagataactaatttctaaacttgttatttttttagaatgtcttctggagagcattctttccaaggaagcttgcaaagctggcctgccgactctggagcaattgttgggtcacagattcttcttgcaatacgcttcaaccgagagcgccggcgccgctgccaatgctgaaaagccgtactttaagctatcattgaacgccaaggagctgcttaagcaggcggctatcaagagcgaaaaccgcctgcgggacgaacagaagtctgtgaagaaccaaaagcgcattgtgcgtgtccaggaactgatgagctccgaggaggagaagcggaagtccaagcagaaagccgttagttacccaaaacccaaagcccgaacacttcacgtagtttaatcttacacagctcattttggtttctttttcgtttatttcaatgcttacgtatagaaactagagcacaaacagtcgaagctaaagcagcaaagttcaatccaaacaaacaatggacgcttgtcgcttgtggctgcgactgcagcagcagcttcctcaagcaccacggtggttggcgagttatgtgggaccgactccttcaaccgctccgacagcacacccgaggagcccaccacactggccggcatcaaatgtagttattcaaatcagatcacagcttcaaattagtagtttgttggcttatttgttcgaacttacatgactcacttccgatctcgtcttcctttcagcaccgccgctcactccggggccacacttgggcagcatatatcagcaggaattgccgtcgacgactggcgcaccggtggaacggcagtcctccacaccgaacatgctgtctgaggatgcggagggcggtgatggcgacgagccaacacgctccgctcttctggagtccatctgcaagtttaaccgcggatcgctgcgcaaagtgcgatccaacgactagctgcggaactgtgggacgaataaatattacaatttttggaccaaatgtggcgttatgaaataacgataccatcaaaaataacttgaactaatcgaattccaaaagctacattttagaggcatattaagaaacagaatactagcagatcgaagacaccgctgagcatagaatagtcccaaaacaatccagcaattactatatgtattaacgaaacccactgattataattattgcatcttatacgtgtccaccatacattgcatacgatttatcggctaaaaagcatgtgtctatttatgtaagcaacaagttacatgtcactcacttgcgatcagattcccgatcgcaactaaagctttacctatgtgtccactacacgactgatactaactttggtacgaatatcttaaatgaaaaatggaaacaaagtatctaaatctaaaaacaaaaatctagaacacgaatgaaacgacatacagagaaatttaaactttccaatatttacataagtctgcaccaaaatttgcacgagacgagacgagatgctattcttttatatggcccactggccaacatatagtacatggatgttagatgtattaagaagtcgttcctcggtgttgtgctatctccaccagcgcggttttatcgccaatttttagtagttgtactgcaggttttgtaactgaatttgagtttttatatatttcgaagagccacgaatgtttcaaaaacactcaactgttcgttaacgtctagacatactcggagtcctggactcaaacaagtggaagcaacaggacaaagacaaggaaatgtggccaagaattcgcactgttattgttttactttttatagataatttattaggtgtgtatttaaccgaatccgagcgtatcgagtatatttatatttaaatatgtgtatatagatgtaattgatgttttgtggccacaagagcaccaccacccagtaataacgtaaatatcgtaacatggatgtgtattattgtctactgactgtgtgtatatgtttcatatgtatactttaaacgcaagaccgacccgaaatgtgaagcatattcccacacatatagcaaaccaaataaagtgtaaactaattgttgttgtaagctgatctttcaatttcttaacaatcttagcaggctgtcgttttctttcgtcttcttggctagtatatttctgctccagttcagttctaaaaagcatttcaagttaaacattgtgatcatgggcgactcaccggaagagcggcgcagcaaggatgtcgtgccagagaccgccgccaaggaggcggaaactggcaagggcaaaaaggagaagaaagaaaagtcggccgagggcactaagccggtaagttgggctgacaagtggcgcataatttggctggttttattgattcaacaaagccaaacgccacgaattgccacggcgacaggccgtcaggtaatctggcagggaatgacttaatggcataatcatttgtggttttatggctaacctctacgcactcgagccgactcgattctattaattcgcaaggaatggcagccgctgcagcgaagaactggtcggggctggtgaatctttatctgggccaggagcgtgagaaggtatacgattgattttgccattatggttacaatggggtattgatgtctttttaatgaattgatgcttgtaacgggatgtgaacacgggaaccatacggttcgtctaaaatttgacgaagtcacgccatttcttgtggggattctattgggggtttgggtatctctgtgcttctagctgtggcctaactaacatgcatattcggtttcccatttcatcgacatgcagaggccggcaagcagccagcgcggatcgctgaccaagtcccatatgggcgtttccttgccgatgggtgctccggcagccaaggtaagtccgttaaatgcccagctagctgtgtttataccctgagatctgcttaatgcctagcccaccatgcggttcatgcccacctaccgcctggagtccaagaatccgctcaacaaggaacgcgtggagaacatcataaaggcggtgatgaaccgacactacaacgatgagtacatgttccatcccaagcattccctccacatggccgcgcaagtgagcgaggaaatcaagaaccgcatcaaactcgacaactacgacaggtgactttggttcggcggtcagtttttgtctaactaaccaccgtttcgccccagatatcgctacatagtgctggtcactgtgggcgagttcctgatgcagggcctctactccatggtcaacttcctgtgggatgctgaaaaagacggatttgtgacctacagcgtggagagaccctcgtactttgcagtctgcaccaccttttacctgtactacgattaagaacgcgattccagggccctggcgcgttccacttggtaataaaattgatgttgatgctagcaatggtgcttaatttcgttaccttctttggtcagcagatggttcactttcttaaacacttgcttgcactgtaactcacaactcacatttttaacacgtaggatgcgatagttgtcgtttatttggatatcagtacaatagtttgatataatattttgttgaagcataaattactttcgaacatccgtctaatgatgcaagacaactgcgtttgatcgttattactaccttgagtgtacatattacgattgatatatatatatatatataaataatagatttgcgaacacacggcatacacagcacatgcactgggtgaactgctcggattggattatcattgtgtataaactgatctcggtccgtggaatgacacttgaactcactgaaacaaatgtagcatgaacgcttgcataaattataaacaaaacactattcttattcttattcttctgttgagcgcagccacaagaaaaccaatgtaacaattgccaaaccaaatcaaacagcatagacattttggagcaaatgctacacgacgttctctcttcggatggaagacggatattgatcggggatcggaacacgatatggaatcgccagccactttcacgcacccagcggccagaaacaccaaagaacctcttggagatcgaggggaactgaaactcagctggagttaagcacttcgcactgattgggaaattgcactgcaaacaacttctggagccactttgcaatcttattttggacccaactggacaatcagaccactactgggcgcacttttggtcgcactgccttctcgccatcgaacacaaacgaaagggcaaaggcaaaatcatcagcgtaacacaaatcaaaatggaaaatcaattttaaggaacacaaaaacttttcatcgacattatttcgcactagttgttgatcatatgcggacactcgaatggagttttttttatggaaaatatttgatttttgtttttactcgtgttgttttcatactgttgtacactttaacataataaaattggataatttgtatgggtagctttagatacaatcatgaacgatttttcaaactttttagcacaataatgaaaaggatgtataaacttcactgtcactaacacatcgagaacttgaactaaaaccaaaagagagatcctgtctgcaaaagaaggttaattaatggttaattaatgcggggtttttgggtcatgaggtgtgggtgaagtctcctcggttctgcttctgtctctgtatgtgtgcatcatgtgtgtgtatgtgcgtgtgtgcggtgcttggaggagccgcatacacgtcccttgcatgtatgtggcccccgggtgtcctccacttgggagaggacgagctaagatacgactacggctgctatgctataattagatgtggcggagattttccttgagcactgtggctagttattacctacagtttgtcctcccatccccaccgtcgccagccgctccagctcaggccgttccgccgcgcaccaccacaatcaccaggtgatcctccttcaggccctcctccgtcagactgtgacaagtgcgctttagcagctctgtggaaaagtcgcagggggggaaggcgtacagcaccccagttgcctccgtctccttgttaagcagcgagatcacgccagccgcctccttctgcttaagataggaaaccaagtttcttagtggtcgcgtctgcacgctggcatcgtcgcaattggtgtcgtttgtggaccctgccagacccatgaaaatggcgtgcgacgatgaggatgcaatacgtttttgcacgtcgtccagcttgggcggatccagacgcagtcgctgggtgatacgtaggttgtgcttgccctcctcatcgcgcatcagcgactccacaatatccgtatctccgtccgtcaaatgaaacttggctgggaacagtgagctcttgaggattagcgctccggtccacactgtgctgcacttgcgcgccacatctggaaccgtactggctgatgcaagggcgtcgttccgacgagtcgaggtgtcagaatcagatccgggagagcgagcccgcttcaatggggatctagaacgagagcgttctacaccaggttcccgagagctggagcgggctcctctgtcgtacgattctcctggcgggcgtcgccactcatcctccactccgccgggagggggaactgaagaagaggaacctgctaaggagccaggatgcggcggcctatgcacgtcgttgtgataatggtacatgcctcttcctcttccgcgatatcccccacgtccacggtagccacccctaggtggatacggagaatagccaccgcgcggagcgtaggcggcggactcttcgtaatacggatcgtattccggacgtctgtactccaacgcactttcatcatatggcggctttgagctcttgaaaggcgctgccggtgtggcgccgggcaactcggcaaagtccgtgcggagtcgacgctccggtccacccaatgggaatcctcgcatctcctttaccgccgccgtggctgcctccactgtctcgtactgaatataagcgtacggctcgcccttctggtattcaatcttcttgatcgcaccgaagcgatcaaactctcgctccagctgagtgacagaagtccaggcacctaagcctccgatccacatacgagttgccggagtcactttcccgtatccgatcttgcactgaaacttgccaatgtactgtccagacaattcgatcttcgctcggtgagccatatccaggttttggtaacgtacaaacgcgaacgcgttccccgtacccggcggcggtcgcttgatgtcgatgtcatctaccactccgtatttgccaaagatgcgacgcagttcgtcgtcggcgatggtaacctccagatttcctgcaaacagtgtgcgcgtagaaagaggatcatcctcgggctgcacatggtgcaagtaattggggaacttgtccttcttgctctcaggcttttcatagggagcgtgtgggcgtggtgccaatggcctcattggagcatactgatggggcggcgcatggccatggaggtgatgcggatggccgccgcgatgcaaaggtggtccgcgtggcggatgaggatagtcatgatgcaatgggcggtaatcacgtggatggactgcgtgcggatgcatatggggaggaccgtaccgatcgtagggatcaatcggaggtcgacggtgatccaaaggaacgccttgtcccataggggacctcgagtagtggtaacgttcatagtccggtggggacattgagtgaccgcgtggtctgcaaagcatcttagattagccaaggctaacaaaataaatacaaaaataaatcccacctatattccggtctggttgtggacttgtacaccggctccacaatggccatcttgtcgtagatgatcaggcgcggcttatggtgcttcgcctcgcgtgcatcttcaggcgttcggaagcaaacgtaagcaacccgttcatccaagtcgtgcgccagtcgcacgctaaaatcgccaaacttcttgtactcgcggtacagtgtctcctcgataaaatcgtccggagcctttggcggcagggcactgacgcaaagtaccttgtagccagctggtcgctctgcaggcggtggaccacgcatgtagggctcccggtgcggggagccataacgactcggcgagcggtccaatcgacgtcgcatgcgctccggcgacaggcgctccggcgaatcgccaggcacgccgctgccgttgtcgtacccacgacccatgcttcgcgagttgcgcgacaaactgctcctggaggccgggcccggggagcgcgaggcgctacgcttcatgttgtgaattttgattgtgatacgatcggctccggctccgtctcgatgactactcatgggcggctattccggggcgctttaactcggtgtgtgctgcctgagaactttctggcaatttagttccggggattctgcgaagaattcgagatttgctttgtgaaagtacgggcgaaatgcaagaagacaagcggcggtcaggtaaaaagaaaatggcggcgccccgcaaacaaagaaaatcgcgttaggcggaaaaattctaaaatcagagcaattcagatcgtttttagagttcttaccacttccggcttttttggatgtttatttttaagtgctagtttactattaagtcgcggatattccacaaattcttcaatttcctccggctttgcaaattctgtatgcgtcgaaagttaactgcggtattcgataacgatacgtgtttgctatcgccattgatggtcccgttcatggtatcgagccatatttgtccattttatagccaaacgtttgattcatttttatataatgacatagttataatcatatataatttcaatgtagtttttaataggtttctatttctgtaatatatttcggcgaacttagatataacaataaaagtttttaagttttaagatcataaatctttaaaacacgcgagattaagacaacgcgatatacgttttgtaaaggatttttttatgaggtggagaactttaagttggcattactgttcaaaatcgcgaccgacttaacatttgccgtgttattgccgatatatgaccacaaatgttggaaaaagtcatcgaatataatacgtccagatgggacttcattcgagccagccgtggcgtcatagtccagaaatcatatataaaatgtactgtcgcaagactatctttctgataaataaaattcattttgatcgaataatccatcgttgtttaactgcaattgataaatgttagttgaagctgctttaatcgatatagtcgcgcagaactgtctcgatagacaactgaggcgggcaccgcatttaaaatcgtcaaggctgcaggtaaaaggaatcacaggtagaaaactcttagatacagtttaattctcggtacgccaccagatgcaggaaaatccaaatggcttattaagaaaaacgactagggtttacacaggctgcacatacgagaattccgggtataaagagtggcgcctgcgctgggtcgtgacattattctaacgaaagcactggcgaaatggttcatttagtgactgaaaagaagacgcaggaggtggcaaccaaagtccccaggctccttcaactcggcggccacgtggggttcgacaccctaccggaccagctggtcaacaagagcgtccagaatggctttagcttcaatatcctatgcatcggcgagac

SEQ ID NO: 5333 - DNA, 3084 bp, DROSOPHILA
ttaactttcgacgcatacagaatttgcaaagccggaggaaattgaagaatttgtggaatatccgcgacttaatagtaaactagcacttaaaaataaacatccaaaaaagccggaagtgaatccccggaactaaattgccagaaagttctcaggcagcacacaccgagttaaagcgccccggaatagccgcccatgagtagtcatcgagacggagccggagccgatcgtatcacaatcaaaattcacaacatgaagcgtagcgcctcgcgctccccgggcccggcctccaggagcagtttgtcgcgcaactcgcgaagcatgggtcgtgggtacgacaacggcagcggcgtgcctggcgattcgccggagcgcctgtcgccggagcgcatgcgacgtcgattggaccgctcgccgagtcgttatggctccccgcaccgggagccctacatgcgtggtccaccgcctgcagagcgaccagctggctacaaggtactttgcgtcagtgccctgccgccaaaggctccggacgattttatcgaggagacactgtaccgcgagtacaagaagtttggcgattttagcgtgcgactggcgcacgacttggatgaacgggttgcttacgtttgcttccgaacgcctgaagatgcacgcgaggcgaagcaccataagccgcgcctgatcatctacgacaagatggccattgtggagccggtgtacaagtccacaaccagaccggaatatagaccacgcggtcactcaatgtccccaccggactatgaacgttaccactactcgaggtcccctatgggacaaggcgttcctttggatcaccgtcgacctccgattgatccctacgatcggtacggtcctccccatatgcatccgcacgcagtccatccacgtgattaccgcccattgcatcatgactatcctcatccgccacgcggaccacctttgcatcgcggcggccatccgcatcacctccatggccatgcgccgccccatcagtatgctccaatgaggccattggcaccacgcccacacgctccctatgaaaagcctgagagcaagaaggacaagttccccaattacttgcaccatgtgcagcccgaggatgatcctctttctacgcgcacactgtttgcaggaaatctggaggttaccatcgccgacgacgaactgcgtcgcatctttggcaaatacggagtggtagatgacatcgacatcaagcgaccgccgccgggtacggggaacgcgttcgcgtttgtacgttaccaaaacctggatatggctcaccgagcgaagatcgaattgtctggacagtacattggcaagtttcagtgcaagatcggatacgggaaagtgactccggcaactcgtatgtggatcggaggcttaggtgcctggacttctgtcactcagctggagcgagagtttgatcgcttcggtgcgatcaagaagattgaataccagaagggcgagccgtacgcttatattcagtacgagacagtggaggcagccacggcggcggtaaaggagatgcgaggattcccattgggtggaccggagcgtcgactccgcacggactttgccgagttgcccggcgccacaccggcagcgcctttcaagagctcaaagccgccatatgatgaaagtgcgttggagtacagacgtccggaatacgatccgtattacgaagagtccgccgcctacgctccgcgcggtggctattctccgtatccacctaggggtggctaccgtggacgtgggggatatcgcggaagaggaagaggcatgtaccattatcacaacgacgtgcataggccgccgcatcctggctccttagcaggttcctcttcttcagttccccctcccggcggagtggaggatgagtggcgacgcccgccaggagaatcgtacgacagaggagcccgctccagctctcgggaacctggtgtagaacgctctcgttctagatccccattgaagcgggctcgctctcccggatctgattctgacacctcgactcgtcggaacgacgcccttgcatcagccagtacggttccagatgtggcgcgcaagtgcagcacagtgtggaccggagcgctaatcctcaagagctcactgttcccagccaagtttcatttgacggacggagatacggatattgtggagtcgctgatgcgcgatgaggagggcaagcacaacctacgtatcacccagcgactgcgtctggatccgcccaagctggacgacgtgcaaaaacgtattgcatcctcatcgtcgcacgccattttcatgggtctggcagggtccacaaacgacaccaattgcgacgatgccagcgtgcagacgcgaccactaagaaacttggtttcctatcttaagcagaaggaggcggctggcgtgatctcgctgcttaacaaggagacggaggcaactggggtgctgtacgccttccccccctgcgacttttccacagagctgctaaagcgcacttgtcacagtctgacggaggagggcctgaaggaggatcacctggtgattgtggtggtgcgcggcggaacggcctgagctggagcggctggcgacggtggggatgggaggacaaactgtagttccgcagctagtcgttggatcgcactttgcgcagcgatccgcggttaaacttgcagatggactccagaagagcggagcgtgttggctcgtcgccatcaccgccctccgcatcctcagacagcatgttcggtgtggaggactgccgttccaccggtgcgccagtcgtcgacggcaattcctgctgatatatgctgcccaagtgtggccccggagtgagcggcggtgctgaaaggaagacgagatcggaagtgagtcattgtggtgggctcctcgggtgtgctgtcggagcggttgaaggagtcggtcccacataactcgccaaccaccgtggtgcttgaggaagctgctgctgcagtcgcagccacaagcgacaagcgtccattgtttgtttggattgaactttgctgctttagcttcgactgtttgtgctctagtttctatacgtaagcattgaaaaaaaaaaaa

SEQ ID NO: 5334 - protein, 793 aa, DROSOPHILA
MSSHRDGAGADRITIKIHNMKRSASRSPGPASRSSLSRNSRSMGRGYDNGSGVPGDSPERLSPERMRRRLDRSPSRYGSPHREPYMRGPPPAERPAGYKVLCVSALPPKAPDDFIEETLYREYKKFGDFSVRLAHDLDERVAYVCFRTPEDAREAKHHKPRLIIYDKMAIVEPVYKSTTRPEYRPRGHSMSPPDYERYHYSRSPMGQGVPLDHRRPPIDPYDRYGPPHMHPHAVHPRDYRPLHHDYPHPPRGPPLHRGGHPHHLHGHAPPHQYAPMRPLAPRPHAPYEKPESKKDKFPNYLHHVQPEDDPLSTRTLFAGNLEVTIADDELRRIFGKYGVVDDIDIKRPPPGTGNAFAFVRYQNLDMAHRAKIELSGQYIGKFQCKIGYGKVTPATRMWIGGLGAWTSVTQLEREFDRFGAIKKIEYQKGEPYAYIQYETVEAATAAVKEMRGFPLGGPERRLRTDFAELPGATPAAPFKSSKPPYDESALEYRRPEYDPYYEESAAYAPRGGYSPYPPRGGYRGRGGYRGRGRGMYHYHNDVHRPPHPGSLAGSSSSVPPPGGVEDEWRRPPGESYDRGARSSSREPGVERSRSRSPLKRARSPGSDSDTSTRRNDALASASTVPDVARKCSTVWTGALILKSSLFPAKFHLTDGDTDIVESLMRDEEGKHNLRITQRLRLDPPKLDDVQKRIASSSSHAIFMGLAGSTNDTNCDDASVQTRPLRNLVSYLKQKEAAGVISLLNKETEATGVLYAFPPCDFSTELLKRTCHSLTEEGLKEDHLVIVVVRGGTA

SEQ ID NO: 5335 - DNA, 7345 bp, DROSOPHILA
atgcactttaaaaaaaatataacaaaaattccacactcctccgggaagagtttcttacgagaagtttccacttagccatgccgccaaagactgatgatcgatttagcagcggtggcaagaatgtagcctcggttttcggggacttcgcctacctgagtccagtccaacccctataagccatttgggttaggttcccagggtttttctattgtccggactcgtcaaggccacgaagtgcagctgccacaggcacgttttctggtttttgcctggatgcctgcattctaaatggcttctttgggattgctgcacgatgatggcaatgccgtttgatgaattttctttcgacgctacatcttgccagagatttcgattttttggtgattttttttttcaatttaaatttaattttaaaagggcaggccctggtaactaacacttttcttcggtgactacgcattaaatgcttgtcggcgaaaaaacgagggccattagggctgccacttgtcgaaaaagccgaaggggacagctcgtatatgaaactacgcccatgtcttctaatatctgcacgcttttcgggtgtggtgccctggtctctgattaaatttacttacaactgctgttaatttgccttaccaactggcctaaacgtatcaaacaatttactattaccgatcgatcactggatatttcacttaatttccattttccactccgaacgtaattgttctacaagatacagttcacagcgaacagaaatcccacagtaactttttccaacgagccggtaacgccgcacaactgcatttctgttatacatgcattgcacataacagctaacattaacagcaatgtttgggacacagttcagtttcaaaccctaactgaagttttaaattgttgatagccagttagctaatattattgtattgtaaacatattttaaaaagtaaaccgcagtgccaattataataattaataagtatataaatgccaaacatttgtaataaaacgtataaaatgtatttacaaaacaattgggtaaaaaatgcatctacagaatactcgtacaaacgaacgtatttacagccaactacatatataaataaatgcgaacaaataaaataaataaaagggctagctacgactaaatgcgaatgcgggcgacgctgtcgatatgggtatggactttaagtacgaaaatcggacatctaggcctccgagaaatcgttgtcgtaggcgtgattgcggtaggccccgtatcctggttccgcctcaatgccgtttgttttccttgcggtagtatcaactgtagtggctttgggcttcgactgcataacactatcgattgtcgcatcatcgtcgtcctcgaagtcctcccgctgatccttgtactggtagctgcgggctagccacaagaagatcatcatatccactagcataaggctggcgaacagggtgaactctccggattgcgagctggtgaacttgaattcggcaatcaccacgactagcatattgccaatggccaccgagagcagccaacaggcctgcaggacactcttcatactaggcggcgactgtgagtaggagaactccaagcctgtcacggagaacatcacctcggctgcggtcatcacgacaatttggggcagctgccacagaatcgatacggtactgagggctaccacctcgatcacattgtgttggtacccatcgcgggcacttcccgtcaccagaatgctgtagagtctaccttctttggcctcgaagctggccacttttttgccgttgatgtctacccgagcgaagccaggcgtgatcctgtggagctgcggcacattgcctttgtccagggtaagcggtggctcctgggatgtggctgactcagttgatagaagaacaggtccctcgccgtctggcgtgtttagcagagctctcactgaagtgcgaccagtgtcagtggcggccatttgtaatccatcggcgaactcgacgagcttgtcctgggctaggaagtaactcactgactttcctggttgcaaacgcaacttgtcgatgatggaagggcactctccggatacgggctgagcattaaaagtgtattccttggactcggtcatctggagtgaaagatcctcccacacattcagaggttcgataacgcgaggagtttggaccactgcactcgagatctcatagcgacagggcatgccattgtatattcgcaggtgggtcatatcgggctctatgggtgtggctctgtaggcagcctgctccattttcatctcaagacccgctgagaggaaaaatcctaaggctgccagaagaaggcctaaggtgagcttctgcagtggtcgccttattccacaacgtgccagagcagggtaaatgatatagtcgaatagtggcagaaacccgaggatgagcaggggattgactacctgcatctgatcgggctttatctgaaaacccaacacgttgccgtccattcgtgtggcctggaaggtccatcgcgagccctgctggtcaaagagggcccagaagacggggaagggcagaaagagtcgtaggattctgcccaggcacttggtctcctgcaccattcgcgaccccaccgtcggcttggcatagtccagaaagctctccatcggctccgagtgcctgcgcttttgccatcccttgaacgcatccgcaatgcaacgcgacaccccgaagatcatgttgccagcaggtggctgacacctatacaaccgcttgccggccatgaagattatcaccgagaagatcatcaagatggcgggcacgccaaaggccagcgagaagcaatcctgatcgccaaaacaatggacgtctgccctcaagatcggggtgaacgtggtcgaaatcaaagatcctgcgttaatggcaaagtaaaacaacgagaagaactttgccagctgaaaactttgcgcgggcagcgagaactggtcgccaccaaaggcggaaacgcatggcttgattccaccggtcccgatcgcaattagtaggagtcccacaacggtcacagctctaaaaggcgataaattaatttataatgacatccatgctatgtcgtatatactcacttagttggcatccccgatagcggaacggcaccaaaggataccaccatagcccctaggctatacaccagcgatagatataatatcgtcttgtactttcccagccagccatcggcgataagagctccgatcaggggaaagatgtagaccagcatggtgaacgtgtgaaaaagtacggttgccgtctcctcattgtagcccagtttgttggtgaggtacagcaccaggatggctaaaaagtaagacatttattagaaaggacaacatggatatttcgccgaggttactcactgcgcatgccatagtagttgaatcgctcgcagaactcattgctgatgatgaaggccacagacttgggatacggaatgggtggctagtcggaagagatagaagaaatgtcattcaactatcgcgatctgattgcccttagtagcattatctcctctacatttctttatcagtgtcccaccagtgagaatatgtcgtttcatgggctgacttggcaattatacgccaagtacccatgtcgatagaaataagtacagcacacaacgccaaaagatctttgggttttaggtgcatttgacattccatcgcaaagaggctaaagaaactttctattagtttattttgttttgttgaaacttctatggattctaacaaagggagtgccataaattaactattatatgaactgccttttcaaagcctgatactcttaatctgtttataataggctcgaactagcatgtaactatttatttatttattgtattaaataaattgttgcgatttcataaagaattacaacggttacatggactaaatttaaccaatttagcaaacatttttttttttatttgtgagagacttacaagattttgaatcggtcgcattaaaaacgattgaatagtttagctattatgtgtgcttttggaatttgcctatggctaagaaatcccctttttcatcttttgataatatgaaaacccgttgctttgaaatatgactcgtaacttgttttttaattgatattggactggaggaagttcgcaagtgttagatgaggtcatttcactagggtatttctaaagtacatacatacatatttcggatggcccttaactttttcgcgttttctaagcttattctcatggaaatgctgctctctgtcgtcacaacgtcttttttttttgatttggctttcgattttgttgggtttgttttgttttgcttggctatttagttttctgttgtgaattgccgcgtctcttggccaaggtgagcaacggaacgcaaacgggtttctgccactaccagtgtctccgtttgtcagtgggtacgttaaccattgatgattgagaattctgagcacaccacggcctaggccaagtaagtgcctctcctcatcctcctttccgctccacgctcttcacaagactcaccgttaccgatttgcaattctccgggccaacaattgcattgctgacaaatgccataacgagctttacgtaatgatcgctacactggtgggtttctaattttcgattcggatctacccaagacttcactatgcacccaactttttggacccccgcagaatttctggtcttgagcttccgtctgtcggagacaacgttcagtatcgaactaagaattctccggagctggccccaagctttaaagttcgatctgccatccgtctttcttctcggcctttcttccgctcccagttcctaactgccacctcgagcagtagcagttgttaagcataggcaaataaattaacaaacaatagaagatccaaagagagtcttaaaagggttgggggctttaaacgggggtctcgaacagaagatggtgagatcaaagctacagctgatagtctctggcttgtctagactctggagtctacaccttatcgccggtaactctggggtaggcgagcggacgaagaatgataacagagctcgggtaaatgcatttgcgtagccccatccgcaaactgggtcactatcgattttactctcttttcacaaaggtacattggctgcgaaagttgctgaaaagtgtcgcgttacaaatatgtacatagattggtggtatttatcaaagcttagctaacaattttagctcctcgattattcaactgctataaatacggttttaattacgggtttcatgtaaaaaattgaatacaataaaaatggcatagcaaaatatttcccatggtgtttagccttgatagactttaattgcttagcaaatatttcagttggattagtaaatgatttaagggtatttattggtcgacgctaccacggaaacaaggcctattcgattcttgttttgattctgacacacgacgattaattcaatcaatttgcgggcaataaaaggatctcgatttgctctcgcttttggttgacacacatttatcgatcgcgtggggcgttcaaggtcagctgcgctgccgctgtgatcaatagccttgggcgcagaagaaagcgaagcaagtggcgaagagagtggaaagaagaaaagtcattggaactttgtgcgcttctttttctcgaacaaccactgcacacgttcagttgggcaagtgtgtatatgtgcctttgtgtgcactgtactttctcaattgacaactaaatgtgataagtagctgttcatcgtgctctccgcttttcgcaccgaaagaaaatccatggttgcaacactccctttcatggcaatgcaagaattgggaaaatggaaggaatgagatctgctatccttgccaacttctttacactctctcctcttatcattgcaccctttactcagcatttcgcttgatgttcatacatacatatgtggggccacttaccgcaatttgagaatcggactcctctttttgtccgtttttaccgttttgtccgtttttaccgttagttatttcacttgccattttggcattggctcgccttggcctcctcttggctacctcttaattgcgctttaatgagctcgaacaagagtcacctaatcgcgctgggcactttggaattttgtcgaagtgccccgaaaatcgagaaacggaaaacacacgcacacgttttgacacaaaaggtttttgcactgatttgcgttgccaaaaaaagttgtacagaagtggactacaataaaaaagacactgatgaaagggggttgtgggggaggtgatcaacaggttgacgccataaaacgatcgccgtcgctggccgacaataaatgatgctccgtccatttgcaagctgcgcttttaagcttgactctcagtcggcggctacgtcggcagcgcagtcgcgacaccgaaaaccaaaaaaaagaaataatacacaattcgagcaagaacaaaaatcaaattaaatttttagataaacaggtggatggggtggttggtagggggggggggcgtggtggagagaggctgtacgagagcgagagcaagataaactctgctctcgcttcaagctgttctctctacactaaaaaaaaagcgtgtgtaatctacaaaacataacattcaatatgtgaacctatttagccagagcgacagcatcaaacagtttaaataaaaagcgaagtataatgccaacagaagttagccacatatttctttccgtgtagctcgctctgcagagatcattgcagctgcagcggcgatctcttattattactgtgggggtgttcccaccgccctctctttcgcgcaaagctgcggcagtcaagttcaatgctgttggaatgacgacttgctgaattagtggacaccccgcccaccgacgggcactatcgctgggagtccactaatcgggcgtggagcagctgtattccttctaatttgtgcgagcagtgtttcctgttgtttcagaaggcttgtggaatgtgcatccctatcgtgcacccacagtattccagcttgtagccattgttgtggcaactgtttgtcgtttggcgttcttaaagagagaatatagttctagaaacccatatcctatttgcgatttaacgttatcttgtgttatctgcgctgaatcttgtggttatcccctcgcttttctttaagctgtgccaatgagctggcaggtacggaatcgatcttatctcgatcatattcctatcccctatctggcgattaaacccccggccgtgcaaaatggtcgagtgccaagtgcctgttatctatgtttgttttctttacggctttgagtaat

SEQ ID NO: 5336 - DNA, 2731 bp, DROSOPHILA
cgacggcgatcgttttatggcgtcaacctgttgatcacctcccccacaaccccctttcatcagtgtcttttttattgtagtccacttctgtacaactttttttggcaacgcaaatcagtgcaaaaaccttttgtgtcaaaacgtgtgcgtgtgttttccgtttctcgattttcggggcacttcgacaaaattccaaagtgcccagcgcgattaggtgactcttgttcgagctcattaaagcgcaattaagaggtagccaagaggaggccaaggcgagccaatgccaaaatggcaagtgaaataactaacggtaaaaacggacaaaacggtaaaaacggacaaaaagaggagtccgattctcaaattgcgccacccattccgtatcccaagtctgtggccttcatcatcagcaatgagttctgcgagcgattcaactactatggcatgcgcaccatcctggtgctgtacctcaccaacaaactgggctacaatgaggagacggcaaccgtactttttcacacgttcaccatgctggtctacatctttcccctgatcggagctcttatcgccgatggctggctgggaaagtacaagacgatattatatctatcgctggtgtatagcctaggggctatggtggtatcctttggtgccgttccgctatcggggatgccaactaaagctgtgaccgttgtgggactcctactaattgcgatcgggaccggtggaatcaagccatgcgtttccgcctttggtggcgaccagttctcgctgcccgcgcaaagttttcagctggcaaagttcttctcgttgttttactttgccattaacgcaggatctttgatttcgaccacgttcaccccgatcttgagggcagacgtccattgttttggcgatcaggattgcttctcgctggcctttggcgtgcccgccatcttgatgatcttctcggtgataatcttcatggccggcaagcggttgtataggtgtcagccacctgctggcaacatgatcttcggggtgtcgcgttgcattgcggatgcgttcaagggatggcaaaagcgcaggcactcggagccgatggagagctttctggactatgccaagccgacggtggggtcgcgaatggtgcaggagaccaagtgcctgggcagaatcctacgactctttctgcccttccccgtcttctgggccctctttgaccagcagggctcgcgatggaccttccaggccacacgaatggacggcaacgtgttgggttttcagataaagcccgatcagatgcaggtagtcaatcccctgctcatcctcgggtttctgccactattcgactatatcatttaccctgctctggcacgttgtggaataaggcgaccactgcagaagctcaccttaggccttcttctggcagccttaggatttttcctctcagcgggtcttgagatgaaaatggagcaggctgcctacagagccacacccatagagcccgatatgacccacctgcgaatatacaatggcatgccctgtcgctatgagatctcgagtgcagtggtccaaactcctcgcgttatcgaacctctgaatgtgtgggaggatctttcactccagatgaccgagtccaaggaatacacttttaatgctcagcccgtatccggagagtgcccttccatcatcgacaagttgcgtttgcaaccaggaaagtcagtgagttacttcctagcccaggacaagctcgtcgagttcgccgatggattacaaatggccgccactgacactggtcgcacttcagtgagagctctgctaaacacgccagacggcgagggacctgttcttctatcaactgagtcagccacatcccaggagccaccgcttaccctggacaaaggcaatgtgccgcagctccacaggatcacgcctggcttcgctcgggtagacatcaacggcaaaaaagtggccagcttcgaggccaaagaaggtagactctacagcattctggtgacgggaagtgcccgcgatgggtaccaacacaatgtgatcgaggtggtagccctcagtaccgtatcgattctgtggcagctgccccaaattgtcgtgatgaccgcagccgaggtgatgttctccgtgacaggcttggagttctcctactcacagtcgccgcctagtatgaagagtgtcctgcaggcctgttggctgctctcggtggccattggcaatatgctagtcgtggtgattgccgaattcaagttcaccagctcgcaatccggagagttcaccctgttcgccagccttatgctagtggatatgatgatcttcttgtggctagcccgcagctaccagtacaaggatcagcgggaggacttcgaggacgacgatgatgcgacaatcgatagtgttatgcagtcgaagcccaaagccactacagttgatactaccgcaaggaaaacaaacggcattgaggcggaaccaggatacggggcctaccgcaatcacgcctacgacaacgatttctcggaggcctagatgtccgattttcgtacttaaagtccatacccatatcgacagcgtcgcccgcattcgcatttagtcgtagctagcccttttatttattttatttgttcgcatttatttatatatgtagttggctgtaaatacgttcgtttgtacgagtattctgtagatgcattttttacccaattgttttgtaaatacattttatacgttttattacaaa

SEQ ID NO: 5337 - protein, 743 aa, DROSOPHILA
MASEITNGKNGQNGKNGQKEESDSQIAPPIPYPKSVAFIISNEFCERFNYYGMRTILVLYLTNKLGYNEETATVLFHTFTMLVYIFPLIGALIADGWLGKYKTILYLSLVYSLGAMVVSFGAVPLSGMPTKAVTVVGLLLIAIGTGGIKPCVSAFGGDQFSLPAQSFQLAKFFSLFYFAINAGSLISTTFTPILRADVHCFGDQDCFSLAFGVPAILMIFSVIIFMAGKRLYRCQPPAGNMIFGVSRCIADAFKGWQKRRHSEPMESFLDYAKPTVGSRMVQETKCLGRILRLFLPFPVFWALFDQQGSRWTFQATRMDGNVLGFQIKPDQMQVVNPLLILGFLPLFDYIIYPALARCGIRRPLQKLTLGLLLAALGFFLSAGLEMKMEQAAYRATPIEPDMTHLRIYNGMPCRYEISSAVVQTPRVIEPLNVWEDLSLQMTESKEYTFNAQPVSGECPSIIDKLRLQPGKSVSYFLAQDKLVEFADGLQMAATDTGRTSVRALLNTPDGEGPVLLSTESATSQEPPLTLDKGNVPQLHRITPGFARVDINGKKVASFEAKEGRLYSILVTGSARDGYQHNVIEVVALSTVSILWQLPQIVVMTAAEVMFSVTGLEFSYSQSPPSMKSVLQACWLLSVAIGNMLVVVIAEFKFTSSQSGEFTLFASLMLVDMMIFLWLARSYQYKDQREDFEDDDDATIDSVMQSKPKATTVDTTARKTNGIEAEPGYGAYRNHAYDNDFSEA

SEQ ID NO: 5338 - DNA, 6300 bp, DROSOPHILA
ctcaccgccgagctgatgcggatgaagggtgctgtggatatgctcattgggatttcaatggacaatagcgaggtagcccataagcccacctatgtggagacaaagacacctaagatgcatccctccgtggcggcgcaaaattatgtggtcttagttgagtgacccaggccgacgtagaacaacgatatagccacatagctttgatattaagtatataagtagtagtagtttaagtataaagcagtttcaatacccattacgcatgtatatatctttctttattaaatacatacttaaaatgaacgtttcgtcgtgcatgccaatttcagttttgaaatgtacaatgaaattttgtctgccgttttacgcataataaaaaaaaaaaaacaatgttaatggggcagcaaaacagctgcccgcgaaaacgaacttttttttaatataatgggtaatttacttgcaaatatttacgattttcgttctccaactactcgatttaggtttcatttttaattcttttttatagttagatttacgttattttacgattatttggaaagacgaatttacacttagaatttgctcatcttcgacgcatcgttctgtattattctgcttaagctaaactctcgcactaatattaatatatatctttatatttatgtataattataattatatgtatgtatagatatatatatctattccgatcgacatcgcgtcaacttttcccaacatgccgttccttgtgttgcttgcttaccagttaaagggaaagggaaaaatttaagataccacggatttgttaaacttaaataagaatacatttcgacttaactaatttacaatttaggggtgtgtgtaaagtgtatggggattgtggttgctgttttcaaggttcaaagccactacatttacaatttaaattaaaagtatactcatatacataacagatatagacatagacattttacactcttcggctgctcattttttttttgacacttttacaccaatatatgcagctccagtttccaagactctgtacagattacacggcttcaggccactacgcactacagaaaagacgagtggggcatttacatacatatgaatgcaacggagcaattaaacatacatcgacgcagcaagcaatgtaattgtgtgggccatcttcttaaaaatgggcgcttcgtccatattggtcctgaccagatcagacatcagacatatcagatcaagccggcagtgagtgcgggatgtgtgcttggcggatgtggacaggctaattttggcggtgtgaggagtggtgttgattggtgtaggctggcatgcgttactctaggaaggatgtgcatcagtggactctcttgttttagccatcttccttgggcggggtgaaccatcctgcaataagaagtttccgtgtcaatcgttgctcatcttacgttgcatttctgggcttaccattcttttcgtgaatctgcaccagagatttgaagctctgctgggctcgagccaaactgtattggccctgggtcagtgcctgtttatagaaggttgttaagagtattaaataaaaaggtcgtccattttgtcgactcgaattctatgaatttaacatactttggtagccccgaattggatgcgcgcctttcccttgacgagagtggctgcaatttgcatgataaccgcttccacggtatatgccgagctccagccctgtttggtcagcaattccatgcagatggcaccaccgatgagcacatagccgccttgtaaacacaagaatcatttaaataaacctccatgatttacttatactcagcaaatcccacctgagataatcggatggacaacgcgcacaaatggcggctcgaagggatacgtctccttgaacaggatgttgagcagtatgctgtccttgccctccttctccttgagcatttgcagatcactgtgcagcggactgtccgggtcgacagacttgaggcgaatgttccattcgtaaatcgactcattgacgagctcaatagaatacatgttctttttgaaggcgtctgagcgataaatgtcgcgtaattccttcattaagcgatcggttgcctgcacggaacccgaaacggaaccctaatgtcgagtaaaacttaagatatagcctttaacgcaaagtatcggtgtactcacttttagatagtcttgtctctgactttgacgcagtttttctagagtcgctaggtgttccacttccatgtcgtccttctgcatttcacggatatcaaaacgatttaagaataattgattgacatcttcgcccagaaattatatataaataactacaaagttacacctaactctctccaaaccaacaaataatttaattgcagacaattttacacctaaagctcaccttgcttgtactgcgtacatcatccatttccagcggcaagtcctcatcgccctcgctctcctgttcgctctcgccgatgggatcctcgatctcctcctgatccgaatcggtctcctcgttgccgtggggtccgccaccgccccccgctccaccaccacctggtctctgctcgcagcgaaggggggaagcggatggcggcggcgtttgcagcggcagagccaaattatcgatgtcgggtggcagtggaacgttgtgaaggcggcacagctcacgcagcagtatgcccacctgcaaggatttggtttgggattgtcagttcacaggcaatagatttcgaaacctgccataagtactcacctgattgatcacgtgattatcacgtccattcgtattgctaagtatttgaacagcatttgtgacgctcgtctcctcgctttcggcgaaccaaactggcggcgatgagggatacgtttcctgcaggagagaaacaggcatatagcattagcatatcgtaaatatacatatgtgcacctttttgaaacaatcttaatagagctggtgaatcttaaaaagccatagttttcctactgaaattcctatgttatacgttcctacgtttcaaccaagttcattggttttctattaacagcgggctcgattaaatgtttgacttggcgtaaatcttatcgggaatccactgtacttttagccaatggggtgggcccaacccatcgcgtgtgtggggttggtcaaggactttgactcgccaagaagacctctcctattcccattcccatttccagtctcgaacttgtttcttttgttttaggttctctggagaattgtcgtcgccgacgtattcactttgcatgcacatgtaaataaacaaatactaaacaacggagatccaaaggcgccagaatgtatgaaattataacctttaattagatcgttgaaccaagcggggatcagtgcacagtcagtgaagacagaaaacagatggaacagctcggcagccgatgatcggggtacaatgaatcacacctcgtcgagggtgtcactccgtactgcaaagtgcaggagcccgcttttatatgaatcgatgtgcgattgcttttgacaatttcagcaaaaattaaatgttaagttgcgaaatatatacatatctacacatgtatacatctcccattgtaattatcccatgacggaaatcttcaaaatcagtctatgttggtcagaaccagaagagtagaaagagagggaacctgagagagtggccaaagggcatcgactacctcgattacatacaaacgtaacatatatatacgtacgaatattccatcttaactgagcagcgtgggaataaagaatcggcacaaatcctcgcctatataatcacgcataagcgggaaagagagagagagggcgaaccgataaagaaaagtcgaaaaagtagattcaacaaggagacaaggatggcactattggaaagaagaaagcaaaaatttgggcataaaaaaatcactatagtactggaccaaaaagaagacggacttgcgtgaaatattagcagaagaatagtaagagattttcacatacgaaaagggaactagggattcgattaagtttagcggataaaaaaagctttgaacacatgctaactggctaaaaatagaattctacactatcgccgtataaataaagttatcgtcgcggtgcgcaaagtgaaaagttgcagagtacaagcggagtaaagtaacctccagagcccgtaatcccctccagcaccaggctccaaatcatttgcaaacacggcgcattcatagtcgcccttcttcagttgcaatgctcctatgtattgattactgaagacgataagacagatgcacagagaaataaaaaccattcgctttaactacgaatttgtttactctttttgctaaagttatacttccgagaatgtggattttatgggaaaaactttagcaattcactggcccgaatcactttacatccccttaacttcactgtcactgtatttttagccataaaacttccccaaattaccaaatagaagatttaagtttagacttatatggttgatcatcggtgacttaccgttatgttggcgtgaatatcgtaccgctttccattcttatcgataaaacggcagagcagttcgtcgacgctggaattgaggatctgaaagcgctcgtggttcttcgggaagatcttctctagcgttttgatttcctgcttcagggtgttaaggcacgccatcttgtggcgggcttaaaaggcaactggtctggtctgtgttttttcgtgcttatgattatttcgtggtccaagtggagttttgtggttcctggggtttcagggagctagctccccctctcttgagctctacctttgcgacttccaggcgtagaaagctggtatgggattaaatgttttttttttttttgtccgtcagctgcttttatctgcccactccagatgaccctttttagtttttaagttgttcttcagggcgtctttatgtgaatattatgtttactcatttagttattgagctttttattagaatgaggattttgctcgtgtttggaggtagattgaaagggcaatttttggagtcgactggttgttctttgttgttttcgctggctctcttctcgctcttctttttccactccacttccagtcaacttcactctcactgcttcttcttctacagctcctgcggcgcccagcatgcgctgtcttgctcgcactctgcttattttatgttcagatttgcactttgattttcccgacttactatcgttttcttatactgttgatgcgtttgtttgtttgttggtttgtgctgggcattaaagctgtaattggagttttaaacacgtgtttcacttagcttgatattaatttttgtattattattatttttgttgctgcttctaacgcttactagccaaaacaaaaacaacaatcggcagttggcttacacaaacacacccggacgcacacaagagcagcagacaagacctgacacacacttgtaccaatctctagcgccatctcactcgcacagcaggtctcttgcctacgcaatgatcgaaactcatcgaaaccgattggaaatcggaaaaaaaaaacaaatctcgcgtttcacccctatccccctctttgttagcctacgctttctgctgagtttgttatttttgtctgctccccacaaggatattgttacagagaaaaagctcgaattgaagggaaaatggagacaaataagaaaacccatgacaaagaggaaagtttcaaatatgggcaatcgaaaaaatcgagaagtgagccaatttttttttcgccgaggctccactgttcccagctgcataactgttttccctcggcacctctcttttgctctcctccaccaccttttcctcctgcttcccaccaccccttctttcactgaccgaagtctgcgttttcagcattgcatacacacacacactcggacacacacacattggcacttttaatcatttatcaatatttaagcgactaaggcgaaaaactaactgtgcacagagggagccccaagaacaaatcctttgtttgcacggaacacggagcacaaatagaggcacagatacacggaaaaacggccgcagaaagcaccaactcttctcgcacacatacacttgcgcaaataggcatgtagttagttgtaagccaaaccgcagcgtagaaaaattctttgggaaaaagacaataaaaaaaagaaaaacaacaaaataatatacgctcacagctgcgaaaattgtgacacggagaattaaattctgttccacgcacgcccgcccgctttaccttttttttac

SEQ ID NO: 5339 - DNA, 2179 bp, DROSOPHILA
tacagctttaatgcccagcacaaaccaacaaacaaacaaacgcatcaacagtataagaaaacgatagtaagtcgggaaaatcaaagtgcaaatctgaacataaaataagcagagtgcgagcaagacagcgcatgctgggcgccgcaggagctgtagaagaagaagcagtgagagtgaagttgactggaagtggagtggaaaaagaagagcgagaagagagccagcgaaaacaacaaagaacaaccagtcgactccaaaaattgccctttcaatctacctccaaacacgagcaaaatcctcattctaataaaaagctcaataactaaatgagtaaacataatattcacataaagacgccctgaagaacaacttaaaaactaaaaagggtcatctggagtgggcagataaaagcagctgacggacaaaaaaaaaaaaaacatttaatcccataccagctttctacgcctggaagtcgcaaaggtagagctcaagagagggggagctagctccctgaaaccccaggaaccacaaaactccacttggaccacgaaataatcataagcacgaaaaaacacagaccagaccagttgccttttaagcccgccacaagatggcgtgccttaacaccctgaagcaggaaatcaaaacgctagagaagatcttcccgaagaaccacgagcgctttcagatcctcaattccagcgtcgacgaactgctctgccgttttatcgataagaatggaaagcggtacgatattcacgccaacataacggaaacgtatccctcatcgccgccagtttggttcgccgaaagcgaggagacgagcgtcacaaatgctgttcaaatacttagcaatacgaatggacgtgataatcacgtgatcaatcaggtgggcatactgctgcgtgagctgtgccgccttcacaacgttccactgccacccgacatcgataatttggctctgccgctgcaaacgccgccgccatccgcttccccccttcgctgcgagcagagaccaggtggtggtggagcggggggcggtggcggaccccacggcaacgaggagaccgattcggatcaggaggagatcgaggatcccatcggcgagagcgaacaggagagcgagggcgatgaggacttgccgctggaaatggatgatgtacgcagtacaagcaagaaggacgacatggaagtggaacacctagcgactctagaaaaactgcgtcaaagtcagagacaagactatctaaaaggttccgtttcgggttccgtgcaggcaaccgatcgcttaatgaaggaattacgcgacatttatcgctcagacgccttcaaaaagaacatgtattctattgagctcgtcaatgagtcgatttacgaatggaacattcgcctcaagtctgtcgacccggacagtccgctgcacagtgatctgcaaatgctcaaggagaaggagggcaaggacagcatactgctcaacatcctgttcaaggagacgtatcccttcgagccgccatttgtgcgcgttgtccatccgattatctcaggcggctatgtgctcatcggtggtgccatctgcatggaattgctgaccaaacagggctggagctcggcatataccgtggaagcggttatcatgcaaattgcagccactctcgtcaagggaaaggcgcgcatccaattcggggctaccaaagcactgacccagggccaatacagtttggctcgagcccagcagagcttcaaatctctggtgcagattcacgaaaagaatggatggttcaccccgcccaaggaagatggctaaaacaagagagtccactgatgcacatccttcctagagtaacgcatgccagcctacaccaatcaacaccactcctcacaccgccaaaattagcctgtccacatccgccaagcacacatcccgcactcactgccggcttgatctgatatgtctgatgtctgatctggtcaggaccaatatggacgaagcgcccatttttaagaagatggcccacacaattacattgcttgctgcgtcgatgtatgtttaattgctccgttgcattcatatgtatgtaaatgccccactcgtcttttctgtagtgcgtagtggcctgaagccgtgtaatctgtacagagtcttggaaactggagctgcatatattggtgtaaaagtgtc

SEQ ID NO: 5340 - protein, 397 aa, DROSOPHILA
MACLNTLKQEIKTLEKIFPKNHERFQILNSSVDELLCRFIDKNGKRYDIHANITETYPSSPPVWFAESEETSVTNAVQILSNTNGRDNHVINQVGILLRELCRLHNVPLPPDIDNLALPLQTPPPSASPLRCEQRPGGGGAGGGGGPHGNEETDSDQEEIEDPIGESEQESEGDEDLPLEMDDVRSTSKKDDMEVEHLATLEKLRQSQRQDYLKGSVSGSVQATDRLMKELRDIYRSDAFKKNMYSIELVNESIYEWNIRLKSVDPDSPLHSDLQMLKEKEGKDSILLNILFKETYPFEPPFVRVVHPIISGGYVLIGGAICMELLTKQGWSSAYTVEAVIMQIAATLVKGKARIQFGATKALTQGQYSLARAQQSFKSLVQIHEKNGWFTPPKEDG

SEQ ID NO: 5341 - DNA, 5923 bp, DROSOPHILA
gtcaacccccgaacgaaaactgggatatggaagggatggatcggagtaatgtaggggcggccaatctatgaattatgtacctacatacgtacatgctcctggctaagaactactacccctgggaacaccgaagcgaggtgattgccccacccaaaatggccaactgcaattgaaacaaacttttattggcatcggaacagatgccaaatgggtggtatgtacgtacggttttcgcttttacgtaattacaataatttatttcatcgttcaaaattgtttcttattctcgttttcgattcgtggttcttttctctttttgccctttcgcgctactagatgttattctcgcacggagcagatacatgagtaattggtatttacaaaaatgcatagttctttaacattgtctgtgatatcgctattgtttatcagttatcaaatcggatgatttatcttgggcatattggtttaattgcactcaattattcagttgctggttggcattaccagctttaagcctcttggagtttggatctgggtcagtgggtggattgtgtgtgtatgttgggctggtctgtctttccgggacaaatcgtttagattcgaggatggtggtggttgggtggtttcggtgtcgagtgccgtgattgaccagctgggcacgattcgttttgaaatatcagtcgttatatgtttatattgagaactcgtcgtacggggtgtgtgtataaatagtttggatgcccttactaattagatacatgtaacattaaaagtttattttcttgctcgtttttcgattctcgagttggtttttacaatttacaaatgaattaggcttatcaacgactcgctcgcacaacttatcaacagaataataaagccctcgctttaatactgacataagtacttaagattagtcatagtttatagttaaatgctgaaacgaaacagaaggttagaactcaaacttcccgatgttttcctttcatttttttttgttttttttttttgtatttgccccaaaagcgaagaccaactaagtcccagtgccttgggtttgggaaattcgggtgactgtggccacaatgggcgcgaaatttttgaaaccatagctaaaacttgagtgtcattgaatgcttgtcgagtatggggtttcaatgatttttgcgatttatttaaatacaatttttatgttttatttgttttgtatttaattgcatttgctgtttctttttcatgttcataatcatgttcattttcaaatgttcacttttgtatttttgcttctttcgatcgatcattcattcacaaatgtaacgtctaatttaataatgaatttgaatatcgtgtgtgtgtgtgagtgtagtgtatctgtgtttaattcgcgggcttcgtttacgctacatttgaaatctttgtatatcttggtttacgcatcaactgggcgtttaaattaggacttatgagataaaggaaagaaagattttggttttgttttgttcttgtatatagtggggatgtttactttttgttggattccgtataggttgcgtttatacgaaaatgccttcaattacaatttttgtttgttttgtagttttttataaaaaaagtacacataaaatacaattaaaataaggtaagaaataaaaaattatttcttaaacataaaaattatatacttttgcgatttttttgtggtttttttctcctcctcctcctcattttctccttgttgtggtttattttctgcttgttggtttattattatattttttttgttttgtttttgcttgtaacttttatttattattaatttaaatttttgtttgtttttgtttgtatttttgactacattattattacgcctgatcgtccgagccggaaccgtcatcattatcatcatcatcatctgcgcgggtaagggaaagggaaaatccggggattagattgatgtggaaaagggaagtgcttccgtgaactcaccatcacattcaatgtcatcctcctcaccatcgtaggggatgtcgtactcgtcgctctcgatttcactgtcgccctcgatgatttcctccagagcctcttcctcatcggaatctccatcggcggccgcggccttcttggccttctttgattctgcggatttggcctggaagcgaaaaaagagaagttagtagagttcctttggtttttgttccgctgatgatttactgtattacaagcaagtttattgaacagaaataaggggcccgtcactattaattatgcatttttgatattaatctgagaaacaaactaaaggatattagggagaattacggagcgaaatggtcctacgcgcccaactcaaacccacacatctccttgatcaagggcatccaatacccctctcaacttcctgtgcgtgtgtacatagtcataaaatgtatattttcagcacacaaaacaagcagcgacgaaaatcgttattttcgccgtaaaaaaacatttgaaaaatgcgcgcgccaatgtaattcgctgcggcaaaaagagacagcgggagagagagtacgtgagagagtggattacaagtgcaaccgcgctacattacatctgtgctccgtatgtacaaggcgacatatttactacataagggggaaggaaaaaaaaacaataagcagcgacgccggcagcgacatatgtatccgcatccgtgagatacgaaacgaagcgtgccctgtaagatagagagcgggcgagagcgccagagagagagcatctgaatccgcagcactgtaaactgtacctgaactgcatgaatgaatctctcgctctcactcacagccatccgaacgacagctgctgcagcgacgtcggcagcgaaaaaggcgcaaaacaacaacatgcgtgggtttaacttttgccgctgaccaaccaacaacaagatacacataatggtatatggtttatggcagtatataggcggtcacgttcccaagtcgaagagaagccgcaacacaagggccctatttaccagactgttacaaagcggaagaagcgaaaaacaatcggactgtggaaaaatgtgcaaaattaatggccacccatcgcccccctttttcacttcgcttacagcataagtcacgagacccagaactcgagaaaaggccaatagaggattaagacgaacagggtgtatctgtattggcaagaactaagcctactattactggtgttataactgggtaatcaatgtatcttgatttagttagaggttttagtttgtgttttctaagcgtgaagatacatttatagggacaaaagctaatctgttgtttggaatcgaaagatatggaaaccaacgaataattttcaaaactattcttgaaatctatacaattcgttactgtaccactaagaattatccgtgccaaacgtatctcaactaattcatgatcatgggataatgatcattattcaattgaatcccgaagaaacccaactaacttttgcgacaccctgtttagccgtcttgttttatgtactaaaataaatacgcataaggcagagcagaaaaaaaagtgaaagataaatgtaagcacatacgcaaacagacaaaacggtgtgtatacaaattacgagggagagagttagcagcgctctctatttgtatctatctttctccggggagagagagagagagcgagagaacgctcccgttaaactgtacatttttatttcgagtttgagtctgagaaaagcgcttgatttgccaatttatctgccttactggccgaactattttatttttatcaagaaatgtgctactcgattatggaatgcgactgcttcaggcccccaaaacttgttcgaataccgcgtgctcttggcgatactaaccaaaaataaagtggccaaacatgacatgagtaatttaccggccggcaatgtgtgttttcattgagagagtgcattggcatcgcgctgaattgcgtttgcgtttgcatttgcaattcccgtagccacagcgactgataaataaggccaagcgtatgagttatagacgtaatgccacaatgtatctattgctgggtaacgctgttcagcggacacgtcaatgctaatgacctatgggtttattaaaaacacattacccaccccaccaaagaaaaggccctggctaactgtactccccgcctatataagcacggcggccctcctaacctcgatttgaacctaacaacaataatctttgattgccggacccgcaatcatcttggttaatcgtaaacaacacaaacgcacaaccgagccagctatacgctctctcttttgggggcatatgtaagccattgggagagtgcgctgttccgaaaaacgtgtgtatatctatttctagaatttttcctcgaacaatgctatgctactggcatattggcttggagtgaatcattagaggggcctccttttggttttaccgcgtaaacaactacctagtcacatagatcagtactcacttctgctggcctcttggtgcctttcacggattcctttgcgggggcagcggcggcggcatcggcggcatcctcgccgtcctttgacgtaccgttgtcggccgcgtcgccggcggcatcggcagcagcggccttatcctcggcggccgccttcgccttgagatcgtccttgacagcagacacatcatctgccgccaccttctccacggccacatcgccgttgttctgttgttccgtagcagccgacatatttgaattggtttctttgaggttttccggaactatttagtttctgcgttatatagagaacaattcgggttggttttgtggattgtcttgttgttgacaaaaaaccagcgcaaaatactcggggaaggcgagagagagacagagagaaccgcaccgaacgaagcacacaaacacactgaatgcgattcagctgcgggccgtctatttaagcactgcctctcgaggagagagtaactttctttaaacgctctcgctgctctctttttcgctctccccgaaatcgttacgacgctcactcgctctctctctcccacgccattggcccatacaatacactcaaaaaatcgccgcggcatttgtacagccgcagtcgataagacaacaacaacagcccagagcagagcgatcgttggatttttggtatattattttgcggtgattttctgataatatagtatctatatagtaaggctttaggaggtgccatatatcaggcggcgctacggcaggcaaaaggatttactcgtaggccccactgatgtatggaatatccgttttcctttggtttgctaaccaccgatatgtgctcccgtcgacggttcgtacaagactgagcttgccgtccgttcgatggctagaaattgccgcttgcttcttcttgcgccaaatcggttgcagacatttttgcctataacttgaatacctttgttcggatcggttcagagactgatcgaggctatagctggtagtatccgcttaattttgggctttttcccgaggcgctgcgatcaaaactagatccgcaaatgacaagttgagtgggtttcctgattaattccatacaaaatctgcttgggttccgtgagtacggttgtgggcgcgtttggcggtaaatttgaaaattgcgcgcgccagtggtgcgcttgtgggcctgggggcggggtctgggggttggtagcggcgatggtggtgtgtggtgtgtgtggtgcagtcactctgtggcgttctgaccgttcgtcggtggaacagaacagaacagagcagaacagtggatgtggatgttgccgatgggaagaagtgttgcagcattgttgccgcagatgcagatgtgtgtgctgtgtgttgtattcagcacggtattcgtatttatagagtggaccagcgtgggacgcaatgtc

SEQ ID NO: 5342 - DNA, 725 bp, DROSOPHILA
cagtgtgtttgtgtgcttcgttcggtgcggttctctctgtctctctctcgccttccccgagtattttgcgctggttttttgtcaacaacaagacaatccacaaaaccaacccgaattgttctctatataacgcagaaactaaatagttccggaaaacctcaaagaaaccaattcaaatatgtcggctgctacggaacaacagaacaacggcgatgtggccgtggagaaggtggcggcagatgatgtgtctgctgtcaaggacgatctcaaggcgaaggcggccgccgaggataaggccgctgctgccgatgccgccggcgacgcggccgacaacggtacgtcaaaggacggcgaggatgccgccgatgccgccgccgctgcccccgcaaaggaatccgtgaaaggcaccaagaggccagcagaagccaaatccgcagaatcaaagaaggccaagaaggccgcggccgccgatggagattccgatgaggaagaggctctggaggaaatcatcgagggcgacagtgaaatcgagagcgacgagtacgacatcccctacgatggtgaggaggatgacattgaatgtgatgatgatgatgatgataatgatgacggttccggctcggacgatcaggcgtaataataatgtagtcaaaaatacaaacaaaaacaaacaaaaatttaaattaataataaataaaagttacaagcaaaaaaaaaaaaaaaac

SEQ ID NO: 5343 - protein, 152 aa, DROSOPHILA
MSAATEQQNNGDVAVEKVAADDVSAVKDDLKAKAAAEDKAAAADAAGDAADNGTSKDGEDAADAAAAAPAKESVKGTKRPAEAKSAESKKAKKAAAADGDSDEEEALEEIIEGDSEIESDEYDIPYDGEEDDIECDDDDDDNDDGSGSDDQA

SEQ ID NO: 5344 - DNA, 2962 bp, DROSOPHILA
tagatgttttacctgcttaagatcttttgactgtttaccattaagatcttcttgcgattccatttttctgtccacaagtgcccagcagaggaatgttgtcctcttcaccagcaccataatgggcagatagtccttcagcgattccagccccgaatcctctttcaatcgattgtgataacagaattctcgttctccgggtaattggctatgcttaccacgcacgccgccgtaaagaagaactcccagacatatggtctgcgttccaatcagctgagaaacatcaaagaccagggtacagcgttctccgttgaaggccacttgcaaatgctttttcacatttgatcggaaatggcgttgggccaaatgttggagcatatcatccttgaaaacggtggaaatgcatttttctatgggacattgtgctggcagctgacatagatggttcagtgtaagtttcgtttgtttttcgggctcggtactggagaggccaattagtctgagtggcttatttcggtccatatttctcgaattgtgttgaatgttttaagtatataaatataatgtacgctaataaattttttgaagctatgcaaacggcctactgttgttgaaacatcactgcttagttggatataattgctctgccgcgtaaaattagcctttttcattatattaataaattcgatttaacttttgtaatgaattaacttcatgcgtgtaaccctttttctttttattaaatcatatgctcctttactctgctaaatgagtttatcaatggtttatgatttccgtatttaaatcagcaaacacatttcatttatgtaaaacagagcagcaagtaattattaccatcaatattcccattcgaaataaaactcttgataattttcctaacaaaagaaggaatacttcagctctattttatggatatgtttcccatgcgaactaatcttaagtgataaaaaaaaaaaaaatagtacaaaacgttaaaactaactcatccatcgtgtccttggaatgtggtcataactgattctttcgctttcgacctggtcgcacggcatacagatcgtcggagatcagggatctgccagctctggaggcggccagaagacgtctttcgtgcaccttacgatgcttggtgaggtgatccgacctggcgaagcacttggaacagtagtcacatttgtacggcttcacgccggaatgggagcgcttgtggcgggccagttcatcggatcgggagaaccgccagacgcaatctggccaactgcagacgtagggcttctcgcctagatgccgcctcaaatgggccttcagatgcgcgggcttggcgtagatcttttcgcaattgccaaaggtgcacaggtaaccccgttcgccggcggcattttcactcatctggagggcagaaggtggggcaacagcttcagctggactggcggaatcactgctgccgggcgaggaagacgatcgatcgggaacgaaaatctctgaatgtggtggccccgacagccgcagattgctgttgctctcctccagaaagtccgcacagttatccgtgcacaggggagttcgttccggcagaaagtccaccaggtccggaatctctacgtagttatccagcagtcgctgctcccaatcacttaagtccggcggacatacggtcaggtcattgaagtcgatgaacaatgaaggatcctccacgtggggcagacccacctggatattcccattagtatttgtattattattactgtccaatgtgatgatgccataataatccgactcctcgaattccagctgattatagttgccaccggaaaagctagtatccacataggtgctatcgaattccccaacactgactatatttagcagcgcatcgccgccggccagtggctcctcttccaagtcgctgtaaagctgctggaatccacccgtcgcaaagaagtccatgatcgcaaatgagcggactccagtcgagtgtccaaatatttataatatccacggacaatccggatgagtgacaggcgtcggaaaagttgatgagagccattgaatctggttgggaatcgcagggcatataccctaagtacttaaaatcatattgatatgtcatgaaaagaatgtttacttaaattgtttcttttacaagtacaatagtatagcataccctgcgatctgcctagaacaatgggtatcaagagatgcactcattgcgatcgtggctcgattgcttccagtgattggtggccaggatcccttggggaataattagccggcgagcaacgtatctaacgcgctgccggcttcattagtccgagactgagataaagatacatccatacgtacgtacatatccattcgcaccagatgttgcgcgcattgatcggcgacacatgtgcccgggtttttggtggccgggtccgggaatccgcaatgctatcgaaatcgctgacggatgccgagtgccaagcagtgtcaggccacagatcggctagctatattgctatatatgtatagccgcgcggcacctgatctcccgctttcagtgcgccatctcgctcttttgtttttgttttgctcgccggacaatcaatacaaatttgttattaattaatgattattactagcgaactagatatgcccgggggatggatatggatattcccggtcgatcatcagtgtttcggttccaagcaaaacaagtgcgtttcctatgtgtgtcaagtggagccgcagatatggttttaaattcacggaaagttatctgtttgaaaatatttttctgttcgaaaatcatttggcttggcaacggtccatttgcagcatatggtcagttggaaaaggttgatagctagtcatttttttttttttttgacaactcatttcgttcatatttaatacagacagtggtgtgcaatttacaattcacttaaagtgcattgtaatgcgc

SEQ ID NO: 5345 - DNA, 962 bp, DROSOPHILA
atggacttctttgcgacgggtggattccagcagctttacagcgacttggaagaggagccactggccggcggcgatgcgctgctaaatatagtcagtgttggggaattcgatagcacctatgtggatactagcttttccggtggcaactataatcagctggaattcgaggagtcggattattatggcatcatcacattggacagtaataataatacaaatactaatgggaatatccaggtgggtctgccccacgtggaggatccttcattgttcatcgacttcaatgacctgaccgtatgtccgccggacttaagtgattgggagcagcgactgctggataactacgtagagattccggacctggtggactttctgccggaacgaactcccctgtgcacggataactgtgcggactttctggaggagagcaacagcaatctgcggctgtcggggccaccacattcagagattttcgttcccgatcgatcgtcttcctcgcccggcagcagtgattccgccagtccagctgaagctgttgccccaccttctgccctccagatgagtgaaaatgccgccggcgaacggggttacctgtgcacctttggcaattgcgaaaagatctacgccaagcccgcgcatctgaaggcccatttgaggcggcatctaggcgagaagccctacgtctgcagttggccagattgcgtctggcggttctcccgatccgatgaactggcccgccacaagcgctcccattccggcgtgaagccgtacaaatgtgactactgttccaagtgcttcgccaggtcggatcacctcaccaagcatcgtaaggtgcacgaaagacgtcttctggccgcctccagagctggcagatccctgatctccgacgatctgtatgccgtgcgaccaggtcgaaagcgaaagaatcagttatgaccacattccaaggacacgatggatga

SEQ ID NO: 5346 - protein, 311 aa, DROSOPHILA
MDFFATGGFQQLYSDLEEEPLAGGDALLNIVSVGEFDSTYVDTSFSGGNYNQLEFEESDYYGIITLDSNNNTNTNGNIQVGLPHVEDPSLFIDFNDLTVCPPDLSDWEQRLLDNYVEIPDLVDFLPERTPLCTDNCADFLEESNSNLRLSGPPHSEIFVPDRSSSSPGSSDSASPAEAVAPPSALQMSENAAGERGYLCTFGNCEKIYAKPAHLKAHLRRHLGEKPYVCSWPDCVWRFSRSDELARHKRSHSGVKPYKCDYCSKCFARSDHLTKHRKVHERRLLAASRAGRSLISDDLYAVRPGRKRKNQL

SEQ ID NO: 5347 - DNA, 5733 bp, DROSOPHILA
atgcactttaaaaaaaatataacaaaaattccacactcctccgggaagagtttcttacgagaagtttccacttagccatgccgccaaagactgatgatcgatttagcagcggtggcaagaatgtagcctcggttttcggggacttcgcctacctgagtccagtccaacccctataagccatttgggttaggttcccagggtttttctattgtccggactcgtcaaggccacgaagtgcagctgccacaggcacgttttctggtttttgcctggatgcctgcattctaaatggcttctttgggattgctgcacgatgatggcaatgccgtttgatgaattttctttcgacgctacatcttgccagagatttcgattttttggtgattttttttttcaatttaaatttaattttaaaagggcaggccctggtaactaacacttttcttcggtgactacgcattaaatgcttgtcggcgaaaaaacgagggccattagggctgccacttgtcgaaaaagccgaaggggacagctcgtatatgaaactacgcccatgtcttctaatatctgcacgcttttcgggtgtggtgccctggtctctgattaaatttacttacaactgctgttaatttgccttaccaactggcctaaacgtatcaaacaatttactattaccgatcgatcactggatatttcacttaatttccattttccactccgaacgtaattgttctacaagatacagttcacagcgaacagaaatcccacagtaactttttccaacgagccggtaacgccgcacaactgcatttctgttatacatgcattgcacataacagctaacattaacagcaatgtttgggacacagttcagtttcaaaccctaactgaagttttaaattgttgatagccagttagctaatattattgtattgtaaacatattttaaaaagtaaaccgcagtgccaattataataattaataagtatataaatgccaaacatttgtaataaaacgtataaaatgtatttacaaaacaattgggtaaaaaatgcatctacagaatactcgtacaaacgaacgtatttacagccaactacatatataaataaatgcgaacaaataaaataaataaaagggctagctacgactaaatgcgaatgcgggcgacgctgtcgatatgggtatggactttaagtacgaaaatcggacatctaggcctccgagaaatcgttgtcgtaggcgtgattgcggtaggccccgtatcctggttccgcctcaatgccgtttgttttccttgcggtagtatcaactgtagtggctttgggcttcgactgcataacactatcgattgtcgcatcatcgtcgtcctcgaagtcctcccgctgatccttgtactggtagctgcgggctagccacaagaagatcatcatatccactagcataaggctggcgaacagggtgaactctccggattgcgagctggtgaacttgaattcggcaatcaccacgactagcatattgccaatggccaccgagagcagccaacaggcctgcaggacactcttcatactaggcggcgactgtgagtaggagaactccaagcctgtcacggagaacatcacctcggctgcggtcatcacgacaatttggggcagctgccacagaatcgatacggtactgagggctaccacctcgatcacattgtgttggtacccatcgcgggcacttcccgtcaccagaatgctgtagagtctaccttctttggcctcgaagctggccacttttttgccgttgatgtctacccgagcgaagccaggcgtgatcctgtggagctgcggcacattgcctttgtccagggtaagcggtggctcctgggatgtggctgactcagttgatagaagaacaggtccctcgccgtctggcgtgtttagcagagctctcactgaagtgcgaccagtgtcagtggcggccatttgtaatccatcggcgaactcgacgagcttgtcctgggctaggaagtaactcactgactttcctggttgcaaacgcaacttgtcgatgatggaagggcactctccggatacgggctgagcattaaaagtgtattccttggactcggtcatctggagtgaaagatcctcccacacattcagaggttcgataacgcgaggagtttggaccactgcactcgagatctcatagcgacagggcatgccattgtatattcgcaggtgggtcatatcgggctctatgggtgtggctctgtaggcagcctgctccattttcatctcaagacccgctgagaggaaaaatcctaaggctgccagaagaaggcctaaggtgagcttctgcagtggtcgccttattccacaacgtgccagagcagggtaaatgatatagtcgaatagtggcagaaacccgaggatgagcaggggattgactacctgcatctgatcgggctttatctgaaaacccaacacgttgccgtccattcgtgtggcctggaaggtccatcgcgagccctgctggtcaaagagggcccagaagacggggaagggcagaaagagtcgtaggattctgcccaggcacttggtctcctgcaccattcgcgaccccaccgtcggcttggcatagtccagaaagctctccatcggctccgagtgcctgcgcttttgccatcccttgaacgcatccgcaatgcaacgcgacaccccgaagatcatgttgccagcaggtggctgacacctatacaaccgcttgccggccatgaagattatcaccgagaagatcatcaagatggcgggcacgccaaaggccagcgagaagcaatcctgatcgccaaaacaatggacgtctgccctcaagatcggggtgaacgtggtcgaaatcaaagatcctgcgttaatggcaaagtaaaacaacgagaagaactttgccagctgaaaactttgcgcgggcagcgagaactggtcgccaccaaaggcggaaacgcatggcttgattccaccggtcccgatcgcaattagtaggagtcccacaacggtcacagctctaaaaggcgataaattaatttataatgacatccatgctatgtcgtatatactcacttagttggcatccccgatagcggaacggcaccaaaggataccaccatagcccctaggctatacaccagcgatagatataatatcgtcttgtactttcccagccagccatcggcgataagagctccgatcaggggaaagatgtagaccagcatggtgaacgtgtgaaaaagtacggttgccgtctcctcattgtagcccagtttgttggtgaggtacagcaccaggatggctaaaaagtaagacatttattagaaaggacaacatggatatttcgccgaggttactcactgcgcatgccatagtagttgaatcgctcgcagaactcattgctgatgatgaaggccacagacttgggatacggaatgggtggctagtcggaagagatagaagaaatgtcattcaactatcgcgatctgattgcccttagtagcattatctcctctacatttctttatcagtgtcccaccagtgagaatatgtcgtttcatgggctgacttggcaattatacgccaagtacccatgtcgatagaaataagtacagcacacaacgccaaaagatctttgggttttaggtgcatttgacattccatcgcaaagaggctaaagaaactttctattagtttattttgttttgttgaaacttctatggattctaacaaagggagtgccataaattaactattatatgaactgccttttcaaagcctgatactcttaatctgtttataataggctcgaactagcatgtaactatttatttatttattgtattaaataaattgttgcgatttcataaagaattacaacggttacatggactaaatttaaccaatttagcaaacatttttttttttatttgtgagagacttacaagattttgaatcggtcgcattaaaaacgattgaatagtttagctattatgtgtgcttttggaatttgcctatggctaagaaatcccctttttcatcttttgataatatgaaaacccgttgctttgaaatatgactcgtaacttgttttttaattgatattggactggaggaagttcgcaagtgttagatgaggtcatttcactagggtatttctaaagtacatacatacatatttcggatggcccttaactttttcgcgttttctaagcttattctcatggaaatgctgctctctgtcgtcacaacgtcttttttttttgatttggctttcgattttgttgggtttgttttgttttgcttggctatttagttttctgttgtgaattgccgcgtctcttggccaaggtgagcaacggaacgcaaacgggtttctgccactaccagtgtctccgtttgtcagtgggtacgttaaccattgatgattgagaattctgagcacaccacggcctaggccaagtaagtgcctctcctcatcctcctttccgctccacgctcttcacaagactcaccgttaccgatttgcaattctccgggccaacaattgcattgctgacaaatgccataacgagctttacgtaatgatcgctacactggtgggtttctaattttcgattcggatctacccaagacttcactatgcacccaactttttggacccccgcagaatttctggtcttgagcttccgtctgtcggagacaacgttcagtatcgaactaagaattctccggagctggccccaagctttaaagttcgatctgccatccgtctttcttctcggcctttcttccgctcccagttcctaactgccacctcgagcagtagcagttgttaagcataggcaaataaattaacaaacaatagaagatccaaagagagtcttaaaagggttgggggctttaaacgggggtctcgaacagaagatggtgagatcaaagctacagctgatagtctctggcttgtctagactctggagtctacaccttatcgccggtaactctggggtaggcgagcggacgaagaatgataacagagctcgggtaaatgcatttgcgtagccccatccgcaaactgggtcactatcgattttactctcttttcacaaaggtacattggctgcgaaagttgctgaaaagtgtcgcgttacaaatatgtacatagattggtggtatttatcaaagcttagctaacaattttagctcctcgattattcaactgctataaatacggttttaattacgggtttcatgtaaaaaattgaatacaataaaaatggcatagcaaaatatttcccatggtgtttagccttgatagactttaattgcttagcaaatatttcagttggattagtaaatgatttaagggtatttattggtcgacgctaccacggaaacaaggcctattcgattcttgttttgattctgacacacgacgattaattcaatcaatttgcgggcaataaaaggatctcgatttgctctcgcttttggttgacacacatttatcgatcgcgtggggcgttcaaggtcagctgcgctgccgctgtgatcaatagccttgggcgcagaagaaagcgaagcaagtggcgaagagagtggaaagaagaaaagtcattggaactttgtgcgcttctttttctcgaacaaccactgcacacgttcagttgggcaagtgtgtatatgtgcctttgtgtgc

SEQ ID NO: 5348 - DNA, 2546 bp, DROSOPHILA
cgacagacggaagctcaagaccagaaattctgcgggggtccaaaaagttgggtgcatagtgaagtcttgggtagatccgaatcgaaaattagaaacccaccagtgtagcgatcattacgtaaagctcgttatggcatttgtcagcaatgcaattgttggcccggagaattgcaaatcggtaacgccacccattccgtatcccaagtctgtggccttcatcatcagcaatgagttctgcgagcgattcaactactatggcatgcgcaccatcctggtgctgtacctcaccaacaaactgggctacaatgaggagacggcaaccgtactttttcacacgttcaccatgctggtctacatctttcccctgatcggagctcttatcgccgatggctggctgggaaagtacaagacgatattatatctatcgctggtgtatagcctaggggctatggtggtatcctttggtgccgttccgctatcggggatgccaactaaagctgtgaccgttgtgggactcctactaattgcgatcgggaccggtggaatcaagccatgcgtttccgcctttggtggcgaccagttctcgctgcccgcgcaaagttttcagctggcaaagttcttctcgttgttttactttgccattaacgcaggatctttgatttcgaccacgttcaccccgatcttgagggcagacgtccattgttttggcgatcaggattgcttctcgctggcctttggcgtgcccgccatcttgatgatcttctcggtgataatcttcatggccggcaagcggttgtataggtgtcagccacctgctggcaacatgatcttcggggtgtcgcgttgcattgcggatgcgttcaagggatggcaaaagcgcaggcactcggagccgatggagagctttctggactatgccaagccgacggtggggtcgcgaatggtgcaggagaccaagtgcctgggcagaatcctacgactctttctgcccttccccgtcttctgggccctctttgaccagcagggctcgcgatggaccttccaggccacacgaatggacggcaacgtgttgggttttcagataaagcccgatcagatgcaggtagtcaatcccctgctcatcctcgggtttctgccactattcgactatatcatttaccctgctctggcacgttgtggaataaggcgaccactgcagaagctcaccttaggccttcttctggcagccttaggatttttcctctcagcgggtcttgagatgaaaatggagcaggctgcctacagagccacacccatagagcccgatatgacccacctgcgaatatacaatggcatgccctgtcgctatgagatctcgagtgcagtggtccaaactcctcgcgttatcgaacctctgaatgtgtgggaggatctttcactccagatgaccgagtccaaggaatacacttttaatgctcagcccgtatccggagagtgcccttccatcatcgacaagttgcgtttgcaaccaggaaagtcagtgagttacttcctagcccaggacaagctcgtcgagttcgccgatggattacaaatggccgccactgacactggtcgcacttcagtgagagctctgctaaacacgccagacggcgagggacctgttcttctatcaactgagtcagccacatcccaggagccaccgcttaccctggacaaaggcaatgtgccgcagctccacaggatcacgcctggcttcgctcgggtagacatcaacggcaaaaaagtggccagcttcgaggccaaagaaggtagactctacagcattctggtgacgggaagtgcccgcgatgggtaccaacacaatgtgatcgaggtggtagccctcagtaccgtatcgattctgtggcagctgccccaaattgtcgtgatgaccgcagccgaggtgatgttctccgtgacaggcttggagttctcctactcacagtcgccgcctagtatgaagagtgtcctgcaggcctgttggctgctctcggtggccattggcaatatgctagtcgtggtgattgccgaattcaagttcaccagctcgcaatccggagagttcaccctgttcgccagccttatgctagtggatatgatgatcttcttgtggctagcccgcagctaccagtacaaggatcagcgggaggacttcgaggacgacgatgatgcgacaatcgatagtgttatgcagtcgaagcccaaagccactacagttgatactaccgcaaggaaaacaaacggcattgaggcggaaccaggatacggggcctaccgcaatcacgcctacgacaacgatttctcggaggcctagatgtccgattttcgtacttaaagtccatacccatatcgacagcgtcgcccgcattcgcatttagtcgtagctagcccttttatttattttatttgttcgcatttatttatatatgtagttggctgtaaatacgttcgtttgtacgagtattctgtagatgcattttttacccaattgttttgtaaatacattttatacgttttattacaaa

SEQ ID NO: 5349 - protein, 734 aa, DROSOPHILA
MAFVSNAIVGPENCKSVTPPIPYPKSVAFIISNEFCERFNYYGMRTILVLYLTNKLGYNEETATVLFHTFTMLVYIFPLIGALIADGWLGKYKTILYLSLVYSLGAMVVSFGAVPLSGMPTKAVTVVGLLLIAIGTGGIKPCVSAFGGDQFSLPAQSFQLAKFFSLFYFAINAGSLISTTFTPILRADVHCFGDQDCFSLAFGVPAILMIFSVIIFMAGKRLYRCQPPAGNMIFGVSRCIADAFKGWQKRRHSEPMESFLDYAKPTVGSRMVQETKCLGRILRLFLPFPVFWALFDQQGSRWTFQATRMDGNVLGFQIKPDQMQVVNPLLILGFLPLFDYIIYPALARCGIRRPLQKLTLGLLLAALGFFLSAGLEMKMEQAAYRATPIEPDMTHLRIYNGMPCRYEISSAVVQTPRVIEPLNVWEDLSLQMTESKEYTFNAQPVSGECPSIIDKLRLQPGKSVSYFLAQDKLVEFADGLQMAATDTGRTSVRALLNTPDGEGPVLLSTESATSQEPPLTLDKGNVPQLHRITPGFARVDINGKKVASFEAKEGRLYSILVTGSARDGYQHNVIEVVALSTVSILWQLPQIVVMTAAEVMFSVTGLEFSYSQSPPSMKSVLQACWLLSVAIGNMLVVVIAEFKFTSSQSGEFTLFASLMLVDMMIFLWLARSYQYKDQREDFEDDDDATIDSVMQSKPKATTVDTTARKTNGIEAEPGYGAYRNHAYDNDFSEA

SEQ ID NO: 5350 - DNA, 3810 bp, DROSOPHILA
gagcatataccagtttcccatggacgacgaaaccgtgtccgaaacaaatgctgcgatgaacggccatctaccctttgccgttgttggcagtacggagtttgtaaaggtggccggaaagcaggttcgtgcccgccaatatccatggggagcggtgcacatagaaaacgaggcgcactgcgactttgtgaagctgcgcgagatgctcattcgcactaacatggaggatctgcgcgaacagactcacacacgccactatgagctcttccgccagcggcgcctacaacaaatgggctttgtggacgtggacagcaacaaccagccggtctccttccaacagaccttcgagtcgaagcgatccgaccatctggcttgcctacaggccaaggaggaggaagtgcgccaaatgttcgttcagcgggtcaagcagaaggagaacgagctgaaggacaacgagaaggaattgcatactaagttcgaccggctaaaacgggagcatttggaggaaaaggcccaactggaagaggcccgtcggcagctggaagaggattgccaggagctacagcgtcgtaggctccagatggccaatggttcgcacactctcaccttgggcaggggcaagaaaaagtagttaagtttagaatgttttcgattttactaaaactgcctatgcgattaaatttctacaaaccttacctatgactccactcctataccaagaagtatactaattttgatattttatttctttttattttaacgatctatgatttccaattaaacagtttataaataaattatattgaaagaattttaatttaggttacgagttccagtaattttagttgtataattaaatacaataaaaatataaaaaacaatattgaatgcgaatatgtctagcatatgaaaaagagtatacatttttcagtaatttaaaaataccaaaatatagaacgtttacatatgtatgtatgtatgtacataatgaaggttatgtttggacagcgttctctataatccagccctaaatatcgtaattaccagactaaatatgaattaaatgggatacttttcgcggaactgttttatgacggtcataacgcatatgtctcttcgaaatttgatcgcttggaaaccctggattagtcgaaacagctgtaaacgaacttcaggtttttcagccctttccgctggccgcttcttctgtggatgtggacccggctgatagcgatagcaatagctagctctccgctgttctcgccgcctctcgctcgttctctggcacgccaagtggaaaaatgggaaacaaaattataaatatgccagcagcgcggatcggaacgcaatggttagtcattctgtgtgtagcgatggcagcgagcggtactaacttggacagtggaatatgcccggtggctggggactccggctgccgcggaaatcctccagaccaggcgcgctacgacaactaccgcatttacaacgtggagttcgagaaccaagagcagatagaacttttccagaagctggaggagcagagcgacagcctcacattcatcggccatgctcgcgaggttggccagaagttatccattctggtagcggcgcatcgcgtggcagatatcgctgatctgctgaagacctacaaggtcaagcatagagtgttggtgagtttctagaaatggtaaccaatgaattaaaaactaaacgattctttccttgtcagacctacaactttcaggagaagatcgaccgcaatctggccgaagttcaaccggaaagcattgatgcctctcagctcgactggcagcacttcttccacctgaagaccatctacgagtggctggacaaaatggtcgagaagtacccaaatcgagtgaccgtactggatatgggcagcagcacccagggcaacgcaattaagggcgttaagctgaccagcaatgctaataacaaggccatcttcattgagagtggaattcatgcgagggagtggatttccccagccgcggccacttatatcatcaaccagcttctaacctcccaggatcctaaggtgcaacaactggcccaggactacaactggattatcttcccttgtgtgaatcccgatggctataagtacacattcgagcacgaccgaatgtggcgcaagaaccgtcagctgtttggcacctgccgcggcgtggatctgaacaggaactaccccgaccactggaactcaacgggatccagcagcgatcccacccgctacgattttgcaggaccctccgctggaagcgaactggagaccaagcgcttgatagatttcattcgcgcaaatgcgggcaaagagcaaataaagacatacattgctcttcactcctactctcaaatgctaatgttcccatatggttacaccaaggagcgggtgtccaactacgatgacctgcaggagttcggcaagaaggcatcggcagcaatcaaagcggagaacggtagggattacgtgagtggtagtctgtttgagaccatctatccgtcgagcggcggcagcatggattgggcgcattcagaggcgggtattccgattgcctacaccttcgagctgcgtggtccgccagacagccaggacttgttcattctgcccgccgtggagatccagcccacggccagcgaagccttcactgccattcgtgccatcgtagaggcggcggccgagaagggctactacaagtaagcacaatgatattatgagcaagcattttgtacgttcaacgatatattactttatctttttaaaaataaacacacgtaaacgcgaaaggcaatgttgtggttacactttatagcattaaacgataaggatcaggcgggtatgtcgcttgtgcgtgatatatggtcagattagggtaattctaccccagtaaaattacggtttaacggccctggtgatgtggtttctaggcgagagccgaggatcgaatatggcctctatctgtacttgacaatctgcaagataaataatttgagtaccttatatactttgcgctaaaaagttgatttataccattttccattagaaacaggcagcgatcgtaaagaataatgctctccaccagcggagccatcattaatcgaagtgtgtagaatgagactatccgttgccagttggccaaatctgtttccgtctgctggttacttagagttcggctgtccagtgcttcaaagcgagtaccctgtacggctttctggaaatatctgcaaaaattggtttagaagtgtatatatgtctttggaattggtcttcttactggtgaaacgtcatgccgggtgagtactttacatttcgcagggcacagtggcgaagctctggaaactgatgcactattattcgctcggcggcggctcttagggagtgtatgcggagatgttggtaatcccccatcctcagacgatcgtgatacacctccatagcgtgacaggagatctcacgggcctcgtagctgagttggcattcgtttttatctttgagttcactgctcaacgggtacccatggacatgctccctgggatgggtggactgggtagtcatcttctggtagcaacagcccacaaaattgaggaacttggcctgcgggcagccgagaaacatgcgcatcagtgtcgggcccagattgccacagggatgcaggcctatcacaccaaatcggaaattgtcgtctgttagctgcagggcctgccgaatgctggataggaactgctctggcttagtgctgctctccaagcgatgtgtaaggtgtactggtcgctgaaagtgtgtggtttcat

SEQ ID NO: 5351 - DNA, 1612 bp, DROSOPHILA
gacagcgttctctataatccagccctaaatatcgtttttcagccctttccgctggccgcttcttctgtggatgtggacccggctgatagcgatagcaatagctagctctccgctgttctcgccgcctctcgctcgttctctggcacgccaagtggaaaaatgggaaacaaaattataaatatgccagcagcgcggatcggaacgcaatggttagtcattctgtgtgtagcgatggcagcgagcggtactaacttggacagtggaatatgcccggtggctggggactccggctgccgcggaaatcctccagaccaggcgcgctacgacaactaccgcatttacaacgtggagttcgagaaccaagagcagatagaacttttccagaagctggaggagcagagcgacagcctcacattcatcggccatgctcgcgaggttggccagaagttatccattctggtagcggcgcatcgcgtggcagatatcgctgatctgctgaagacctacaaggtcaagcatagagtgttgacctacaactttcaggagaagatcgaccgcaatctggccgaagttcaaccggaaagcattgatgcctctcagctcgactggcagcacttcttccacctgaagaccatctacgagtggctggacaaaatggtcgagaagtacccaaatcgagtgaccgtactggatatgggcagcagcacccagggcaacgcaattaagggcgttaagctgaccagcaatgctaataacaaggccatcttcattgagagtggaattcatgcgagggagtggatttccccagccgcggccacttatatcatcaaccagcttctaacctcccaggatcctaaggtgcaacaactggcccaggactacaactggattatcttcccttgtgtgaatcccgatggctataagtacacattcgagcacgaccgaatgtggcgcaagaaccgtcagctgtttggcacctgccgcggcgtggatctgaacaggaactaccccgaccactggaactcaacgggatccagcagcgatcccacccgctacgattttgcaggaccctccgctggaagcgaactggagaccaagcgcttgatagatttcattcgcgcaaatgcgggcaaagagcaaataaagacatacattgctcttcactcctactctcaaatgctaatgttcccatatggttacaccaaggagcgggtgtccaactacgatgacctgcaggagttcggcaagaaggcatcggcagcaatcaaagcggagaacggtagggattacgtgagtggtagtctgtttgagaccatctatccgtcgagcggcggcagcatggattgggcgcattcagaggcgggtattccgattgcctacaccttcgagctgcgtggtccgccagacagccaggacttgttcattctgcccgccgtggagatccagcccacggccagcgaagccttcactgccattcgtgccatcgtagaggcggcggccgagaagggctactacaagtaagcacaatgatattatgagcaagcattttgtacgttcaacgatatattactttatctttttaaaaataaacacacgtaaacgcgaaaggcaa

SEQ ID NO: 5352 - protein, 453 aa, DROSOPHILA
MGNKIINMPAARIGTQWLVILCVAMAASGTNLDSGICPVAGDSGCRGNPPDQARYDNYRIYNVEFENQEQIELFQKLEEQSDSLTFIGHAREVGQKLSILVAAHRVADIADLLKTYKVKHRVLTYNFQEKIDRNLAEVQPESIDASQLDWQHFFHLKTIYEWLDKMVEKYPNRVTVLDMGSSTQGNAIKGVKLTSNANNKAIFIESGIHAREWISPAAATYIINQLLTSQDPKVQQLAQDYNWIIFPCVNPDGYKYTFEHDRMWRKNRQLFGTCRGVDLNRNYPDHWNSTGSSSDPTRYDFAGPSAGSELETKRLIDFIRANAGKEQIKTYIALHSYSQMLMFPYGYTKERVSNYDDLQEFGKKASAAIKAENGRDYVSGSLFETIYPSSGGSMDWAHSEAGIPIAYTFELRGPPDSQDLFILPAVEIQPTASEAFTAIRAIVEAAAEKGYYK

SEQ ID NO: 5353 - DNA, 10359 bp, DROSOPHILA
tgattttgatacaaatactgacgggattttaccaacatcaggcgggtgctttggtacacggctgacgcagagtttcctaagctcctcttgcaggttcttcagatccaatggccatgtcagctgggtattatgattctcatttttgagcaaatctccaaggttctccagaggaatgctttctaagtgcttttgccaattccctggaagtttactccaatgatcgtctatgaagaagtcctataaataagaattttatactcatgaaagtcttacaaataaaaatcgcaataaaaaaaaggcgcaaagcaaaggaggcgaaaatacatgatcaacatgaggtatccaaggaacacacgtcgcagtaggaagcccaattctggttatatatggtgcccatggaaaaaagattcaggaggtgtaccaggaggtgtatcaataggtttacccacaacaaaacttctccagcattactcaacgtgcaatctcaatattcaatattaatttggatggaaacactataacttcattaagccgcacgaatattgtagacaacaaagctaacattttaacaaagctaacttaccagtacataggcatccaacagccattcatatttctttaacaattccaaacctctttcgagtttttctcttacaatcaacatgtttaacaaagaaataataaatattcgtacatcaaaacattactatcctatacgcgtatgtacatcgtttttcatagtcgagttttcaaccatgggcggagtccgcaatttcgatagtcgactacaaaagttaaaaatggtatgttgacaacaataaatttttcctcgatattattttaactcagtatattcaaaaatataaatatataaaaatatcaagttttaaattctttttggaattttgcggaacttgaaaacacggaataagttcacagtctcccgactattcgattggcattaaaatcagcggttcacccgtcatcgatgttcttgcagcccgctttcccacctctatcaccaacgaatttgcataaaaaactttcagcgagctaaaagcgcgcacggcgttaccgattctggtgcagttcgctagcttttccgcattatttcgtcctgtgaaatttagttgcccctggcatatgtaccgtgtccgcttaagagagctggtgaatacggaaaacgaagttccctattatcgacgacgagcgctcgagaagtcttttttgaactgcgaattcaagtgttttgtttgttgtccgcgtcgctcttcatgattatcatgtcttatttacccttacgaagggaaaaccgaaagtagaacccgcaagccgcagaaactgtaaattatgtaaaagtgtatggccaacaacaagtcgttatgtgcatcagtatgagtgcgtgcgttgagtgagcttatcagaaaagtttaatggaggctgcgccggtaatttctccatgtcaccaccccagtctgcagcaacaacaactgcacgcggcgtacaacaaaagcaactgtaaataaccgctgccctttgatgagcgccccattaaaaactgtaagtccgacgcacattgcacatcattgtcgcatcgttgtaatatttgcatgaacgtacacgtgtgcttccatacatatgtacgtacatcgctttgttgcactcaccttgccctcgtcatctcgctttctggccctgcgccaagaaattaaccccatcaagccgatggggtgtcagcaggtgcagttattcgtaccccagatcagggatgctaaggtttccgaaaactgattgttttcgttaagatcaaaatcgttgttttccatcttcttcgcatttcaagaatataaagaaatcaagtgtgcattacatttcagaacaagtacactaaaagaaattgtaacaagatataaagtaaaagtgcaatatttatttacacgaaaaagagaatatattgtaaaacgaatacataagtgtagttcagaatcgtcattcccaacttttgcataaatgataaaattacatagtatcaaattgaacctgtaaaactttcgtacaggtttgatacccaattagcattaagttcatactttgtggagtgtattcaattaccaaccatttgcaattaacaaccaatgcaaaccaaatccactgtaactcagtatttttgtaagttttgggacgtttaagagttcagagagaataagagaataagagtttataggaagcattcagaaaaacaaaaccaaaaaatttttctacattatatttgtttaaaattcctcatattgaaaaataataaatcctcacaaataagtgtttattcggaacgagcagaataaatctttgtatacttcaagtatacttcgacagtatagaatattttgaataatatacgtttttgattagaattcctcatatacagaaggataatacgtcctcacaaaaaagaattaaatttgagagcatgatgaagaaaacggactttacttaaagtaaccaatatcaaacgcacgaaaaattaacaattctaaggtgcctgttttaattttcattaacaggagaaccaataatgttaacaacgggaaactgcagccataatgatgatgacgggataaacaaataaatgctcaataacctaattgcgtggcaagtcatagaagcgaacgatgatggtctagtgccaaacgctgtgtaatagaccaaattgccactcggctaaaagggaaagccaaaagccttcagactggaggcctcactcacgctgaagcgcatctttgcccgcaaaattggctacaaggcgaagacgaagtcaattttagcggccatgcgcacgaaacacctgatcctgatactgatcggagtgataatcgccacgatcgtcttcatcgcatttggtccagccggagagccgaacgattcattcaagaacatcgttgtccagacgcaccagcagtttaaagagttccaggtgagttgactcacgtttgggggtcttgagtgccgggcgggcctctgatacaaaacactccgcgccccaagttatgctgaatgacttagataagggtattaaataacaattatctgttcgtatctggcgctggtgcgttgaaactgtcacagataaatcgggaaaactgaaaccccagtgcaccgtttgtcatttgttgtttctttgattcgaagcgcttgaacttatcgccggggtgtagctcgaaaaaaaatgaatgcgaatctaattgttttacaagcacgccagccatgattcatatgtagattccactatcagcagatagtcaagtgcctatgtacacagacagctaggacaggacttttctggcaattgcttttggcagcgtctggctattgacatcacacttggccttgaactgcgttccgccccccggcaacaaccactcgagtagcttattttccgctcactctgtgctcttggtcaaattaatgcgcgtccttcggggtgggcgggtcggttcgaaagctagatacgccaggctgtctggcacatttggccaaatcaaacagccggcagccaaatgaaagtcatcagcatcactcacataagcgtctggaaggcagagaggcaaaggggacgggtgttgaccagggtcgggttcatttcggaacacttttggccgtgctctggcaaacaaaaactcgaggccactgctggctgtgtttacgtttcgcctgccagagcgtttactgtttacactaattagattccggccggagtccggttgcacagcccgatgagctattgggtaacctgcggttaaccacggctccgagaccacgtcgctgaaggatttcttgcgtctagggaaaacttaatagattgcatagcaagatggttataaatcatcgctatgcatttcatgtttagctacgcaaagaaggtgttcttttcccatcacgtactcataaaggcaattttaatagtgcccaaacgccgagtctctgcttcaaagtttacaactggctgttatctcaacgaggtaaacagaaacctacgattttgctatcatgacaaactgagataatggaagcattaattagtaataccactgttttgatagggatcaacgtatcttctccacccgaaaaggcgtttcaacgcatatgaagttactttgtctgtaaactagttcccacaattgcatcaaaatctaaggcattgctcgttcgtttgttaaaatgcattctttacccaactggtttgtgcaccagtactgctacatacacaacgatatgtgtgtgaataaatttccacatcatactaatataggctagcatatagatttacaattaaagtgattgactgttcgactgccagcacttgatgcatgtcgaacacttccagtgagtgcacaatcatttctgtgactaagacatattcatagcacagctagggtgttttctattatgaactatatatttttaaagcgtgcctatgtataaataacaactccggagactacctaaaagtagtataaactttccatgcggaagtacgtgtatagctaaatcccacccttttggatcttattccgagggttcgcttcgtgggaatcaaacaggtgcgctgggattgaatacaacaattcgaatcaaaactgtgggtatacgaaactcatatataagtcgagcagaaatttatttagtcaattagccaattatggagtattgctgggaaataagctgaatgttttcttttttttttttctaatttcaaattataatgctgccccatttgtgacaatttgtgtcaactttcttaatggacgacactaatcaatgacttaaattacagcgaggagcgcgggctttatcaatgcgcttgcacagcgattactcgtattccatatttacctgtgtgaggagtaaacaggcgctattgattgcctatagccatcggttcaatgtcgcaccgccactcacatgcagagcaatgcaattaaactgtagctgaacgataacctatttaaattatccatatgaagcgctagaaacatatgaacgtcggaatgacctctcgacttttgattaacattaataagtccgtgggttaactgtaagtggatgtaaaataaagaagctaatgttttaatttttcaattaagcataattaagtatttttggggttattgtgggtatttaccttttacaaataggattagcaatgacgaaatcgtgaaatctttccgagtaatgcatcccagccccgaaatatttctccgaattcggcatcaattattctttctctatacatgattttcttttatatatgttctgaaatccatgcacgaaggcgcattcaaatttataaacctttcccccttacaaattattagtcactagtcacttgacaatattttattgccaaggtgggcttttataattgccgaatgagtcatggacaatgtatgttgtatgcgtattaagggtgccaatagataacaaggtaatttaaaaagagcaaggtgcgataagacttgaacccaaaatcatgccacttgtaaacttggtcagacaaaaaggaaaccagcgagtccagtccagtccagcacatggtcaaatatttaaattggcatcgtaatcagcgtggctcgattttatgattgctctggcccatcgccatcaccctttcgaatatcctggcactccccagcggccattaggcacatgcgaccgtttcggagtcacgcgccgtgccacatggacacacacaagtggacttcttcggacaaggtttaacagccgactttctggcgctgcgttgagtaagccaaaggaatttggttgggaatttcaagtggtgccgcctaggcgtagggaaaacgcgactgggttgggctctttcgaaaggggttcgtggttaatttgtgccttcaatttggaattcctagcttcgcatggcggtaacaaattcgttgaaggagatctttccatctttgtcctgatcaatgtcctggaacaactcgcgcaagtcctcttcggacatcttctcgcccaggttggtcatcaccattctgatctcgttaattgtaaagctgttcacttcgctgcgatcgaagattttgaaggcctgctttaggcacaccagactgttctgctcctccagccgtttgctcatcacgtatagaaagtccttgaactgcacctgcccaccgaagtcggcgttactttcgttggccaggtcgtagatctccgcctcggtgagactctctccaagggcccgcattactccgccgagctgttggacggaaacccatccggaccgttccttgtcatacaaactgaatgcttctcgaatttcttcaatctgggcctcggtcaaactgccgctcattgtttccaaagtgattttcttttttttttttttttttgtagtggactaatgtttcatgtgcttttgtcagtgtgaacataaagaatttaaactgaacacagacagaacgccgactttttgttggatagaaatcaagccagccttctatacgagtactcacatggaggctatcgcattgtcatcatgttgacgaactcctcgtaattcaagtgattgtcctgatccaagtcgtactcgcgtatcatttcttccaactcgtcgtcgctgagctttacgcccagcgcggtgaacacattttttagctcggtggtggtaatgtagccattgttatccttgtcgaaaattcggaaagcttcgcgcagctcgtcctcatggttggtgtcgcgcatcttgcgcagaatcacattgcagaactccggagccacgatggatccgtttccctccgaatccacctcattgatcatggactgaacctcggcgtcgttgggctggcgacccagggcgcgaatcaccaccgccatctctttagatgttatggcgccctcgttgtccttgtccaaaatacggaaagtgtcaaggatcaggactcgctcctcatgcgaaatatcctccatcttaactggtatattatagtttctcggaagagttgtatattgctctgtttatatgtaggtgtcaactgatgtttggatgaaacaaggtcctgacattgaactcagtgaaatgtgaaaaatggtaaaatgaacatcccccggtggcttcactgcgctgcacagtgcacaacaccgaatggcacaaaatcaatatgctcgttatataagcgcagtgccgcacggacagagttgattgattcgaatgtccttgggcgaggaggccttgcagctgatcggtttcaattgcgacccagcaacggacgtcagctagtatctttcgttgttcgttaacaaaacagaaggagagtgccgttcgaggaaagttaaggagtaagaatgtgtacaatcaccgtcattgttccaacgcacactcaagaaaaaaaaggctcatcttttcgctattcgaaatacaagaactcaacagaagtttgcaacgccaaaatatttgtgtagaatgaaaacaacattagtgaacttttatagttcccgagatctcgacgttcatacggacggacaggcagacggaaggacagacgggcttatccagatcgactagtgatctggatgaataactcctttagcttcacgagtaactggtataaaaatgtaaatgtaagattttgttcttgattgcttaaacttattcgtaagttttgctatacattaaataatctatctatgaatcagcataccatactattcatacttaacaagagtgttttgagtgtactgccatacaagtgtagtggttgctatcggcacagaaaggttgtcatgcgatttgggtttggcgcctagcctgcaactttggcggctgcctttttgccgcaggttaattccagtgcttctccccctcggccctttcacctgaccgcagtgggacacacctgacaccggtttttggctgccggaggagtggtagtgcccgggggggtgggcagagaatgcggcacgctttactctggccacagtctaagcaaataatagacaagaatttgacatcggcacgagagggttccattgtgcggctcatttgatttttggttgtgtttgggtatttgtttgggctagtttcggcgaaacagaggaagtgtgctagagggccataatggaaacatatctcacatgtgtgtttcggaattgttcctatgacgaggcaaattctggccatattttttgaccattaacgccgcctggcccgacataaataattttctaagagtggggttcgggaaccgtatgtcaaaacttaaataataaatctcttgtttatttcttggataaaccaaaaatattcatttattgcaaatttaattttttttcttgcaggaaaacctccgcgttggcttggaacgcaaaaagctcgaaatagacccaaagtatttgcttcttctgggcttcacctcgtcaaatgaagctacaggccaacagcagcagctggatcagcaaaatgtggtggacatcggttcaccaggtcagcaactgccaaagacagatttttcagcgccggctacaaaagcggaactggagctcagcgaactgcgaggtctgcggcgtccacaggatgctgttaccttcggtagtcaggcaggagatcaaaaggggcagcggaagcggatcacgacgccgtacaacggtacaaagagcaacttcacaatcgtcagctatgtgctggaggggcaggccgcatcggccatcctgctggcccagaatattgccgccaagcttcccagcgagtacctgctaatctacgatttgggcgtttccgaggagcaactacgggatttgggcgcctactgtaataacagccgatgctcggtgatcacctatgatctgtcggagtttccctccttcgtcgccgatcagcggacgcacgcctaccggcccattgtaattaaggacggtcttatgcgtgcccgatcggttctcttcttggaaaacagcatgcgcgtgcgcggaggttccgcccagctgcgaagtctgcagagcatcgttatgaatccaggagtgggaaaatctgcagtcaagtccgctggagtgctcggatggaacacagcgacggcggtatcctctctgacgcatccaaaaatgttcgactactttgagtcgaaagctgaggagtttaactttcttcggatggtcgacctggatgctgtcttcttctcggacagctccttggtggccgagaagatcatgcttccctggctgaagtgctgcctcaccctcgagtgcatcgatccgatcggtgagtcgggtgggatgggtggtggtggtggtggtggcgtcatagggatatgtaaaactgtcattagaaatgttcctcagtcactgcctgacgccaatataaatcaatcaaacgtacgttcaaacctccaacccccaagctctccttcggggctaggctcgtgtactaataactgtcatttgcacggcattccgttgatggcactcacatcggggaaatttatgtaattaccacctgaattgggattgatggcaaaagtgacattgcctttcttaacgaacaattcatttttattcgaccggcatttcccaaactaagtagtcaacaatactcactttttggctggttattacatataatgcttaccaagcataggtgaatttttaatagaaataagctttcatttccttgaattcatctgaaatgaactctgtgttcacttcctggcactcctggcgaattaaacacagagctcatttttaattgatgaatccaaagaaagaaaatgcttcttttccaatttcattcattttctcgcgcatgttatatgcagtcaaatgctcatttctgtatcttcattgattgactagattcagatactttatagtcgacaaattttcggttaaggatcaaaggtatttggaaatattccattcgttcgttgctcggcttcaaaaagtgtttgataacagcgtgatatcatttttgtcacatcgagtgccttgtaagcctttaataattctcgtgtgtagttttcaaatcgaaggggggatgtaaggttctcaagggtttcggaaatgattttggggtaacgagaatacaaatttacatctttgtgacttctgtgtttcgcttcgcaatcgctttgattgggcttagttatggagattaattcccttttttctgaaacaggtgcttttaactttcttttcttgagattttccatatagtattgtcgttgattcaaaaaatttcttttcattgtcatttccattagcaaaggtgatactttttcagtcctatacttttgcaacgaacagcaaatttcacactcgcattcagtctgtgtacctgcgtcagttttgggaacg

SEQ ID NO: 5354 - DNA, 1897 bp, DROSOPHILA
cccgctttcccacctctatcaccaacgaatttgcataaaaaactttcagcgagctaaaagcgcgcacggcgttaccgattctggtgcagttcgctagcttttccgcattatttcgtcctgtgaaatttagttgcccctggcatatgtaccgtgtccgcttaagagagctggtgaatacggaaaacgaagttccctattatcgacgacgagcgctcgagaagtcttttttgaactgcgaattcaagtgttttgtttgttgtccgcgtcgctcttcatgattatcatgtcttatttacccttacgaagggaaaaccgaaagtagaacccgcaagccgcagaaactgtaaattatgtaaaagtgtatggccaacaacaagtcgttatgtgcatcagtatgagtgcgtgcgttgagtgagcttatcagaaaagtttaatggaggctgcgccggtaatttctccatgtcaccaccccagtctgcagcaacaacaactgcacgcggcgtacaacaaaagcaactgtaaataaccgctgccctttgatgagcgccccattaaaaactgagaaccaataatgttaacaacgggaaactgcagccataatgatgatgacgggataaacaaataaatgctcaataacctaattgcgtggcaagtcatagaagcgaacgatgatggtctagtgccaaacgctgtgtaatagaccaaattgccactcggctaaaagggaaagccaaaagccttcagactggaggcctcactcacgctgaagcgcatctttgcccgcaaaattggctacaaggcgaagacgaagtcaattttagcggccatgcgcacgaaacacctgatcctgatactgatcggagtgataatcgccacgatcgtcttcatcgcatttggtccagccggagagccgaacgattcattcaagaacatcgttgtccagacgcaccagcagtttaaagagttccaggaaaacctccgcgttggcttggaacgcaaaaagctcgaaatagacccaaagtatttgcttcttctgggcttcacctcgtcaaatgaagctacaggccaacagcagcagctggatcagcaaaatgtggtggacatcggttcaccaggtcagcaactgccaaagacagatttttcagcgccggctacaaaagcggaactggagctcagcgaactgcgaggtctgcggcgtccacaggatgctgttaccttcggtagtcaggcaggagatcaaaaggggcagcggaagcggatcacgacgccgtacaacggtacaaagagcaacttcacaatcgtcagctatgtgctggaggggcaggccgcatcggccatcctgctggcccagaatattgccgccaagcttcccagcgagtacctgctaatctacgatttgggcgtttccgaggagcaactacgggatttgggcgcctactgtaataacagccgatgctcggtgatcacctatgatctgtcggagtttccctccttcgtcgccgatcagcggacgcacgcctaccggcccattgtaattaaggacggtcttatgcgtgcccgatcggttctcttcttggaaaacagcatgcgcgtgcgcggaggttccgcccagctgcgaagtctgcagagcatcgttatgaatccaggagtgggaaaatctgcagtcaagtccgctggagtgctcggatggaacacagcgacggcggtatcctctctgacgcatccaaaaatgttcgactactttgagtcgaaagctgaggagtttaactttcttcggatggtcgacctggatgctgtcttcttctcggacagctccttggtggccgagaagatcatgcttccctggctgaagtgctgcctcaccctcgagtgcatcgatccgatcgtcactgcctga

SEQ ID NO: 5355 - protein, 356 aa, DROSOPHILA
MRTKHLILILIGVIIATIVFIAFGPAGEPNDSFKNIVVQTHQQFKEFQENLRVGLERKKLEIDPKYLLLLGFTSSNEATGQQQQLDQQNVVDIGSPGQQLPKTDFSAPATKAELELSELRGLRRPQDAVTFGSQAGDQKGQRKRITTPYNGTKSNFTIVSYVLEGQAASAILLAQNIAAKLPSEYLLIYDLGVSEEQLRDLGAYCNNSRCSVITYDLSEFPSFVADQRTHAYRPIVIKDGLMRARSVLFLENSMRVRGGSAQLRSLQSIVMNPGVGKSAVKSAGVLGWNTATAVSSLTHPKMFDYFESKAEEFNFLRMVDLDAVFFSDSSLVAEKIMLPWLKCCLTLECIDPIVTA

SEQ ID NO: 5356 - DNA, 9864 bp, DROSOPHILA
ttgtattgctgccaaaatactgccaatcatttcggtcttaagttatgtacatacgtatgaactttgtttgcccacggaaaagcgttgaaaaagaaagtcatgtagcttgttaatatgcaagtcattagtattaaacactggacgcgttgctctaaaaattgtttgggtactttcttaaaaattaaatggctgattagttacttttcgaccaatatcagcaagacatttggctatttaataatgattaattgcccgattaacacacagttcaagccattgaagattctgactcgatctccttaccctacaaatttccttggccatcattatctcttctattttggcgttgatttttttttatcagcgtatagacgtagtagctctttaaataattatctttagaccatatactaaactacttttcgattcatgacttacggtgggtaaagttgggaagctcccatccctcagacgtgcaagtaatggccagagataaccgtttggtgcgatgaaaatatttagttaatgatggtgcgcaatctgcatcgcccactatacacaacacagcaaccacccacccactgactgatgacagacggggcgtggcaggtgtgataagcggagcaattgtgatggacagcgatctgtaaattgacaggcggccaagggcggggaagggtgaaatgtcaagcagatattccggtgggtagttgtgggccataaataacaatcgcgagagctgcgagctgcggctccattcattgtgggtaagcgaacaccgggccgtaaatacttccacttgcctgtcgatacgataacattgcgattaggcttatcaccactactcgctcgttctaacgcctttcgccatccttcgacgtcgagcaagcgcgcagtcgcagcgggcagagcagtgcggcaaagcgacaaagcggcgagcggcgaaaccgtcaacggcttcttagctaagttcgttcacagtcgacttcagtctgaggctgttgatcgccgcttgcggacgtggtcgctcaatcctgctcgattcataaccgattcaaaaccgatcccatccgaaacgacgtgcgttccaatttttttttttttgcagttgttaaatgttttaatgtgagttacgagtgcgcgaatgcaatggaacaataaaagcaataacgatccgaaagcttcgccagagacaataaaagcaatatcaaaacactgatgtctatattatgaaaagatcttacgaaacaataaaatccttttaaaggccaatgcagcaaaataggataaagttaccagagaaagagcttcctttttttatacagtttgaaaatcaatttgcaacacagaaaatcaattaaaactattaataatctgaatgagatatatttgcgatattgttggtttaattaattatttcgcagtggcaattggaaatttcccttaaatatagccaatttgtgggcttattgaactccagacgaggatcagtacttttttgcttttattgtctcttttgtctcttattggaaaaaaataaacaaaatttacacgtaatatacatatatgtgcatatatttttcgttaaattaaaagaaagttgagtttatgcatcttatacatatgcacattcctacaacgtaatgatttttaaagtaaatttaatatttttcttcgatttcaagtgacgcgtaacggatgtgaagcgatctccgggttcccaacatgacggataaaaaaaatggtattgttaattactaaaaataaccacagatgcataattatagtttttacagaggggtggcgattatacagactactgaaccgagatttatggcccatatttttgtgaggctcgagttttactcattgtttcgatttctagacatgctatataagccacacaaaatacacctcaccatagattgcaatagtgttcttatttagtttattgcacctatttacttcgatactcctcacccttcagttttaatcagtggccgttgggtaacgtgcaagttataagaattggcggaatacatctccacttgccagttatgactcaacggacgaacgattttcagaactccaggttcgcaactacgataatcggttctcttggccgcgtgtgcagtttgcaaatctaatcgctctgataagggactttgagtgactggccccgggttttagccacttgagcggctccaacacaagcaacgagcaggtccaaatgtggatttactttcgacggtccccaaaaaagagctgccaaacttggtcaattggcacggaccaaccttgcctatatacttgcctattcaaatctcaaaaaataaataactcgacttgcctacaccgatgcaaattttccaatttgtacaactgtgtgcgcctgcatttcaatgtcagacgccggcttcatttgcatattcgtaggcaaactgccaatgcgggtgtttaaaacaaatgcggctaaaattgcgattacgatttcgtttggtataccaaacacacacacacacacaccacttgctgacaaatcgctgggagagcctgtagtaaatgcaaccgcttgcaattagtgagtgagtagttcgcctggaatttgccatttcgtatttggttgctccatgcggagcagaacccggtcgaattggatggggcggtgccgatatggggtcgtaattgccgcttcgaacggaacaagacaatcaaagttttgctcactaccgaaaacatcgaacttatctatctgacaacttccattgaataattctgtttctttgccgccgtaaaaagcaattgtaattaaaactgggccaaagcgccagctcctgcggcgcttatcatttcgctggaccaataaacatcgcgctcgttctaatcgcttgtaaatcagttggaatgcttttagaccctcttcatggcgattatgtatgttattgggtaggtgtgaaatttacaacctatttgatggccaatcgatgaacaaaccgacgattatgcgatatcaatgccgatatgcaatgtcattaaagaatcactcactactatatatagccaatccaattatgttcatccgttctcgaattccagaagaatttctctgcatatcacagttagcgatagttcaacgcacatcctaaccacctatcaatcaatcaatcaatcaatcaatctataggtcccagggctcttagagcttaagtaaagaaatcttgagaaagtgaaattgagaacactttcacagcactttccctccgaaactttacaactgcactcagggcataccaggcttatctaattatttataggtaaagccctcagtgtactcatttttcaattagcttgttgaaaattacggagtatcagcgactccgattggtctacggcttttatggagcccaatcgagtggattgagtggagatccgtctggagatcaattttccgtccttcggtgacacttggccagttccctggcactaaacactacgctattagcggctgcaaaatgaatgaatgaatgagtggttttgagtgtgaatgtgagtggcaggcctggtctaccaacttcaaacggccaccgaagcgggtcaatgctgtacacgtctggtacttgtatattttgtatatctctgtttccctgcgataaggcgctttatgttaatggatgtttgatgtgaagtgtagtgcgtgcaatagcattgtttccacggtttatggagccatgtgatggctgctatacattactgcctcaaatagcggtcataaacgctgataaagcatcgatggattagctgcgaaccgattctggatcgcagttagataaggcccattcattggtcgccattcgggactttcgcagttcgcagttcgcttcctgaatcatcaaccatcgaacagatacagatccagttgtccgaacatggccatgaccatgactagctgcactaggcaccagctgcaattaccattcgatccacatggacatgaccattaaagctccagcagacatttagacgcagcattgtcagtaatcagcatgttgtttatggcgtggaaagccatactcccagccagtttgtcaaagtgtggaggcgatcgccgagagagctatcttccctagctgggttatctgacgcccgccactggcgtaaacctcgtaaaagctcggggcctaaggctggataatttatgccgggccaccgaattcacacgcccgccgttgaagtaaaggcccgttcaaatatagaacagtccttatctgtggcggaggtgtcaagcacaaggccacaagtctcggtttcggtttctgatgaaatgtcgccgatcctcagatcactaacgaatctcagtggccatatgaaatggagctgccggcggagcaagtacccctgctgggtgggctctccaagttttcgattattgcatttcgaattactaacctggatccttctttcgtccgcagaaatacagccagcggctgagcctgtggctgaaccagagccttctcccgcggccgaaatagctcctgcaagtcccgatggctccggtccaagtgctgccgctgcagaagaagtcaccccgagtgttgcgaccgttgaagacactaccccgattgcagcccctgcagagagtcaaccgtccggcgagagcaacggcacggcggaggccaagaagctgcccgagatcgctaaaaagaatggcaaggagcccgaccagaatgacaaggagcccgaccagaatggcaaggaactggcagagaccaatgacttcaagaacgtctccgagactgagggtcagcagaaggtaatcgtcattggtgctctttaacaagtattgaagcaaacactgtacttaccttttcattgacacccacagaaactgccctaccccaagtccgtgttcttcatcatcagtaacgaattctgcgaacgtttcaactattacggcatgaggagtaagttaatcgcaaagtatcttacaatgaaatctctgctaatcgctcgtactccattcagctgttttggttctgtatctgagtcgagttctgggctattctgatgataccgccaccgtggtcttccatatcttcaccatgttcgtgtacttcctgtgcgtttttggagccatcatttcggactcttggctgggaaaattcaagactatcctgtatttatcgctggtttatatatgcggatcggtgctgctgaccctaggtgccattggaccacttaacctgcccatggaaacgtttacgatgttgggcctggcgttaattgcccttggttcaggcggcattaagccgtgtgtgtcggcattcggtggcgatcagtttaaggtgccggagcaggtgaagcagatcacttcgttcttctcgctcttttacttttcgatcaatgccggatcgctgatctccaccacggtgactccaatattgcgcgaggacgtgtcctgctttgacgacattaactgctatccattggcctttggagtaccggccgtacttatgattgtgtcggtgatcatcttcgttttgggacgatccctgtacaagatgaagccaccggccggaaatatggtggtgcttgtgagcagtaccatctggacagccctgaccaccaaatgtaaggagaaaaagaccaatccgcgggagcactggctggactatgccgataaaaagtacgaccgccagttgattgacgatgtaaaggtccttatgcgagtcctcttcctctacctgccacttccggtcttctgggcactgtttgatcagcagggctcccgttggaccttccaggccacccgaatggacggcgacatgggctcctgggacatcaagcccgaccagttgcaagtgctcaatcctctgctcatcctaatctttataccgttgtacgatgtggccctctatccggccctgaaactagtgggtatccgacgaccgctgcagaaactcaccatgggcggcatccttgcgggcattgctttcatcatttccggagtggtggagcttagcttggaggtgagtaattgttcgaaaatgcttgttggcttgggacttaaagctctgaaagtatttaattgggaagttttaaagtatttttaactgctgtgcttatatatattgtattgtactgtacctgcacctgcactttccgtttttctttcgttgcacgccttgctgtcgttagaaaacctatcccgacctgccctacagccagaacatccaactgcgcatcttcaacgcggacaactgcgactacttcttcacttcgaacattccgggagcggaaaatgtgacggtgacctcgttgaatgcctataccaacaaggatatttacgcacccggttcgctggacgtggagttctcgctcagcagtgcaagtgaagcttgtaccattagcgctgacaaaatacctaaagtccttactgataatacggcttggtctctgttcctcaatccgctaaatggtagtggatactactgggaggaggattttgtggacaagccgagccagagccatccgctgatccgaaacgtcgctaatgtgccgcaggagctgtcaattcgttgggaaaaggctagcacgggagaggtggtctatgacgacctggctagcaaaacgttgctcacgcgtgtgaattcggcggagtatgtagtcatggtgggcgaaaggaacgtcggaacattcgatgttcacaccggcggcgtgtacacactcctgattaaagataacaacaacatttacgaggccaatttggaggaagtgacgagccccaactcggtaaagatcctttggctggtgccgcagtacgtggtgatgaccctcggcgaggtgatgttctcggtgacgggactggagttctcatacgcccaggcaccacccagcatgaagagtgtcctgcaggcctgttggctgctaacggtggccttcggcaacgtcattgtggtcgtcatcgccgaggccgccttattcgaatcgcaggccagcgagttcttcctgttcgccggcctcatgttcgccgacatgttgatcttcatggtgatggcctactactatgtgcccaacgatccgaacaaggtggaggaggcccagcccctgacggcgggtgatgccaaaacagagattcccgctctcgaaggcggagtcgagaacaagggcaaggacatcaacgagtagacctcaaaccgattcgtcctgcttgctcccgcgttgtgtattatatatatatatatttgtacttgtagatgtgtatatgtatgtaaatccttagtggcctttgtccatttccaagctaagtgtaagtgaagctgcgaccgggcattgttgcatatgaaaagacatccaactagttaatctaataaaagaaaattaataatataatccgtcgttgttactattcttgttgtctctctatctgctttaatactcttaattgtttcttttcacctatgacctggattttactcagtatgatagtcttatacgatatcattccggagatttctggtattgctccgatctaatatattagtaccagcttgcacgtatatcttccacccttgcagcacacttacccattgatcccgagcagtggtaatacccagctacgcgtcttcagcggtattcccgactgcgattatcgctttagtacgaacctcggagcccgggagagcttcaccttaagggggctggacttctactattcgggtagcgtggccacgaacaccgacggcatcttccagttaacatacaccgtggaaagtttaactgaaggtatgttaccacgttatcgcgatcctcctattcaagagaacttgttgatgtaagaactcgtgaatatgtttaaagcccaccatcctctttggagcgttaagctgtcaacacaaatagaatcacttcagtggtcacaaggttttcggatgtttgagagtatcttagaatggctgataagccattagtagtaattactagtaacttttttgggtagtattttgaattgggtatgggtagtatagttgaaatgggtattctaccacaatttgtactttattctgaatggtgtaccccttaggttgcgcaatcctggagggcggaacacagcagttgtatgaggccaccgcccactcactgttcctgcgaccttcgcacgccatcactaagttttggtacgaggacgaggtgcagaagtcgaatcgctcgtgggcttttgtgcgaaacttggcgaatctcttggccaccacgcgtgtcgtttggcgggaggattcaggggatacggtggccctggatttgcccgcccgcaatcatgatctctacgagctaagtacgggcggttacaacgttcaggtggcggatcacaatcttaccagcatagagttacgcgctgggggcgtttacgccctgctgatcggccagagtcacggaacattcgtatcgcgaatcatagaggtaaccagccccaattcgatgcacatgctctggctggtgccgcagtacgtggtaatgaccctcggtgaggtgatgttctcggtgacgggactggagttctcctattcccagtcgccgcccagcatgaaaagtgtcctgcaggcctgctggctgctaacagtggccttcggcaacgttatcgtcgtggttgtggcggaactcaagttcttcgactcgcaagccagcgagttcttcctgttcgctggcctcatgtttgtcgacatgctggtcttcatgttcgtggcctactactataagccatatgatgaggtggctgctctggcggagagggtaagggccagacgggaacggaaatggcaggatctcgaccgattcaagagggactaggaatacggatgcctgattgtcatttgaatctgtccgcttattatatccttatgtgcagttcttttacgattcgaaataaatatcccccaaatatggcagaacaaagactttttaatatccgccatcatcctttgaattgttttaatacgctaagttgagtgttaaataagttatattaaatgttactgaccattgcctttacatttatccagcgctcaacttgtttattaccgccagtggactctgcacttagtttatcattaaaatataagtccactgcacttagtatatcaataaaatataagtctactgcacttagtatatcattaaaatataaaatgtaggtttatattagtataactgtaacgaatattcaagctcgcgcggagttgccagatcacaacttaacagcgtgctgttatgcgcatgttgtcacctgacattccgccttttttagtaccttttgcgctgacatttggtcgagaaaaatataagaagaggaagagttgaaaatcatatgacttgtcgatcgatagagaaaaaaggttgaattttcaccgtcgctccgtatcgaactgcacgcccttcgccacacaattcgcgcaactttcggtcgagcgagagcagtcccatagaaaggaatccagcgcaattcgccacctcttcaacttccagtcagctcctctgcgtgtgtgtgtgtgcgtgtgtcatcaagatgaacagctcgggctttatgtttaacatcgataatggatatctggagggtctgtgccgcggcttcaagtgcggcatcctgaagcaggctgactatctcaacctggtgcagtgcgagaccttggagggtaagtagtagagccatcgcaagcgtaaaccgaaaaccccattttcccacacgcccctgggtcacatgaccagcgataacagagtggtgcgtgtgtgtatatatatacatgtacggctgttaatgtatctttgcgccggtgtgtgtaagcttgtcttgtgatttgttgacgtttttcaatt

SEQ ID NO: 5357 - DNA, 3560 bp, DROSOPHILA
gttgatcgccgcttgcggacgtggtcgctcaatcctgctcgattcataaccgattcaaaaccgatcccatccgaaacgacgtgcgttccaatttttttttttttgcagttgttaaatgttttaattgacgcgtaacggatgtgaagcgatctccgggttcccaacatgacggataaaaaaaatgaaatacagccagcggctgagcctgtggctgaaccagagccttctcccgcggccgaaatagctcctgcaagtcccgatggctccggtccaagtgctgccgctgcagaagaagtcaccccgagtgttgcgaccgttgaagacactaccccgattgcagcccctgcagagagtcaaccgtccggcgagagcaacggcacggcggaggccaagaagctgcccgagatcgctaaaaagaatggcaaggagcccgaccagaatgacaaggagcccgaccagaatggcaaggaactggcagagaccaatgacttcaagaacgtctccgagactgagggtcagcagaagaaactgccctaccccaagtccgtgttcttcatcatcagtaacgaattctgcgaacgtttcaactattacggcatgaggactgttttggttctgtatctgagtcgagttctgggctattctgatgataccgccaccgtggtcttccatatcttcaccatgttcgtgtacttcctgtgcgtttttggagccatcatttcggactcttggctgggaaaattcaagactatcctgtatttatcgctggtttatatatgcggatcggtgctgctgaccctaggtgccattggaccacttaacctgcccatggaaacgtttacgatgttgggcctggcgttaattgcccttggttcaggcggcattaagccgtgtgtgtcggcattcggtggcgatcagtttaaggtgccggagcaggtgaagcagatcacttcgttcttctcgctcttttacttttcgatcaatgccggatcgctgatctccaccacggtgactccaatattgcgcgaggacgtgtcctgctttgacgacattaactgctatccattggcctttggagtaccggccgtacttatgattgtgtcggtgatcatcttcgttttgggacgatccctgtacaagatgaagccaccggccggaaatatggtggtgcttgtgagcagtaccatctggacagccctgaccaccaaatgtaaggagaaaaagaccaatccgcgggagcactggctggactatgccgataaaaagtacgaccgccagttgattgacgatgtaaaggtccttatgcgagtcctcttcctctacctgccacttccggtcttctgggcactgtttgatcagcagggctcccgttggaccttccaggccacccgaatggacggcgacatgggctcctgggacatcaagcccgaccagttgcaagtgctcaatcctctgctcatcctaatctttataccgttgtacgatgtggccctctatccggccctgaaactagtgggtatccgacgaccgctgcagaaactcaccatgggcggcatccttgcgggcattgctttcatcatttccggagtggtggagcttagcttggagaaaacctatcccgacctgccctacagccagaacatccaactgcgcatcttcaacgcggacaactgcgactacttcttcacttcgaacattccgggagcggaaaatgtgacggtgacctcgttgaatgcctataccaacaaggatatttacgcacccggttcgctggacgtggagttctcgctcagcagtgcaagtgaagcttgtaccattagcgctgacaaaatacctaaagtccttactgataatacggcttggtctctgttcctcaatccgctaaatggtagtggatactactgggaggaggattttgtggacaagccgagccagagccatccgctgatccgaaacgtcgctaatgtgccgcaggagctgtcaattcgttgggaaaaggctagcacgggagaggtggtctatgacgacctggctagcaaaacgttgctcacgcgtgtgaattcggcggagtatgtagtcatggtgggcgaaaggaacgtcggaacattcgatgttcacaccggcggcgtgtacacactcctgattaaagataacaacaacatttacgaggccaatttggaggaagtgacgagccccaactcggtaaagatcctttggctggtgccgcagtacgtggtgatgaccctcggcgaggtgatgttctcggtgacgggactggagttctcatacgcccaggcaccacccagcatgaagagtgtcctgcaggcctgttggctgctaacggtggccttcggcaacgtcattgtggtcgtcatcgccgaggccgccttattcgaatcgcaggccagcgagttcttcctgttcgccggcctcatgttcgccgacatgttgatcttcatggtgatggcctactactatgtgcccaacgatccgaacaaggtggaggaggcccagcccctgacggcgggtgatgccaaaacagagattcccgctctcgaaggcggagtcgagaacaagggcaaggacatcaacgatggtaatacccagctacgcgtcttcagcggtattcccgactgcgattatcgctttagtacgaacctcggagcccgggagagcttcaccttaagggggctggacttctactattcgggtagcgtggccacgaacaccgacggcatcttccagttaacatacaccgtggaaagtttaactgaaggttgcgcaatcctggagggcggaacacagcagttgtatgaggccaccgcccactcactgttcctgcgaccttcgcacgccatcactaagttttggtacgaggacgaggtgcagaagtcgaatcgctcgtgggcttttgtgcgaaacttggcgaatctcttggccaccacgcgtgtcgtttggcgggaggattcaggggatacggtggccctggatttgcccgcccgcaatcatgatctctacgagctaagtacgggcggttacaacgttcaggtggcggatcacaatcttaccagcatagagttacgcgctgggggcgtttacgccctgctgatcggccagagtcacggaacattcgtatcgcgaatcatagaggtaaccagccccaattcgatgcacatgctctggctggtgccgcagtacgtggtaatgaccctcggtgaggtgatgttctcggtgacgggactggagttctcctattcccagtcgccgcccagcatgaaaagtgtcctgcaggcctgctggctgctaacagtggccttcggcaacgttatcgtcgtggttgtggcggaactcaagttcttcgactcgcaagccagcgagttcttcctgttcgctggcctcatgtttgtcgacatgctggtcttcatgttcgtggcctactactataagccatatgatgaggtggctgctctggcggagagggtaagggccagacgggaacggaaatggcaggatctcgaccgattcaagagggactaggaatacggatgcctgattgtcat

SEQ ID NO: 5358 - protein, 1123 aa, DROSOPHILA
MTDKKNEIQPAAEPVAEPEPSPAAEIAPASPDGSGPSAAAAEEVTPSVATVEDTTPIAAPAESQPSGESNGTAEAKKLPEIAKKNGKEPDQNDKEPDQNGKELAETNDFKNVSETEGQQKKLPYPKSVFFIISNEFCERFNYYGMRTVLVLYLSRVLGYSDDTATVVFHIFTMFVYFLCVFGAIISDSWLGKFKTILYLSLVYICGSVLLTLGAIGPLNLPMETFTMLGLALIALGSGGIKPCVSAFGGDQFKVPEQVKQITSFFSLFYFSINAGSLISTTVTPILREDVSCFDDINCYPLAFGVPAVLMIVSVIIFVLGRSLYKMKPPAGNMVVLVSSTIWTALTTKCKEKKTNPREHWLDYADKKYDRQLIDDVKVLMRVLFLYLPLPVFWALFDQQGSRWTFQATRMDGDMGSWDIKPDQLQVLNPLLILIFIPLYDVALYPALKLVGIRRPLQKLTMGGILAGIAFIISGVVELSLEKTYPDLPYSQNIQLRIFNADNCDYFFTSNIPGAENVTVTSLNAYTNKDIYAPGSLDVEFSLSSASEACTISADKIPKVLTDNTAWSLFLNPLNGSGYYWEEDFVDKPSQSHPLIRNVANVPQELSIRWEKASTGEVVYDDLASKTLLTRVNSAEYVVMVGERNVGTFDVHTGGVYTLLIKDNNNIYEANLEEVTSPNSVKILWLVPQYVVMTLGEVMFSVTGLEFSYAQAPPSMKSVLQACWLLTVAFGNVIVVVIAEAALFESQASEFFLFAGLMFADMLIFMVMAYYYVPNDPNKVEEAQPLTAGDAKTEIPALEGGVENKGKDINDGNTQLRVFSGIPDCDYRFSTNLGARESFTLRGLDFYYSGSVATNTDGIFQLTYTVESLTEGCAILEGGTQQLYEATAHSLFLRPSHAITKFWYEDEVQKSNRSWAFVRNLANLLATTRVVWREDSGDTVALDLPARNHDLYELSTGGYNVQVADHNLTSIELRAGGVYALLIGQSHGTFVSRIIEVTSPNSMHMLWLVPQYVVMTLGEVMFSVTGLEFSYSQSPPSMKSVLQACWLLTVAFGNVIVVVVAELKFFDSQASEFFLFAGLMFVDMLVFMFVAYYYKPYDEVAALAERVRARRERKWQDLDRFKRD

SEQ ID NO: 5359 - DNA, 7396 bp, DROSOPHILA
ccaagataacgaatgactcttcgtccgacatgtctccgttgtcgcggtagcaatggcgggtattaataatcagattttacgactgtgaacgcaggtgagggaattcccctctttcgaaaactagacggcaaagtattagccaaatcgattaatttgatatcggcaatagtaaggataaatgtataataaatgagttttagggcaatgattcattaggcgtgggaattacatcgacgcgtcacaatggaataagcaattgtcatgtttattgcatatataccttatatactactgcgttccttatctcgttttgctttgctgacaagctttaaggaaataaaattgttttcggagtaatatttacttttaactaatttaccaaacaacttagaccagtgtgaccgcaatcgtttcaaatgtgcctttttttgtgtcattgattgtcatattgtcataatcggaaatgttatcgacaatcggcgagctcgtctatctaaatttaaaagcagctaatttcaataaaactgattacacgcccaaaactcgtgcatatgaagtgcagtttgcactgcaagggcggtggaaagtcccggcatcatttattcaagcccagtgacgtgcatcccaatttaccttcctttgttgctcagctgagattaatgggcgcgtcctaaaggcctgagcctgacaaaccagttgccagcgaaattacaccgaaatgtaattgccaaaactcgcaaattctaatggacggcgcagtgcgttctgaacccgccaaaccggattcagtacctccattgttcggctcaactctgtagatgtgggttaataaggctttcgcgtgttaaatataggtgtgagtggagctcgcgacaaggaactggtggctggccgagatgcgactttcgtattaccataaccaaccggttcctggctatgtgcacagaccgcatccccatcctcatttccatcccaatccacacattttagaattaatacgttcgtaacaatgataatcatcatgcggtttattactcaagaatctctatgtgatcttacgactaatgcacgcgaataaataaaattaaaaaaacttaaacgaatacgatacgaaattccattaaagctcaagtgcattcaagaaaactcctcaaacggctacaactagaagactcacacgttcactctcgcactctatgatgcaggatctcctcatctgctctatcacattcacacaaggacttaggtctaggcctgcggatcctctgaccgcgatcttacgcctgttgctggcggaacagacgcctctgcgtctggtggggtggctggaggtcgctctgcaggatagaggcgaagtgctgctgctttaaggagctgattgtggcgatcttgcggtgcctgttgggctgagcggcggccagaccaagatgaaagtagggcaggtcttcgtcccgcggcagtggcatcatcttgtcctcctccaccggggagccatcgggtcgcacccggatcaccaaaggtccggtgaggaatcttttggacggttctgaagtcagtgcggcggccattgggagctcactgctggactgcggcccgtagccgtaggccttgtccatgtccatggcgtatttgtgcttctgctcgccgctctcgaagattggattggtggcggagccggagctctggatggggtgggcatgggatgctccgtgcggaagttgctggcgcgttaggatgatcagagaggacgcaggaggagttggcaggggctgttggagcggctgcctcgttgtcaccaggctggctccgctcggatggtcccccataatcgatgaccagactgcggaagaaaagagcgattagatcgacaccgagatttagagctcacgtcgagcacgtcgcgactgcgcactgcggaagttctgacgcggaaatcaatcattctcccacgcagatagaggcacttactcagctcgttggcatcgcgctgatacggatctagtgcctccagctgtacgtcggagagcgtctgcagcttggcggacccgtaaccgagcaggttgtgcttgcactggttcactgggaggcctccgacggcggctgttgacttgcagtgcacgcttaccaattgagcgaatgttgagtagaggtgggacatctgcaaagtaacaaaattggtggttattttaatggcgtcttgtgtttaagaatcaagttatagaaattagaaagcagatcatcgcttctctgttcaccagccgaatatggtattgatttgtcataaacgaaaatcggagaacatatgtcggtgatattagaaaaaaaaagaaaaaagaaagttcgaagcaatcatacttcgaccaggtctcttgggtaacgcagggcagaggtggagctgaagcctggtgctctcaatggggggatttcgcaaggtgcgtgtgtgtcagccgggagatgattgcactttcgttgcacaaacgaaatgcatttcgacagcgcggcccgcgggttgagcaactgcctcccagggcgagattggatggctgccatctggttcatgtgccccagttcggatgggctgggtatgagtatgggtttacggttcagcggccaaagcaacagctcattgtctattctccgtggccagcgaagcgtcgaatggacttttaattagcgccgaatgttctactgcggtgacacatctgcatctgagatttgtgggatttctctggtcgtcggtgacgtcaagtggatcgcttcagctccgatgctaatttagtggtggtgatacagagcagaagctccctgaaatttccgaatccggcattggtcacgacttagcacctctcccgacagacagccaaacaatcgaagagtcgacgagcaaacagcagaacaaagaaataaaaagaaatggggaactgggttacttcactaggggatccagtatcgagtctgtagcctccttctagatatatgtatatatatatatatatgtatttgtatacacccttgatctgcttcaaaatctagcaagagcttcatttgcattggctctgctttgggttttacaattttacgccgtttgcataatgcattggatatatcggatcggcggactcggaggggccaaagttggagagttgggttgttggcgggttggctcacattaccaattaccgttacccactcagtggggccacacaaacgtgtgcaaactgcgaattgcagtggataccatcgcaccacctcagcacccccctgggtgtgcatttgctcagatgtgtacttgagtggggcagcgattaattgaacgaatcggttcctttgtgcccacccctccgccagtggaagccactctgcgtcaggagcacgttatctgattcgaataactcggtcgggattttatggtccaggccctggcacaattaaatatataacccagtcaaaattgcaaattcagcaaaacagcaatttatttatggcttagtgcgcaaatattccaaaaagcctttgcgggagttgtcaaagtcacgtacttaattcgcttatataatatacgctcgtttttataaaaatatgtttactcgagatcgtcgcggacaggttgtaactcattagccttccagcgaagtgagctaagctaagttgagctgagctggcatcgcctggtttgtccacaagtctagcctatagacagactgatcttggcccgagccatctgtatctgtatctcaaacttccttgtggctatgcgagatactcagtcgacgcacaacccccgagaagcgagacccagagatggccaaaagcggtctcgtgggtctgcagacgcgactgcttcccgggccgcaagtggtggtggtaaacccctggcccataccacatgccatccccagcggattggcggtcaataacctgttgatatgcgcaggttacattatgaaacatcgaaatggccaaccacagagaccaacgcacagacagccacgaaaatgaaaaatttcataacagacaaaataaaaagctaaaagacgaagtaatgatcgaagttcgatcgggtatcggatgggaaaagggttccattactacacacatgcttgtgtatcccagcatattttacgtaaaaacaaaacggtaatgcgaacataacttatttattggggcccggaccgcaaaccggccaaacgcgtttgcacccataaaaacataagggcaacaaaaaaattgttaagctgttgtttatttttgcaatcgaaaatcgaaagcgctcaaatagctgcgatcactcgggagcagggtaaagtcgcctcgaaacaggaagctgaagcatcttctataaatacactcaaagcgatcattccgaggcgagtctggttagaaatttacatggactgcaaaaaggtatagccccacaaactgcgtctccacatcgctgcgtttcggcagctaattgccttttagaaattattttcccatttcgagaaactcgtgtgggatgccggatgcggctttcaatcacttctggcccgggatcggattgggtcacattgtctgcgggctctattgtctcgatccgcggatttaaggcgcagttcgcgtgcttagcggtcagaaaggcagagattcggttcggattgatgcgctggcagcagggcacaaagatctaatgactggcaaatcgctacaaataaattaaagtccggcggctaattaatgagcggactgaagccactttggcggagttcattaaccaaaaaacagcagataaacaaaaacggcaaagaaaattgccacagagttgtcacgctttgttgcacaaacatttgtgcagaaaagtgaaaagcttttagccattattaagtttttcctcagctcgctggcagcacttgcgaatgtaaattgaaactgatgttcctcataaatgaaaattaatgtttgctctacgctccaccgaactcgcttgtttgggggattggctggctaatcgcggctagatcccaggcggtataaccttttcgcttcatcagttgtgaaaccagatggctggtgttttggcaacgacagccagcggactcccctcgaacgctctcgaaatcaagtggctttccagccggcccgctgggccgctcgcccactggaccggtattcccaggccaggccacactgtaccgcaccgcataatcctcgccagactcggcgctgataaggcccaatgtcaagaccgcactccgcaggcgtctatttatgccaaggaccgttcttcttcagctttcggctcgagtatttgttgtgccatgttggttacgatgccaatcgcggtacagttatgcaaatgagcagcgaataccgctcactgacaatgaacggcgtcttgtcaaccattcatattcatgctgacattcatattcattcctttggttttttgtcttcgacggactgaaaagtgcggagagaaacccaaaaacagaagcgcgcaaagcgccgttaatatgcgaactcagcgaactcattgaagttatcacaacaccatatccataaccatacccatatccatatcaatatcaatatcgctattattaacgatcatgctctgctgatcaagtattcagcgctgcgctagattcgacagattgaatcgagctcaatagactcaacagactccactcgacagatgcgcaatgccaaggacaattgccgtgtgtaagtggagtaaacgaggcgtatgcgcaacctgcacctggcggacgcggcgtatgcgcaatgtgcaattcgcttaccttctcgttgcgggtcaggaactcccagatgggaatggccgatgacgagctgatctgaatgtggaaggcgcccagcaggcagcaggccaagattactttcgccgcagtcgtcatggtgtcgttgctgcttttatgttgcgtactccgcactacacggagagttcaggggattcgtgctccgtgatctgtgatccgtgttccgtgggtcaattgcacggttcggttgtgtaaccttcgtgtggcgactttctttttttttagggcccaataaaagcgcttttgtggcggcttgatagattatcacttggtttcggtggctagccaagtggctttcttctgtccgacgcacttaattgaattaaccaaacaacgagcgtggccaattcgtattatcgctgttttcgggtgtacgtgtgtctcagcttgaaacgcaaaagcttgtttcacacatcggtttctcggcaagatgggggagtcagtcggtctagggagaggggcgcccaccagtcgatcacgaaaacggcgaattccaagcgaaacggaaacggagcgagcactataatcttgcagtactatgtcgaacaaccgatcgcggcgatgtcagtgagtcgtcttcggacagcgctggcgctccacacgtatttaagctctgagatcggctttgggagagcgcagagagcgccatcgcacggcagagcgaaagcggcagtgagcgaaagcgagagggagagcggcagcgggtgggggatcgggagccccccgaaaaaaacagaggcgcacgtcgatgccatcggggaattggaacctcaatgtgtgggaatgtttaaatattctgtgttaggtagtgtagtttcatagactatagattctcatacagattgtatctgagagtccttcgagccgattatacacgacagcaaaatatttcagtcgcgcttgggcaaaaggcttaagcacgactcccagtccccccttacatttgtcttcctaagcccctggagccactatcaaacttgttctacgcttgcactgaaaatagaaattaaaaaccaaagtaaacaatcaaaaagaccaaaaacaataacaaccagcaccgagtcgaacatcagtgaggcattgcaaaaatttcaaagtcaagtttgcgtcgtcatcgcgtctgagtccgatcaagccgggcttgtaattgaagttgttgatgagccgcgggattactggattgtggcgaattctggtcagcatacttaacagcagcccgctaattaagcaaaataaacatatcaaattccagaatgcgacggcgccatcatcctgtttgggaattcaattcgcgggcagatcgtttaattcaattaaaaggtagaagtcggtaaaagggagcagaagaatgcgatcgctggaatttcctaacatcacggaccccataaatttgataagcccgagctcgctgcgttgagtcagccaccccacatccccaaatccccgccaaaagaagacagctgggttgttgactcgccagattgaggtgcggattgcagtggagtggacctggtcaaagaagcaccgttaatgtgctgattccattcgattccatccgggaatgcgataaagaaaggctc

SEQ ID NO: 5360 - DNA, 1646 bp, DROSOPHILA
gaagacgactcactgacatcgccgcgatcggttgttcgacatagtactgcaagattatagtgctcgctccgtttccgtttcgcttggaattcgccgttttcgtgatcgactggtgggcgcccctctccctagaccgactgactcccccatcttgccgagaaaccgatgtgtgaaacaagcttttgcgtttcaagctgagacacacgtacacccgaaaacagcgataatacgaattggccacgctcgttgtttggttaattcaattaagtgcgtcggacagaagaaagccacttggctagccaccgaaaccaagtgataatctatcaagccgccacaaaagcgcttttattgggccctaaaaaaaaagaaagtcgccacacgaaggttacacaaccgaaccgtgcaattgacccacggaacacggatcacagatcacggagcacgaatcccctgaactctccgtgtagtgcggagtacgcaacataaaagcagcaacgacaccatgacgactgcggcgaaagtaatcttggcctgctgcctgctgggcgccttccacattcagatcagctcgtcatcggccattcccatctgggagttcctgacccgcaacgagaagatgtcccacctctactcaacattcgctcaattggtaagcgtgcactgcaagtcaacagccgccgtcggaggcctcccagtgaaccagtgcaagcacaacctgctcggttacgggtccgccaagctgcagacgctctccgacgtacagctggaggcactagatccgtatcagcgcgatgccaacgagctgatctggtcatcgattatgggggaccatccgagcggagccagcctggtgacaacgaggcagccgctccaacagcccctgccaactcctcctgcgtcctctctgatcatcctaacgcgccagcaacttccgcacggagcatcccatgcccaccccatccagagctccggctccgccaccaatccaatcttcgagagcggcgagcagaagcacaaatacgccatggacatggacaaggcctacggctacgggccgcagtccagcagtgagctcccaatggccgccgcactgacttcagaaccgtccaaaagattcctcaccggacctttggtgatccgggtgcgacccgatggctccccggtggaggaggacaagatgatgccactgccgcgggacgaagacctgccctactttcatcttggtctggccgccgctcagcccaacaggcaccgcaagatcgccacaatcagctccttaaagcagcagcacttcgcctctatcctgcagagcgacctccagccaccccaccagacgcagaggcgtctgttccgccagcaacaggcgtaagatcgcggtcagaggatccgcaggcctagacctaagtccttgtgtgaatgtgatagagcagatgaggagatcctgcatcatagagtgcgagagtgaacgtgtgagtcttctagttgtagccgtttgaggagttttcttgaatgcacttgagctttaatggaatttcgtatcgtattcgtttaagtttttttaattttatttattcgcgtgcattagtcgtaagatcacatagagattcttgagtaataaaccgcatgatgattatcattgttacgaa

SEQ ID NO: 5361 - protein, 288 aa, DROSOPHILA
MTTAAKVILACCLLGAFHIQISSSSAIPIWEFLTRNEKMSHLYSTFAQLVSVHCKSTAAVGGLPVNQCKHNLLGYGSAKLQTLSDVQLEALDPYQRDANELIWSSIMGDHPSGASLVTTRQPLQQPLPTPPASSLIILTRQQLPHGASHAHPIQSSGSATNPIFESGEQKHKYAMDMDKAYGYGPQSSSELPMAAALTSEPSKRFLTGPLVIRVRPDGSPVEEDKMMPLPRDEDLPYFHLGLAAAQPNRHRKIATISSLKQQHFASILQSDLQPPHQTQRRLFRQQQA

SEQ ID NO: 5362 - DNA, 3723 bp, DROSOPHILA
gaggcgctggtggagaaaagaacaatatattcggacatcaaggcttgctttcattgctaacagtctgattagatctatagtagaactaaatgctggactcacagatcctgatccttgaggaacaccgcattgatgtccctgatgatcttctcgcagagcacctttttctcgttgcgttcctcctccatggaatttgagtatagtccgaacgtggaatttcaatggggatgtggtttttgcttcctcggggatctcgcttccgttccgttcgattcgagggtctcaggcacattgattgcctccaattaatatgaacatgctcaatgtctccggttaattaagatttggaaaggggaggaagaggagaagatggcggaggctggaaccctgtctacgcgactatggaacccccaaaggcggccgcatcacaacaaataaatttcaattaagccggggcctggacacgagatctagcctttattattattattatttcagtgcccagtgcgaggggctgtcaatctggttcaccccaaagcgcggttctccggcggatcggtccgcaagctcggaaatgtgttccctttttttggcgacggtgagcatatgtttgtttgcaaacatgtgtttggtgtgcacaacaacagaggaggcacttgccacgataacctactaaccgcgacgtcagaaccaactgtcgggaaaatggctattgaaagcaggcattagctgggacattagaatttttcaatttttttttccttttttctacagtcagtattatcagtacatttgctacattcatatattttttcagtattaacggaattatttcttaagtatatgcgtttaataaacagttgatagcagaatgattaagatatttaagaaaatttattgaattcaatgagcacctccgtatttgtgtgcacgcggatttggctaaaaaccaaaatgtttgccaccactgttacattccgctggtcacactcttcccatctaacacgtgcgcgcccgaaagagatttagtagaaatacacagacaggatgcagaactcctttcttccactgaacacacggcgttttcgacagcgggcccaggtggaaacgccggatacggtgtactgggaccgactggcggtgagttgtataggactaggcagagaggctcggcaaccaaatcattgtttcccctctgcattccacagaaaccagaactactcaaggagcacaacaccatcgattatttggacttcagtccaagcgatcctgacaactttgttgtgacctgttcggtgcgcgttcagatttacaacctggtgaccatgcttgtggtaaagaacctttcccgattccaaaagaccgcatacggcgccaccttccggcaggatggtcgactcctggccgccggcgacgaggagggccatgtcaagctattcgacaccaccagtcgcaacatcttgcgtttgttcaagggacacacggcaccagtacaccgcaccttctttacggcggacaagctgcagctagccagttttggagacgacaagtcggtccgtctgtgggacgtggcaaacgagaaggtggtgcaaacgtacgaggacacgcacaccgactacgttcgtgcaggcgccatgcatccgcaggcagggcatatgttcgtctccggcggctacgatggcaagatcaaactgtacgatacgagagcggaaacggcggtgcagcgcaccttagatcacggagctccggtggagtccatgttgttccttccgaacggctctattttcgtcagcgccggcggcagccaggtgcgcgtatgggatctcatcagcggctgccgtctgctcaccatgatgtcgcagcatcacaaaacagtaacttgtctgcgactgggatccgatggcaggagattgctctcaggcgggctcgataggcacgtgaaaatctacgatgtgagcacctacaaaacagtgcacacattgacttatcccaatgcggtggtcagcatggctgttgctgacggagatcaagcagttgtggctggaatggtcgatggtctagtctccattcgtcgcatgatggtagacagcaagcccagtcatttgaaaaagattcgtgcggatcgcgctcgaaagtacttcgtgagtacgaaacgcacgaacaacacccaagaggttgatcacaccatcaaggaccacgtcaaggggcctggattgaaatcctacgatgtgcacttgcgccagtttaaccacaagaaggctttggacgacgtgatgaatgcgcagaagatgcaataccagccggagctcattgtggctgtcatcacggaccttctgcaccgtggatcactgggaaaagccctcacgggtcgtcatgaggcagcgcttgtccgattcatcgacttcatttgcaaccacttgggcgaggtgcgattcatgcgcccgctgatgatggccgcgagcacggtccttgatgtcttcgagcaacgattggtggcctacagccagaagctgatgaaagccttgcaacgattgtcacttgcaatgcaggaggaggtgaggctcaccgccgagctgatgcggatgaagggtgctgtggatatgctcattgggatttcaatggacaatagcgaggtagcccataagcccacctatgtggagacaaagacacctaagatgcatccctccgtggcggcgcaaaattatgtggtcttagttgagtgacccaggccgacgtagaacaacgatatagccacatagctttgatattaagtatataagtagtagtagtttaagtataaagcagtttcaatacccattacgcatgtatatatctttctttattaaatacatacttaaaatgaacgtttcgtcgtgcatgccaatttcagttttgaaatgtacaatgaaattttgtctgccgttttacgcataataaaaaaaaaaaaacaatgttaatggggcagcaaaacagctgcccgcgaaaacgaacttttttttaatataatgggtaatttacttgcaaatatttacgattttcgttctccaactactcgatttaggtttcatttttaattcttttttatagttagatttacgttattttacgattatttggaaagacgaatttacacttagaatttgctcatcttcgacgcatcgttctgtattattctgcttaagctaaactctcgcactaatattaatatatatctttatatttatgtataattataattatatgtatgtatagatatatatatctattccgatcgacatcgcgtcaacttttcccaacatgccgttccttgtgttgcttgcttaccagttaaagggaaagggaaaaatttaagataccacggatttgttaaacttaaataagaatacatttcgacttaactaatttacaatttaggggtgtgtgtaaagtgtatggggattgtggttgctgttttcaaggttcaaagccactacatttacaatttaaattaaaagtatactcatatacataacagatatagacatagacattttacactcttcggctgctcattttttttttgacacttttacaccaatatatgcagctccagtttccaagactctgtacagattacacggcttcaggccactacgcactacagaaaagacgagtggggcatttacatacatatgaatgcaacggagcaattaaacatacatcgacgcagcaagcaatgtaatt

SEQ ID NO: 5363 - DNA, 1655 bp, DROSOPHILA
taacacgtgcgcgcccgaaagagatttagtagaaatacacagacaggatgcagaactcctttcttccactgaacacacggcgttttcgacagcgggcccaggtggaaacgccggatacggtgtactgggaccgactggcgaaaccagaactactcaaggagcacaacaccatcgattatttggacttcagtccaagcgatcctgacaactttgttgtgacctgttcggtgcgcgttcagatttacaacctggtgaccatgcttgtggtaaagaacctttcccgattccaaaagaccgcatacggcgccaccttccggcaggatggtcgactcctggccgccggcgacgaggagggccatgtcaagctattcgacaccaccagtcgcaacatcttgcgtttgttcaagggacacacggcaccagtacaccgcaccttctttacggcggacaagctgcagctagccagttttggagacgacaagtcggtccgtctgtgggacgtggcaaacgagaaggtggtgcaaacgtacgaggacacgcacaccgactacgttcgtgcaggcgccatgcatccgcaggcagggcatatgttcgtctccggcggctacgatggcaagatcaaactgtacgatacgagagcggaaacggcggtgcagcgcaccttagatcacggagctccggtggagtccatgttgttccttccgaacggctctattttcgtcagcgccggcggcagccaggtgcgcgtatgggatctcatcagcggctgccgtctgctcaccatgatgtcgcagcatcacaaaacagtaacttgtctgcgactgggatccgatggcaggagattgctctcaggcgggctcgataggcacgtgaaaatctacgatgtgagcacctacaaaacagtgcacacattgacttatcccaatgcggtggtcagcatggctgttgctgacggagatcaagcagttgtggctggaatggtcgatggtctagtctccattcgtcgcatgatggtagacagcaagcccagtcatttgaaaaagattcgtgcggatcgcgctcgaaagtacttcgtgagtacgaaacgcacgaacaacacccaagaggttgatcacaccatcaaggaccacgtcaaggggcctggattgaaatcctacgatgtgcacttgcgccagtttaaccacaagaaggctttggacgacgtgatgaatgcgcagaagatgcaataccagccggagctcattgtggctgtcatcacggaccttctgcaccgtggatcactgggaaaagccctcacgggtcgtcatgaggcagcgcttgtccgattcatcgacttcatttgcaaccacttgggcgaggtgcgattcatgcgcccgctgatgatggccgcgagcacggtccttgatgtcttcgagcaacgattggtggcctacagccagaagctgatgaaagccttgcaacgattgtcacttgcaatgcaggaggaggtgaggctcaccgccgagctgatgcggatgaagggtgctgtggatatgctcattgggatttcaatggacaatagcgaggtagcccataagcccacctatgtggagacaaagacacctaagatgcatccctccgtggcggcgcaaaattatgtggtcttagttgagtga

SEQ ID NO: 5364 - protein, 535 aa, DROSOPHILA
MQNSFLPLNTRRFRQRAQVETPDTVYWDRLAKPELLKEHNTIDYLDFSPSDPDNFVVTCSVRVQIYNLVTMLVVKNLSRFQKTAYGATFRQDGRLLAAGDEEGHVKLFDTTSRNILRLFKGHTAPVHRTFFTADKLQLASFGDDKSVRLWDVANEKVVQTYEDTHTDYVRAGAMHPQAGHMFVSGGYDGKIKLYDTRAETAVQRTLDHGAPVESMLFLPNGSIFVSAGGSQVRVWDLISGCRLLTMMSQHHKTVTCLRLGSDGRRLLSGGLDRHVKIYDVSTYKTVHTLTYPNAVVSMAVADGDQAVVAGMVDGLVSIRRMMVDSKPSHLKKIRADRARKYFVSTKRTNNTQEVDHTIKDHVKGPGLKSYDVHLRQFNHKKALDDVMNAQKMQYQPELIVAVITDLLHRGSLGKALTGRHEAALVRFIDFICNHLGEVRFMRPLMMAASTVLDVFEQRLVAYSQKLMKALQRLSLAMQEEVRLTAELMRMKGAVDMLIGISMDNSEVAHKPTYVETKTPKMHPSVAAQNYVVLVE

SEQ ID NO: 5365 - DNA, 3946 bp, DROSOPHILA
acgagctaagtacgggcggttacaacgttcaggtggcggatcacaatcttaccagcatagagttacgcgctgggggcgtttacgccctgctgatcggccagagtcacggaacattcgtatcgcgaatcatagaggtaaccagccccaattcgatgcacatgctctggctggtgccgcagtacgtggtaatgaccctcggtgaggtgatgttctcggtgacgggactggagttctcctattcccagtcgccgcccagcatgaaaagtgtcctgcaggcctgctggctgctaacagtggccttcggcaacgttatcgtcgtggttgtggcggaactcaagttcttcgactcgcaagccagcgagttcttcctgttcgctggcctcatgtttgtcgacatgctggtcttcatgttcgtggcctactactataagccatatgatgaggtggctgctctggcggagagggtaagggccagacgggaacggaaatggcaggatctcgaccgattcaagagggactaggaatacggatgcctgattgtcatttgaatctgtccgcttattatatccttatgtgcagttcttttacgattcgaaataaatatcccccaaatatggcagaacaaagactttttaatatccgccatcatcctttgaattgttttaatacgctaagttgagtgttaaataagttatattaaatgttactgaccattgcctttacatttatccagcgctcaacttgtttattaccgccagtggactctgcacttagtttatcattaaaatataagtccactgcacttagtatatcaataaaatataagtctactgcacttagtatatcattaaaatataaaatgtaggtttatattagtataactgtaacgaatattcaagctcgcgcggagttgccagatcacaacttaacagcgtgctgttatgcgcatgttgtcacctgacattccgccttttttagtaccttttgcgctgacatttggtcgagaaaaatataagaagaggaagagttgaaaatcatatgacttgtcgatcgatagagaaaaaaggttgaattttcaccgtcgctccgtatcgaactgcacgcccttcgccacacaattcgcgcaactttcggtcgagcgagagcagtcccatagaaaggaatccagcgcaattcgccacctcttcaacttccagtcagctcctctgcgtgtgtgtgtgtgcgtgtgtcatcaagatgaacagctcgggctttatgtttaacatcgataatggatatctggagggtctgtgccgcggcttcaagtgcggcatcctgaagcaggctgactatctcaacctggtgcagtgcgagaccttggagggtaagtagtagagccatcgcaagcgtaaaccgaaaaccccattttcccacacgcccctgggtcacatgaccagcgataacagagtggtgcgtgtgtgtatatatatacatgtacggctgttaatgtatctttgcgccggtgtgtgtaagcttgtcttgtgatttgttgacgtttttcaattggattttctttgaattcatagttggaatttatttggattagggaacatgtagcgtgatgactaaatgaactccggacaagtactttggctcaccatatttcgtagaaaactaacttttgaatgatgtattaaacttgatctcacttggattttacagatctcaagctgcatctgcagggaacggactatggcagcttcctggccaacgagccctcgcccttgtcggtgtccgtcatcgacgacaagttgcgcgaaaagctggtcatcgagttccagcacatgaggaaccatgctgtggagccgctgtccaactttctggacttcattacctacggttatatgatcgacaacatcattctgctgatcactggcacgctgcaccagcgacccatctcggagctgatccccaagtgccaccctctgggcagctttgagcagatggaagccatccatgtggcgtccactcccgctgagctctacaacgccgtcctcgtggacacgccactggcgcccttcttcgtcgactgcatctccgagcaggatctggatgagatgaacatcgagatcattcgtaacaccctttacaaggcctacctggaggcgttctacaacttttgcaagaacatgggtggtgccaccgccgacgtcatgtgcgagatcctggctgtaagttaattgttgtaataggcgattatatcgtttacttcatatatggtttaatttgaaaaataaaaattgtatatcttgccatttcagtttgaggccgatcgtcgtgcaattatcattaccatcaactccttcggcaccgagctgtccaaggacgaccgtgccaagctgtatcccaactgcggcaaaatgtaccccgatggcctagccgctttggcgcgagccgacgactacgagcaggtgaagaccgtggccgagtattatgcggagtacgccgctttgtttgacggatccggcaacaatcccggcgacaagacgctggaggacaagttcttcgagcacgaggtgaagctggacgtgtacgcctttttgcagcagttccacttcggtgtcttctacgcatacctcaagctgaaggagcaggagtgccgtaacatcgtctggatcgccgagtgcgttgcccagaagcaccgcgcaaagatcgacaactacatacccattttctaagcgcgctagatgatcgctaagcatttggcatacaaataatattacacgtttttttttcctgcctttcgatatgcgtttttttttgttgtccctctacccttgttattgaattgtttaatgtatattatattatgataccgagtctgtatgtttgtatgtagcgagtattattgccggtccaggcaaatttttgtcaagtgttcagacccaagcctagatttctcagtttccgcggctcctcctccaattgttatcagcattggcccaatagataactatataatatgtattcgggagacccatagtgtcccttcagggcttcgtgtttgtgtacatatgtataattatcgaacggaacgaaaacagttcaaattgaatgtagagaaaagaaacatcagcaccatatgttaactactatatagaaaatgcatacttatacaagaactacatatgtgaatgataaatcaattattaaaacatgttttcaaacattcccttaaacgccgctgtctaataactgagttatatggctatactaatacatgccaatacaaagtcatgcatttgctttgaaaaagatagctctgactaaaacgatggcctctgattccaactttcttgtttgttttttgcataatctaaaagcatttttctttcgatcttagttttatacatattttctcttttggatgcttaagtagccaaacttaaaatgccaatcggttggacaaactgtccacgggtcgttttggggttacataaaaattggataagatgccaaacaagttattggctatcgaatgatatcaagtctgttgtcgtagaaagcatttccaaagatatgttttctgcagaatgattgtattttaatcagtccatgggagcagacaataagtttagttcatagttctggctaatccctctgagtcactttaaaaaaaaagtctacgtgtaaagagatttatgagaaatgcaagtatgagggattgccatgaaggcatcacatatttcactcaattcataaagaagacagttgttatagggcgcgtgtgctcaaggatatcctgctactctttgtctgctcgcggagttcaaggtttccatacctccagggtgcgtccactgctccattactcaccggggaatcttttgggctagacaaagaaatcctcctttgtattccatcagcatatacacagaatatacagatgtatataccttgcgttaac

SEQ ID NO: 5366 - DNA, 1518 bp, DROSOPHILA
tcgagaaaaatataagaagaggaagagttgaaaatcatatgacttgtcgatcgatagagaaaaaaggttgaattttcaccgtcgctccgtatcgaactgcacgcccttcgccacacaattcgcgcaactttcggtcgagcgagagcagtcccatagaaaggaatccagcgcaattcgccacctcttcaacttccagtcagctcctctgcgtgtgtgtgtgtgcgtgtgtcatcaagatgaacagctcgggctttatgtttaacatcgataatggatatctggagggtctgtgccgcggcttcaagtgcggcatcctgaagcaggctgactatctcaacctggtgcagtgcgagaccttggaggatctcaagctgcatctgcagggaacggactatggcagcttcctggccaacgagccctcgcccttgtcggtgtccgtcatcgacgacaagttgcgcgaaaagctggtcatcgagttccagcacatgaggaaccatgctgtggagccgctgtccaactttctggacttcattacctacggttatatgatcgacaacatcattctgctgatcactggcacgctgcaccagcgacccatctcggagctgatccccaagtgccaccctctgggcagctttgagcagatggaagccatccatgtggcgtccactcccgctgagctctacaacgccgtcctcgtggacacgccactggcgcccttcttcgtcgactgcatctccgagcaggatctggatgagatgaacatcgagatcattcgtaacaccctttacaaggcctacctggaggcgttctacaacttttgcaagaacatgggtggtgccaccgccgacgtcatgtgcgagatcctggcttttgaggccgatcgtcgtgcaattatcattaccatcaactccttcggcaccgagctgtccaaggacgaccgtgccaagctgtatcccaactgcggcaaaatgtaccccgatggcctagccgctttggcgcgagccgacgactacgagcaggtgaagaccgtggccgagtattatgcggagtacgccgctttgtttgacggatccggcaacaatcccggcgacaagacgctggaggacaagttcttcgagcacgaggtgaagctggacgtgtacgcctttttgcagcagttccacttcggtgtcttctacgcatacctcaagctgaaggagcaggagtgccgtaacatcgtctggatcgccgagtgcgttgcccagaagcaccgcgcaaagatcgacaactacatacccattttctaagcgcgctagatgatcgctaagcatttggcatacaaataatattacacgtttttttttcctgcctttcgatatgcgtttttttttgttgtccctctacccttgttattgaattgtttaatgtatattatattatgataccgagtctgtatgtttgtatgtagcgagtattattgccggtccaggcaaatttttgtcaagtgttcagacccaagcctagatttctcagttt

SEQ ID NO: 5367 - protein, 350 aa, DROSOPHILA
MNSSGFMFNIDNGYLEGLCRGFKCGILKQADYLNLVQCETLEDLKLHLQGTDYGSFLANEPSPLSVSVIDDKLREKLVIEFQHMRNHAVEPLSNFLDFITYGYMIDNIILLITGTLHQRPISELIPKCHPLGSFEQMEAIHVASTPAELYNAVLVDTPLAPFFVDCISEQDLDEMNIEIIRNTLYKAYLEAFYNFCKNMGGATADVMCEILAFEADRRAIIITINSFGTELSKDDRAKLYPNCGKMYPDGLAALARADDYEQVKTVAEYYAEYAALFDGSGNNPGDKTLEDKFFEHEVKLDVYAFLQQFHFGVFYAYLKLKEQECRNIVWIAECVAQKHRAKIDNYIPIF

SEQ ID NO: 5368 - DNA, 6842 bp, DROSOPHILA
gttttaataactccgatggagatttaagctgaactttccaaaatagccacgaagttaaagaatgggacaaagacttattcccatagaccgagcagtttttaaagaccgatggcatgttcaaaagggctattggaagtgttgaatgaatcagattattcttctggagctggcgatgcgaaaagtctaatctaaacccgtgtagtatacttttagggttcgattatatgtacatataggtcgattataatgatttgaccacttgcactacagttattattacgtttttaatgtataggttaattacgataagctttggccaacactaaaagtgagtagcagggtgcgagtcataatacaaatcttgtcagccacgggcccaggccaattttttttaagtctatcttactgaaatggttagaagccgatttaaagaaagtcctacggcagctttatttgtttaaaacgctaatttttccactaggcttaccataggggtatttaaaattctattcaaagggttagcagatggagcattaacgtcacaagtcctgttccttgttatagaaaccttaaataaattgttttgcttataaatgacaaaaggacacgatataggaaacatatatcttttttattcgtttccgatgttattgccttggaaatgcatactttattgtagattgctacatataaaatgtgcaatgtgttctataatctgcatgttgcatccatagatctagacgtcattcgattcttggaacaacataagtgccaacacaatcagtttatcatacacgctagaagtcctcgaaattgcagtattaattaaataacttaaaatatctaatttaagataatcacttaccagatttgcaaaaacgaaaattgagtattgagaattttcagtatttaacaaaaattgtgccgtgtattccgcccaaaagaaatcttttatgattaatgccataagcaccctgttttgttggctcgcttttgtaataccgtttgcaagcctacttatattgtgatcggacaacccgtgtgttatcttaaataacaaattttttatttcgttgaaaatagttgtttgtttcgtttatattttaaatactttctacatatttctgtgcataatgaacataacgatttcacaactaagcaagaaaagaaattaacttcactcggtgacgccattttgtccaatttttatatactgctttataaatggaatttggtaaaaaaaggtaaattttgttcaagtttatggccaatttaagaattaaatgctccacatacttttttgtgttttgacaaaagtttaaaatatgtaaatatgtacaaaatgttttataatattaaccagtttatctgtattattgtttaaaggtaatgtaaagtacatggaatgtagaagtgtcttcaacgcgaatgcacatatgcatatacatgtctatgtatgtatgtatatgtatatttatatgtttttatatgtacgtatgtatgctcttttatgtgtatacataacgtgtttcatttcaaggtaacacaaaatcgttaattttctttcttttaaggtataagggtggtcggacaccttctattaggtccagtgaaaggcgtcgtcctcaaagtgtttcatctatatccacactatccccgagagttgttttgtccagattggagccgagggagtttgaacgtcttcgactatcctacaaaattgcaatcgaccaaagaagatccagaagctgccgtggcatgaacatgggtcaaaaaattagtggcggagtcaaaacagttagtcgcaatgattcacagtctacatttaaaccaataataccaagagagttgcaagctgatttcgttaaaccagcgcgaatcgatatattacttgatatgccgccagcatctcgagatcttcaattgaagcattcatggaactccgaagatcggtctcttaacatttttgtaaaagaggacgacaagttgacatttcataggcacccagtggctcaaagtactgactgtattcgcggaaaagtcggacttacaaagggattgcatatttgggaaatttattggccaacaaggcaaagaggaacccacgctgttgttggcgtatgcactgcagatgcacctttacattcagttggctaccaaagtttagttggatcaactgaacaaagttggggctgggacttaggaagaaataaattataccatgactcaaaaaactgcgctggagtgacatatccagcaattcttaaaaacgacgaagcttttttagttccagataagttcttagtagcgttagatatggacgaaggaacactaagcttcattgttgatcagcagtacctcggtattgcgtttagaggactgcgagggaaaaaactatatccaattgtttcggcggtctggggacactgtgaaataacaatgcgttacattggtggattagatcgtgagtaaacttgatatattaaatatatataagatataccagattcgatgaaaagtacgagtacggggcaggtagaagaaagcgtttccaaactcacaaaatacattcatttattgttaatcagggtctcaggaactatgcgagctaaaaagttgagactaggtaggcagatttaactagggtgtgcaagttcgaaaaatgtttttctgattgggttgagtacgtctcttaaatatttaaactaaatttgtttagccttgcagagggagcaacttagggattgagatttaatgtacatttcagtattatatatatgcatatatatattatataaatatatatattaatttgtttatatacatttaaatatataaaaatatacatttatgtatagatatatatatgtattaatatatatacatgtattaatatattaatatattatatatacataagtatcaacagctgagtcaactcgtccgcctgtttttacctaaacctattcactcacatatctcacttttgacaaaaatattttcagtttttatttgatcgtatatcaaaatattacacaaatgagaattctacagtcgagttgtccgagttttttagtatatcgatagatattggggaatgaatggaaaaaaaatttaaaattctttataaatgtggtcgtgatcggttggcggatttaggtcgttagagtgggcgtggcaaatggatagaaattcacacacctaagaaaagtattaaaaaaatatcaaaacattttcctaaagtgtgggcgcggctaaaaatttttgccaaatcgatagaaatttacaagactatgcacatacattttttaaatttaagttctcacttttaaaatatatttctgtattccctcaactaagatgtaccgtatagagtgcagtcaagtttgatttcgatcgaccaacgtgcaaattattgttcgacgtaaaaaggggtttggaatatcatacttgcttctgctataaaactgcacaagtgagtaggtcgattttgcaaggtttttttgcaagaccaatattaaaagatgaattgtgcttagtgtaagaaaagtaatatcggatagtttcaaagccaatggacgtaaacatgcatagtagtagtatttatttttatacccgttacttgtagagtaaaagggtatactacatttcttgaccatataaattatacgtattataaaagctagaaggttgagtttgagcatacagattctagagacaaatacgcagcgcaactaatgtaattttctatagatgtgccaaaaaactttttatacacacatatttgaaatttgttttctcattttactgcctaatatctatcgatatcccagaaaaaccgatgaaatttctcgttcccattctcacactagcttaaaaacgggtatctgatagtcggggaactctactatagcattctctcttgtttttatcgatttattgtttgtgttgccattttttattcgtataccaaaaacactgtagcctctcccctcctttcacctacaaaacgcccaaaccggtcacgcccagttcggtcaagaccgtgttgtttagtagtagaataacctcgttatcttatttagcgtgcgtttgggatagtccgtgttcggacctccttgaggaaacaagatttttccaggaaattctgagtgtcttacgatatgtttctatacagagttgaaagacgacatttctgtacttgctttgaagatgggagatatagcatttgttcttaagttcggtggaatagcgtgcgcatccacaagtatggatgagagggctacatacacatataaatattcaagtagtcttccagaacttcggttttaattgccagcgcttcccaaattgtgtcatgtttcaagagtcaacctatcgcaatttccattacttaagatataaattaaaccatgtaggttattataataaaagggttatttattgagcaaactttttcttgtttttggtttcgaacgtactaacttatagagttaacatatttatcccgcgaagtcttccgttgagggcagagatcctggcagagcgctttctcagcgcctcgtgccattttgtgcgagttggagcttcgtgactcatggctgaccgtttcatattgattttgccgatgcggaatgcgttgctcggctgaccggatactgtcgatgttactgttgacggttcctcatccggtttcgggtagcattgtacccctctgacttgcttttggaggttgtgaatgttgtgaatgatgttacttttcgtatgagcgctgtggcgttaacatgaagtttatagcaccttagagtctgcaatcgtgatttgtggtttccctttaaagttcacattttgggtaagtgtgactccaactccaaggtgtaggcagagtaggcatgcagattccagaaacctagacgcagcggaactgatattaactgatgttgccacgtatacaagccgaccttttcttatttgtcttataatttactattgagttctcaaaaacgttttgccacgcccactctaatgcccacatatcgccgaaaactgtcacacccacacttttgaaaaatattttaatttttcttcgttttattggttgtcttaccaatttctatcggtttctacatacgcccagaaggctcacgcccacgtttttgaactatttttaatttttttctcattttatgccccaatgtcagaaaactgttaaactttcacattcggctttccattagctgagtaatgggtatctgatagtcggggcactcgactatagcactctcttaagttttaaataaattgtggattacatgattacattgcgaaaagtacattaattatttagagttcgcatgacacttattaaaaaattatatatatttttacaaaaaaacaaacaatttcttacttgtatcttttaagccgaacccttgcccctaatggatctttgccgaagaacaattcgtcaaaaaattggtcgcacaaacttggaggagcacattcaacagcttcaacttcctttatcaatgaaaacatatttattgtataaaaaccgtagataatagttttgttaagtagatggaggagcaatttcaatttttgctgcatgtgatgaaagcagcaaatactaattgtgttagattataatagtattagatcaatgtttgtctgtcctccaacaggaaaatcataggtatacaattcgtaataatactttacttaagctataaagattgattgtatattaagaagcattcaaataatagtatgtacacggaatgacatctcatcttgcaataaattggagaatcgagtttcttcatgtaacattatttaaaaactatactcacttcgtgttatataaaaagcatatttgtataaatattaaaacttaaaaagcgcagttttaattaaatgtatgtatgtataaataattctaacaatatttaacatgaaaagctctgaaagtaattggtttactttttataaatatatttcgggagaaaaacttgaaatattgaatatatttattaaaatttgtaagctgctttcaagttttaggcaaaaggcctgaggacatagaaaattctggaagtagcgcaaatcacaattacaatattgctctatagttgctgagtagtattcaataaaatgatattaaattgttacataaaagtatgtaacggccttaacatggaagtttcaatatatgtcttcttttaagagttcataaacagaaatatgtttatgcgttgtatattatttctaaacctaaagtaaagcatacaattcgaaggtacgtttctgatttgcgatttatattttttgcagactacaatacttgactttagggttcccggtaatttttttttacaattttatccgctccctacccttgcccaatcagagagatatctacatttttccacgtcgctaaacttgaagacggcagtgagtacgcagaccttcaatctgcattcctacttccaataggacttgctacagcagaatatgtaggtattttcaaaaatagcacggaacggtagaaagttattttacgaatttagtataacaaactgtgacttgcaaaaccaataaattcgtatctcttctctaattatacccatacccgctactcgtcgagtaaaggagtatactagattcgttgaaaagtatgtagtaacaggcagaaggaagtgtttccgactgtataaagtatatatatttgtgatcaggatcaatagccgagtcgatctagccatgtccgtattaacgtcgagatctcagcaactattctagctagaaggttaagattcagcattcagaatagaagacaaaga

SEQ ID NO: 5369 - DNA, 1552 bp, DROSOPHILA
accgtttgcaagcctacttatattgtgatcggacaacccgtgtgttatcttaaataacaaattttttatttcgttgaaaatagttgtttgtttcgtttatattttaaatactttctacatatttctgtgcataatgaacataacgatttcacaactaagcaagaaaagaaattaacttcactcggtgacgccattttgtccaatttttatatactgctttataaatggaatttggtaaaaaaaggtataagggtggtcggacaccttctattaggtccagtgaaaggcgtcgtcctcaaagtgtttcatctatatccacactatccccgagagttgttttgtccagattggagccgagggagtttgaacgtcttcgactatcctacaaaattgcaatcgaccaaagaagatccagaagctgccgtggcatgaacatgggtcaaaaaattagtggcggagtcaaaacagttagtcgcaatgattcacagtctacatttaaaccaataataccaagagagttgcaagctgatttcgttaaaccagcgcgaatcgatatattacttgatatgccgccagcatctcgagatcttcaattgaagcattcatggaactccgaagatcggtctcttaacatttttgtaaaagaggacgacaagttgacatttcataggcacccagtggctcaaagtactgactgtattcgcggaaaagtcggacttacaaagggattgcatatttgggaaatttattggccaacaaggcaaagaggaacccacgctgttgttggcgtatgcactgcagatgcacctttacattcagttggctaccaaagtttagttggatcaactgaacaaagttggggctgggacttaggaagaaataaattataccatgactcaaaaaactgcgctggagtgacatatccagcaattcttaaaaacgacgaagcttttttagttccagataagttcttagtagcgttagatatggacgaaggaacactaagcttcattgttgatcagcagtacctcggtattgcgtttagaggactgcgagggaaaaaactatatccaattgtttcggcggtctggggacactgtgaaataacaatgcgttacattggtggattagatcccgaacccttgcccctaatggatctttgccgaagaacaattcgtcaaaaaattggtcgcacaaacttggaggagcacattcaacagcttcaacttcctttatcaatgaaaacatatttattgtataaaaaccgtagataatagttttgttaagtagatggaggagcaatttcaatttttgctgcatgtgatgaaagcagcaaatactaattgtgttagattataatagtattagatcaatgtttgtctgtcctccaacaggaaaatcataggtatacaattcgtaataatactttacttaagctataaagattgattgtatattaagaagcattcaaataatagtatgtacacggaatgacatctcatcttgcaataaattggagaatcgagtttcttcatgtaacattatttaaaaa

SEQ ID NO: 5370 - protein, 349 aa, DROSOPHILA
MEFGKKRYKGGRTPSIRSSERRRPQSVSSISTLSPRVVLSRLEPREFERLRLSYKIAIDQRRSRSCRGMNMGQKISGGVKTVSRNDSQSTFKPIIPRELQADFVKPARIDILLDMPPASRDLQLKHSWNSEDRSLNIFVKEDDKLTFHRHPVAQSTDCIRGKVGLTKGLHIWEIYWPTRQRGTHAVVGVCTADAPLHSVGYQSLVGSTEQSWGWDLGRNKLYHDSKNCAGVTYPAILKNDEAFLVPDKFLVALDMDEGTLSFIVDQQYLGIAFRGLRGKKLYPIVSAVWGHCEITMRYIGGLDPEPLPLMDLCRRTIRQKIGRTNLEEHIQQLQLPLSMKTYLLYKNRR

SEQ ID NO: 5371 - DNA, 3834 bp, DROSOPHILA
aatcgaataatatactttgtttattacttttgatttctcggttgactggaatgcactttttttcgacgagtcggaaacaaattgtttgtaagccttcaaagaagccagcactttcgccactcaacactccacaaaacaccgccgcacgcgaactgctccagaaacacactgaaaagctggtagggattacggcctggcgattctgagtccgctgctgaaattgttgtcatctcaggccttcggcagcatctcgcacatcccacctcgcatcccaggcatgcgcaatcgatactcgttaccccacaatccccagttcactcggggaagggatgggatgtcatggctgtggctgcaccgccacaaaacgataccatcccatattacaactgctctgcgcaaaagaaacccccatacaatgcattttgagtgctcattacggccattaccgaatcgatattctcgaaatgaacgagccgaactggctcgacgttcaaaactgcataaaaaaggcgtcgtctatgatttggatttatttaaaaactaactgcaattggctaacaacaaacacgtgcatggcatggcgataatcggttaagttttacttctgaacaaagggctaacaaatcgtgcccggatcagattaagaacagaaacgaacaggtaacgctaatagatatcgaaatgcaattggcggaccagtgagatccgttgtcatatcgggctagttgaactttgtctttggatcgcacatttatagtagagtagaatagaggcatttccgtttccaaatccgttttgaatcgtcttcctttctagtattttactctttaacaatttgtcttgcacaagtttctgtatttttgggacgataattagataggaaataaaacacacgtctttatacacttgccacatttcagaacggatgggcaaacggaaaggccgggagtgagtaattctattggggtagattgatttgagctttatcaggtcgcgctgtctagtccgctggatatccaaagctgaggtgaagattgcaccaccgccggtgcttaccacccagggtggactcctcgcgccgtacggcacttaaaaacggattatcttcaaagtcaaagttgcccaaatgcgaacgcagatcgcctgacgccactggtaacagttggccattgggcaagcccatttgcaggcgcacgcactgctccacgatgaacttgagtgccgcacggcgatgcagctcgaagcaatcccgcgatccgtacatcaagcgctgctcggcacacagacgcatatcgttggcggcaacgttgcagcagtaaagaaatgatattagcctttgcttgctcacggaactcagatccacatgtggtagcaagagacccagcagatcctcagcgttggcttcacattccaggccatagcttgtcattagatgctgcagactggccaacgtagacgaaccactggctccggaatccttgggaagggcaaaactgagctcatatgcacgactcaggagcacttggcggtagtggtagcagctgtagtcactgatgtgcttccgcataaacttctccgtgcgtagcagttccgattgcagcaggcatgggccgttctgaaggatccactggcggtgcgaccaggcgtgatagttgctggcgcatctatcggcggccctttcgcatatcccgatctcattgggccagtcaatagcatcggcacctggaaataatggaatgaaatgggatccccagttgccgacgtccacttactttgaaatgagtacagccaacggcggtaggcgaatgcttcattggacttcggtttgattgagagcacgagtgcggagaactgcagctccttgttgatgctcagccgattcttttgcaccagctgacggcggatgtgccaaaaggtggtcacatcgggattaatcagcagagccacgtttaggtatttggccagggagtcgctctgctgctgctgctgcagcgtccgcagctgttgcgccgtggtttgacggcgatgggagatgagggtgcggtgggcgtggtcgtagacatgctgggcacaccacgattccaggcccagattgtgctccacatgcacaaccggcgatttgttgcagttggcttctttgggtataatttcaaaggaggcgctggtggagaaaagaacaatatattcggacatcaaggcttgctttcattgctaacagtctgattagatctatagtagaactaaatgctggactcacagatcctgatccttgaggaacaccgcattgatgtccctgatgatcttctcgcagagcacctttttctcgttgcgttcctcctccatggaatttgagtatagtccgaacgtggaatttcaatggggatgtggtttttgcttcctcggggatctcgcttccgttccgttcgattcgagggtctcaggcacattgattgcctccaattaatatgaacatgctcaatgtctccggttaattaagatttggaaaggggaggaagaggagaagatggcggaggctggaaccctgtctacgcgactatggaacccccaaaggcggccgcatcacaacaaataaatttcaattaagccggggcctggacacgagatctagcctttattattattattatttcagtgcccagtgcgaggggctgtcaatctggttcaccccaaagcgcggttctccggcggatcggtccgcaagctcggaaatgtgttccctttttttggcgacggtgagcatatgtttgtttgcaaacatgtgtttggtgtgcacaacaacagaggaggcacttgccacgataacctactaaccgcgacgtcagaaccaactgtcgggaaaatggctattgaaagcaggcattagctgggacattagaatttttcaatttttttttccttttttctacagtcagtattatcagtacatttgctacattcatatattttttcagtattaacggaattatttcttaagtatatgcgtttaataaacagttgatagcagaatgattaagatatttaagaaaatttattgaattcaatgagcacctccgtatttgtgtgcacgcggatttggctaaaaaccaaaatgtttgccaccactgttacattccgctggtcacactcttcccatctaacacgtgcgcgcccgaaagagatttagtagaaatacacagacaggatgcagaactcctttcttccactgaacacacggcgttttcgacagcgggcccaggtggaaacgccggatacggtgtactgggaccgactggcggtgagttgtataggactaggcagagaggctcggcaaccaaatcattgtttcccctctgcattccacagaaaccagaactactcaaggagcacaacaccatcgattatttggacttcagtccaagcgatcctgacaactttgttgtgacctgttcggtgcgcgttcagatttacaacctggtgaccatgcttgtggtaaagaacctttcccgattccaaaagaccgcatacggcgccaccttccggcaggatggtcgactcctggccgccggcgacgaggagggccatgtcaagctattcgacaccaccagtcgcaacatcttgcgtttgttcaagggacacacggcaccagtacaccgcaccttctttacggcggacaagctgcagctagccagttttggagacgacaagtcggtccgtctgtgggacgtggcaaacgagaaggtggtgcaaacgtacgaggacacgcacaccgactacgttcgtgcaggcgccatgcatccgcaggcagggcatatgttcgtctccggcggctacgat

SEQ ID NO: 5372 - DNA, 1688 bp, DROSOPHILA
cggttagtaggttatcgtggcaagtgcctcctctgttgttgtgcacaccaaacacatgtttgcaaacaaacatatgctcaccgtcgccaaaaaaagggaacacatttccgagcttgcggaccgatccgccggagaaccgcgctttggggtgaaccagattgacagcccctcgcactgggcactgaaataataataataataaaggctagatctcgtgtccaggccccggcttaattgaaatttatttgttgtgatgcggccgcctttgggggttccatagtcgcgtagacagggttccagcctccgccatcttctcctcttcctcccctttccaaatcttaattaaccggagacattgagcatgttcatattaattggaggcaatcaatgtgcctgagaccctcgaatcgaacggaacggaagcgagatccccgaggaagcaaaaaccacatccccattgaaattccacgttcggactatactcaaattccatggaggaggaacgcaacgagaaaaaggtgctctgcgagaagatcatcagggacatcaatgcggtgttcctcaaggatcaggatctcgcctcctttgaaattatacccaaagaagccaactgcaacaaatcgccggttgtgcatgtggagcacaatctgggcctggaatcgtggtgtgcccagcatgtctacgaccacgcccaccgcaccctcatctcccatcgccgtcaaaccacggcgcaacagctgcggacgctgcagcagcagcagcagagcgactccctggccaaatacctaaacgtggctctgctgattaatcccgatgtgaccaccttttggcacatccgccgtcagctggtgcaaaagaatcggctgagcatcaacaaggagctgcagttctccgcactcgtgctctcaatcaaaccgaagtccaatgaagcattcgcctaccgccgttggctgtactcatttcaaagtgccgatgctattgactggcccaatgagatcgggatatgcgaaagggccgccgatagatgcgccagcaactatcacgcctggtcgcaccgccagtggatccttcagaacggcccatgcctgctgcaatcggaactgctacgcacggagaagtttatgcggaagcacatcagtgactacagctgctaccactaccgccaagtgctcctgagtcgtgcatatgagctcagttttgcccttcccaaggattccggagccagtggttcgtctacgttggccagtctgcagcatctaatgacaagctatggcctggaatgtgaagccaacgctgaggatctgctgggtctcttgctaccacatgtggatctgagttccgtgagcaagcaaaggctaatatcatttctttactgctgcaacgttgccgccaacgatatgcgtctgtgtgccgagcagcgcttgatgtacggatcgcgggattgcttcgagctgcatcgccgtgcggcactcaagttcatcgtggagcagtgcgtgcgcctgcaaatgggcttgcccaatggccaactgttaccagtggcgtcaggcgatctgcgttcgcatttgggcaactttgactttgaagataatccgtttttaagtgccgtacggcgcgaggagtccaccctgggtggtaagcaccggcggtggtgcaatcttcacctcagctttggatatccagcggactag

SEQ ID NO: 5373 - protein, 398 aa, DROSOPHILA
MEEERNEKKVLCEKIIRDINAVFLKDQDLASFEIIPKEANCNKSPVVHVEHNLGLESWCAQHVYDHAHRTLISHRRQTTAQQLRTLQQQQQSDSLAKYLNVALLINPDVTTFWHIRRQLVQKNRLSINKELQFSALVLSIKPKSNEAFAYRRWLYSFQSADAIDWPNEIGICERAADRCASNYHAWSHRQWILQNGPCLLQSELLRTEKFMRKHISDYSCYHYRQVLLSRAYELSFALPKDSGASGSSTLASLQHLMTSYGLECEANAEDLLGLLLPHVDLSSVSKQRLISFLYCCNVAANDMRLCAEQRLMYGSRDCFELHRRAALKFIVEQCVRLQMGLPNGQLLPVASGDLRSHLGNFDFEDNPFLSAVRREESTLGGKHRRWCNLHLSFGYPAD

SEQ ID NO: 5374 - DNA, 2753 bp, DROSOPHILA
aagcgaacttaatgccgcccgcatgaatggaggtaatagcatcctggcccatttggacgaagcttaccagtgcctgaatgacaccgaaaagcgtggccagtttatcctcattgccgtgtagcgagaagattggctttcccgcctcgcttagtatgaagatgtgtttcttttggccctgccacagactgtcgtgctggtaatcgtattcctcctccagtcccccgccaatggagtcctctgttttggcgctggtcgaggtgctcaatgccagagactccacagaggcagccagtcccttgttctcctgccccggctccggactgagggcactgttatctcgcatggtgcccaggccatctcttagctcagagataatactatggttttgttgctcggcctcctggtcgggatccgcctcttgatagagatttggggactccggatcgccctctgcgtctagatactcgcaggtggagttcgtgtccgacctgactgacgtctgctctacttccatttcgaattcgtttaactatttcagtcgctggaacattgcagtttgccaatatttagcaatatcataaatttacaactaaatcattacagctggaatggatttcccaacactgtccgaagcagaaggtgaaataaagggtgttccggaaaacacaccataagataggcttattcattcttaaatgttatgaaaaataagttaatttgatatatggattttgaattactttatcttaataattataattaaatttttatatctgttattttgtttttgttttaagacctcttatagaaacacttctatccaacactacccaccagctgtttaccaaaatcgacggaaaagaagaagaacataggttatgaaaacacgagccgctccaaaatgttgagaaaatcgtttgccaaccgtaagtaatcaattaaaacatcaaggaaaccaaattatacatgctttcccttggtagtaccccgctttggtcagatgtgcggtctgccacgacgcctgcagagcacacagccggagcaatcggtggaaacggaaccggaggacatcgccctggtggaacagcggattctgaagcatccggactacttccaagtgcacaacctgttcaccgtgcgcgacctcttcaatgcccgagtgcactatggccacaaggagggctccctggacgaccgaatgcgtccgtacttgttcggcagtcgattaggtcatctgatcttcgatctggacaagacggcatcacatctgcgcgatgccctcaactttgccgcacacattgccttccgagatggcatcattctgttcttcaaccgcaacgccatgaactcacatctcgtggagcgaaaggcccaggaggccggtgaattctcgcacactcgcttttggcgcggcggcatctttaccaatgccaatgtgcaattcgatgcggtcaccaggctgcccgatctttgcattttcctcaacactcaaaacaacgttatggctcagcacacggcggttcgggacgccgccaaaatggccataccaacgattggcatagtggacagcaattgcaatcccaacctgatcacctatccggtgcccggcaacgatgactcgccggccgcagtggagctctattgcaacctcttcaaggaagccatactgcgtggcaagcgggaacgacgccaactccttggccttccgcctctggacgaatcccagccgcggcgcagtcgcaaaactaagtaatagccaagtagtagtgtcaagttgattttgttacatttatcttaatacaaatgccaatggccgtcaatccacgatgaagaagaaattgctaaatatggttgcaaaattgcagaactttgtgcatgtgccatgctatttgatagtgtttaagaaaacccacgacctgggttagtttcggatagctattctagggcggcagcagagtggcacccttgacaaagttgttgctgtagtggctgaaatacgagggattggagttggaccccgtgttgttggaacttccagagggccagtagttggtaatctgtggtggggtgtcaggtggcggcggaggcggcgctgaggtaccaatgatggagagatccgtaccgcctttgatggcacggccgggaccgaagaacgtatccatttgctgcttcttgaaatcatgcatcgacgcaaaaccattcggcggcctctccttggacatgtcccacgagccgatgctggatgacttgcgcacgaacacttggcccttttcattcttgtcctgctccacccagcgctctgcatgcttcaccgtcagcatcgccttgtgcgcaactatatactcctcggccttctgtagtcgttccagttgctgctcgtccagctggtcgcgcggcagcttccccaaacgctgcaccgttcgcttccagttgtggaactcacggtttttaaagggcttcatggccatacggtactccttccactggcgctggcgctcctccttcgtaccaggcggtgcatcctcgagcggcggtggtgcctctggcttctgtatccattggccattgacctggacaaatgtgccgcagcgcttgggcttcttggagggctgcgcttccccgtttgacggcgaattgttgccattgcttggcggtgggggcggaggcataagcctcgtatctttgtcactgttgccgcgatggtttaccttgaatttcttgttattctggtttggattgctgcgattgttttg

SEQ ID NO: 5375 - DNA, 753 bp, DROSOPHILA
atgtgcggtctgccacgacgcctgcagagcacacagccggagcaatcggtggaaacggaaccggaggacatcgccctggtggaacagcggattctgaagcatccggactacttccaagtgcacaacctgttcaccgtgcgcgacctcttcaatgcccgagtgcactatggccacaaggagggctccctggacgaccgaatgcgtccgtacttgttcggcagtcgattaggtcatctgatcttcgatctggacaagacggcatcacatctgcgcgatgccctcaactttgccgcacacattgccttccgagatggcatcattctgttcttcaaccgcaacgccatgaactcacatctcgtggagcgaaaggcccaggaggccggtgaattctcgcacactcgcttttggcgcggcggcatctttaccaatgccaatgtgcaattcgatgcggtcaccaggctgcccgatctttgcattttcctcaacactcaaaacaacgttatggctcagcacacggcggttcgggacgccgccaaaatggccataccaacgattggcatagtggacagcaattgcaatcccaacctgatcacctatccggtgcccggcaacgatgactcgccggccgcagtggagctctattgcaacctcttcaaggaagccatactgcgtggcaagcgggaacgacgccaactccttggccttccgcctctggacgaatcccagccgcggcgcagtcgcaaaactaagtaa

SEQ ID NO: 5376 - protein, 250 aa, DROSOPHILA
MCGLPRRLQSTQPEQSVETEPEDIALVEQRILKHPDYFQVHNLFTVRDLFNARVHYGHKEGSLDDRMRPYLFGSRLGHLIFDLDKTASHLRDALNFAAHIAFRDGIILFFNRNAMNSHLVERKAQEAGEFSHTRFWRGGIFTNANVQFDAVTRLPDLCIFLNTQNNVMAQHTAVRDAAKMAIPTIGIVDSNCNPNLITYPVPGNDDSPAAVELYCNLFKEAILRGKRERRQLLGLPPLDESQPRRSRKTK

SEQ ID NO: 5377 - DNA, 5333 bp, DROSOPHILA
tgacctgtaatgggcaactaaatgttactcgcaaccaaaagtaaaggaggaattatttagcaaaaaaaaaaaacattgtctatattatggattacatgttttgtgcagggtgaagtacatacatacccccaattgattaccactctaccaatcccatcaaatctgaagtctatcacgtatacaaatttttcagtttgctaagcaagccaagccacaagtgcctaaaagaaaattatttcttacccggttgccctttaggataaccctaattttactataaagcaatatagtttttttaggctgtaaatgttaacgcggggtttgtatgtgtaattaactttgtctgtttaaaacggcaacatgtaatttaagtcgcaagattttccgtttcagcaacaaagtcataggtcaccgaaaggcgcttctttgattttctgctggcatttttatccatatttatgtaaccacgacaagagtaatgatgaaaatatatttatacagatcagtgtcccttggcggtattaactgttacggctgacagtttaagctgtcatcttaatgcatttgttttttgtttttcttttgcaataaaatttgtaagttttacgcataattgaaagaataggtatgcaaggagtcatttttcgagtgcagctacgttaatgtttaaccataaaatattgaattgattaaattcgccataaatagcacagcagaaacggtgcaaacaataaacaaatattatcgtgtgcagttaaaattgactttttaatgcggctccatttttgggtcggtgtttactatttgatcaagggcttaaatatttttgtcttaatacgaaaaaacgcacagatttggtaaaggcttaacttaaaatttcagcgcccaatcacccccttcagagttgccacacgttgttacactaagttatcgaaacgaacagctgatttttgttttgtaatatttgaggttggtttttgttggctgaaatattattacattaaattagatatggaccttttacttcaaagcgtttgacaagttgaacatcaaacggaaatctattatagccccaattggcgagaccatcaaataatcattggaaaacaacctgagatgagttttccagacaaggcggagcgcaaaaagtgctggaacaaccgggacgagtattggaaatgtctcgaggagcacgccccaaagcacagttctaccagtggggaaaaggtaccaaccccctgccagagtcttcgcaaatcatttgagcaatcctgccctggtcaatgggtaaagcacttcgaccgcaagcgtacttatgaccagtttaaggaaaaaatggcccagggttatgatcccttggaggaccgtacgaaggccgagaagcaagccaattaacccttaacccgccaagagttctaggagtactgttgaccagtttatacccgtgtttgtgtactttttatggtaaataaataaactatataataactacaaagaaaccacatttacaatatatgtatgtacatatgcattaatggcagatggtactaagcatgtcctaacttgtcttctaaattgtggattgatttcgtatatactttgaaaataaagctaaaaagtagtggcttattaatttatatttatttatttctcgacatgacatgcccattgtggggttaatatttctgtttctgtaatcagtgttcccactccagagttctttactgaattatcgataactagaagcaaaatggttgcatgcatattaatttatgtattgtagtttacaatttaattgagtatcgtcagtggttgcagctggaaacggtgtagttaacgtaatggaatcgattacctttggagttttgactagtatgtgggcttttatccccatagacttctacttttcatgatttttatacccctagttagcgacacatgttggcaggagccggagaaagatacaagtggtcctatattgagacaacttatcggtgaaacctttgctaatacccaggtgattggaaacatagttccggacgaaaaggatatcatacagcaagagctacgtaaatggatcgatcgggaggagctgagagtgattctgactaccggaggaacgggatttgcaccacgggatgtgaccccagaggccacgaggcagctactagaaaaggaatgcccacaactctccatgtatattacactggagtccatcaaacaaacccaatatgcggctctttcccgcggactctgtggcattgcaggaaatactctcatcttaaaccttcctggtagcgaaaaggccgtaaaagagtgtttccagaccattagtgcacttttgcctcacgctgttcaccttataggtgacgatgtgtccctggtgcggaaaacacatgctgaggtccaaggatccgcccaaaagagccacatttgtcctcacaaaaccggaactggtacagattctgatcggaattcaccctatccaatgctgcccgttcaagaagtgctttcaattatctttaacacggtacaaaagaccgccaatctgaacaaaattctgttggaaatgaacgcgccggttaacattccgccctttagggcttccatcaaggatggctatgccatgaagtccactggattttctggcactaagcgtgttttgggatgcatagccgccggagattcagtaagtttcgattttatttgtagtggtaatctatataagcaggagggaacgagagtaaatgtttaatggaagtttaaaatcctgtctcgatttttaaacacacttcccattcgttttcagcctaattctttgccgctggcagaggatgagtgctacaaaattaacacaggggcaccattacccctggaggcagattgcgtagtgcaagtggaggacaccaagttgctgcagttagataagaacggccaggaaagccttgttgacattttggtggagccacaagctggattagatgttaggtatgtattgcgaaatatcaaagacaaaccaaataaaacatttgatttatttccttaggcctgtgggctacgatctaagcaccaatgatcgaatttttcctgctctagatccttctcccgtggtggtcaaatcgctgctggcttccgtgggcaataggttgatactatcgaagcctaaggtggctatagtgtccactggaagtgagctgtgttcaccgcgcaatcagcttactccgggaaagatctttgactcaaataccaccatgttgaccgagcttctggtttactttggctttaactgcatgcatacgtgtgtgctaagcgatagctttcagaggactaaggaatctctattggagctcttcgaggtggtggactttgtcatttgcagcggtggtgtctcaatgggcgataaggatttcgtaaagtccgtgttggaggaccttcaatttaggattcactgcggccgagtaaacataaagccagggtaatattgtctccctcaacgcttagtgctatatttatcttgtgttcctcaggaagcccatgacttttgccagtcggaaagataagtacttctttggtctgcccggaaacccagtttcagcattcgttacttttcatctgttcgcgctgcccgcaatacgctttgctgctggctgggatcgctgcaagtgctccctttctgtgcttaacgttaaggtaggttccaatccaatttaaccacatagtgaatttgtgaatggcgacagacttttacgattgaaggtagttatatcttggcaatcatcaatcaaagtgaggactaaagattgctctcgaaattgctggaatgtttccgtcaccatacttctttggaagctattaataggaaatagtttgacaaattacagattttttaatggaaaagattttataacatttaaattagaatcaacaggagtatctcctttccgtatatgtacattaaagtgctcatacgtaaaatgaagaaaaagccacttaaaattttgaataatttcttaatatattttcttttagttgcttaatgacttcagcttagatagccgcccggagttcgttcgggcctccgtgatttcgaagtctggagagttatacgcgagcgtcaatggaaatcaagtaagccacttttccttaaattaaacgacatattatgacggttttcctgcgattattctagattagtagtcgcttgcagagcattgttggtgccgatgttttaataaaccttcctgcacgtacttctgatcgaccattggcgaaagctggtgaaattttcccggcctccgtgttgcgctttgactttatctcgaagtacgaataagaactacacaaacgtaaaatgtaaaacaaaggtataaattccagaagttggacagacatatatagacagcacatatattatctttatttttttatgtatgataacattaaatataacgttcaacaattacaccgttagcagtgtgagcaaaaacgattaaaaagtaaatattataaaagccctcagaacagaaaaaagaaacatcaatcgaaatatattgtaaaaatattaaattagggaaaggagcaggatcagacgcgttatactaaatgggatcaggatcaggagcatatgtacaggaaatggaagaagacaaattttaaaccgactgactggcgctctcgccgactgttgaagctaccggcctctgaagtcgcagcgaggagcgacatggcaacgcaaattggtatttgttatgacttagaagcgcatatcgctgctgcggaacatagtcccacaacgcccgctcgatcacatgaagagcgtccggactgagcacgtccgctgtatactgcgtaggagccccaacgaccaaggacatggctgaaataaattacaaacataaaattatatataattgattcccaacgatgatggaaaacattactttgtgccactggtgccttgtacaatgactccgccgtcatgccgcatgtatccaaagcgaccacactgacgccatagggatgcagctccttgcgcagctcttcggcacacttgtctacggcaacgcgtgaggcgttaaaggcaaccagtccatcaccttcgtttcgagcatttccacctccacttactcctcccaagtaaaggagtcttccacgtgtcggacggagaaaacacacaaaggccttggccacacgtaaggtgcccaggatgttggttctgagcatgtgttcccactgctggacattctgcgattcaacctggcctcggaaaacactgccactagtgttaattacggccgcaataccgcgctcatctgcatttagattagcgccta

SEQ ID NO: 5378 - DNA, 2357 bp, DROSOPHILA
ttaaattagatatggaccttttacttcaaagcgtttgacaagttgaacatcaaacggaaatctattatagccccaattggcgagaccatcaaataatcattggaaaacaacctgagatgagttttccagacaaggcggagcgcaaaaagtgctggaacaaccgggacgagtattggaaatgtctcgaggagcacgccccaaagcacagttctaccagtggggaaaaggtaccaaccccctgccagagtcttcgcaaatcatttgagcaatcctgccctggtcaatgggtaaagcacttcgaccgcaagcgtacttatgaccagtttaaggaaaaaatggcccagggttatgatcccttggaggaccgtacgaaggccgagaagcaagccaattaacccttaacccgccaagagttctaggagtactgttgaccagtttatacccgtgtttgtgtactttttatgttgcatgcatattaatttatgtattgtagtttacaatttaattgagtatcgtcagtggttgcagctggaaacggtgtagttaacgtaatggaatcgattacctttggagttttgactattagcgacacatgttggcaggagccggagaaagatacaagtggtcctatattgagacaacttatcggtgaaacctttgctaatacccaggtgattggaaacatagttccggacgaaaaggatatcatacagcaagagctacgtaaatggatcgatcgggaggagctgagagtgattctgactaccggaggaacgggatttgcaccacgggatgtgaccccagaggccacgaggcagctactagaaaaggaatgcccacaactctccatgtatattacactggagtccatcaaacaaacccaatatgcggctctttcccgcggactctgtggcattgcaggaaatactctcatcttaaaccttcctggtagcgaaaaggccgtaaaagagtgtttccagaccattagtgcacttttgcctcacgctgttcaccttataggtgacgatgtgtccctggtgcggaaaacacatgctgaggtccaaggatccgcccaaaagagccacatttgtcctcacaaaaccggaactggtacagattctgatcggaattcaccctatccaatgctgcccgttcaagaagtgctttcaattatctttaacacggtacaaaagaccgccaatctgaacaaaattctgttggaaatgaacgcgccggttaacattccgccctttagggcttccatcaaggatggctatgccatgaagtccactggattttctggcactaagcgtgttttgggatgcatagccgccggagattcacctaattctttgccgctggcagaggatgagtgctacaaaattaacacaggggcaccattacccctggaggcagattgcgtagtgcaagtggaggacaccaagttgctgcagttagataagaacggccaggaaagccttgttgacattttggtggagccacaagctggattagatgttaggcctgtgggctacgatctaagcaccaatgatcgaatttttcctgctctagatccttctcccgtggtggtcaaatcgctgctggcttccgtgggcaataggttgatactatcgaagcctaaggtggctatagtgtccactggaagtgagctgtgttcaccgcgcaatcagcttactccgggaaagatctttgactcaaataccaccatgttgaccgagcttctggtttactttggctttaactgcatgcatacgtgtgtgctaagcgatagctttcagaggactaaggaatctctattggagctcttcgaggtggtggactttgtcatttgcagcggtggtgtctcaatgggcgataaggatttcgtaaagtccgtgttggaggaccttcaatttaggattcactgcggccgagtaaacataaagccagggaagcccatgacttttgccagtcggaaagataagtacttctttggtctgcccggaaacccagtttcagcattcgttacttttcatctgttcgcgctgcccgcaatacgctttgctgctggctgggatcgctgcaagtgctccctttctgtgcttaacgttaagttgcttaatgacttcagcttagatagccgcccggagttcgttcgggcctccgtgatttcgaagtctggagagttatacgcgagcgtcaatggaaatcaaattagtagtcgcttgcagagcattgttggtgccgatgttttaataaaccttcctgcacgtacttctgatcgaccattggcgaaagctggtgaaattttcccggcctccgtgttgcgctttgactttatctcgaagtacgaataa

SEQ ID NO: 5379 - protein, 601 aa, DROSOPHILA
MESITFGVLTISDTCWQEPEKDTSGPILRQLIGETFANTQVIGNIVPDEKDIIQQELRKWIDREELRVILTTGGTGFAPRDVTPEATRQLLEKECPQLSMYITLESIKQTQYAALSRGLCGIAGNTLILNLPGSEKAVKECFQTISALLPHAVHLIGDDVSLVRKTHAEVQGSAQKSHICPHKTGTGTDSDRNSPYPMLPVQEVLSIIFNTVQKTANLNKILLEMNAPVNIPPFRASIKDGYAMKSTGFSGTKRVLGCIAAGDSPNSLPLAEDECYKINTGAPLPLEADCVVQVEDTKLLQLDKNGQESLVDILVEPQAGLDVRPVGYDLSTNDRIFPALDPSPVVVKSLLASVGNRLILSKPKVAIVSTGSELCSPRNQLTPGKIFDSNTTMLTELLVYFGFNCMHTCVLSDSFQRTKESLLELFEVVDFVICSGGVSMGDKDFVKSVLEDLQFRIHCGRVNIKPGKPMTFASRKDKYFFGLPGNPVSAFVTFHLFALPAIRFAAGWDRCKCSLSVLNVKLLNDFSLDSRPEFVRASVISKSGELYASVNGNQISSRLQSIVGADVLINLPARTSDRPLAKAGEIFPASVLRFDFISKYE

SEQ ID NO: 5380 - DNA, 6241 bp, DROSOPHILA
atgaatttaaatcattttccctcggcccggcgagctgtgcatcggaaaagccgagtccgggcggctcggaaaagcttggcagctcccactcaaaagcatttctttgcggctcactgacctggttcgcggctaagaaaagcggtggcttccatggatccggatgtgggggtggaaaagttgtggaaaagcggtggaaaagccacttgttgacgccagccgtgagctttccagccagcaatcgcagaccaaagctgatcgccggatgagcttttcactaatttaaatgtatatagtttaatttagaattccacgtttttagcattttttgatttgttcatcttgagctgctactagtaaattaccatgtatataaggcacacgtaaatgtcaaactatttctaagaggactctttaaaaagattgaaaccataaattaattaagaaatttccccaaatacaaagacgttcaacacatttatatgctgcctagaaagaaattgcgattcgcctgccttaaagcctcaaaaccgaaacatttcccaattaaaaggcgacaaacttctgtttgtgatgcgaattaagttcttcattaaccgagagtgtgtctacttatttatgcaaatatgtacctttgcaggcgcgtggagctgtcgcagtttcactcccaactgcccctcatccacatccgtgtgcttatccacatcctcacatccttacatcctgaggggcacaactctttttgctttggcgaggtgaatgaatgctttttgtgaatggaaagcatgttctgccaccacccgccgccttttcacactgagaaaaatgttggcaacacaaatgcgataattcgaaataatactatattatatatagtacgaatatatgtacatatatgggtcaatagccgtgcaccttaggtgccatcattacccgaaacacgtccacaataattcaagacatctcaccagcaacagatagtttttctcggtgtagtttggacttagttgcagcttgtttgcagcatgtcaatgagcacaatttctgcagcctcctccacgtgcccgcattggaggatgcccagttcagtggccgccagtccagagttcagagttgcagcatattttccgaaaagtgtgataaattttccggccaatggcttccgaccggcgctgtatagtgtgtcaaataagtgtatatccattgctttattctcttgctttatacatacatttggtttgccgctgcttatgtttgagtgtgagtgtgtttggttgggtgagttgttaagtaatttgtgcaaaatttaattaaggctaagttaaccctaggctgtatacatcggcgcaaataattccgatatacacatacatatatcatgtgtgtgcctacagtgcgtttcagaaccataagaatattgtgcagttgcaggtaaagccatataaagtcagctaccgaattaacttattaaacaaacatatatgtaaatagattttaggagctttaatcttaaaaatgaaattgcattaagtaaggttttacatctcatttcgagagttgactacgattttcttcttatagctatgacacgcacttttcaaactagggtggttcgattgctaaataggcaaaaataaatatactttaactgaaagttatttgatcccgactcgaatcgaatgaacataatgagctaacattaacaaattaaattattgtcttgtctgaatcttagcaaaaatgccagatcccggggtttcttaggcaaaacgaaaacaaatatttgacccatggccttagagttaagtatcttttaaaaaaatatcgagatatggcaaatggattttaaggtcataagcttaaatacagaaccgttccaccctgacgttaaacaattaagttcgttccatatttgccgaataggctatgctatctatcgaatactttgggtcaatacctgggcggcaattggattgcgaatcgctcaggatcagaacatgccatccgatcgggcgacgggtatgagcacgatgaggaagatgacgaaatttcgcatgaccagacgccagtcgctgggcaccgcatacggcagcaggatttgggtgaggcggtgcacctcgtgcgatgcgcacacaaatatgaacgatgtaatgatcatgttgagcgtcgggaaaccgggcagcagcaccagaactccatgccgatcggcggccagccaaatatgatactggcagacgaacagctccaacgagatgcggccaaaccaggcgaagaacgccgagtatcgtgtacgtagaatacccgaaatgttcctgaggaccacatagcccacaatcgggatgaacagtatatacgaatggatctcctcacagttctgaacgttgcggcaaaggaacgagaacgaagtgtacaccccgacgcccagcagggccagcaatgtgactgatattgatgtccttcgcgaaaacagattcccatggttgttgtcatcgaacacattgtacttttgggcaatgtgaaagcaggcggcatatatcatgccaaaggccaccgtataccggtccagtttccactgatgccaccactcgtgcaggtcgtcgtcagtggtcacaaacaacgctttccacggtcgcgttacgaatatccgttcgaagaatacctccgacatgaagagcaccgtgatgccgcccaggcaaccaatgcacttgcacaccaaatacagatagtgcagcggattggcgtccaccgatgcggacgaaattcgtggcggcagtgcgagcacaaagtatacgatgcacagccaaaaggatagtagtggcacaaaatagtagaactgatacggccggttcatgcagaagcacagcagtacactgagaaagtttgcccggaacatggcctggaaaaagcgtacgaatagggagccactgccacccgtttgccacatatgcgtgaagtgcgtgtatccggtaaggaaaaagtatcctgagatcaacagcttaatgtgcatgtgaatgggcagcactcgctgtgctccggtcatgtaatatataagcaccaccagcagtatccagccacgcagttcatccgtttgatcgcgattgagcaccttagtgaaccgtgaatcttccgtaaaaaacaatccgagtgcgaagacatagcccactggtatccagaagctaaactcagaatagtatttgttctccttcataaagaagtttgtgcgatcgcagaggtagaaataggccaaaattaggcccagcagtgatagcgccaccatgggagtgccatagtcggttatcagagcggataaggcattgctcggtgatcctccacctgctcttcccccgtcgtaagattgctgctgctgcaggggcacatacaaagtctggccccgcaggtgaagcacccatctgcgcagacacatgccacacacaagcgccatacagacgccaaacaaggcgtatgccactatttgcagcgtggtgtatggctcagaactgctgcagcaggtgccatcattgtagttcatgtagtcattgcagtacatgttccacagtagctgaacctccagtcgctggccatgggcgcacagctgatgaccatcgatggcgttgtccagcaaaccattggctatgtgccaggcggattcccaaacacttgcctccgtgtagcgaaaaactcctctggccacatggtttaatcgatcgatttgctcgttctggagcagcttccagtgcgcgggcaatttctcctcgtccacgcggtctgctagcttccagaggacccgcgaagtttgcgccaccaggcgatgaaacggagccaccagcaatgtaagattggcggcatattgccgcagcacatcgtctgtggtgttgccagcgagcaagccggcataggtgaagcccacaacgtacacagaggacagctgcttctcagactccagacggtacagttgctccacaagcgacggactcacctcctccgcccgaatgtactgggccagcatatgcagcttcttgtcctcgaaacgggctgagccatcagtcaccgaggcgttattgtcctcctcgtcggccatttcatccgcggccaatggcaggcgaagttgctccacaaatcgttcgtagagcagccgtatactctcgtcgccaatgaacacaaagttgttcttgttgtcgaagaaggcgaggtaacgcaaacagcgccttgtgtcactgtaaataatgagaatttcggtttgggtgactcattaattggggggttatcttgtcgggaatgtgcgttgattactcacgtgagggagtacttgtgcaccatgcaaccgtacggctgccactcgttgtcgcccttaaatcggcccttggacagcagccactggcaggagtcactgcctgcgggagaacaaaacaaaacaaatcaatatccataataagcatacgatggcagccaacatcccaaatatgaactttacatgtcgtttatattaatccaaccaactgcagaatttgtacactaatcttaaaattcgacatgattatctatatttacataaacgtttgagattaaaagtttgtaaaaaccttttttactatttaaaatgtaccgaatatggtcaaacgtcaaactgactcattaataatatgagaagaataagtgaacattggtatacaattgtgatcttaaaatgggtacgattccgtatccacatccattataaatttcatagtacttagatctttaaagatcttgtaaccttggacccaccgtatttccagttgagcaggccgtgatagacgatgaagccgaggaccagaagcaaagccaccttcttggcattggtggcgtttagttgttccataaatatatccgctctggtgggcatacgctgtcctccggcggcgcctccaatgcagatgccgcctagttcgggactaggggctccattcactgacactccgggggttccggttgtagctgctccaatgcctcctacgcttccaccatttccaccgcgcagttcgcgtagctccataatttataagccgtctgccgccttctccaccgccaccaccaaacggtctgcgacggaaagtctggcctataatatagataatttggcctattgcatgggcatgttttaacccagttccgcttgttccttaggcagcgaccgactcctcctatcgcttgctgtttcgctcttgcttggcttttattttactttcctttagcttttgcttcgccggccgatagacaaccgcgtctatcgaccgccacccacaacacaaaactatcgacaccgaacagctgatttgtctgcattgtgggcgaacgggaaagatcgttaataatatcaattatcaaatttcgaaaaacacaatactatactttatagcaaatatacatttatttttttaccatttaagcattagcttttgctttgccggccgttaggcagccgcgtctattgccctccaacgcaatacaagactatcgataacgaacagatgatctctcagcattcctgtcgaaagggaggatcgttaataatatcaattattaattatcgaataaggcactacaatacttaatttatttttcagctaaaaatatttacatatcataggaaaaaaattagaaataaagttaaataaataggaataaatctacatcagagagtccataacaaagcgaaatttttgtattcgggacattttcattttcaaaaaatattcttcgcacgcaagataagtggtacgcaactatcgattttggatagtcatctgacgagaagacgcacataaaattgaattcgttcggaaaagttttgacaaaacgcgaagtttcggcagcactatgataactgctaagaagcacccgctggacaattgccaattgtttgtccagctgaagaagttatttcatgactacaacgagaaggtccagcgtctgaaggacatgatttactggagtggtaagtgaagtaccagaggttagtgcccaaatatgaacattgtttgttctcaggaaacgatgagcacattgcgaagatctgcgaccaagtgacggacctgctggtggagcacgatctaatcatacagccgccagacacaatggatccttgtgctatgaatcacctgcgtggactactggtgtacctggtgctgaacactgcacacgatgatatccagtgcgaatcgcagtggagcgccaatgtcatgcatttgtgtaaccagctgccgcc

SEQ ID NO: 5381 - DNA, 3003 bp, DROSOPHILA
ggcgaagcaaaagctaaaggaaagtaaaataaaagccaagcaagagcgaaacagcaagcgataggaggagtcggtcgctgcctaaggaacaagcggaactgggttaaaacatgcccatgcaataggccaaattatctatattataggccagactttccgtcgcagaccgtttggtggtggcggtggagaaggcggcagacggcttataaattatggagctacgcgaactgcgcggtggaaatggtggaagcgtaggaggcattggagcagctacaaccggaacccccggagtgtcagtgaatggagcccctagtcccgaactaggcggcatctgcattggaggcgccgccggaggacagcgtatgcccaccagagcggatatatttatggaacaactaaacgccaccaatgccaagaaggtggctttgcttctggtcctcggcttcatcgtctatcacggcctgctcaactggaaatacggcagtgactcctgccagtggctgctgtccaagggccgatttaagggcgacaacgagtggcagccgtacggttgcatggtgcacaagtactccctcactgacacaaggcgctgtttgcgttacctcgccttcttcgacaacaagaacaactttgtgttcattggcgacgagagtatacggctgctctacgaacgatttgtggagcaacttcgcctgccattggccgcggatgaaatggccgacgaggaggacaataacgcctcggtgactgatggctcagcccgtttcgaggacaagaagctgcatatgctggcccagtacattcgggcggaggaggtgagtccgtcgcttgtggagcaactgtaccgtctggagtctgagaagcagctgtcctctgtgtacgttgtgggcttcacctatgccggcttgctcgctggcaacaccacagacgatgtgctgcggcaatatgccgccaatcttacattgctggtggctccgtttcatcgcctggtggcgcaaacttcgcgggtcctctggaagctagcagaccgcgtggacgaggagaaattgcccgcgcactggaagctgctccagaacgagcaaatcgatcgattaaaccatgtggccagaggagtttttcgctacacggaggcaagtgtttgggaatccgcctggcacatagccaatggtttgctggacaacgccatcgatggtcatcagctgtgcgcccatggccagcgactggaggttcagctactgtggaacatgtactgcaatgactacatgaactacaatgatggcacctgctgcagcagttctgagccatacaccacgctgcaaatagtggcatacgccttgtttggcgtctgtatggcgcttgtgtgtggcatgtgtctgcgcagatgggtgcttcacctgcggggccagactttgtatgtgcccctgcagcagcagcaatcttacgacgggggaagagcaggtggaggatcaccgagcaatgccttatccgctctgataaccgactatggcactcccatggtggcgctatcactgctgggcctaattttggcctatttctacctctgcgatcgcacaaacttctttatgaaggagaacaaatactattctgagtttagcttctggataccagtgggctatgtcttcgcactcggattgttttttacggaagattcacggttcactaaggtgctcaatcgcgatcaaacggatgaactgcgtggctggatactgctggtggtgcttatatattacatgaccggagcacagcgagtgctgcccattcacatgcacattaagctgttgatctcaggatactttttccttaccggatacacgcacttcacgcatatgtggcaaacgggtggcagtggctccctattcgtacgctttttccaggccatgttccgggcaaactttctcagtgtactgctgtgcttctgcatgaaccggccgtatcagttctactattttgtgccactactatccttttggctgtgcatcgtatactttgtgctcgcactgccgccacgaatttcgtccgcatcggtggacgccaatccgctgcactatctgtatttggtgtgcaagtgcattggttgcctgggcggcatcacggtgctcttcatgtcggaggtattcttcgaacggatattcgtaacgcgaccgtggaaagcgttgtttgtgaccactgacgacgacctgcacgagtggtggcatcagtggaaactggaccggtatacggtggcctttggcatgatatatgccgcctgctttcacattgcccaaaagtacaatgtgttcgatgacaacaaccatgggaatctgttttcgcgaaggacatcaatatcagtcacattgctggccctgctgggcgtcggggtgtacacttcgttctcgttcctttgccgcaacgttcagaactgtgaggagatccattcgtatatactgttcatcccgattgtgggctatgtggtcctcaggaacatttcgggtattctacgtacacgatactcggcgttcttcgcctggtttggccgcatctcgttggagctgttcgtctgccagtatcatatttggctggccgccgatcggcatggagttctggtgctgctgcccggtttcccgacgctcaacatgatcattacatcgttcatatttgtgtgcgcatcgcacgaggtgcaccgcctcacccaaatcctgctgccgtatgcggtgcccagcgactggcgtctggtcatgcgaaatttcgtcatcttcctcatcgtgctcatacccgtcgcccgatcggatggcatgttctgatcctgagcgattcgcaatccaattgccgcccagcgccggtcggaagccattggccggaaaatttatcacacttttcggaaaatatgctgcaactctgaactctggactggcggccactgaactgggcatcctccaatgcgggcacgtggaggaggctgcagaaattgtgctcattgacatgctgcaaacaagctgcaactaa

SEQ ID NO: 5382 - protein, 862 aa, DROSOPHILA
MELRELRGGNGGSVGGIGAATTGTPGVSVNGAPSPELGGICIGGAAGGQRMPTRADIFMEQLNATNAKKVALLLVLGFIVYHGLLNWKYGSDSCQWLLSKGRFKGDNEWQPYGCMVHKYSLTDTRRCLRYLAFFDNKNNFVFIGDESIRLLYERFVEQLRLPLAADEMADEEDNNASVTDGSARFEDKKLHMLAQYIRAEEVSPSLVEQLYRLESEKQLSSVYVVGFTYAGLLAGNTTDDVLRQYAANLTLLVAPFHRLVAQTSRVLWKLADRVDEEKLPAHWKLLQNEQIDRLNHVARGVFRYTEASVWESAWHIANGLLDNAIDGHQLCAHGQRLEVQLLWNMYCNDYMNYNDGTCCSSSEPYTTLQIVAYALFGVCMALVCGMCLRRWVLHLRGQTLYVPLQQQQSYDGGRAGGGSPSNALSALITDYGTPMVALSLLGLILAYFYLCDRTNFFMKENKYYSEFSFWIPVGYVFALGLFFTEDSRFTKVLNRDQTDELRGWILLVVLIYYMTGAQRVLPIHMHIKLLISGYFFLTGYTHFTHMWQTGGSGSLFVRFFQAMFRANFLSVLLCFCMNRPYQFYYFVPLLSFWLCIVYFVLALPPRISSASVDANPLHYLYLVCKCIGCLGGITVLFMSEVFFERIFVTRPWKALFVTTDDDLHEWWHQWKLDRYTVAFGMIYAACFHIAQKYNVFDDNNHGNLFSRRTSISVTLLALLGVGVYTSFSFLCRNVQNCEEIHSYILFIPIVGYVVLRNISGILRTRYSAFFAWFGRISLELFVCQYHIWLAADRHGVLVLLPGFPTLNMIITSFIFVCASHEVHRLTQILLPYAVPSDWRLVMRNFVIFLIVLIPVARSDGMF

SEQ ID NO: 5383 - DNA, 6175 bp, DROSOPHILA
atcgtcaagggtcgcaaaatggttactctcaaaatttttaaaatgttaacattgttgcttttagaccttagaccttaggatttcaccttgttatcataacagtttgcagctagttttatctgaatctggttctggatctggatctggttctggatctgaatcgggatgcatctatgggggtaggcaaaagtggagggtctcgaaacctatataacgcacataacaccgacaacacatacatacataacatgctttaactctggagcggatcggataagatctctcttcggcttataaactgcaaactggagttccaattaaatacacctatgccttggagtttacattaggaaatacacacaaaaacctttttttggaggagcctttggcgaaatacataaatgtatacagatacggcaattgatatcgtatccatttatcatctcagatcggatatactggtacatatataacgttctacatgctagatgcttattgtggctcataaagctcttctctcctcttctcatgttcttcctctcttgctcgctcgctcgctcgctcgctcactctctctctctctctctctctctctctctctctctctctcttgcttactccctttctctctatttctctatttgatagataggttatagacatggaacaacattactggcactggcaaatgctataaattgagaatgcacccactgagaagggaaccccccatgagtgtagatcaaacctattaactagtcttatcctctaggctcgtggacagaggtcaatagccggctttgcccccagttaaaacatccttcaaactgtatccctctccgaatcgaccaacttctgtccacagagcttgaagtgtagcttgcgtcgcttgacttgtgtctgtcgttccatactgacgggctgcgattcgagcagatctggccgccgacccggatccggatccagttctccgtccgtatccgtatccgaaacatgtcacatggtgtgcgtccgggccacgacatcccgtcgcattcgtcgggactagctgaagatgctgcgtcataagctgacgagcgtcgccttgcgttgcgcctccaatcggatttccagagtggcatatggcggcacactgatgacgaggagcaccaccaatgcaatgatcttcatcgattcgcagaggaagccgtgaccggcaaaggtcaatcccagtcccaggaagcgaagggcaagaagaggcgcctggacctccgttacatgactggaatggttgagggtgaccagcgagagcaggagcgtctcccacatcccattacaggcaccccacgaggcggcaatcacgtagaacagggcgctgtcgtcactcgagggcttccaactggacagcgccagcagtagacaggagtggaagaagaaaccagccactgcaaagagaagagcgttgtaacttcgagtaccctgtgtccatctggtggtactcacaaatcacgacgatcctcttgacgtgccttagcagcatgctcaaggtacaggagacgatgagctgcatcagacccatgccaatcaacgcgccggcaatcattccgatgcccagcgaacaggtgacgaaggccctcaagaagtcacccatcatatacgcctgttccgtgcccacaaaataggccaggggtccggcaaacagcagggtgtccgtgatgcttacatctctcgaacgctccggtcgcgatgagcctatggcctgcaccttgtccaccactatcagcagcgaaagggtcaatgataccatggagaacagaacgtacagccagagcaaggattgcccggccactcgaggctcactttcgatgaagccagcatagatggaactgggtatggagctcccattggcccatcccgcctccaggattgactgcactctgagtggacacatgtctgccccacagatcctgtcgccgtgctcgttcctattgtagaaatccctcagttgtggtggccagctctcgtttccatagtaaaccaatccggagcaatcgcccgtaaagtttccatcgctgcaggccagcaaaatggatgccagaagggctcctcctatgagacccaggtcctgggaaaccctgaaccacctggccagacgcctcaccttctgatcccgattgcaaaacatcttgtgctcctcgtgcaagacatcgaccgccgcctgcgactgctgggaatcgcaggagcagctcaacttccctccaaagtggacaatcaacgcggctttggagccagcggatccgcttaaggtcatgccaagcagcaaataggcgggtagaagggtgtaaatggaggcgtacaggtgcgacagaagaaataggagcactgtcatatagtttgccacaattagtggcccataaccatatcgtttcatcagtcgaatgctgggcaggctcataccagcggcgaccaggaagagagcactcagcagaagggatccaacctccggaccgaggggcaaccattcctcccgatggtgccacaccgcattggagccctggagcgccatcaccggcagcagaacgcagttcatcagtccgtgggccaagcttaaacagctaaactggcgccacactttttggcgcacatgggctggcaccttgtgccggcaattcctgttgttcagcgttatcaatcgccgtatggaggtggctccaatggagctgtttatggactcccgacgacgagaggccgccagagcagcctgcacctggtacgaggacaccgggatttatgcgatgcgacctcgtcgaaatgggtgacggcgaagtatgtggtgaagtgctgctggaaaagatgcaagaaaagggtattaggatatagcaagaatccaatcatctggcaggctaatggtattacagccagctacctttcactttaacaatagcaaagggggagtagtcggagtagggaagtagttgtagttcaacttggaaagagagtccgtgtccgaacactcacctttcacgacacaccaatgaccacagggcaccccttttgtgcacacatcgccacatgatagttgagtgtccaggaaaaaagggagataagctcccagattctatttatatgcgacaggtgtcaccatgccggaaagcaagtgacatgaattatataaaggcttttcacacagaggcggactttttatgtgttcacctgagaactcacctccatcatctgctcttcccagacgttctgggctcctcctgaactgcgggttcgaagcactctgtgcctggtggtcagcgaatggcggtgctgatggtgctggtgctggtgctgatgctggtgctgatgctgatggtggtgtgagtgtggggcatacttcttgcccagtcccagcatcgcaaagccactggtggccaccggagctcccgagctggtggccaatccagaagctgggcccactgcctggttcggaccctttccgccagttgtcccattgccaccgagcagctctccgttgcctgttgcagttcctgaggtggcattgaggctcaaggatccgccaccaatccccagaccagccattatgtaagcattatacgacgattgctgagtggagtagaaaaatacataagtcgtaaggaggggggatctactcaggcgatctcaccttgcgctgctgagcaaacgcggagagacgctcccgctcgcgactggtgtcccgagcccgctgctccagcagaagttcgtactcccgtcgcttctcccgcttgcgctccgcctcctccagctcgtgaagattcggcagactgcccatttccggcgattattgccaacttatcaaaacctagcgcccgtagtgcgagttatgtggattgtggggccactgcgaatccagtactgccatcgctccaaaacggcgaactcatgctgctgctccacgggcatcccattccaatccagtctgcaattattgtccttgctgcgtaggcgggttcattgtccgccgccgacctgccacgcccccaattccgcgtataaggctgtgtcaaaacgcaaatattgttctcctgcagcggaatgactgtgaagtggaaacaggaaatgaaaaagttgcgaggcctgaacggcagcgccatctatcggctgcttatcgagttgacacctgcacctggaaaccgttactcgcacacacacacacatacacctggccgtacgtgcactgcatacttatgtgggccataggccctacgtatgcgcacatgttctttccgttgccgttaccgttacttactcactacattctggcacattcactggcactcgcggtcgcaaaaataggatggtgggaataataagcttctaggctagctaatcctaatctgattgaagtcctaaggaagtggcaccttaatgctcaccaattagattgagtttccactagtaggattacttggcaactcaataatgtgcctattagccgctgctattagtgcagccgcgagtatagctcccttggccgtaggaacttcgcacacacaccccaccccccacactggcacaaaatcatcaggtgtgtccattttgtgttatctacacatgtgcagccgatggtgccccagggtcaggtattccgaggtatatttccaggacacgacgggatggtgcaggacaagatcctggggatgcccggagggaacaggtcccgaagacaatggcacagtactttgcagcccataatcaactcataaacatcataaactaacccccacccctcacgaacaccacacacccatgaagtgaactgcgatggaggcgtagttttgggcccacgccccttgggccaggaaaagtgggtgggagttataaaaaatgcaaagagggcggatggaaaacgaatatgaatattttaaaaccaaacaaagacgggcacagaaaagcgcacacacactctcgatgcaatgctcccttgaaatcctcttggcctgtacacatgtatccacaaacggaaccccgttcagcaaactaaaaaaaaaaatcgaataatatactttgtttattacttttgatttctcggttgactggaatgcactttttttcgacgagtcggaaacaaattgtttgtaagccttcaaagaagccagcactttcgccactcaacactccacaaaacaccgccgcacgcgaactgctccagaaacacactgaaaagctggtagggattacggcctggcgattctgagtccgctgctgaaattgttgtcatctcaggccttcggcagcatctcgcacatcccacctcgcatcccaggcatgcgcaatcgatactcgttaccccacaatccccagttcactcggggaagggatgggatgtcatggctgtggctgcaccgccacaaaacgataccatcccatattacaactgctctgcgcaaaagaaacccccatacaatgcattttgagtgctcattacggccattaccgaatcgatattctcgaaatgaacgagccgaactggctcgacgttcaaaactgcataaaaaaggcgtcgtctatgatttggatttatttaaaaactaactgcaattggctaacaacaaacacgtgcatggcatggcgataatcggttaagttttacttctgaacaaagggctaacaaatcgtgcccggatcagattaagaacagaaacgaacaggtaacgctaatagatatcgaaatgcaattggcggaccagtgagatccgttgtcatatcgggctagttgaactttgtctttggatcgcacatttatagtagagtagaatagaggcatttccgtttccaaatccgttttgaatcgtcttcctttctagtattttactctttaacaatttgtcttgcacaagtttctgtatttttgggacgataattagataggaaataaaacacacgtctttatacacttgccacatttcagaacggatgggcaaacggaaaggccgggagtgagtaattctattggggtagattgatttgagctttatcaggtcgcgctgtctagtccgctggatatccaaagctgaggtgaagattgcaccaccgccggtgcttaccacccagggtggactcctcgcgccgtacggcacttaaaaacggattatcttcaaagtcaaagttgcccaaatgcgaacgcagatcgcctgacgccactggt

SEQ ID NO: 5384 - DNA, 2696 bp, DROSOPHILA
agcagttcgcgtgcggcggtgttttgtggagtgttgagtggcgaaagtgctggcttctttgaaggcttacaaacaatttgtttccgactcgtcgaaaaaaagtgcattccagtcaaccgagaaatcaaaatcattccgctgcaggagaacaatatttgcgttttgacacagccttatacgcggaattgggggcgtggcaggtcggcggcggacaatgaacccgcctacgcagcaaggacaataattgcagactggattggaatgggatgcccgtggagcagcagcatgagttcgccgttttggagcgatggcagtactggattcgcagtggccccacaatccacataactcgcactacgggcgctaggttttgataagttggcaataatcgccggaaatgggcagtctgccgaatcttcacgagctggaggaggcggagcgcaagcgggagaagcgacgggagtacgaacttctgctggagcagcgggctcgggacaccagtcgcgagcgggagcgtctctccgcgtttgctcagcagcgcaagcaatcgtcgtataatgcttacataatggctggtctggggattggtggcggatccttgagcctcaatgccacctcaggaactgcaacaggcaacggagagctgctcggtggcaatgggacaactggcggaaagggtccgaaccaggcagtgggcccagcttctggattggccaccagctcgggagctccggtggccaccagtggctttgcgatgctgggactgggcaagaagtatgccccacactcacaccaccatcagcatcagcaccagcatcagcaccagcaccagcaccatcagcaccgccattcgctgaccaccaggcacagagtgcttcgaacccgcagttcaggaggagcccagaacgtctgggaagagcagatgatggagcagcacttcaccacatacttcgccgtcacccatttcgacgaggtcgcatcgcataaatcccggtgtcctcgtaccaggtgcaggctgctctggcggcctctcgtcgtcgggagtccataaacagctccattggagccacctccatacggcgattgataacgctgaacaacaggaattgccggcacaaggtgccagcccatgtgcgccaaaaagtgtggcgccagtttagctgtttaagcttggcccacggactgatgaactgcgttctgctgccggtgatggcgctccagggctccaatgcggtgtggcaccatcgggaggaatggttgcccctcggtccggaggttggatcccttctgctgagtgctctcttcctggtcgccgctggtatgagcctgcccagcattcgactgatgaaacgatatggttatgggccactaattgtggcaaactatatgacagtgctcctatttcttctgtcgcacctgtacgcctccatttacacccttctacccgcctatttgctgcttggcatgaccttaagcggatccgctggctccaaagccgcgttgattgtccactttggagggaagttgagctgctcctgcgattcccagcagtcgcaggcggcggtcgatgtcttgcacgaggagcacaagatgttttgcaatcgggatcagaaggtgaggcgtctggccaggtggttcagggtttcccaggacctgggtctcataggaggagcccttctggcatccattttgctggcctgcagcgatggaaactttacgggcgattgctccggattggtttactatggaaacgagagctggccaccacaactgagggatttctacaataggaacgagcacggcgacaggatctgtggggcagacatgtgtccactcagagtgcagtcaatcctggaggcgggatgggccaatgggagctccatacccagttccatctatgctggcttcatcgaaagtgagcctcgagtggccgggcaatccttgctctggctgtacgttctgttctccatggtatcattgaccctttcgctgctgatagtggtggacaaggtgcaggccataggctcatcgcgaccggagcgttcgagagatgtaagcatcacggacaccctgctgtttgccggacccctggcctattttgtgggcacggaacaggcgtatatgatgggtgacttcttgagggccttcgtcacctgttcgctgggcatcggaatgattgccggcgcgttgattggcatgggtctgatgcagctcatcgtctcctgtaccttgagcatgctgctaaggcacgtcaagaggatcgtcgtgattttggctggtttcttcttccactcctgtctactgctggcgctgtccagttggaagccctcgagtgacgacagcgccctgttctacgtgattgccgcctcgtggggtgcctgtaatgggatgtgggagacgctcctgctctcgctggtcaccctcaaccattccagtcatgtaacggaggtccaggcgcctcttcttgcccttcgcttcctgggactgggattgacctttgccggtcacggcttcctctgcgaatcgatgaagatcattgcattggtggtgctcctcgtcatcagtgtgccgccatatgccactctggaaatccgattggaggcgcaacgcaaggcgacgctcgtcagcttatgacgcagcatcttcagctagtcccgacgaatgcgacgggatgtcgtggcccggacgcacaccat

SEQ ID NO: 5385 - protein, 217 aa, DROSOPHILA
MGSLPNLHELEEAERKREKRREYELLLEQRARDTSRERERLSAFAQQRKQSSYNAYIMAGLGIGGGSLSLNATSGTATGNGELLGGNGTTGGKGPNQAVGPASGLATSSGAPVATSGFAMLGLGKKYAPHSHHHQHQHQHQHQHQHHQHRHSLTTRHRVLRTRSSGGAQNVWEEQMMEQHFTTYFAVTHFDEVASHKSRCPRTRCRLLWRPLVVGSP

SEQ ID NO: 5386 - DNA, 6804 bp, DROSOPHILA
atgagacgcacagaacctaaggtgagtgaagaaatcagatctcttctttacaacatagtgctgtgtctaactgacactgctaatcgagttagaaaacaaatgcttgtgcttttagtgttctagcactaaacaacttcgtacgtaaggaactctagatatctggtgcagtgagctaaaacattgtcatgtttccattcatttacagcacgatctcatccagaaccgccttaacgagcttttcaactcgctagccgtggagcgtcagatcacgcaaagcgacaccaagtccagtcagttgcaagccagcaatgagaagcccatctacgagacgaactttccggaactcttctactactaaaccgtatccctcgaaccgaaaacgatatgcggcgaatattctctaatcaattcatgtatatctatagctgagaaagcgaatttgtttggtgtctgtatggaactaggtaaatcttattaaattttttgttgttaattgcaaacaattcaattgttaaacgaccccgaatatgtactttgatttaattgttagacaaatacatatatgtatacatatatattttagactcgtgtattcagatgatttcaaatttctcccaaaatgggacgtgctgtaaaaaataatagagtaaggtcggcccattgcaacagtgccgccaaggcgacgtcaatcagtggacattcgatgctaaagcaaaacaacgattgcaatggacgcaacccgttctttcagtttctggcctactttcgaaaatgttccaacaactgccttggccacttgccgtcggatcgggtaactctaattgccggcaaggtgtggaattacatgagtctgtcggagaaagaaccctttatcgctgctgcgcgaagatttaactacacgtatcgatcgcggagcagaaaagtcaactgggtcctggcgcaactgcgaaaatccgctgctggggaagaatgccgaccacaggcacagtggatgttgatgaactttttaaagtcttggcaggaatctgtggtgaggaaccttctcgacctggatcacaatcaaaactaaatcagagcagatttttattaagtgtaatctttaataaatgatcactcaaggtaatagttactgtgcgtacatttagcgagtaaaaatgtgttagggacagtaattacatgcgttgaacttgcaggattcgaagacgcttaaaccataatttctttgccgcgttttttcttgttacttaaacataacaattaatctttaaattccaaatttacaaactatttgcaacgcctacatattgtgcgagggcactagagtgtgcgtctactccatttaagtagatgacgtaaagcgtcattacatgatactagtgatgtaaacgatatacaaaaatatagatctgcgcattccaaaacgattgcggatatgcttatactcgatgtacaaacgtctagatggagtgatcagccgtagctaatcgcgatggcgataaacgaatttacaaaacaactacaacgagcccgaactgctgcgggtaaatgaacaaaaaaatggtggtagtggtggtactggtattggtttggtggactgctcagcacgtgctcagcacgccagttgtccgcagattgcgcccgtttcgctagccgaccaagcgattctgggccgtggggctggcgaggatggcgtcgaaggctcagagtcaccaatgaaaacggccgaatcatcagcactggacggggacagcggtctgtcgctgtttgctccgatttccgaaatgggtatggagagagaggttgtcgcctcctcgctgagcggaacaatttccttgaaactctgattcggtggcattaccaccagcatgtttattgaaatgagaagtggatgcaccaactttgggtctaacaccatgagtggcacctcctcgttcttttcgaggctaagagaacagatctcggacgtttgggtgaagactgcctggcgctgggcgtttatcgaggtcaccgtggtgcggaccatgaacttgcgtttcgtctgcaggctaagcactcgctcgtgctcgtgccggtggtgccgacgaatgttcagtctacgcgagtccatgatcaggatgagatccatgccaaagttgaagcccgtccagcgccacttctggtagccaggctcaagcaacatacgtccgcatcgcatgcagttctcaaagaactgctcatcgtccagctgctgaggactactgtgaatgcagaataaaaggattttagtttttaatgatataattccaggagaggcttcagaagacttaccaatcctcctgcccatgatcgatacgtagtaatgcatcccagtggttgtgaatgtgccgatacagccactccttgggtataatattgtcattgtatatgatttttagatccatgtagtggttggtcaggtactgggttcgtagcttctgaaagaccttcacataaggctgcccctcgggcgtggccaagaacgagcgttcctccgagcggctggtaaagtatgtccactggacgacatcaccactaggcgcatgcgtttccacgccggcattaaccaaaagctcctgcgtctttagcgcctccgcccgctggaccgggtcctctggatcgtagtcgggatgcagtcgtaggaacatccatgtgcgcagtagagtgtacagcgagaactccgtctgcatcacatacaaatcgggactggcggtcagggcactcatcagctcaatggagatgtgcctaagcaggttcggttgcttactataaatgcttagcagattgatctggaaccactgaaaggtggacttcttgactccgaccacaccgtactggcaggcggcctcgtaatactggatagctgtctccggactaatgttatccaccatcacctcggcacacttgtcgatgattccgtctaagtggaacaacgtggctgtggccaataccgagataacatctgctgactcgatttcgatctcatcggaatacatggaaccaaagacagcatccaggctagcaacggtgatccggtcgtccaggattgtgatctgaatgaaattctgctgggcttcccgccacgtcccattgaacatagtatagaagtatggactctggctcaggtacaccttatgcaggtgccagaccttatccagagccatgacagccacatccgagttcttttcctccttgaagagcgccttgtatatgtactgggtggtagtaagaagtttttttctgcggaaattaagcaggtaaattaaattaccttaaattaattaaggtaaccacttactttttgggctgagtggtgtctaactgggccggatcatccttccccaaagatgaatcagtgctgcgcttccgcttccgtcgattgctgaacacctcagcgacgttcatatgcatggatcccactatttgacccatggctgagcgcaggaattcttactctgaaacagcatatatacaattttttttttagatttccctacatgaatagagtttacaataaaaatgcggtctgttatcgatctgacagattgcgtgttgatggtgccctcaatggaaccagttgacccagtttcattccgccaaactgtaacgccagccgctgttaaggcggggaaacctttcccgggtgggcgaacattagtgtgggcgactttacaggccctaaaaccaagtggaaagcgcatccattcataaacaatggtgatgtcataagatatctgagcagcgatgctcggaaaacttaaagtcatttgtagattgcaagtaactgaactgatatctagcttagtctttttgattaggtacgcaataagcccaagactaattattagattttacaagtcatgtatcttagtattttagtttttaaaggtgtgtataaaggcaacatttattttattaaggtcgacaaaatgcaattcaatttgtagagtctattaagattgtgtgcatggaatacataatgtagtaagaaacagagaagcatccgttcaaagcgattttaacgacctgaaccgcactgtagcgcaaacatatttgggtaattttaaaggggcgggactctataattagaatgagatcaaacgagctcgattccatgcgcgtatatgttgtgtttatgctttgccgccaaatgctggaactggacgagctgatgtaaccatgtcaaggccgcgttggaagctactgctactacacgtatatatgtgtatttgctgcccataaacaatcaaacggacgctttcgtcacctcattggatctcattgatatgggcgaccggacagtctcggactatggatatctattcggacgcagactaagcataaaataatgatgatgatgattttgccgtggtggagaaaggtttgttttggtgtggcgcagttccgaaaacaagagtagtgttccaaaccggttcccaaagcgtgtatttcttataagaccaaaacaagacgattgcagcgctttaaattacgtcaccacttgaagccagagagcagagagaattgaagattgagagggaaacaaacaaaagggggatgaccaagaccaccaaacaaagccggacctccaagtataacccgagtttccaaaagtcgtagtttagaaattaaaggaaggtttagggtaaacatacatgttattatagtcaactatttttaatttttttgaaacatttgcagtgcctgaagcttttgtttcgatggtggtaagataaagtgcatttccaaacgattttaaaacatgtttaaaataaacttaataacaagttttcacgcttgacagattttatctactgcaccttgggggataaggtttgctttcgaaatgtatcatccggaagtttaagtttataaaaacgtaagcatatgatcttctctttgaagacccactccaaacatttttaaaggaggattgttccacttttgagataaactaaacacatgtaagatactcttttttttacacatgtaagttagggaaatgacaaaaaaaattaatgtagcccaaggagttaacggctaaataacgtgggtgatcgtcggaagaagccaacaagcatgggcggagactcgaactcgaactcgcgcactgatttcgtagggaattccagttgccttagacgactgagccaccgcggctggaaaatttgggacgtccgaaatcggagaaaggtgtttgaagcaggttaatatatgtggttaacctacagataaggctacaagcagcactcttttatttatggatgcaaaatcagctgattgacagcttaaaacgcttatttacgatggcctgttgtttggccctgataacacgcgattagcgatatggaaaacggaccaccagaccatcaactttttctcactttatatccccatgttcctggctgcgaagtgcagttaatccgcagctataaatagcaaacaaaagtgaattcggtgggtgacgtagttgggaataacagagaaggggtgggatggatacgtactaaagagatagagagagagcgacagagagcgcgctaacgaacgacgcaaaactgaaggaaacaaggtacacaaaggggaactgataaacgaaacttactgtaaaactgcagttacagtgccgtacttttatataacagcaattgcaccccacgttcactggcttcgtttcaataaataaaataaacacgggctaaaattctacgcgagtctgattaggcatgcggtttaagccatttcaattccgttcgctgtcaattttatctctgttttgctgcagttggctctccaaatcttttagttatggtcaccctacgatagcaaagcatgtattttgattgcatcgctgctatcgatgtttgcggattggcgctttagcgttcgcaccggtcacacttaccgtactttttaaaattaatatttactttacgatgcggaagcacaaacctatcttgagttgctcctttcgaagtaaattttaaaaataatattaacttcaataatagtaataaaaacatatcaatttacatttggggacacaaaatacataaactatgaatatttagaaataaatgagcttacatctcttcgttttgttgtttatttatatgacatctaattcaaaaattattgtataatatcatgatatttgcgaataatgactcgtataaacgttaccgttctgcaaaacgcataatgtcagtgtgaccgtgttgcgcggcattttaccactttcagagattagtgctcacgggttttcgtgctgcgcagcagttaaataaaattgaatacatcaagagctgcagatataaatcggagttgaaaaccagtgcaagttgcattggcccacaaatcaaaggtacgccttataaaggagagtgaatcaattgccgaattagtagtgcaaaaggtcaaagcatcagtcgtgaaaaagtggcacacataaatacaaatgcatacatacatactcgtagatgcaacacacacctacacctaaacacacatacacacacaaacacacatccgtgggaggaataaaacacccacaattgctgattattttctgcactcgttatcgttatcgctttcgttttcgcattcattttccacagccgcagtttcgtggggcgtgcaatgtttaggatccacctcaagatgggtccccaacgcaaccagctccacagcaacaacaacaatggtgccgccggaagtagcagcagcaccggaaaccgtcacctgaaggagttcacctgctgcttcggcctgcatgtccacacggccact

SEQ ID NO: 5387 - DNA, 2526 bp, DROSOPHILA
ccaactgcagcaaaacagagataaaattgacagcgaacggaattgaaatggcttaaaccgcatgcctaatcagactcgcgtagaattttagcccgtgtttattttatttattgaaacgaagccagtgaacgtggggtgcaattgctgttatataaaagtacggcactgtaactgcagttttacaagtaagaattcctgcgctcagccatgggtcaaatagtgggatccatgcatatgaacgtcgctgaggtgttcagcaatcgacggaagcggaagcgcagcactgattcatctttggggaaggatgatccggcccagttagacaccactcagcccaaaaaaaaaaaacttcttactaccacccagtacatatacaaggcgctcttcaaggaggaaaagaactcggatgtggctgtcatggctctggataaggtctggcacctgcataaggtgtacctgagccagagtccatacttctatactatgttcaatgggacgtggcgggaagcccagcagaatttcattcagatcacaatcctggacgaccggatcaccgttgctagcctggatgctgtctttggttccatgtattccgatgagatcgaaatcgagtcagcagatgttatctcggtattggccacagccacgttgttccacttagacggaatcatcgacaagtgtgccgaggtgatggtggataacattagtccggagacagctatccagtattacgaggccgcctgccagtacggtgtggtcggagtcaagaagtccacctttcagtggttccagatcaatctgctaagcatttatagtaagcaaccgaacctgcttaggcacatctccattgagctgatgagtgccctgaccgccagtcccgatttgtatgtgatgcagacggagttctcgctgtacactctactgcgcacatggatgttcctacgactgcatcccgactacgatccagaggacccggtccagcgggcggaggcgctaaagacgcaggagcttttggttaatgccggcgtggaaacgcatgcgcctagtggtgatgtcgtccagtggacatactttaccagccgctcggaggaacgctcgttcttggccacgcccgaggggcagccttatgtgaaggtctttcagaagctacgaacccagtacctgaccaaccactacatggatctaaaaatcatatacaatgacaatattatacccaaggagtggctgtatcggcacattcacaaccactgggatgcattactacgtatcgatcatgggcaggaggattgtagtcctcagcagctggacgatgagcagttctttgagaactgcatgcgatgcggacgtatgttgcttgagcctggctaccagaagtggcgctggacgggcttcaactttggcatggatctcatcctgatcatggactcgcgtagactgaacattcgtcggcaccaccggcacgagcacgagcgagtgcttagcctgcagacgaaacgcaagttcatggtccgcaccacggtgacctcgataaacgcccagcgccaggcagtcttcacccaaacgtccgagatctgttctcttagcctcgaaaagaacgaggaggtgccactcatggtgttagacccaaagttggtgcatccacttctcatttcaataaacatgctggtggtaatgccaccgaatcagagtttcaaggaaattgttccgctcagcgaggaggcgacaacctctctctccatacccatttcggaaatcggagcaaacagcgacagaccgctgtccccgtccagtgctgatgattcggccgttttcattggtgactctgagccttcgacgccatcctcgccagccccacggcccagaatcgcttggtcggctagcgaaacgggcgcaatctgcggacaactggcgtgctgagcacgtgctgagcagtccaccaaaccaataccagtaccaccactaccaccatttttttgttcatttacccgcagcagttcgggctcgttgtagttgttttgtaaattcgtttatcgccatcgcgattagctacggctgatcactccatctagacgtttgtacatcgagtataagcatatccgcaatcgttttggaatgcgcagatctatatttttgtatatcgtttacatcactagtatcatgtaatgacgctttacgtcatctacttaaatggagtagacgcacactctagtgccctcgcacaatatgtaggcgttgcaaatagtttgtaaatttggaatttaaagattaattgttatgtttaagtaacaagaaaaaacgcggcaaagaaattatggtttaagcgtcttcgaatcctgcaagttcaacgcatgtaattactgtccctaacacatttttactcgctaaatgtacgcacagtaactattaccttgagtgatcatttattaaagattacacttaataaaaatctgctctgatttagttttgattgtgatccaggtcgagaaggttcctcaccacagattcctgccaagactttaaaaagtt

SEQ ID NO: 5388 - protein, 569 aa, DROSOPHILA
MGQIVGSMHMNVAEVFSNRRKRKRSTDSSLGKDDPAQLDTTQPKKKKLLTTTQYIYKALFKEEKNSDVAVMALDKVWHLHKVYLSQSPYFYTMFNGTWREAQQNFIQITILDDRITVASLDAVFGSMYSDEIEIESADVISVLATATLFHLDGIIDKCAEVMVDNISPETAIQYYEAACQYGVVGVKKSTFQWFQINLLSIYSKQPNLLRHISIELMSALTASPDLYVMQTEFSLYTLLRTWMFLRLHPDYDPEDPVQRAEALKTQELLVNAGVETHAPSGDVVQWTYFTSRSEERSFLATPEGQPYVKVFQKLRTQYLTNHYMDLKIIYNDNIIPKEWLYRHIHNHWDALLRIDHGQEDCSPQQLDDEQFFENCMRCGRMLLEPGYQKWRWTGFNFGMDLILIMDSRRLNIRRHHRHEHERVLSLQTKRKFMVRTTVTSINAQRQAVFTQTSEICSLSLEKNEEVPLMVLDPKLVHPLLISINMLVVMPPNQSFKEIVPLSEEATTSLSIPISEIGANSDRPLSPSSADDSAVFIGDSEPSTPSSPAPRPRIAWSASETGAICGQLAC

SEQ ID NO: 5389 - DNA, 6826 bp, DROSOPHILA
tggagatttaagctgaactttccaaaatagccacgaagttaaagaatgggacaaagacttattcccatagaccgagcagtttttaaagaccgatggcatgttcaaaagggctattggaagtgttgaatgaatcagattattcttctggagctggcgatgcgaaaagtctaatctaaacccgtgtagtatacttttagggttcgattatatgtacatataggtcgattataatgatttgaccacttgcactacagttattattacgtttttaatgtataggttaattacgataagctttggccaacactaaaagtgagtagcagggtgcgagtcataatacaaatcttgtcagccacgggcccaggccaattttttttaagtctatcttactgaaatggttagaagccgatttaaagaaagtcctacggcagctttatttgtttaaaacgctaatttttccactaggcttaccataggggtatttaaaattctattcaaagggttagcagatggagcattaacgtcacaagtcctgttccttgttatagaaaccttaaataaattgttttgcttataaatgacaaaaggacacgatataggaaacatatatcttttttattcgtttccgatgttattgccttggaaatgcatactttattgtagattgctacatataaaatgtgcaatgtgttctataatctgcatgttgcatccatagatctagacgtcattcgattcttggaacaacataagtgccaacacaatcagtttatcatacacgctagaagtcctcgaaattgcagtattaattaaataacttaaaatatctaatttaagataatcacttaccagatttgcaaaaacgaaaattgagtattgagaattttcagtatttaacaaaaattgtgccgtgtattccgcccaaaagaaatcttttatgattaatgccataagcaccctgttttgttggctcgcttttgtaataccgtttgcaagcctacttatattgtgatcggacaacccgtgtgttatcttaaataacaaattttttatttcgttgaaaatagttgtttgtttcgtttatattttaaatactttctacatatttctgtgcataatgaacataacgatttcacaactaagcaagaaaagaaattaacttcactcggtgacgccattttgtccaatttttatatactgctttataaatggaatttggtaaaaaaaggtaaattttgttcaagtttatggccaatttaagaattaaatgctccacatacttttttgtgttttgacaaaagtttaaaatatgtaaatatgtacaaaatgttttataatattaaccagtttatctgtattattgtttaaaggtaatgtaaagtacatggaatgtagaagtgtcttcaacgcgaatgcacatatgcatatacatgtctatgtatgtatgtatatgtatatttatatgtttttatatgtacgtatgtatgctcttttatgtgtatacataacgtgtttcatttcaaggtaacacaaaatcgttaattttctttcttttaaggtataagggtggtcggacaccttctattaggtccagtgaaaggcgtcgtcctcaaagtgtttcatctatatccacactatccccgagagttgttttgtccagattggagccgagggagtttgaacgtcttcgactatcctacaaaattgcaatcgaccaaagaagatccagaagctgccgtggcatgaacatgggtcaaaaaattagtggcggagtcaaaacagttagtcgcaatgattcacagtctacatttaaaccaataataccaagagagttgcaagctgatttcgttaaaccagcgcgaatcgatatattacttgatatgccgccagcatctcgagatcttcaattgaagcattcatggaactccgaagatcggtctcttaacatttttgtaaaagaggacgacaagttgacatttcataggcacccagtggctcaaagtactgactgtattcgcggaaaagtcggacttacaaagggattgcatatttgggaaatttattggccaacaaggcaaagaggaacccacgctgttgttggcgtatgcactgcagatgcacctttacattcagttggctaccaaagtttagttggatcaactgaacaaagttggggctgggacttaggaagaaataaattataccatgactcaaaaaactgcgctggagtgacatatccagcaattcttaaaaacgacgaagcttttttagttccagataagttcttagtagcgttagatatggacgaaggaacactaagcttcattgttgatcagcagtacctcggtattgcgtttagaggactgcgagggaaaaaactatatccaattgtttcggcggtctggggacactgtgaaataacaatgcgttacattggtggattagatcgtgagtaaacttgatatattaaatatatataagatataccagattcgatgaaaagtacgagtacggggcaggtagaagaaagcgtttccaaactcacaaaatacattcatttattgttaatcagggtctcaggaactatgcgagctaaaaagttgagactaggtaggcagatttaactagggtgtgcaagttcgaaaaatgtttttctgattgggttgagtacgtctcttaaatatttaaactaaatttgtttagccttgcagagggagcaacttagggattgagatttaatgtacatttcagtattatatatatgcatatatatattatataaatatatatattaatttgtttatatacatttaaatatataaaaatatacatttatgtatagatatatatatgtattaatatatatacatgtattaatatattaatatattatatatacataagtatcaacagctgagtcaactcgtccgcctgtttttacctaaacctattcactcacatatctcacttttgacaaaaatattttcagtttttatttgatcgtatatcaaaatattacacaaatgagaattctacagtcgagttgtccgagttttttagtatatcgatagatattggggaatgaatggaaaaaaaatttaaaattctttataaatgtggtcgtgatcggttggcggatttaggtcgttagagtgggcgtggcaaatggatagaaattcacacacctaagaaaagtattaaaaaaatatcaaaacattttcctaaagtgtgggcgcggctaaaaatttttgccaaatcgatagaaatttacaagactatgcacatacattttttaaatttaagttctcacttttaaaatatatttctgtattccctcaactaagatgtaccgtatagagtgcagtcaagtttgatttcgatcgaccaacgtgcaaattattgttcgacgtaaaaaggggtttggaatatcatacttgcttctgctataaaactgcacaagtgagtaggtcgattttgcaaggtttttttgcaagaccaatattaaaagatgaattgtgcttagtgtaagaaaagtaatatcggatagtttcaaagccaatggacgtaaacatgcatagtagtagtatttatttttatacccgttacttgtagagtaaaagggtatactacatttcttgaccatataaattatacgtattataaaagctagaaggttgagtttgagcatacagattctagagacaaatacgcagcgcaactaatgtaattttctatagatgtgccaaaaaactttttatacacacatatttgaaatttgttttctcattttactgcctaatatctatcgatatcccagaaaaaccgatgaaatttctcgttcccattctcacactagcttaaaaacgggtatctgatagtcggggaactctactatagcattctctcttgtttttatcgatttattgtttgtgttgccattttttattcgtataccaaaaacactgtagcctctcccctcctttcacctacaaaacgcccaaaccggtcacgcccagttcggtcaagaccgtgttgtttagtagtagaataacctcgttatcttatttagcgtgcgtttgggatagtccgtgttcggacctccttgaggaaacaagatttttccaggaaattctgagtgtcttacgatatgtttctatacagagttgaaagacgacatttctgtacttgctttgaagatgggagatatagcatttgttcttaagttcggtggaatagcgtgcgcatccacaagtatggatgagagggctacatacacatataaatattcaagtagtcttccagaacttcggttttaattgccagcgcttcccaaattgtgtcatgtttcaagagtcaacctatcgcaatttccattacttaagatataaattaaaccatgtaggttattataataaaagggttatttattgagcaaactttttcttgtttttggtttcgaacgtactaacttatagagttaacatatttatcccgcgaagtcttccgttgagggcagagatcctggcagagcgctttctcagcgcctcgtgccattttgtgcgagttggagcttcgtgactcatggctgaccgtttcatattgattttgccgatgcggaatgcgttgctcggctgaccggatactgtcgatgttactgttgacggttcctcatccggtttcgggtagcattgtacccctctgacttgcttttggaggttgtgaatgttgtgaatgatgttacttttcgtatgagcgctgtggcgttaacatgaagtttatagcaccttagagtctgcaatcgtgatttgtggtttccctttaaagttcacattttgggtaagtgtgactccaactccaaggtgtaggcagagtaggcatgcagattccagaaacctagacgcagcggaactgatattaactgatgttgccacgtatacaagccgaccttttcttatttgtcttataatttactattgagttctcaaaaacgttttgccacgcccactctaatgcccacatatcgccgaaaactgtcacacccacacttttgaaaaatattttaatttttcttcgttttattggttgtcttaccaatttctatcggtttctacatacgcccagaaggctcacgcccacgtttttgaactatttttaatttttttctcattttatgccccaatgtcagaaaactgttaaactttcacattcggctttccattagctgagtaatgggtatctgatagtcggggcactcgactatagcactctcttaagttttaaataaattgtggattacatgattacattgcgaaaagtacattaattatttagagttcgcatgacacttattaaaaaattatatatatttttacaaaaaaacaaacaatttcttacttgtatcttttaagccgaacccttgcccctaatggatctttgccgaagaacaattcgtcaaaaaattggtcgcacaaacttggaggagcacattcaacagcttcaacttcctttatcaatgaaaacatatttattgtataaaaaccgtagataatagttttgttaagtagatggaggagcaatttcaatttttgctgcatgtgatgaaagcagcaaatactaattgtgttagattataatagtattagatcaatgtttgtctgtcctccaacaggaaaatcataggtatacaattcgtaataatactttacttaagctataaagattgattgtatattaagaagcattcaaataatagtatgtacacggaatgacatctcatcttgcaataaattggagaatcgagtttcttcatgtaacattatttaaaaactatactcacttcgtgttatataaaaagcatatttgtataaatattaaaacttaaaaagcgcagttttaattaaatgtatgtatgtataaataattctaacaatatttaacatgaaaagctctgaaagtaattggtttactttttataaatatatttcgggagaaaaacttgaaatattgaatatatttattaaaatttgtaagctgctttcaagttttaggcaaaaggcctgaggacatagaaaattctggaagtagcgcaaatcacaattacaatattgctctatagttgctgagtagtattcaataaaatgatattaaattgttacataaaagtatgtaacggccttaacatggaagtttcaatatatgtcttcttttaagagttcataaacagaaatatgtttatgcgttgtatattatttctaaacctaaagtaaagcatacaattcgaaggtacgtttctgatttgcgatttatattttttgcagactacaatacttgactttagggttcccggtaatttttttttacaattttatccgctccctacccttgcccaatcagagagatatctacatttttccacgtcgctaaacttgaagacggcagtgagtacgcagaccttcaatctgcattcctacttccaataggacttgctacagcagaatatgtaggtattttcaaaaatagcacggaacggtagaaagttattttacgaatttagtataacaaactgtgacttgcaaaaccaataaattcgtatctcttctctaattatacccatacccgctactcgtcgagtaaaggagtatactagattcgttgaaaagtatgtagtaacaggcagaaggaagtgtttccgactgtataaagtatatatatttgtgatcaggatcaatagccgagtcgatctagccatgtccgtattaacgtcgagatctcagcaactattctagctagaaggttaagattcagcattcagaatagaagacaaaga

SEQ ID NO: 5390 - DNA, 1724 bp, DROSOPHILA
cttatattgtgatcggacaacccgtgtgttatcttaaataacaaattttttatttcgttgaaaatagttgtttgtttcgtttatattttaaatactttctacatatttctgtgcataatgaacataacgatttcacaactaagcaagaaaagaaattaacttcactcggtgacgccattttgtccaatttttatatactgctttataaatggaatttggtaaaaaaaggtaatgtaaagtacatggaatgtagaagtgtcttcaacgcgaatgcacatatgcatatacatgtctatgtatgtatgtatatgtatatttatatgtttttatatgtacgtatgtatgctcttttatgtgtatacataacgtgtttcatttcaaggtaacacaaaatcgttaattttctttcttttaaggtataagggtggtcggacaccttctattaggtccagtgaaaggcgtcgtcctcaaagtgtttcatctatatccacactatccccgagagttgttttgtccagattggagccgagggagtttgaacgtcttcgactatcctacaaaattgcaatcgaccaaagaagatccagaagctgccgtggcatgaacatgggtcaaaaaattagtggcggagtcaaaacagttagtcgcaatgattcacagtctacatttaaaccaataataccaagagagttgcaagctgatttcgttaaaccagcgcgaatcgatatattacttgatatgccgccagcatctcgagatcttcaattgaagcattcatggaactccgaagatcggtctcttaacatttttgtaaaagaggacgacaagttgacatttcataggcacccagtggctcaaagtactgactgtattcgcggaaaagtcggacttacaaagggattgcatatttgggaaatttattggccaacaaggcaaagaggaacccacgctgttgttggcgtatgcactgcagatgcacctttacattcagttggctaccaaagtttagttggatcaactgaacaaagttggggctgggacttaggaagaaataaattataccatgactcaaaaaactgcgctggagtgacatatccagcaattcttaaaaacgacgaagcttttttagttccagataagttcttagtagcgttagatatggacgaaggaacactaagcttcattgttgatcagcagtacctcggtattgcgtttagaggactgcgagggaaaaaactatatccaattgtttcggcggtctggggacactgtgaaataacaatgcgttacattggtggattagatcccgaacccttgcccctaatggatctttgccgaagaacaattcgtcaaaaaattggtcgcacaaacttggaggagcacattcaacagcttcaacttcctttatcaatgaaaacatatttattgtataaaaaccgtagataatagttttgttaagtagatggaggagcaatttcaatttttgctgcatgtgatgaaagcagcaaatactaattgtgttagattataatagtattagatcaatgtttgtctgtcctccaacaggaaaatcataggtatacaattcgtaataatactttacttaagctataaagattgattgtatattaagaagcattcaaataatagtatgtacacggaatgacatctcatcttgcaataaattggagaatcgagtttcttcatgtaacattatttaaaaa

SEQ ID NO: 5391 - protein, 279 aa, DROSOPHILA
MGQKISGGVKTVSRNDSQSTFKPIIPRELQADFVKPARIDILLDMPPASRDLQLKHSWNSEDRSLNIFVKEDDKLTFHRHPVAQSTDCIRGKVGLTKGLHIWEIYWPTRQRGTHAVVGVCTADAPLHSVGYQSLVGSTEQSWGWDLGRNKLYHDSKNCAGVTYPAILKNDEAFLVPDKFLVALDMDEGTLSFIVDQQYLGIAFRGLRGKKLYPIVSAVWGHCEITMRYIGGLDPEPLPLMDLCRRTIRQKIGRTNLEEHIQQLQLPLSMKTYLLYKNRR

SEQ ID NO: 5392 - DNA, 7117 bp, DROSOPHILA
attgcctccaaagcccatgttcatcagctgcataggaagtggaggcggtcgattcatcggaggatagttcctgtcctggtagctttgcggacctccgcctccatgaaaggcattgttgctattcgaagaccaatgtttacgtccgttgccgttgttgttattgttgttgttgttactattgttattgttgctccgttgtagtccgcttttggtatccggtttcagtgcatccttgcatttcttccaatctgcaaacgacattttcagcggcttagtttcaggctcatctttgccggactccggaacgacttccttggaatcctctggtgccgcctccacgtccccgttttcagacatctcgcaccttagagagtgggaatacactttataaatatatcaacttaattttatttgagttttgcttagcgatggcaaacaaaaatttcaataacaacaaattgaaggaacagccgatgttttctatcgatattttcgtgcttaaaattttagggagtttcccctgaagtattttcttaagagtcctgttgttcttaaaaaagaacagtagtttccaaatgtattctctaaactttccgctataccagtaaatcttcatttgttaactagtaagcgatatattaatgcccaacgtaatataatatatatttaacattttcgatcccatgcagacacaaccggcggggaatagtaattgcccagcgtccagataccatagtgaattgttggttatcagcgataagtgtctgatttcgtaacatttatttcatatttaaatttaaattttaatacgaacacatctgtgatgcgaaattgatgtgagctttttgactgcgctttacgtgaactggtctggatagctgtggcgcatctctaaaatctaacgtgttcgatcaggtggcaacacccaccgtaaaaaacgattttagtcgcagtcgcagagattttggttttggtaagctctagtaatttattggaaattacgatccaaaatacaccgttttaagagacgtttcaatcggccattaaagtaaataataagcgcgacgaagactaaacatcaaaagtgttgaaactagaacgagagtgcaaagtcggtcgccagcaaaacgcgtagtttgcttattttaacgaaaagcggccagtgccattaaaatattactcaatttcacagagaattttggccgaaaacggatgcaatatatggatatatagaccctgtttcctgaaagttaacttcctttttgttctacgcccaacacggtcgtcaactgcgctgccatcgtcgacgtcggcagaggccattcttgttgttgctattctcgacatatgattcaatagagcgatcgcctctctctttctccctcccacggacaatttcagttttttgtaatatttctgttagctgtgttttagttgcccatgtttgtttgttcttgttgttgttgctgctgctgctgttgctgcagcggcagtaagtgatatttaaaaaagaaatgagttgttcgcatggagcgaaagtcgaactgaaataacacaaatggtcgtccgtttgtcgttcccattcgatatatgccaacaattttcatcaattatttacatattttgcttttggaacttcgcaccgattaactgagcagaagccagaagctcagaaggcgccaatgggttaatttggccactaaactatagataaatcgcggtgttatcagctaaagccgcttatcaaacgtgcacatcgttaagatatacgagagctttgcgtcgcaatattcgagattcggtcggaaacgaggccaatctccatatcctaagaaaccttttggttgtccatgctctcggccattactcccaagttctaatgcaatatagtcggctttgatcatcctagcagctgaaagcatgtatccaaatagtacaatagttttaatgtaaacaatacatttgatcgataactaacctttcttgtgtttacagggggaggtgcggaaacagcttctacgattcatttttgatcaattcttcaacaacatttaaacgaacgaataagttagcagaccatatagactgaaatcagcagatccggacaccaggcgggacaaccttaagacttcttcacgagacgatatcgaatccaacgaatcccgagaatggctcacacacacctgggacgcgccgtgaaaaacattgaggcgccacgcccgttgaagacacaatcgcgatcgtcgttgaagaacagctacctggtgatcgaggagctaatccagttgatagacaacgtgaccgtcggtcttcagtcgtgcaacaccacgccggaatcgatcacgctgctcctgcacaacctccgggtgcatggaccgcaactggaggcggtgtccaaggatacactggaccgggccttcgtcgttttccgcaacgcttcgcaggacgaacggctgaatataacgacgcgcctcaagctgctcgaactcatcgagctgcgcgccaagagctgggacaatgacgacacaatcgcgtactacaagtccaagcagcagatctccaacgtggaggtgagtagagtacatagaatcgatctcactttggaaaacgatcaaatatgtatcgttgctttgcagctgccttcggaataccagtacgatgccggcgtgcagcctggcgccttcagcacctcccccacattcggcgtcagcggcggtgttggtggcgttaacgatggagccgcagccgccgctgccgccgtcttcaatgcagcatctgcagctgcagccgcccaagctgcggccattgcggccgtgggcacatccaaccagcagcacatgctgctgccgcccggtgaggtcattcgtaattcgggcaagttccccaaaccgaccaagattcctggcaagacgtactgcaaggacgaggtcgtgattcgcaatgctgactccggcaaaggtaagtttttcaatcagctgaggagtgttctggagcacacagatctacagaaatggttttcaataatgtattcctccattcccgtggccaaaaagtaatgggcatcaaggggcgtcgcgtgcacatgatcgaggagctaagcgaaaccattatatcgtttcaaagaggtaactccagagagctggttttaattgtgatcctcaccgcacccccatttcatttggcacgcttatttaaatcaattaatgcccggtggcttctacaaaatttactaatagaaattataaatacgcatgttccagattttgtccattcaacgacaccacattaagccaaaattgatcgttaaaggcattttgaaatcacatattttcatactgtatatatgcattttgtttttaaatgttttcgcatcccaattatttttcataaatataaatgcttttttcgagaacaattatgaatgccttgttttcattagtcaacccgggtgccaaggagcgtttggtgcagattactggtccagctgaggataaaattaagtgagtaaagtaaataaattaaagctaatttacctttatgtcaaaatgttttaattctacgacagctatgccaaacaacttatggaggacaccattcgtcggaacgcctcgccggtgcgcctggaacccgctcctgccgttggaggatcctgctcctcgcttaactcgtccaactcggacgacgccattgtgcaaccaagaacgccaaccggaagcagtttggccaaccggctaagctttaactcggcccaaaacttcatgaccgccacagctgctgcacagcagatctcgcagcagatgcaccaccaaacgcatcacctgcagcaccaacagcagcagcaggtcgccgcagtagccgccgcagcagcagcggcggcacatgctcaggcgacagccgctgccggtaaagtcttgcgtcccaatcaacagctgctaatgcactcatattccacaaacgatgcttccgtaggtgaatacaagttcacggtcaacgtgggccagcacctgatcaagatcaccggcgactgctgcgaactagtgcgcgtgagtaatgttgaagttttcaattgtgaaatttgttaaatcccctgcgatttcaaggtggccaaactcgtgctcgatgactattttagcagctcggagtttctggcatccattgaggctggcgccgccttcgacggcacttcgctggtgaccacgccatcgactccgcttcccggagccgggccgccgcaattttggctgcccggcacggacagtggcattggactgaattgcgttgtttcctcgtcagcgaacaacaatggtgaaggcgacgacgaggtgttcgctgagcccagcaatggaggatcatcgactagcaatcagaatggactggccagatcgcgtcgcagccacttttcgcgcaaggagtccacgccggagaccaagggcgctcgggaaaagggtgacttggacgatttggcaggcaccaattccttgaaaagcaatgcatgtaagattacaatccttttatgcttaaccaagtctttgatgcttaaacttaaattacagctcgcgtttcttacgatattgaacacttgctctactactccatgagtccgcactcgtggaccctgcccaccgactggcaaaagatgcaggagacagcgccctcgattctgcgcaacaaggtaatttcgccgttcgatggctcacttggccgtacggcttactcttcgaacatccccgatgctatcatcgccagtgcacctaactcatcagtaataacacatccgtgggctttaaatgcaataacctcctccccgaacacaaatatcatcagcaccgccgttggactagctgctgtcgatgcgtcggcagacaacaatcccctaaccgtcactaacaagcaatcaaaagggatcttcgccgaacgcgagaaccgtcgccttcccaaaacatcggccgtgtccgatcgaaacctgtataacaagcaattgcaaatcataactaatactgtgggtcaatcggtggcaacacaaggaaagcatcgccagtctagctatcaaacatcacaagtgaaggcaatttttcaacgctactgcgaggacgatgagttttcattggcactgtgcgaaacagaatcgaataataaccgcgtttatgtgtaatttcatttaatttcatttaatttaatttaattttacgtagccggaatacgtattattgaatctcagtcacagataggcttttcttttcatgtcagtatttttgctgttttaattttatataacttatcattaagaaaaggtgaagcgtgaagaacttgataatgaatcaagtcaatacatcattatcattatcatcatccagtcattagattaacgacataccatcgaaaccaaaccgatcgctagtcttagaggtaacaatacatataatgcattgaaattaaaatgtaactatagggagaatctgtgttttggctgtgaaacagattaagtcgtcgctaaggataagctggaaaggcggttgaaaccgcttaaccgctaacaaacaaacattctcgaattcaaaccaacatttacaaatctgtaatcaatacgatttatattaactaataaacaggactttcaaagtccgtaacaaagcttggctgggtttaacttacaccaccacacaccccacacattgtaaattataaattgtaacttgtgttttaccaccgaagcatcataacatcaccacctaaccaccactccagatggctaacttagttactaaactgttccgtatgtatatatgttcgttcatccctggatagcttgcgtgtcaatgttactttgaaatcagatattaaaccatttctttgttcgacaacaggatctgcaggatgagagccagcgcttcgatggtgataagtatctggccagcattaagacggccgccaagcgagacattgtggctgccgatgaggtcgagactctggacgaataaagccatcaatcgagcggctcgaactgacaatatagagtgtcccggggtgaagtgcctgctcccagacggagctgcagtatgcttcaatgcttttggccatggccacatctaacaatcgcaaactcaaaacgaccaaaacaaaacaaacaaaaaaaaaagaatattgaaaaatatgcaaactaaccctagaaattaccaacgaaataatcaaaaatttcaaaataactagaaaattcaacgaagctcttagttaagttcaatcgaaatgggaatccggaatattcccaatatatactaattcaaaaaatgcagctaaatgaaaagcctcgaagcggccctaacttgataatatggcccaaatgaaatggaatgcatttttagtaactcaatagagaatgacacgtttttagttggaaatttgtttctcatccttacgcaaactttgtttctcccaaccaaataattctcaaaacggaaatggaaatgtattaattcatctatgtgttttattattattattttgtaattctcttgtgacttgcgctgaatgtcacttttcaagatttgaaattgtattttgttttctctagtctatgcatcatagaaatttgtatactattttgttaaattcacaccaaattctttgaatttctgtttatgctttagttaatttattttatttattttgtacaaatacaaatcatatattcttcaaaaagatatttgcaaggaaataaaatggaatcaagatcaaaacacaccttctttcgcccaaaactccaaatctttggttatttaatttggttaatgtacatttacataaatttatttatcacacacaatggaacataaatataacaatagtttaaagtttgatatgtatcatcatagaacgttggctaggaggagtaaaatagatcgaatgaccacgtcgattgtgcggctagcagaatgtgctccgagttgcataacaagtcaagtgtagtggaaatggcattagcatcgcaattggttattggttagtaacaaacagaatcgatctattgcacatagttgcccaataaaggccgcctgttcatgtggcggcactgcatcgcgcttttggcatgtacacaaagcaaatatacatttagaaaaag

SEQ ID NO: 5393 - DNA, 2322 bp, DROSOPHILA
acgatccaaaatacaccgttttaagagacgtttcaatcggccattaaaggggaggtgcggaaacagcttctacgattcatttttgatcaattcttcaacaacatttaaacgaacgaataagttagcagaccatatagactgaaatcagcagatccggacaccaggcgggacaaccttaagacttcttcacgagacgatatcgaatccaacgaatcccgagaatggctcacacacacctgggacgcgccgtgaaaaacattgaggcgccacgcccgttgaagacacaatcgcgatcgtcgttgaagaacagctacctggtgatcgaggagctaatccagttgatagacaacgtgaccgtcggtcttcagtcgtgcaacaccacgccggaatcgatcacgctgctcctgcacaacctccgggtgcatggaccgcaactggaggcggtgtccaaggatacactggaccgggccttcgtcgttttccgcaacgcttcgcaggacgaacggctgaatataacgacgcgcctcaagctgctcgaactcatcgagctgcgcgccaagagctgggacaatgacgacacaatcgcgtactacaagtccaagcagcagatctccaacgtggagctgccttcggaataccagtacgatgccggcgtgcagcctggcgccttcagcacctcccccacattcggcgtcagcggcggtgttggtggcgttaacgatggagccgcagccgccgctgccgccgtcttcaatgcagcatctgcagctgcagccgcccaagctgcggccattgcggccgtgggcacatccaaccagcagcacatgctgctgccgcccggtgaggtcattcgtaattcgggcaagttccccaaaccgaccaagattcctggcaagacgtactgcaaggacgaggtcgtgattcgcaatgctgactccggcaaagtaatgggcatcaaggggcgtcgcgtgcacatgatcgaggagctaagcgaaaccattatatcgtttcaaagagtcaacccgggtgccaaggagcgtttggtgcagattactggtccagctgaggataaaattaactatgccaaacaacttatggaggacaccattcgtcggaacgcctcgccggtgcgcctggaacccgctcctgccgttggaggatcctgctcctcgcttaactcgtccaactcggacgacgccattgtgcaaccaagaacgccaaccggaagcagtttggccaaccggctaagctttaactcggcccaaaacttcatgaccgccacagctgctgcacagcagatctcgcagcagatgcaccaccaaacgcatcacctgcagcaccaacagcagcagcaggtcgccgcagtagccgccgcagcagcagcggcggcacatgctcaggcgacagccgctgccggtaaagtcttgcgtcccaatcaacagctgctaatgcactcatattccacaaacgatgcttccgtaggtgaatacaagttcacggtcaacgtgggccagcacctgatcaagatcaccggcgactgctgcgaactagtgcgcgtggccaaactcgtgctcgatgactattttagcagctcggagtttctggcatccattgaggctggcgccgccttcgacggcacttcgctggtgaccacgccatcgactccgcttcccggagccgggccgccgcaattttggctgcccggcacggacagtggcattggactgaattgcgttgtttcctcgtcagcgaacaacaatggtgaaggcgacgacgaggtgttcgctgagcccagcaatggaggatcatcgactagcaatcagaatggactggccagatcgcgtcgcagccacttttcgcgcaaggagtccacgccggagaccaagggcgctcgggaaaagggtgacttggacgatttggcaggcaccaattccttgaaaagcaatgcatctcgcgtttcttacgatattgaacacttgctctactactccatgagtccgcactcgtggaccctgcccaccgactggcaaaagatgcaggagacagcgccctcgattctgcgcaacaaggatctgcaggatgagagccagcgcttcgatggtgataagtatctggccagcattaagacggccgccaagcgagacattgtggctgccgatgaggtcgagactctggacgaataaagccatcaatcgagcggctcgaactgacaatatagagtgtcccggggtgaagtgcctgctcccagacggagctgcagtatgcttcaatgcttttggccatggccacatctaacaatcgcaaactcaaaacgaccaaaac

SEQ ID NO: 5394 - protein, 653 aa, DROSOPHILA
MAHTHLGRAVKNIEAPRPLKTQSRSSLKNSYLVIEELIQLIDNVTVGLQSCNTTPESITLLLHNLRVHGPQLEAVSKDTLDRAFVVFRNASQDERLNITTRLKLLELIELRAKSWDNDDTIAYYKSKQQISNVELPSEYQYDAGVQPGAFSTSPTFGVSGGVGGVNDGAAAAAAAVFNAASAAAAAQAAAIAAVGTSNQQHMLLPPGEVIRNSGKFPKPTKIPGKTYCKDEVVIRNADSGKVMGIKGRRVHMIEELSETIISFQRVNPGAKERLVQITGPAEDKINYAKQLMEDTIRRNASPVRLEPAPAVGGSCSSLNSSNSDDAIVQPRTPTGSSLANRLSFNSAQNFMTATAAAQQISQQMHHQTHHLQHQQQQQVAAVAAAAAAAAHAQATAAAGKVLRPNQQLLMHSYSTNDASVGEYKFTVNVGQHLIKITGDCCELVRVAKLVLDDYFSSSEFLASIEAGAAFDGTSLVTTPSTPLPGAGPPQFWLPGTDSGIGLNCVVSSSANNNGEGDDEVFAEPSNGGSSTSNQNGLARSRRSHFSRKESTPETKGAREKGDLDDLAGTNSLKSNASRVSYDIEHLLYYSMSPHSWTLPTDWQKMQETAPSILRNKDLQDESQRFDGDKYLASIKTAAKRDIVAADEVETLDE

SEQ ID NO: 5395 - DNA, 4122 bp, DROSOPHILA
aatcaaaatataaatacttaaaaagaaaaaaaaacgaaaataaaaataaaaacagcagcagaaaaaaacgatgagacagttgagcagacgagaaaaacaaagcccattaaattatttgttgagtattttattaaaaaataattacgataataattaaaaagtttaaattgaacgaattacgaaaaacaaactgaatatacatatatgtgtgcatatatacatatatgtatgtattatatataaacaaattatttaatagttatgctaaaaaattatttaaagtgaacggatatgaaaaatatttgtatgcgtgcgagcacggagagaagggcactcagaataggccatcgacaccacccactcccttccgatacccgaacatcaccaccagttttcaccattttctgacccttaaccccttcaaccagacacacaccaaacacaagaaaaggcgaagaaagccgaaaaaaaaacaatgcaaacacgaaataggcggcgacgacagagataagcgcgaagaagatactaaatcaataagtaaacataaaaattaattaataaattaattccaaaacaaaatgaaaaaagctaaaaaaaaaacatcaagaaaacaaaagacaaaagcaaacaaaaaacatgacgaaacattgaaaataaaaaaatactaaaatgattaacagaaaactgttttaatgtcaatgggggcagacataaacttcttcagcaatagttatggacttaattgtggctcattacattctcgatcctatgtgaatatatatgtatttagttttggggtatgtggcggaaaatggctgttatctttttaaaagttgtcacattttccagcactatcgtacgcacaaaatactgaaaaatacaagagcgaagcgataaataccgtcgattaattctcagtactttttcatggtatttatgcataccaatcgatagggcagagcaaaagtggacgtaaagctaagcaaatattgcttattaataatattaatatattaatatatcagatctgaaaacatcgagacaaaacggaattcagaaatggctttcacaatgcaaaccggggatctgaagaagctgaagtacttcatcgactttgcgcttgagaatcccaccttcttgaacatgccgcagctgcagttcgtcaaagatttcgtggagaagtttggtggcacggtgccgcctggccaattcaacggtggcagcgccggagggtaagttaaccgaactatttgaccaattttcaaaacaacacgattgtatgatttgctcatcccgcggcttgttcttccagcaagtgcccattcggcggtgttgctggtgccaaggccaacgagccggccaatgcccccgaggatagcgaggacgaaaagtccctctccgatcctgagtcggacgtggagctggacatggagggtgagtgtgcaaattttgccgagtcacgtggtcattgggggtcacaaccctggactttgatgcgttgctgtcgcagtgctggcagttgctttatcttatatcctttcgacactgcaaacttagcgtttacccaaattcgaatcctgcagtattaatatatgtaatacgccaattaaaactatgtatcttctatccgtattacttccgacgccttcaggtgtgatcgaggcggacagcgaccccgcccaacccatgggcaactacagcaagaaggccaccgaagaggaggtggagcaggcgagcgagctgcgcgcccaggcggcctccgcttacggccagcagaagttcgacgaggccatcgccttgtacaccaaggccattgaactgagcccgggtaatgcccttttccacgctaagcgtggtcaggccttcctcaagctgaagaagccgaatgcctgcattcgggactgcgacgtggcgctggaactcaactcggatttggcggctggctacaagttcaggggacgcgcccgtcgcctcctcggagattttgagctggctgcccatgatttgcgccaagcatgcaagctggactttgacgaggagacagacgagtggctaaaggaggtcactccgaatgccaagaaaatcgagcagcatcgcttgaagcaggagcgtcgccaggcagagcgtaagatcaaggaacgccagcgggatcagaggcgcgcacgtaaggagcaggaaaagcacaatgccagctctggtggatcatctggagaattttccggtgggaatcctggtaacggaaatatgtctgatatactgggcgccatgtcagatcccgaggtgtcagccgccattcaggttcgtgaatactacttttctatttctaatacaaatgcagtaatcatatcgttgttatttattaactttcgtaggacattttgtcaaatccgggtaacatcacaaagtacgcgtcgaacccgaagatatacaaccttatcaagaagattgtgcccggtggagatgtgggtgctgcctttggccaagcgggtgaaaaggctggaaagccgagcgagcctaagcctaaaaaggactccgccgacttcgtcgatgacggtttggactaaggtttagaaatggggcagtagtaagactgaaacatgcgtcgataaaaagaagttaacaaccaattacacgaaatcgagcgagattacaaaacaacaaagaaagagaaagcaacagagtgcggggaagaagatggactacacgaaaaacaaaagggaaagcaactgccttacacatttttgcagctgggaaaaaacaaacatttcctaagctttaacttaaccaacacgtaaaagaacgggcgacaatggagaaaattcaaatattcaaaatactacaagcagtcagaagaataagcaacatttatttaaatcgagaagaaagagatgttggagatgctggagacgcttcttcacatattattgaaaagcatacttgcggccattaaagtggcaaatgaaactatacaaaggagctagaatatgcttaaaaacttatcacatttgcagttcacaggtaaatcaaaagattgtcctgtgacgaacaaaacatgaatgtttagacgtcaagtcagattcaagggtgccgatcgatctagttgaactaaagctcgagaaacaaccaaaagaaaataaaaaatatatatatgttcaataatattagcctaaattaccgagaacgaagaaacggataaaactaatcgcatcatttggtcaaacaaaattgtactgagtaggatttaaatcatattgtatgcaaatgcatttagccccccaacatgaaagcaatcgcccattcattcacacactcattcacacactcattcacacactcattcaaccagtgatcaatggaaataaataaacgaatcaacaagaacccgaattgctaatgtccatattttttggtaaacgggtaaaaggggagatacttttgcttttttttcgagcgggttgaacagatggagccgtagtcccttaaactatccggcgcatcacctgtgtgggttgctcactttgtatgaagtacattgggtacgcatggtgtatgaaagcgtcgattagacgcttcaatggctgcaccctgcaccctggatccagaacctatctaccgcaccccgccccatgtcagcgcgaaattggctaacggacagcttggcgcacatgttcgattatggccaaatcgagcgaccaagcagaaccagcggcacatgacctgggctcagcgatgccaagacctgggtggttgtacctagaggtacttgattgctttttaaactcagcttggtacagcgtacacgactgattatttagaagctatgacagctttctttgctttgatatttttcatatttatatataaattataaatatatatttataagcaggtgatatggttgaaacatatatcaacgaatatgtcaaatataatacagtgaagtgtctgcattattttattgtacctgcgccatcacaggtacggctcctctttccatcgactgcagacgtaccgcttatgtgcatgactgggtgtccggggtggtggatgtgaatgtggatgagtggcaggagggcgcaggcgcagctcagcccaacagccaagttggtctggactcctggc

SEQ ID NO: 5396 - DNA, 1751 bp, DROSOPHILA
taatattaatatattaatatatcagatctgaaaacatcgagacaaaacggaattcagaaatggctttcacaatgcaaaccggggatctgaagaagctgaagtacttcatcgactttgcgcttgagaatcccaccttcttgaacatgccgcagctgcagttcgtcaaagatttcgtggagaagtttggtggcacggtgccgcctggccaattcaacggtggcagcgccggaggcaagtgcccattcggcggtgttgctggtgccaaggccaacgagccggccaatgcccccgaggatagcgaggacgaaaagtccctctccgatcctgagtcggacgtggagctggacatggagggtgtgatcgaggcggacagcgaccccgcccaacccatgggcaactacagcaagaaggccaccgaagaggaggtggagcaggcgagcgagctgcgcgcccaggcggcctccgcttacggccagcagaagttcgacgaggccatcgccttgtacaccaaggccattgaactgagcccgggtaatgcccttttccacgctaagcgtggtcaggccttcctcaagctgaagaagccgaatgcctgcattcgggactgcgacgtggcgctggaactcaactcggatttggcggctggctacaagttcaggggacgcgcccgtcgcctcctcggagattttgagctggctgcccatgatttgcgccaagcatgcaagctggactttgacgaggagacagacgagtggctaaaggaggtcactccgaatgccaagaaaatcgagcagcatcgcttgaagcaggagcgtcgccaggcagagcgtaagatcaaggaacgccagcgggatcagaggcgcgcacgtaaggagcaggaaaagcacaatgccagctctggtggatcatctggagaattttccggtgggaatcctggtaacggaaatatgtctgatatactgggcgccatgtcagatcccgaggtgtcagccgccattcaggacattttgtcaaatccgggtaacatcacaaagtacgcgtcgaacccgaagatatacaaccttatcaagaagattgtgcccggtggagatgtgggtgctgcctttggccaagcgggtgaaaaggctggaaagccgagcgagcctaagcctaaaaaggactccgccgacttcgtcgatgacggtttggactaaggtttagaaatggggcagtagtaagactgaaacatgcgtcgataaaaagaagttaacaaccaattacacgaaatcgagcgagattacaaaacaacaaagaaagagaaagcaacagagtgcggggaagaagatggactacacgaaaaacaaaagggaaagcaactgccttacacatttttgcagctgggaaaaaacaaacatttcctaagctttaacttaaccaacacgtaaaagaacgggcgacaatggagaaaattcaaatattcaaaatactacaagcagtcagaagaataagcaacatttatttaaatcgagaagaaagagatgttggagatgctggagacgcttcttcacatattattgaaaagcatacttgcggccattaaagtggcaaatgaaactatacaaaggagctagaatatgcttaaaaacttatcacatttgcagttcacaggtaaatcaaaagattgtcctgtgacgaacaaaacatgaatgtttagacgtcaagtcagattcaagggtgccgatcgatctagttgaactaaagctcgagaaaca

SEQ ID NO: 5397 - protein, 373 aa, DROSOPHILA
MQTGDLKKLKYFIDFALENPTFLNMPQLQFVKDFVEKFGGTVPPGQFNGGSAGGKCPFGGVAGAKANEPANAPEDSEDEKSLSDPESDVELDMEGVIEADSDPAQPMGNYSKKATEEEVEQASELRAQAASAYGQQKFDEAIALYTKAIELSPGNALFHAKRGQAFLKLKKPNACIRDCDVALELNSDLAAGYKFRGRARRLLGDFELAAHDLRQACKLDFDEETDEWLKEVTPNAKKIEQHRLKQERRQAERKIKERQRDQRRARKEQEKHNASSGGSSGEFSGGNPGNGNMSDILGAMSDPEVSAAIQDILSNPGNITKYASNPKIYNLIKKIVPGGDVGAAFGQAGEKAGKPSEPKPKKDSADFVDDGLD

SEQ ID NO: 5398 - DNA, 3512 bp, DROSOPHILA
ggtgggaggtggaatgggactgatgggcagtgaacggatgttggattcccgcacggttttcgggctcatcgcttaccaatctccttgggcagcttgtcattttgccggaaccactcgaggagctccttgagatcccgttcctgcttccgcaccgcctgttccgatgtgtcgctatcctgttcccgctgcagctgctcggacgtaccgctcgccccagtctctctcacacctatgcggctcattggtgctgtggcctgggtatcgattgctccgtcgctgttccctccgccaggttggtctgctatcggctatcggacgcagcaatcgctttcgaatcactttcaaaaacgctttcgaatcacttttaaacctttgggcttgacgcctggcagccgactgactgacagttgcgcatcgatttcgctcatcgatttagtttttgaatattcaatgctactgcgttggcaattaaagccacgtaattttttaatggcttttcggccatcgtttggacgacgcttaatagtgcctaaatatgttccgttccagcttctggatctgcctaatcacctggtcgtgtgccgcatcccaatgccatcgcaagtagtgacacaattttcactttaattgataattcgcgggatgggcaatttttctaagaagcgtttgttttttgtaatcatagaagaacattgaaagccacctggcttttgggtgtaataaaacctcataaaatgtaattaatataatttattgttttgtcaagtatattgttcccattgctgtcaatcaatcgacaatagccccttatttgataatagagaaattggtaagaaaataataaaatatgaaaataagaattcttaatggagggccagcttcactgagctctagaacctgtaagtgtttctgggactttcccaactaatcgatatcttcgcttggcaagacgcgatgcttgatcacatttatgtttatatcacgttcgatgatcaggatatcagaaccaggaccaccgactcttgctctgagcggccaccttccagtaccgctcgtcgctgagataagccctatgaagtacagaatgggtggctaagatggacatccccatctaaaggtaatactcacgcgttgtccctgatggactgaatgcctttcgccttgagttccgctacagtgcccgccttgccgccgtactcgttcggcaacatgtccctgggcacttctttgtaaaggctatccataccctctgtgtggtaccggatctgcaagacgatttggttagctagtgcttagaatgaagtacttttcaggttctaccatgttgcggacttcctcccttaggaagggcgacatcatggatatgagcttgtccaggtaagtggggcagttgatgacatgcatggcctggagtcgcgagggataggcttcctgcaggaacttcatgtaaacacgcagcacgaatatggacacgtaggccaggtggcgtagggtgtagcccccaatgtccacaatctgaacatcgccctcggcaatgtccgcttcgtctagtacgtaatcagctccgcttcctgtttctcgctctacatccggctttgtgaatcgtgcatcactcatcatgacaaagattttggtctcctcgacagaattccgctgtgggaatagcacaattgtggatcaatgagtcaacaggggaaacggacatccgagtcgagacacaccgttcgtggatccagatcggccatgcggaagaagatgagcttatttccctggggagtgactccgggtaatatcaaaaggtccctgtgaagggcaaatgttaatactcgctcattgaatcttttgctgcacttacgaaaccctcaggccctcggcggtcatctcgtcctccatgttgcgatccatgaacagatgtgggctcttattgcgcatacaataatttagctccgccagggccttggtgcgttccacatcaaaagccgtgcacttgaggaatcgtagcataactattggttctatcgggaagaattggaaattttgataagctagatgctactgcactcacaacaaaagatacattgcaactatatgaagatagaattctcaattctcaatcaatgtccaatgtatctgtgtgcatatggcactagctaagtgcatgtcagtccaacttcagcaaggaggaagtgccttgctatcactggaggtgcctaatgcacttgacctttggcactgctctgttacaaggtttatggattgttaccacaacaggttattgcgcgcccattaattccgtctgccacttgactggttatcaatcggagcgaaacgcatttgaaatcgattccagtgactcacttaccgatcttctcgggcagattgggattggcctcgaaccaggcgaccagatccgtcagcttgtcgctccatccagttgctggcgaagcgctggtctcgggggcggagtccttatcccctgtatctttatccattgttgtagcccaatgcgtctctcaggggccgcagaaagccactaactaagcaagtaacttagctaagtacccccaattgataaagctaactagcccgatcgcacacacacatccgctggaaatgatacgagtgtgtgaccactattcggacgcgatctttagcttttcgcgatcggatcggcgagtgaaagctccaatgcaaagctccactagcagccgcacagatgagtccagttgtttgcaattaagcaaagacgagggcggttttaattgctccattggagagcaagccgaatcagcaatacactcactaatagacttgttttgaaatctttattggatctggagatggacacctacaatatacaacacacatccaatacacgtagaactcgatcttatcgtacttggcttcctgtcccaccggtttaattcgtttgcgaccagctttgttcagtattcagatggaaccagcgctaagaaaaaatatatagtatgtctatgcctatgtctatgtgtacatgtatatgtatatatactcgtagtatatggctagcaacatactcgtaatacttagcccgatgtatgaaatcgtcaagggtcgcaaaatggttactctcaaaatttttaaaatgttaacattgttgcttttagaccttagaccttaggatttcaccttgttatcataacagtttgcagctagttttatctgaatctggttctggatctggatctggttctggatctgaatcgggatgcatctatgggggtaggcaaaagtggagggtctcgaaacctatataacgcacataacaccgacaacacatacatacataacatgctttaactctggagcggatcggataagatctctcttcggcttataaactgcaaactggagttccaattaaatacacctatgccttggagtttacattaggaaatacacacaaaaacctttttttggaggagcctttggcgaaatacataaatgtatacagatacggcaattgatatcgt

SEQ ID NO: 5399 - DNA, 932 bp, DROSOPHILA
agacgcattgggctacaacaatggataaagatacaggggataaggactccgcccccgagaccagcgcttcgccagcaactggatggagcgacaagctgacggatctggtcgcctggttcgaggccaatcccaatctgcccgagaagatcgaaccaatagttatgctacgattcctcaagtgcacggcttttgatgtggaacgcaccaaggccctggcggagctaaattattgtatgcgcaataagagcccacatctgttcatggatcgcaacatggaggacgagatgaccgccgagggcctgagggtttcggaccttttgatattacccggagtcactccccagggaaataagctcatcttcttccgcatggccgatctggatccacgaacgcggaattctgtcgaggagaccaaaatctttgtcatgatgagtgatgcacgattcacaaagccggatgtagagcgagaaacaggaagcggagctgattacgtactagacgaagcggacattgccgagggcgatgttcagattgtggacattgggggctacaccctacgccacctggcctacgtgtccatattcgtgctgcgtgtttacatgaagttcctgcaggaagcctatccctcgcgactccaggccatgcatgtcatcaactgccccacttacctggacaagctcatatccatgatgtcgcccttcctaagggaggaagtccgcaacatgatccggtaccacacagagggtatggatagcctttacaaagaagtgcccagggacatgttgccgaacgagtacggcggcaaggcgggcactgtagcggaactcaaggcgaaaggcattcagtccatcagggacaacgcggcttatctcagcgacgagcggtactggaaggtggccgctcagagcaagagtcggtggtcctggttctga

SEQ ID NO: 5400 - protein, 303 aa, DROSOPHILA
MDKDTGDKDSAPETSASPATGWSDKLTDLVAWFEANPNLPEKIEPIVMLRFLKCTAFDVERTKALAELNYCMRNKSPHLFMDRNMEDEMTAEGLRVSDLLILPGVTPQGNKLIFFRMADLDPRTRNSVEETKIFVMMSDARFTKPDVERETGSGADYVLDEADIAEGDVQIVDIGGYTLRHLAYVSIFVLRVYMKFLQEAYPSRLQAMHVINCPTYLDKLISMMSPFLREEVRNMIRYHTEGMDSLYKEVPRDMLPNEYGGKAGTVAELKAKGIQSIRDNAAYLSDERYWKVAAQSKSRWSWF

SEQ ID NO: 5401 - DNA, 3768 bp, DROSOPHILA
ggttaatccccaagcctttcaaaatgtttgccaacaaagtttgtgccgcggggacagcgattgccaatcccaattgttgtcagacattttcatgcgagctcataacattttatgcagaaaataaatttgcatgttgcacttttgaataatcgcacgccgctgacaaacaactggctgccaaaatcgttcgtctggaaatgtgctccgctcaatctgctgccttaaccccttgacccccccgggaaaatccagagaaaggagttttcctggccagccgccagttggcaaaaaggagcgactttcggaagaaaggagctgccacacagaggaaattaggctgaaaagtttaataaatgttattcggagtattgaagtagtcttaagacatcaacaatttactagaggtgccggctcgattgcattttcatttcaaaatgaacatttttttacaattttattgtaaatgtttttcgcagtgtagaggagttggtttagaagcagtatcttttcgccagaagcggccaaaccagacacgtaaattcaggacggacaactacagcgacagcaacaacgaaaaggacaacgatgaggacaacttcctggcatgaatgatattgagccgaggcggcagcagtcccaaatgaaatgtcattaatttggcaaatgagtgcggttgcgttggttgtttgactgacttgaataactgactgactgacgggagaggacaccaaaaccaaagccagacagacactaccattcacagcaattaccaacaagtgtaggcaaatttgaagccaagtcgactcaactgcggctaaaacaacgacagctggggaaatctttagttggtcatattttattttgggtggtaatactttaaaatttattttgttcgagctgatttacggaattttagtgaacaacttggccgaaaacgtacatatataaatatttaaatctaagtgtattctatgcaaacttcaaactttgctatctcctattaatcggtattcattttccaatgcttaaatgtcgttctgctctcattaatcttactgcggtaccaattttgctcgatcctttggaggatcttaataacgttataaatatctttccatatcgaaacgatttttgcatccatttccttattgaaatgactaacatctgggaaatcatcggaaaagcactcttcatccgacgaatttggcggggattcatctaccaactttttgatcgaatacttgaaggatttgattttaacacttttctcttcatgaaaaccaaaagtccgccgaagtttgaatggtctagtacgcgggaggggtcgatccaaacgttttccgagaagtggcccattggagttcttacagcgactagtttcttcagggtcgattttctttaaatcaatttctatagattgcggaagttcgcctgccacggtaatatctgcacaattacaattatttgattgattttgttgtaaatgttgttccttaaaatcaataacgtctataggcagtgcattttcataggtggattgccaggtggacgaccattcatccggcgaagaatccaattctgctataagagaaactcgttcctcatccgattttttcaagtccgtttcagttctatgaatgtcatgggttaaagtagatagttctcctaggtccagatgaaatgacacgtgtacgtcatcaagaaaaagtaaacatttcttggccagaatagtgtgataatcttctattatctctggatattgaaatagatttggtttgaaacctagtttcacacctggaacgttgatcatataagtctgtgttgttctgggctcatcaagacctgaagccaatacttccgtggctaggacaatgtcaggatcatctatgaacggtgcggattctgatttttggttttctgattttgcaatccttacggttttggaatttcgtggcttattactccttttagtatgctttctgatgaaacgcgattttacgattttatatttctttgcagctctatacgttttgttaaaaacttctggagtatatccatcgaagtcctctaggctgccccaaagcggatgtttcgtggaatcatccttgcgatgattctcagatttgcctactgagttacttcccgttgtagtagttttcttcttctggtagttttcaaaattcttccctgattgatttgaatgtcgactgcttacagtcgaatctaatctatgactacatcttgctccatacctgcattttccggtatccacgaaactgtcaggcttttcgtcgaatttttctaggggcttcggtgcatcttcggtcttttcgggccataacagctggtggttatgatcatagaatgccttgaaccactgggcaaactccaaactctcgctattaccacgagaaactagccgctgaatgggtatttgcttctcaacgccctgttttaagaggctcttttgcagcaatttcatattttgcacacattcataatggctctttggttccttgaagacccttttcaacctaatcgccgaaggttgcagcttatgaagcattcgacaatattccgcgccggttcgcagttcctctaaacgtacgtaagtggtgccaagattgttgtttatccaaccaaggattctgcgacgggacgcagaattcccatgtttgtgttgatttacgttttgcattacataaaattacgaaagtgaaaatgatgttagaaaactagatgtgttcgtgtcactcacttggttaaactgaaagcattagcatacaaatgttgacttttgtacttttgagcctactctgatcgaaaataaatctgtaatatgtgtcgctattctttcttgatatgttaaggtttaaacggtgctacaaacatcgtacttcttgtatagattcttactagaaatatatattacttaactctttcgtgacctctgacctactggtagcccttctaccaacgcttttgatctgattagtgccggcagcaaattggttgttcctgtgtcatctggccatatttcaagcaactccacttcatgtggggtcatctatcaagcaagtgctgcaagtgctatataatatttctgtcattatgcttaattatctggttcctgtgcaatgcgtcaacgttgacctgacctgaccagccgctgacacggccccgcccaccagctcttgcctcgcccctcgtccttgcgtgctagttgtccggttcgctatccaatgtgaaattagttggggcaggtcctttcagtcttttcacataagattgaggttgagcaccgaggttgaggcgcattacatcgcgtgttgtgagcaggcgggtcataaatgaaatctgctgccactttgtcgcccattgtttaataatgaaattaaatcgttttggccgacaaactgtacgctttgaaaaattatgtagtatttataatgaaatataacattttaactgcttacatgaactatatgtatatagttctcattcacaaatgccatcatatatttcgtatacagttgctaactgaaatctgaaatggcttggagaaagattttcgctctgtgtacttggtgctcggagggttagaaactaaaccccaatgcgaagggaagccaaccccatccgcttctcacttgtcagcgctcttgttgacgcttgacaaatggctttgggtggggatttggccccctatttcttcttttgatttactgccacattttgtatacacatacatttttttcccctttgttt

SEQ ID NO: 5402 - DNA, 1768 bp, DROSOPHILA
gtttaaccaagtgagtgacacgaacacatctagttttctaacatcattttcactttcgtaattttatgtaatgcaaaacgtaaatcaacacaaacatgggaattctgcgtcccgtcgcagaatccttggttggataaacaacaatcttggcaccacttacgtacgtttagaggaactgcgaaccggcgcggaatattgtcgaatgcttcataagctgcaaccttcggcgattaggttgaaaagggtcttcaaggaaccaaagagccattatgaatgtgtgcaaaatatgaaattgctgcaaaagagcctcttaaaacagggcgttgagaagcaaatacccattcagcggctagtttctcgtggtaatagcgagagtttggagtttgcccagtggttcaaggcattctatgatcataaccaccagctgttatggcccgaaaagaccgaagatgcaccgaagcccctagaaaaattcgacgaaaagcctgacagtttcgtggataccggaaaatgcaggtatggagcaagatgtagtcatagattagattcgactgtaagcagtcgacattcaaatcaatcagggaagaattttgaaaactaccagaagaagaaaactactacaacgggaagtaactcagtaggcaaatctgagaatcatcgcaaggatgattccacgaaacatccgctttggggcagcctagaggacttcgatggatatactccagaagtttttaacaaaacgtatagagctgcaaagaaatataaaatcgtaaaatcgcgtttcatcagaaagcatactaaaaggagtaataagccacgaaattccaaaaccgtaaggattgcaaaatcagaaaaccaaaaatcagaatccgcaccgttcatagatgatcctgacattgtcctagccacggaagtattggcttcaggtcttgatgagcccagaacaacacagacttatatgatcaacgttccaggtgtgaaactaggtttcaaaccaaatctatttcaatatccagagataatagaagattatcacactattctggccaagaaatgtttactttttcttgatgacgtacacgtgtcatttcatctggacctaggagaactatctactttaacccatgacattcatagaactgaaacggacttgaaaaaatcggatgaggaacgagtttctcttatagcagaattggattcttcgccggatgaatggtcgtccacctggcaatccacctatgaaaatgcactgcctatagacgttattgattttaaggaacaacatttacaacaaaatcaatcaaataattgtaattgtgcagatattaccgtggcaggcgaacttccgcaatctatagaaattgatttaaagaaaatcgaccctgaagaaactagtcgctgtaagaactccaatgggccacttctcggaaaacgtttggatcgacccctcccgcgtactagaccattcaaacttcggcggacttttggttttcatgaagagaaaagtgttaaaatcaaatccttcaagtattcgatcaaaaagttggtagatgaatccccgccaaattcgtcggatgaagagtgcttttccgatgatttcccagatgttagtcatttcaataaggaaatggatgcaaaaatcgtttcgatatggaaagatatttataacgttattaagatcctccaaaggatcgagcaaaattggtaccgcagtaagattaatgagagcagaacgacatttaagcattggaaaatgaataccgattaa

SEQ ID NO: 5403 - protein, 521 aa, DROSOPHILA
MLHKLQPSAIRLKRVFKEPKSHYECVQNMKLLQKSLLKQGVEKQIPIQRLVSRGNSESLEFAQWFKAFYDHNHQLLWPEKTEDAPKPLEKFDEKPDSFVDTGKCRYGARCSHRLDSTVSSRHSNQSGKNFENYQKKKTTTTGSNSVGKSENHRKDDSTKHPLWGSLEDFDGYTPEVFNKTYRAAKKYKIVKSRFIRKHTKRSNKPRNSKTVRIAKSENQKSESAPFIDDPDIVLATEVLASGLDEPRTTQTYMINVPGVKLGFKPNLFQYPEIIEDYHTILAKKCLLFLDDVHVSFHLDLGELSTLTHDIHRTETDLKKSDEERVSLIAELDSSPDEWSSTWQSTYENALPIDVIDFKEQHLQQNQSNNCNCADITVAGELPQSIEIDLKKIDPEETSRCKNSNGPLLGKRLDRPLPRTRPFKLRRTFGFHEEKSVKIKSFKYSIKKLVDESPPNSSDEECFSDDFPDVSHFNKEMDAKIVSIWKDIYNVIKILQRIEQNWYRSKINESRTTFKHWKMNTD

SEQ ID NO: 5404 - DNA, 4000 bp, DROSOPHILA
gttcccctcggttagggttgtggatttgcacgctttacgatggttggcaactaactgatgattatttaatagcggaatgatttcgatgggcgagcgtctaaacatttcggcttgtttcctgggaaattcctgcgatcccaaagtatatacaaatggaaaatcctcgcacagcaaagttgattgggtaaatatgcaatcagatagatataacttataatcgatttatatatacttacatctaaatgaatttgatacccgatttatgtggattttcgtgtttttgatcaggggagattcattgcgtcttatttttttttttacaaaaagaatataacttatttccatatcatttcaagtttttaagttaaattcttgtctaaacctaaactaacgctgcaaacaacaacattcaatgaagtttactaaatgttcaattgggaattgcaaaacaaaatcttttctaccagaatgcaattttcaggaaatgcttttatgtaataaacataatttatcattactctgaatgcactttttcaaaacttagaaactctgtcctatgaattcccgtcgatccaaagatattctcaatcccctttttgaatcaacaagtaaaatatttcaaaaattgccgacaattcccctcgtattccccgtcccgcatcccaacacgcatacttcccaggcattttcccaaatcgagagaaaacccaaagaataacccaagagaaacagaaaaatccagagcgtcgagtcaaggctctcttcaatttagctttgaatttgctgtattttcgttttgcagccgccgctgccgctcgagaaaatcgaaatcccccgccgcctgacgtcatacctgccgatgccgcagcttccgccattgagtgggagcgggatggcaagacaagcgagcgagcgggacgacgatagagcggcggcagcgaatggccgtcgagcagccgcaaaatgtcaatttgagcaatggccggaaggatcctgcgtcagttgcgttccgtaagtgcgtgcgagcagatcgatccagcaaaacgcgggcgtgaagaatatctacggagttatacagttccgaaataagaatatattgttagataccacaaattctaactgaagaagtgcgctaaaaagccaagcaagatcaccaaatgatgagcgctcgctcggtgtcgcccaaagtgctgctggacataagctacaagcccacactgcccaacatcatggagctgcagaacaatgtgatcaagctgatacaggtggagcagcaggcctacatgcagtccggctatcagctgcagcaccagcagcagcacctccactcccaccagcaccaccagcagcaccaccagcagcagcatgcccagtacgccccactgccctcggagtacgccgcctatggtattaccgaactggaggacacagactacaacatacccagcaacgaggtcctgagcaccagcagcaaccagagtgcccagagcaccagtctggagctgaacaacaacaacaccagcagcaacaccaacagctccggcaacaatccgagtggcttcgatggccaggccagcagcggatcctcttggaacgagcacggcaagagggccaggagcagtggcgactacgattgccaaaccgggggatcactggtcatgcagcccgagcacaagaagctaatccaccagcaacagcagcagcaacaacagcaccagcaacagatctatgtggattacttgcccaccaccgtggacgaggtggcctcggctcaatcttgtcctggcgtccagagcacgtgcacctccccgcaatcccacttcgattttcccgacgaggagctgcccgagcacaaggcccaggtgttcctgcccctctacaacaaccagcagcagcagtcgcagcagctgcaacagcagcagccgcaccagcaaagccacgcccagatgcacttccaaaacgcctacagacaaagtttcgagggctacgagccggccaactcgctgaacggcagtgcttactccagctcggatcgggatgacatggagtacgcccgccacaacgccctgagttcagttagcgatctcaacggaggagtcatgtcgcccgcctgcttggcggatgacggcagtgccggcagtttgctggacggatccgatgccggcggaaaggccttccgcaagccacgtcgccggctgaagcggaagcccagcaagacggaggagacggacgagttcagcaaccagcgggtcatggccaatgtgagggagcgccagcgcacccagagcctcaacgacgccttcaagtccctgcagcagatcatccccacgctgcccagcgacaagctcagcaagatccagaccctcaaactggccacaaggtaatatatctttagtttacatcttcataatagttgaaagcattcatagatagatagatagataatagatgaattgaatcgaaactcgtaattaatcgaactctgtttaaccaacttacagatacattgacttcctgtgccgcatgctcagctcgagtgatatatctttgctgaaggccttggaggcccagggatcgccctcggcgtatggatcggccagctccctcctgagtgccgccgccaatggagccgaggcagatctgaagtgcctgcgcaaggccaacggagcacccattatcccgcccgagaagctgagttatctgttcggggtgtggcgcatggagggcgacgcgcagcaccagaaggcatagcggcggatcaggacactatagtccgagaggggcttccagcagcaactatcgtgtgaattccagagccctggcgctctcactcttcaattctctgtcacgctttccatatatacgtgtcgactagatgattctaagatgtctaagcctaaaaacctactgttaatgcctatttaatgtcatagtctaaactaaattaattgtaaaaagccaacaagccaagaaacaaagaaacgccatgaacaaaaccagacgccattttgcatttccattcatttcatcgcgctccattccgccgcgcttttcgattggaggggcccactaaattgggcgcgaaaatgtcttcgctgggggggtcggtcccctcgagatctggacttttgtcttttggagcggagacaatcggagcgacgtcgacatacttagagcgtaacgtcattccgccgacagacggacggacggacggacggactttatgtatctgcgagatacgcgcacactgcatcctctagatactcgctgttcatgggaagaagcgaacagatacagatacagatacagatacatatatacatatacagatacagatacagatacgcgggcccgcgatggagcaacacatccacatccggttgatttatgttcgaaaacataaaaactgtttacaaagtataccagggcagcggaatatatagttgagcaaagtatttatgtcgccaaaatgcgtgcttaaaatgctcataattagctcagtcagataatttagtcgccgtcttttgggggcctggaatcggactcctcctcatcaaaggcctgaaatcgccaagatcactctcgttcacagttgttgacttaattgctttttaaatgacagctcccagtgcccgaaagtgctctccgctccacatacattgtacactgtttagatgcaaacacattcgtatctgtagatacaaatttagatttgtgtttagatctgcttaaattggcatatcgcatccatgttgacaggttgtcgtgttcgtggggttggggcgtgctcatttcaaagtgttaaaacatattagggaaaagtatcataaagattatcgtgcatttcgaggcatcaaatttgaaaaggaatttagagatacaaaaagtggggaaatgatccacttaacactttctattgctccacacatcgcctgtatacaagtctttgatttctgatattattcattacgctaaataatgtataggcagaaatatatca

SEQ ID NO: 5405 - DNA, 1879 bp, DROSOPHILA
agttgcgttccgtaagtgcgtgcgagcagatcgatccagcaaaacgcgggcgtgaagaatatctacggagttatacagttccgaaataagaatatattgttagataccacaaattctaactgaagaagtgcgctaaaaagccaagcaagatcaccaaatgatgagcgctcgctcggtgtcgcccaaagtgctgctggacataagctacaagcccacactgcccaacatcatggagctgcagaacaatgtgatcaagctgatacaggtggagcagcaggcctacatgcagtccggctatcagctgcagcaccagcagcagcacctccactcccaccagcaccaccagcagcaccaccagcagcagcatgcccagtacgccccactgccctcggagtacgccgcctatggtattaccgaactggaggacacagactacaacatacccagcaacgaggtcctgagcaccagcagcaaccagagtgcccagagcaccagtctggagctgaacaacaacaacaccagcagcaacaccaacagctccggcaacaatccgagtggcttcgatggccaggccagcagcggatcctcttggaacgagcacggcaagagggccaggagcagtggcgactacgattgccaaaccgggggatcactggtcatgcagcccgagcacaagaagctaatccaccagcaacagcagcagcaacaacagcaccagcaacagatctatgtggattacttgcccaccaccgtggacgaggtggcctcggctcaatcttgtcctggcgtccagagcacgtgcacctccccgcaatcccacttcgattttcccgacgaggagctgcccgagcacaaggcccaggtgttcctgcccctctacaacaaccagcagcagcagtcgcagcagctgcaacagcagcagccgcaccagcaaagccacgcccagatgcacttccaaaacgcctacagacaaagtttcgagggctacgagccggccaactcgctgaacggcagtgcttactccagctcggatcgggatgacatggagtacgcccgccacaacgccctgagttcagttagcgatctcaacggaggagtcatgtcgcccgcctgcttggcggatgacggcagtgccggcagtttgctggacggatccgatgccggcggaaaggccttccgcaagccacgtcgccggctgaagcggaagcccagcaagacggaggagacggacgagttcagcaaccagcgggtcatggccaatgtgagggagcgccagcgcacccagagcctcaacgacgccttcaagtccctgcagcagatcatccccacgctgcccagcgacaagctcagcaagatccagaccctcaaactggccacaagatacattgacttcctgtgccgcatgctcagctcgagtgatatatctttgctgaaggccttggaggcccagggatcgccctcggcgtatggatcggccagctccctcctgagtgccgccgccaatggagccgaggcagatctgaagtgcctgcgcaaggccaacggagcacccattatcccgcccgagaagctgagttatctgttcggggtgtggcgcatggagggcgacgcgcagcaccagaaggcatagcggcggatcaggacactatagtccgagaggggcttccagcagcaactatcgtgtgaattccagagccctggcgctctcactcttcaattctctgtcacgctttccatatatacgtgtcgactagatgattctaagatgtctaagcctaaaaacctactgttaatgcctatttaatgtcatagtctaaactaaattaattgtaaaaagccaacaagccaagaaacaaagaaacgccatgaacaaaaccag

SEQ ID NO: 5406 - protein, 490 aa, DROSOPHILA [sequence omitted]

SEQ ID NO: 5407 - DNA, 3290 bp, DROSOPHILA
aagcttatagagtggttctgtgcgtcaagccactgaatcccagcgagaaacgcttgccccgggaaatcctaatgaaggcttatgaagtaggaaaaatgcgcaagcatttcggtcatactatctcgtcaaagaactcagccgaaaactatttgtcgtacaagaacaagtataacaacaataatggcgccacgaccggatatgtactacccgattcggacccggatgccgggcaattcaccacactaaccacaaagatcgatgacaatgctgatcggatcgagttcctcacccaggagatccaggagctaaagcaggcgctcatctcgcagcaacagcaagccagcaaggtgatcgacaagctgctgattgtgatctccaatcagcagaaacagaatctgcgcaagtagcaggagcatttactgcaccccattcggaatatttatagatcacagtttgaccttttttagacgtaagggggtcgtgtaggccccaaagaatccagaacattgttgatattatcgtagcagcgagttgtagttaaaccaattttgatatcgatgcgccaggcgcaatatgcatacgctatatagccatatatcctacatacactacactattgatacaaatactataactagcgtttagttgaactagaggcgagcagttggcaggattgatttgtggctggttccaggctgtgtctttgttgttttggcgttgtcgtcagagaatcgtttatatagtaatttaatgcaaattattactcttaataaagtatatgctatatatctattgttatgaaaagagacgttcttatttgcagctgtcggccaaattgagcgatgtcaaggtaactgatataaactgatataaattttataatatatcatttcaattgaataaagtctcaagaataaacttttcgtaatattaattcaataggattttcaattgctcttaactgcagttgtgaattcatatttcaacaaggaacctatcctcagcagaagcttaagctgtacatgacttcactcacctgttctctgcagttttcgtcctcaaagtatgagatatcctttccattaatgctgatttttcctgttccgggtagccgcactgtgacatcggctctagcagttttgcgcaggcactcgtaggtggtgatgtactggcgaccctcttcatcgatccttggtttgggcacctccagctgcttggactggtccatcagcggtttcatgtatcgctcgatgaatgctttgctcttgtaagcatatggcgatgcgatcaggcgatccatggagttggtaaagttggagtattcgatatcggcaatgctctcaactagcaaaagttccaactggtccttgggcagcagctgaaagccggcaatctcactaaaataaaatatataaaacaaggtcaaagtacttaattttcaaaaaatgcatagcttgtttacagtttttggttctcatcgggtttattgccgcgccgtagcatgcgctcctccagatccgccagcttgttagtttcttctacaatgtcctggtaattaaaaaggaaaagtagttaatacctttctaccaaaccacttaaaattaattcatcattcttctttcttaagtaatgaagttcccaagttgcgcaattactcacatgaagcagttggaagaagttgggtttgccggtgtagaacatgctgtggaatggtctgcccgtctcatcgaattccgcagccttgcgggcggggaagacaacctcgggtgacttcatagccggccgggccttttggtcgtacaatccggaagggaacagataggatatcgcctcctgtaattgataatgaggtaaaatagccccttaaaattttcatagccaaatatctcacgtctatgtcctcctgggtaaacgtctccgcatcggcgcccatcatgttggccaggtgccgctttccgatctggaactccaggtgctgggtcttcatgaactcgtcgtgttcggtggctcttttcaggtacgcccgcatggccttgctcaccctttgcttctggacagccgccggagcagcctggacggtcacatcggtggcaaatggagccgctgcctgaaaggttatgcaaacgtttggtctcacaattgggaacagtgaaaagtgtcaagtctattgacttgactattgtaccaaccatgtagcatggcatcggtgccctggatttgcatgcattttgcagcagattcctgttattttttactatatttaagccaaaaacacgcagtgccatcctttcaattttgcggaagaagaagagaataaacatatgtttcagtcggttaaagttggatggtcggtgttggaaaacacacaagctttcagctgatttttggcgcccatttaaaaatttttttatttgtatttttaatttattaagctataaaaccacaactttcttacaatgttataagacggtgaaaattacttcatttttgagataagtattataataataattccttttatactttacaggaaattctaaaaaaaattgtcctaaataaatcaggtaatagacgctatgaatttttgatttaattgtatttttattatttatattttttgttttaattatcaaaaattttttgaatccacctcctaattaatcccaacaatcagttaattctgatgaaaaaattgtttatttactttaccgttgtccacctttacaaatgcttttattgactatactttttaaacactctttcaatgctgatattttcaaatggaaatttaaacgaacacaaatcaaaggaacagaacatgcaatgaaaacctttcaacagctaattatagttatttgatgtttaacgctatataattagttataaataattgcctaggcttagcgttgataaaaggttttattcgcattgtgggatgtaatgcagctatcagaattctgttatatatatcaatagtatctcgccgatttacattctctcatcatcattccatcctcccttgtggtatttggtcgcagtacaatttatatatatttaaagcaattatttaataataatgccaagcctatttccacgcctgcttgagcaatttacgcgacgctaaatgcttaacaatcaacgagcctgatgtgagcgcgactagcactatggaaatgagaatataatcaaagtcctccttcagcaagtcgaacgtctttgatggcgccacgcgcgtaacgaacaaatctgtcaaataaaaatggtttacagtgctttaaccaaaatcgcgt

SEQ ID NO: 5408 - DNA, 974 bp, DROSOPHILA
aaaggatggcactgcgtgtttttggcttaaatatagtaaaaaataacaggaatctgctgcaaaatgcatgcaaatccagggcaccgatgccatgctacatggcagcggctccatttgccaccgatgtgaccgtccaggctgctccggcggctgtccagaagcaaagggtgagcaaggccatgcgggcgtacctgaaaagagccaccgaacacgacgagttcatgaagacccagcacctggagttccagatcggaaagcggcacctggccaacatgatgggcgccgatgcggagacgtttacccaggaggacatagacgaggcgatatcctatctgttcccttccggattgtacgaccaaaaggcccggccggctatgaagtcacccgaggttgtcttccccgcccgcaaggctgcggaattcgatgagacgggcagaccattccacagcatgttctacaccggcaaacccaacttcttccaactgcttcatgacattgtagaagaaactaacaagctggcggatctggaggagcgcatgctacggcgcggcaataaacccgatgagaaccaaaaacttgagattgccggctttcagctgctgcccaaggaccagttggaacttttgctagttgagagcattgccgatatcgaatactccaactttaccaactccatggatcgcctgatcgcatcgccatatgcttacaagagcaaagcattcatcgagcgatacatgaaaccgctgatggaccagtccaagcagctggaggtgcccaaaccaaggatcgatgaagagggtcgccagtacatcaccacctacgagtgcctgcgcaaaactgctagagccgatgtcacagtgcggctacccggaacaggaaaaatcagcattaatggaaaggatatctcatactttgaggacgaaaactgcagagaacaggtgagtgaagtcatgtacagcttaagcttctgctga

SEQ ID NO: 5409 - protein, 322 aa, DROSOPHILA
MALRVFGLNIVKNNRNLLQNACKSRAPMPCYMAAAPFATDVTVQAAPAAVQKQRVSKAMRAYLKRATEHDEFMKTQHLEFQIGKRHLANMMGADAETFTQEDIDEAISYLFPSGLYDQKARPAMKSPEVVFPARKAAEFDETGRPFHSMFYTGKPNFFQLLHDIVEETNKLADLEERMLRRGNKPDENQKLEIAGFQLLPKDQLELLLVESIADIEYSNFTNSMDRLIASPYAYKSKAFIERYMKPLMDQSKQLEVPKPRIDEEGRQYITTYECLRKTARADVTVRLPGTGKISINGKDISYFEDENCREQVSEVMYSLSFC

SEQ ID NO: 5410 - DNA, 3092 bp, DROSOPHILA
ggagtcgctctacaaggtgtattggaagtcgggcaagatttgccagcagctgcccacgttggagcaggtacgcgagaaggtgcaaatctcgctgaaaacgttgcgcaacgatcacaagcgcacgctcaacccgacgccctacaaggtgggtgtaatcatttgatttggcttacgaaaagggtctaaccaatgtctcactttttttcaggtggctgtcagcgataatctctacaacttcattcacgatctgtggcttcagaatgcaccaattggcgagctatcatgatctatataaggaggatctggcaaggatgcgctaaaacatttccgagaaatttacttacctttggttttcaatatttgttggcctcgattttggggtcgtggtggattagttttttttttagtcaattgctggtcatatgcattgtagagctggaactcgttccgtcacacgaggatttcccgctgactatgaagcacaaactcccacgcaatttagcgagtgaatttcaaatcaatagttttaacgtgtttatctaatatttactactactactactactactatgtaaaacgcacatcatattcaggaatgtgtaatgtgccttaaacgagaagcggaagcggaattagaatcaggatgcacaggaatcacgaacccaaatcgagttactaagttacaaccaaatatcggaacggaataaatatgtctttaatatttttctagtacttaagtgttgaaatgttgcgaacgaaggatgaatgttagaagtacaaatgctttttaggacatttgcacgcagtagggcacaacacatcaagcacacaactataactactctatctatatataactacatacatactgcgattatgtatttaactaaaaggtaaaagagcgccgcaaagagaaatcaactttctacgacagtttgggaatagtttttagtatctgtatcttttatttatttcgaatatgcaaagacagtgttttcatttaaacttctttgtcggtttgacaaataacatgcttctttctgtggcacggatcatcgttcattttgctcctaatcagctccacacagttctcatcttcattgccgtgattgggttcgcccgcattccaattgaggaattcaacttccctgccggatgccacggatacgtaggtgttactgctttgcaagtcgtttatgcccagccagtagctcttgtcgtccagtctcgctgaaatggcgtccagctcctcttgatccttgatggcggctatatagccacccatgtcacgacagaagtctacagcggattgccagtcgtaggcatccttgtgatttatgtagaagagtctagagccgattcgctcaaatttcggccagaagaccttggtataaatttccttgagtgtgacttggttggcggactgctgagctcccagcttggtcagctcatccttctgattctgctccaacttttgcaatttccgttcaaaatcctctgggatcttctttagagtttcctgaagtaacttctgctgttcttcaatctgagccagccgcatttcgaaatttatcggcatggcgttctttagggcttccaactgatcctgctgagattccttggtgagattgatttgattttccaactggtcgcccaatgtcttttgctgattttccattttcattagcctcgcatcgagttcagctggcattttctttagagactcctgcagtgtcgtctgaagatgttccattcggtccagtctatccttgatgtctcctggaaccttctgcgctgattcctccaaggatagcgcttgtgccgccagctgggtctgtatcctgtccaatttgccctgggtttcgttcagccagagggcctcggaggtgttccattgctcctggtgctttacaatgtgatccaatagcggttggagcaccgaaaggcagaattctccgcactgatttggcggatctttcagaaggcacacggatcgggaattttctgtggattccgctcgtgattcaaccagattgcaggcaacaagtaagtacacaatacatttttcaagcctaaacattttgatatcgcacaaccactgcaagcgcagaaataaaacgtactgatccgcattttatgtaaaaggttctacagagcaaaaaagataagacccataatttaaatttaattccgtttttgcatttatcaagaatttatcgcttctgtgggcgacattcaatgtgctttgtgttcggcgagatgtttgattgtattaagtttcttacgctgcttacaagagttcataattaatattatcgcatttctcctataaaaaattcaaatctaaaatttccctggcgcgtattcttcttcttgccgccgttgccattcaccgtgcgcattaaacggtaatgttgtttggtcttttttagtacataactgttgacactcacaacgattaggcaacatttgttattgtgagcagctgcacaaaataataagaaaattaaacaaaaggttaataaacagaataaaaataatataatttctcttaatttgaactacaatcactgcgcatatgatacgtgcccagtaagaaagccgcgttttccatgcatttctctgcagctgcgcaacttggcaagaaaaacaacaacaactgtgattcatacggccaaatagaagttatgccctagaaattgatttttaaccagatatttcgttatagattgataccgaaaatcatggaaggcgacgcggaaaatcgcaaggatcaaatcctcgagcgtttgaacaaaagaaacaaggacaggcaaaactatttggatgtgaaatcggagctgcgttccaaggaaacagtgcagaacgagggcgttgactacttctaccagactttcagccaaaaaaccatggatatagagcagcgattaaaggatgtgcagtgcggcgatggccagccaaccgatttggccagaaacttcgccgacataactgtggagatccaggatctgcagcgatatctcaccgcatccaccatgtttctgcccgacttcaagatcaaatcctgtcagaatatccttaacaccctgacc

SEQ ID NO: 5411 - DNA, 1092 bp, DROSOPHILA
tgcgatatcaaaatgtttaggcttgaaaaatgtattgtgtacttacttgttgcctgcaatctggttgaatcacgagcggaatccacagaaaattcccgatccgtgtgccttctgaaagatccgccaaatcagtgcggagaattctgcctttcggtgctccaaccgctattggatcacattgtaaagcaccaggagcaatggaacacctccgaggccctctggctgaacgaaacccagggcaaattggacaggatacagacccagctggcggcacaagcgctatccttggaggaatcagcgcagaaggttccaggagacatcaaggatagactggaccgaatggaacatcttcagacgacactgcaggagtctctaaagaaaatgccagctgaactcgatgcgaggctaatgaaaatggaaaatcagcaaaagacattgggcgaccagttggaaaatcaaatcaatctcaccaaggaatctcagcaggatcagttggaagccctaaagaacgccatgccgataaatttcgaaatgcggctggctcagattgaagaacagcagaagttacttcaggaaactctaaagaagatcccagaggattttgaacggaaattgcaaaagttggagcagaatcagaaggatgagctgaccaagctgggagctcagcagtccgccaaccaagtcacactcaaggaaatttataccaaggtcttctggccgaaatttgagcgaatcggctctagactcttctacataaatcacaaggatgcctacgactggcaatccgctgtagacttctgtcgtgacatgggtggctatatagccgccatcaaggatcaagaggagctggacgccatttcagcgagactggacgacaagagctactggctgggcataaacgacttgcaaagcagtaacacctacgtatccgtggcatccggcagggaagttgaattcctcaattggaatgcgggcgaacccaatcacggcaatgaagatgagaactgtgtggagctgattaggagcaaaatgaacgatgatccgtgccacagaaagaagcatgttatttgtcaaaccgacaaagaagtttaa

SEQ ID NO: 5412 - protein, 359 aa, DROSOPHILA
MFRLEKCIVYLLVACNLVESRAESTENSRSVCLLKDPPNQCGEFCLSVLQPLLDHIVKHQEQWNTSEALWLNETQGKLDRIQTQLAAQALSLEESAQKVPGDIKDRLDRMEHLQTTLQESLKKMPAELDARLMKMENQQKTLGDQLENQINLTKESQQDQLEALKNAMPINFEMRLAQIEEQQKLLQETLKKIPEDFERKLQKLEQNQKDELTKLGAQQSANQVTLKEIYTKVFWPKFERIGSRLFYINHKDAYDWQSAVDFCRDMGGYIAAIKDQEELDAISARLDDKSYWLGINDLQSSNTYVSVASGREVEFLNWNAGEPNHGNEDENCVELIRSKMNDDPCHRKKHVICQTDKEV

SEQ ID NO: 5413 - DNA, 5058 bp, DROSOPHILA
atagttagctatagtaattgtaatccgtttacagaagcccgtagctttccactggatattctcgaaagcacttcaaaaacgtaccacaccgggcgctgcgtgaatgaagttcaggaacaccgataccaccgccaggagcacatatagattcatgattccagccgttgaccgttagcctggtgcacttgggagcgatttgaagatgactgtgccgatttgccgcgccgcagttcgttttatacccgattcggggcaaacatcctctgacttaaacagggtgatggcaaatttatgatgcagataaccaccgacgacagctaaaagaccgcaggaacgcacccgttattaacggcttagtggctcgatggcttgatggctctggctctatggttcggtggccgtgggttgggtgggccagttcggtctcctttatgctcttaatgcgtcacttgcaccatatttctagccactaatggtaagtactcccacaaacagagcgagagtgtcaagatttcagcaaacatgcgtgcactcgcacatatgttcgattattagatttaattttcatttgcacgacaccataaatgtccctgtgtctgctgcctttagggtttcctggttaattgagttaaccgcgaatcccattcatctgcaagcgttggttggttggcgctgacgaaatataaagtatgtgaaatattttaaagttgactttactttgtgacgttatatcacattataattcgggttggaattggctagaattgaaaaacaattattatgctgatgctcttcacttactgtcactttccacaaaaaaaaactttatttcaattaaaagacatattcgaaatcatcttttccgattcgaaaatagttccgaaatttaccgttttagatacccccaacgaaaaaattaatcgatttgcacgcaaatgcgatatgaatcaccctgtttgccgactatcataatgttttcttcttagtatttttcgacttgtaaaatcggcacatatattgcgaaatgtcgagatttcttttaaacaaaagattcgttccgagcctggtccaggtacgttctagaaccttcgaaatcgctgcaatggtttaacggcccgctaatatatctacttgcagcaagacttcctgctcgccggctcatggattccgtcgcaatctcggaggggaaaggcctccaccccgataaacatgtgtgttatgtttgtgccccagcaagaggtaggttccatcgcctgaccacggtcgcccgcagctcactccaatccgatccgttcctctccgttttccaggcctgggtggtggagcgcatggggcgctttcacaggattttggaccccggactcaacatactagtcccggtggcggacaaaatcaaatacgtccagagcctgaaggaaattgccatagatgtgcccaaacagagcgctattacctccgacaacgtgaccctgagcatcgacggcgtgctctacttgcgcatcattgatccgtacaaaggtaggtctccacaatccataagcagcggcacgtcaccacatctgttatatcaccgttaagcctcgtacggcgtggaggatccggagttcgccataacacaactggcccagacgacgatgagatcggagctgggcaagatgtccatggacaaggtcttccgcgaaagggagtccctcaacgtcagcatcgtcgactcgatcaacaaggccagcgaggcgtggggcatcgcctgtctgcgatacgagatccgtgatattcgagtaggtcacatccttcagttgactctcaagtagcgagattaatggatcgtgtcccttttcagctgcccaccagggttcacgaggcgatgcagatgcaagtggaggccgagcggcgaaagcgagccgctattctcgaatcggagggtgttcgcgaggccgaaatcaacatagccgagggcaagcggaagtctaggattctagcctccggtaagcggcagtgttccttacagaatgtacccagtagttacattcatggttccttcttccacagaggcggagcggcaggagcacatcaataaggccagcggagaggcggctgccattatagccgtggcggatgccagagcccgcagtctactggccatagcgaaatccttatcccacctggtaagtatttcgccgggggactccaccaactctcgatttcggttaggtagaatgctaggcatttaatttcaaaaacactttggcatcacactacgaacaaatattggaattcggagatgtttcaatcagagtatcagcaacgattgcttccgggcgtcgccgtcggcaaaaaggaggacatcgatctgcgctgcattcccacacgagctggtaaccactggaaccggaactttgtcaatgctccgggagactccaatgtgtacgagagctctgtgtactcatgcctcttgcgcaacgagttcctggacgagaacatcacttccttggagaactgcgagcagaccgcacaggtccatgcccagactgatgattttagggatcggcataaccgtatctttggttttgccagcggttcttcgtcgccagtacgcacaccattcgccaacatcagcgagagcagccagcggctgctcagcatcttcaagagacccatgcgccgactgccacgtcgcccgtacaagatactcgatgcgccggagctgcaagacgacttctacctgaaccttattgactggtcgtcgaaaaacaccctggccgttggtctcgggtgctcggtttatctctggagtgccgtcagtggtcaggtgacgcgactatgcgacttcaacaatgaggataacctgattacagcagttagctggcacggtgaaggccggcaggtggccattggcacccagtccgggtacgtgaccatttgggatgccgagaaccaaaagcagataaaccgactggaagagcactcggcgcgtgtaacggcgctagcttggtgcggcaaccgattggccagtggctcccgcgaccgctcaattttgcagcgggatatccgcaatccgccgacgcacataacccgctgcttgcgcggacacaagctagaggtgtgtggcctacagtggtcgcccagcaatcgatacttggccagcggtggcagcgacaaccgcctgttggtttggaccgacgattggccggagcccatttacgccttcgacgagcacaaggcggtggtcaaggcgctgggctggtcgccacataagtccggtcttctggccagtggcggtgggtccgccgatcgctgcttgcgcttttggaacgtcctcaccgggaagctggtgaagtgcatcaacaccggcgcccagatcagcaacctggcctgggccagggattcccgagagctggttaccacccacggacacgcgcagccacaggtcattgcctggcgctatccctcgctgaagcagatggccaggctgtccgggcacacacagcgggtactccacctgtcagtgagtccggataacgagtccatagtgactggcggcgcagatgagacgcttcgcttctggaccgtttttaccaaacagaaaatatccaaagagccaaactccgtgctccgtttgtttaaaggcataagatgaggacaaaattgcgacgtattctttgtgctacgataaattatatttgttaccatctaaagtcttatatggtttcttaatttaagatcgtggttttcgtcttatgcatttcaggatggacagaatgctgcttcgctcacgctggccgagcagtacattggagccttcaagaagctggccaagacgaataacaccatgatcttgccctcgaatcccggggatgttaatggcttcgtggcccaggccctggcggtgtacaaccacgtttccaactctaaccaggccaccaagtcatcggaaaacgtgaagggtgtgggcgcctgcctgaacgcaaagagtgttgagtacaaggagttgcaggaggataaaagcagtgtgaaaatgaatattgaataggaatgaataaacggttgttgctattacatttgccccactcatagttgttattatcaaggcgaggatattaaatttttggttcaacaaataaacgcctatttatttacttcggaaggtacttcaacagtcgaacctcgtgcgacagccacaatgcgaaactcagcagaataagcgagcccgactggtgggccgttgccagaggcacgggcacgtagttaagcaaggtggttacgccaagcgtggcctgcgtccaggccatagccaccacggcgttgatggcccagttggcgcgcttgggcaactgcatccttctggtgaccagccacagagcggtggtcagcgttactgtgctaataccaaggatgcggtgattgaactgcaccgtcgtcggattctcggtgatgttcttctgtatgggcgcaaacgtccacatgtcatcgggaatccacttgtcgcccatcttcgggaacgagttgtacacgagtccggcgtctagtccggctacaaaggctccagaaatggcagtcagcaggaccattgccttcgtcaaatgcgtcagccccttgatattaaatgctttcttggcttggatcacgaatgtgttcgtggggatgagcagggacatggcctttgacagggagagtgagtacaggacgaaggcagctgccaggtgggaggccaatctatactgggatacccgtggcacgtcgttgggatcctggaacctgtcttccagcccggacttgaccatgtaccatcccatcagaccttgcaggccaatcagtgtgcccagcagcaggacgctcttcttggtcttcgcacagaagtatccctttctccagaagtaaacagcgggcaaaaggaagaacccgccgatggcacgaccccacatcctgtgcatgtactccatcatgaaaatgaacttgaactcctccacggtcatattcacattctttctgaaagcagaagtttgcatgtagttcctggcgttggatgaatctggggagtactcacagcttgtactctgg

SEQ ID NO: 5414 - DNA, 1153 bp, DROSOPHILA
taaaatcggcacatatattgcgaaatgtcgagatttcttttaaacaaaagattcgttccgagcctggtccagcaagacttcctgctcgccggctcatggattccgtcgcaatctcggaggggaaaggcctccaccccgataaacatgtgtgttatgtttgtgccccagcaagaggcctgggtggtggagcgcatggggcgctttcacaggattttggaccccggactcaacatactagtcccggtggcggacaaaatcaaatacgtccagagcctgaaggaaattgccatagatgtgcccaaacagagcgctattacctccgacaacgtgaccctgagcatcgacggcgtgctctacttgcgcatcattgatccgtacaaagcctcgtacggcgtggaggatccggagttcgccataacacaactggcccagacgacgatgagatcggagctgggcaagatgtccatggacaaggtcttccgcgaaagggagtccctcaacgtcagcatcgtcgactcgatcaacaaggccagcgaggcgtggggcatcgcctgtctgcgatacgagatccgtgatattcgactgcccaccagggttcacgaggcgatgcagatgcaagtggaggccgagcggcgaaagcgagccgctattctcgaatcggagggtgttcgcgaggccgaaatcaacatagccgagggcaagcggaagtctaggattctagcctccgaggcggagcggcaggagcacatcaataaggccagcggagaggcggctgccattatagccgtggcggatgccagagcccgcagtctactggccatagcgaaatccttatcccacctggatggacagaatgctgcttcgctcacgctggccgagcagtacattggagccttcaagaagctggccaagacgaataacaccatgatcttgccctcgaatcccggggatgttaatggcttcgtggcccaggccctggcggtgtacaaccacgtttccaactctaaccaggccaccaagtcatcggaaaacgtgaagggtgtgggcgcctgcctgaacgcaaagagtgttgagtacaaggagttgcaggaggataaaagcagtgtgaaaatgaatattgaataggaatgaataaacggttgttgctattaca

SEQ ID NO: 5415 - protein, 323 aa, DROSOPHILA
MFVPQQEAWVVERMGRFHRILDPGLNILVPVADKIKYVQSLKEIAIDVPKQSAITSDNVTLSIDGVLYLRIIDPYKASYGVEDPEFAITQLAQTTMRSELGKMSMDKVFRERESLNVSIVDSINKASEAWGIACLRYEIRDIRLPTRVHEAMQMQVEAERRKRAAILESEGVREAEINIAEGKRKSRILASEAERQEHINKASGEAAAIIAVADARARSLLAIAKSLSHLDGQNAASLTLAEQYIGAFKKLAKTNNTMILPSNPGDVNGFVAQALAVYNHVSNSNQATKSSENVKGVGACLNAKSVEYKELQEDKSSVKMNIE

SEQ ID NO: 5416 - DNA, 2826 bp, DROSOPHILA
tttgtatattggacgagaacgtggccacagtggtctattgataattcggaactgaatggatatagttattatagtaaatcttatatcttattcaattctttaaaaaaaatgtgtcatacactttttttacttatatggtataaaactatactataagcaactataagcaagtatttctaggtaccactgtactatcaactatcataggtttttttcgagccactgcaatcctcacctctgggcagctcaggttgcttttccacttaccttttgctgggactttcctgcgggcgacggcccttaactttttttcattgtgcttgatccgcaatttcatcagtcgcgtcccctcctccaatccagccacccattctgcgcctgggaaatctgcgcgggtcacccaaaaacgtatttttaattaatgttgaccgcaatttgtgcctggtcctccggcagcagctgctcttctcggtttcccgcttgttatcatgtcctgcctatcaggcaggccctttgggtcgtcaccagccagttcttgggttattaagatattcataataagagcctccgcggggccaacgaccaagtgctagcatggattagagcgccaacaaccagtttaccagttggccacggaagccgttgcgcgccttagtcggcggtcaatgaaaccaattaactgtactcgaagtggacttggcttagcttggccaagtaggtctgctcgaccatccgcggcgtactagccagccagtccccttgtttcccttgggcagaagagtagaccgcaagggtctggtatcgctggcagatggaatatcaattacctgctgctgtcgcccgcttcctggtggcgagacagaaccagaaacagagcagaaaaactaactgagatctcggagaggccaactaattgcagtataagagcttcctaaaaccgcagaaactcgttcttcggagaccacaaacgaaaacagatgacaggaaaacagaaacatacacggtgtaaataggctgtgccttggcagcaaatgcaatacatttcgattagatgtggtttcacaaaatgtacatatatttacttagatggttaaccatggttttgtcgatagaaagaccagcctggaccgtcgacggatgatcatagtctacttcaacttcttcttggggcgcaggttgttggtgtgtccgcacttcttcttgcggcagttggtggcacgaggatgcagacgggcgtagcacttgcggcagatcatcttgtcgcagttgtacttctgggccagaatcctgagcgagggctcaatgataccaccacgcaggcggagcaccaagtgcagggtggactccttctgaatgttgtagtcggacagagtgcggccatcctccagctgcttgccggcgaagatcagacgctgctgatctgggggaatgccctccttatcctggatcttagccttgacattctcgatggtgtcagaaggctccacctccaaggtgatggtcttgccggtgagggttttcacgaagatctgcataatggcggcgtcactgaaagcaatataaaacataaatcagtaccaaatcgtacgatttcttagcgaacttgtgcgtcccaaagagcgggcaaagattggaggttaggtccgacttgctggcatgtttcgttcgacagaaacagctccaccggtcgacaagcaccagtgtccatctttttcatatcacaaatacgtcactaaacaacaatatgtttacattctgccacgttattgcgatttttcgtttatttttaatatatttaatggaaactcaccagaggaaacgtgcaaccaaatgctattcaaaagaaaaagggaaaagagagtgtggccgccgccgagcactgcaaatataccaaaatactattttttaaataccaaaacattctaaatggaactgtaaaaaatattcagacactcaaattaattaatgcaaaatatctttaccatttgaaccgagaccaactttacaatatcaacatatagtttttcgtgtttttttatagcccaacgctacctcactgatagctaagctaattcaaaattatattattatggcatgaaaatgctatttgcattgtatacaaataaattgaaatcaaaacttgtatatagaattatattttagataaggttcaaatattacatattacgcatatttttttttattgaaaaaccgcctaatcgatttaaattatatttttaatgaatttatgaaatattttttcagatattaaaccttttgaatttatacaaaaatattcaagttgctgtccattttactaagaacaataattgaatactaggttgtataagtataagtaagtaagtaagtataagtaagtaagggatatacatttaagccaacgatattctaaaaatgtgtattgctaaatatgtcacatataataaataaatttgtatttgacttagtgaaaaaagtatgtctttatagtgagaacaccgtgcttttccattctgcgtcaaatcgatagattctgaaaaatacccctttcgatatcgaagttctaatggctcgataggtcctcaacacttacctatcgatgacagtagcacaagttgtgcggaaaacgggaaactaagggaaaagcgtggaaaacccttgagaacagagcatgtcgaaagcaggcgaagatcagcccgcagcagagggtgcggtaagtatctgagaaacttaaacctttctcaaccccaatcacctgacaatagcgacctggttctcatcgttttttctaggtgattgcgggcaatggtaacgctgagctggccc

SEQ ID NO: 5417 - DNA, 564 bp, DROSOPHILA
ttgcacgtttcctctgtgacgccgccattatgcagatcttcgtgaaaaccctcaccggcaagaccatcaccttggaggtggagccttctgacaccatcgagaatgtcaaggctaagatccaggataaggagggcattcccccagatcagcagcgtctgatcttcgccggcaagcagctggaggatggccgcactctgtccgactacaacattcagaaggagtccaccctgcacttggtgctccgcctgcgtggtggtatcattgagccctcgctcaggattctggcccagaagtacaactgcgacaagatgatctgccgcaagtgctacgcccgtctgcatcctcgtgccaccaactgccgcaagaagaagtgcggacacaccaacaacctgcgccccaagaagaagttgaagtagactatgatcatccgtcgacggtccaggctggtctttctatcgacaaaaccatggttaaccatctaagtaaatatatgtacattttgtgaaaccacatctaatcgaaatgtattgcatttgctgccaaggcacagcctatttacaccgt

SEQ ID NO: 5418 - protein, 128 aa, DROSOPHILA
MQIFVKTLTGKTITLEVEPSDTIENVKAKIQDKEGIPPDQQRLIFAGKQLEDGRTLSDYNIQKESTLHLVLRLRGGIIEPSLRILAQKYNCDKMICRKCYARLHPRATNCRKKKCGHTNNLRPKKKLK

SEQ ID NO: 5419 - DNA, 3698 bp, DROSOPHILA
ctgagctgcgagatgaccggtgggctgccctgcgcccactcaatgaccttcacggtgttcgtactcatcctggcctcgttcttcttcgttcactgctgggatcgctttgctgcgttgcgctcttccttctgccgctgcataatgtacctgctgatcattggaatggtggtctgtatgtggctgagtcgcctctacctggccaccgagtttctgcaccagtgcatactgggaagttacctgggaattaggtctctttgcacctttgagggaaatgtgaagtacttgttctcgcgaccacgtcgctatgcggtctcagctgttttcttcttgggaggattggcattgtcagtgtactatgtgaagctggaactgaatatcgatccccattggtcggtgcgagaggtaagtttgtatatgctattcgaaaccttattaaatatacctttcttcaggcatttaaatggtgtccagaacccacatatttgcgtcatgaagttggtccaatctttgcacttgtcagagatctgggaaatctaatgggattggctttggcctcgccactatataagctgtaagtctgattattttggatacacaaactgcatcaacctcattccagggaaatgaaacaatcatcattttggcggcgatgccgattccttggagttctggagtttgtcaactatggattgcgcttttccacgtttaagcagtctggtcgcttcgttttcttgacctatgagttcttaagaaatgtcattcattccctagtactgattaagtacgtatcgaaattttactagaatagaggcttttctaattttgtacagataaaagaaaatataaaaaacaatactgggacgaaagtaaaataacgatcttccaaaataatttatttgatgattacatttgaggcaaccaagttccatttctccgggctcagctacgcattaccacttttcttatctgcaaggataaattcgaagaaatatcaagaacatcaatttaagcccacgtctgaatccttaccagcaggctcccgatttgccatctgcaggttggtgttctttcgagaatgccgcctgtccgaccggaacaggcagtccacgcgatccgcctcgaagaaagcgtagaccacacggacattgttggtgaacccgccgccatccttccaggcactcactatcacaatgggatcgccgtcgtcgatgatgccccacttcttggcagaggtcatggcgaactgcacccgagcgtccacatcggtggcgtagtccgtgctgggctccaaggtgtacagtatcggcaggactccgcgatgcagatagacccagcgggcggtccgttcgcagcgcgtgatagccatgatgggacagcggggtcggaacttgctgaccagagtggccgagcggcccgaggtggtcagcacgatgatcagggtggcattggtgcgcttggccgtctccacggctgcaatggccagcgagtgtgccgcgtccagctcgccacgcacctcgctgaccaggtcggagaagaggtctcgaaaccagagcaccttctcggcctcccggcacaatgtgtcgcaggtggccaccgtctccttgggaaacgacccaatggccacttccgacgacagcatgatgcagtctgctccatcgatgatggcgttggccaaatcgaagcactcggcccgtgtgggatggggcagggtgcgcatggactcgaggatgtgggaggccactatgaccggcttgcccaccttgttgcattggcccagtatgctcttctgggtgatgaagagcttttcaatgggtatctgggtgcccagatccgctcgcgaaagcagcaatccatccgccgcacgcagaatctccgagaacctgctcagagctatcttgctgtccatcttggcgatgatcttgatgtgcttgcccttctcgccgagcaccgttcgcagctccttgacgttcttggcactgcgcacggcggaggcgaagaggaagtccacgttggcctttatgctgaactggatgtcaaacatatccttctcggagacggcgggcaaatcgatctcgatctccggcaggatcacgttgcagttgttgttcagctggccgccatggatgacctcgcacagcagaccatccactcccacttccaagatgtggagcagcagcctgccgtcgtcgatgaacaggcgatcgccggtcttggtcaggttgatgatgttcgggtagtccacgtagaccgcctccttgttgcccttgtcgtaaagatcccgattgatcgagagacgcagattgtcgccgctgcgcaggaacacatctccatccagtaggccagtacgaatctggggtccacgcgtgtccgccgcaatggcgaccgttcggatttggcccgtctccttatgaatcctctccagcgcctcgttgatcagctcgatcgttttcgagtgcatctcgtgcgattcgtgggagaagttcagacggaatatgttcactccgcgcattatcatggtgtatatggtgtccgcgttccgggaactgaccgatatggttgcgatcagggaaacgaggcgctggtgggacgcctgctgggcaagatccagctcgcagatgtggctcagctgtgtggagccctcctttagcacggatttcgcggacaacgacatggttgtaaattttggataagaggaataacttaaaattttgggcaactaccattaaaatcaatcactctgcagttataaaaaaaactctgtgacgttttacgaacaggtaagtaagctgtttattaaaaagcaatacatttttacaaatcaattgttgaattgcagagcttaccaaactgtaaagtgcctaaaggtatgctatattccatggacttcctacaaaccaattacattttcgacacaacgttttaccattttttaattagttaggatattttctaagaccctacattccatattgtaactcagatacttggttttctatacagtaatgtgcattatgcactccgatgagtttgtggtacgctgcccctatgaaaaatgcatatcttacattatattaattatgttttattttgcgattttcatgttttctgctaataactcaaaacacgctacttaaacaatgcaaatcactactttacgtttaaagatagctattaaattaattgaagccattggctaactacctacatacttcgagagcttaagtacattgactttagcttttaactatcaactagtggcagctcaggcactacaggtaactacgattaaatgacaacgctaatgtaaatgctttgcaaaatgagtttaaattagttggagagaaatgtagttggatggttggatgctagctgaaatggagcgaaatggagtctacgtctaatttgtccgatgtaacgtaaatgtaacttggctaattctattcgcctctctatctgcagccacatgactccaccaccatgttgggcagcgtcttcaccgtcgccgtgttgctcgagtccatcacgaccagctgcagcgaggaatactgtttggcggtgcagcagggcaccaactccagcgacttgttagcaccgctcgtggagagaattttctgcaagggaagaggatatacattagtttcatcatcaacacatcagttcctgtcgaatggggtacctaccattatggaactgtggtg

SEQ ID NO: 5420 - DNA, 1698 bp, DROSOPHILA
tattcctcttatccaaaatttacaaccatgtcgttgtccgcgaaatccgtgctaaaggagggctccacacagctgagccacatctgcgagctggatcttgcccagcaggcgtcccaccagcgcctcgtttccctgatcgcaaccatatcggtcagttcccggaacgcggacaccatatacaccatgataatgcgcggagtgaacatattccgtctgaacttctcccacgaatcgcacgagatgcactcgaaaacgatcgagctgatcaacgaggcgctggagaggattcataaggagacgggccaaatccgaacggtcgccattgcggcggacacgcgtggaccccagattcgtactggcctactggatggagatgtgttcctgcgcagcggcgacaatctgcgtctctcgatcaatcgggatctttacgacaagggcaacaaggaggcggtctacgtggactacccgaacatcatcaacctgaccaagaccggcgatcgcctgttcatcgacgacggcaggctgctgctccacatcttggaagtgggagtggatggtctgctgtgcgaggtcatccatggcggccagctgaacaacaactgcaacgtgatcctgccggagatcgagatcgatttgcccgccgtctccgagaaggatatgtttgacatccagttcagcataaaggccaacgtggacttcctcttcgcctccgccgtgcgcagtgccaagaacgtcaaggagctgcgaacggtgctcggcgagaagggcaagcacatcaagatcatcgccaagatggacagcaagatagctctgagcaggttctcggagattctgcgtgcggcggatggattgctgctttcgcgagcggatctgggcacccagatacccattgaaaagctcttcatcacccagaagagcatactgggccaatgcaacaaggtgggcaagccggtcatagtggcctcccacatcctcgagtccatgcgcaccctgccccatcccacacgggccgagtgcttcgatttggccaacgccatcatcgatggagcagactgcatcatgctgtcgtcggaagtggccattgggtcgtttcccaaggagacggtggccacctgcgacacattgtgccgggaggccgagaaggtgctctggtttcgagacctcttctccgacctggtcagcgaggtgcgtggcgagctggacgcggcacactcgctggccattgcagccgtggagacggccaagcgcaccaatgccaccctgatcatcgtgctgaccacctcgggccgctcggccactctggtcagcaagttccgaccccgctgtcccatcatggctatcacgcgctgcgaacggaccgcccgctgggtctatctgcatcgcggagtcctgccgatactgtacaccttggagcccagcacggactacgccaccgatgtggacgctcgggtgcagttcgccatgacctctgccaagaagtggggcatcatcgacgacggcgatcccattgtgatagtgagtgcctggaaggatggcggcgggttcaccaacaatgtccgtgtggtctacgctttcttcgaggcggatcgcgtggactgcctgttccggtcggacaggcggcattctcgaaagaacaccaacctgcagatggcaaatcgggagcctgctggtaaggattcagacgtgggcttaaattga

SEQ ID NO: 5421 - protein, 556 aa, DROSOPHILA
MSLSAKSVLKEGSTQLSHICELDLAQQASHQRLVSLIATISVSSRNADTIYTMIMRGVNIFRLNFSHESHEMHSKTIELINEALERIHKETGQIRTVAIAADTRGPQIRTGLLDGDVFLRSGDNLRLSINRDLYDKGNKEAVYVDYPNIINLTKTGDRLFIDDGRLLLHILEVGVDGLLCEVIHGGQLNNNCNVILPEIEIDLPAVSEKDMFDIQFSIKANVDFLFASAVRSAKNVKELRTVLGEKGKHIKIIAKMDSKIALSRFSEILRAADGLLLSRADLGTQIPIEKLFITQKSILGQCNKVGKPVIVASHILESMRTLPHPTRAECFDLANAIIDGADCIMLSSEVAIGSFPKETVATCDTLCREAEKVLWFRDLFSDLVSEVRGELDAAHSLAIAAVETAKRTNATLIIVLTTSGRSATLVSKFRPRCPIMAITRCERTARWVYLHRGVLPILYTLEPSTDYATDVDARVQFAMTSAKKWGIIDDGDPIVIVSAWKDGGGFTNNVRVVYAFFEADRVDCLFRSDRRHSRKNTNLQMANREPAGKDSDVGLN

SEQ ID NO: 5422 - DNA, 13815 bp, DROSOPHILA
gtgagagtggcagagaatgtggatgtgagtgctcctaagcggttttcccagctgccttcgtttttgctcctgcttctgctgctgctcaatgaacattcctgttcgcctgttacataattcgcgtaatttattcaattttgagaattaatttaatttttcttttcacacgtgtattttccgctatctggatgtatactttggcatttattttaaaagcacacggttttaaacaccgcacaaagtgggatattttattttagtcgtttctagactattattcagtggccatgatcagttaataaaattgagtttggaaataggatcatttaattaacaaacaaataccttctaacaaagttatattttttagttttcacagtatatttatatgttaaaatttacttatctggtcaaatgtttcactgtacaagtcataaccatccttacacgattaatataaataaaaaaatatttatattttaataatatatcatacatatcaaatggtcctaatttattttaaaatttattgatctagagaagtttaaattttctgtttttgcggtggcaaaaaaagatataaagccctatttcgatttgtattgtttataatatgttcatatattctaatacctgtttaatcaacatttctttaaaatgggtttgttttaaacaataatttatttaaattaaataaatttaaacatattgcgcctaaatatatgcttaatggttcatgagccgaattcgctcttgtcgaattcgctctacacttgggtagaataaatgtaagataatatacattcgaaattgttagcattgccacgaccccttcgatatattcgaaagaaattcgaacttatcacggcgaatgcaaacccttgcatacttttcggcgttggcgtatagcgccatctaccgagtgcgccacatttgaattttctttaaaaagacgacattatttatacaatattattaattttcttcttaaggtatcgatgatgttttgggttctttattaaaaatactctaccagattttgacagtaattaatatgggttttgtgtacagtaatggccattctttaacgttaatgtacagtgtaacatgggctacaaactaccgaaatatacaacacaccatacttaaacgaatatttcccggggggttttcacaacagattgcttaataaataattacaatgctgtactgtccttttgaaagcagcctgaatatgttgccaccgatttctgtagttaaacttggtttgtgtatcaatccaatgtgttttacatccaaggctatcattaaataatttactttgggtgtggctgccgaaggaaggagagcgtgctgtttaaatgaaaattgcatttattttggcatgacaaatgtagacgtataaaattaaactaaacatgtactaaattaaaatgtaataatcacaaatacgcgcagctaacacaaatccgattgcatcccatcgtaaaaatagtaattgctttatatcaccagttggccaggttcccttctccgatttgttggttctacctttcccgtccggtatgtggattctccagcccggactgcaccgcttgctatcacaagggaatgatttctgtttccgtttccgctttacacgctcgccctaacttccgtttgattgcacgctgctgcctttctgggctcgaaatcgattgccaaaagaagattatagtgtgtttttgagagtacaacttagggacggagtgaagaacgttgggagaaagtcgtgtcctaaactctgcaccgattcggtttccgttctaaaggatcttgtctacaatttgttatgttttcaacctacttaagttcagactcttttctgcatggtcacaagaattatatgtacctcaattgaagtgtgtgttgaagtggggctctacgtgggtactcctagtattaactctatatatagttctatgtaaattccatttttttttgtggtatgcagaacagctactgtacgggtgtatatatatccatgggtatatatttagaatcgtcttccagatacctatgcgatgcgatgcgatgcgtgtgtgtatgtctgtctgtctgtataaacgtacaaagcgcgacgggagaagttttagaatgcgataaagctacaactagctacaatccagctttcctgggatcccaacctcccccgcactaggccccaaacccctttctatgtacaggtgatctctaacgtatggtaataatgatattcctagactatgaacaaatcccacaagctgtccgcttagcgaatcatgtgcagtttccatcgcagcacaaagtaggcgatgatgcgcagggcaaagaagattccgatcagggcgacggcgtccacccaaaacagagcgttatccatggacatctcttccagaaacttcttgggcactcgatagtggcagtacatttgattgcactgcatcttggccctatccattccatagatggctaccatggcacctaaataataaggagtaacatgagttaaacatatctaaaggtaaatatatcccaacttaccttcgaagccatagcgcacatagctgacgtaggtcacccactgcaggtagcccggaatggtgtcaaagttcacaaagaatccggagaacaatatcgtgggtatggtcgtcacggggccgaggaatacgcccgtctcgatgttcatccccgccccgatcagcagtcccagcgattgtgccaccagtgagtttagcacacagatcagcacgaacatcgagacccgctccaattccattggctgtgaggttaggtagtacaccaccaggacatagacgctggagaagacaatctgcaagataatatataaaattagttaattttcaagccactcaattgtttaataatagtcacctgaaatggcatgtccgctatggtcttggcaaagtagaaggccttcaaggagtaccagtagttgagatgctccctcacgaacactgacatttcggtgggaactgcgaattaaagattccagattatattcgtgtgccaaaacctcgaaatcgatcaactcacaggtcagaatggtgggcatcatggccgtgaaggtggtgaacagggaaacgaagaagatgcatcccgcattgctcatgatcttgctggcctcgttgcccacatcgtagtagatcatcccaatgatggctccaacgatcacgtgcgagaagagtcgcatgtgggtcagcattttatcgcgcaggatggtgcggaatgagcgtttgagcaggatccagaattgtgtccagccgctggtggggaatcccgtcttgttgggcaatgtgaccacgctctcgtgcgaatccagcagcgaggtcatgcagccaacaacggcactgggtcctcccgatcccgaaccacctacagcattttgtgtgcccttcgaggagctaaagctgcaactgtcgtccacggcattagtcggcatattgaccacgctgcaatcggagttctgggactgctgcgtctccagcttcggtggttttagctccgcaggatcatcgacgggaatagagggctccagctgtctgtcctccagcgggggtttctcatcctccagggtcaaaatggccattgcattctccgctccgctgccactgcccttgataatgtcattgttgcagcccttttgggccaacgtcagtacataatccttgtgcgcgtacttcttgcaagccccactcttcaccgcatccaccagcttgggtacagcatcgccgtactccccggacgccacctccaggacatagtcagcaggattgtgatatgaggggcattcgtagcccagtgatgataggtacggcaccaatcccttcactctgccctcgtaaacgcactggccctgggccagcagatacagatgatcgaacttctcgaagagacgcgccgacggctgatggattgtacacactatggtgcggcctcctctggccaacgatcttagcagcgatatcagctggaagcaggtggagctgtccagtccggaggtgggttcgtcgaagaacatcactggtggattgttgaccaattcgagggcaatggacagtcgcttcctttggccacccgacagattgcaggtcagcgtgttcaccgactccttgaggccaattgtctcgaggatctcctcgaccaccaccaccttggcgtagctgatcatattcttgcccagcttgaggttggcggccaccatcatggcctcgcgaacagtcagattggcgatcagaacatcgtcctgcatgatgtagcaggagagcttgcggaagcgccgcagatttcgctccttgctgttgattagtacggagccgctgagttgggcagttctgtaaaagggtggggagcatcattagttgatcattaaaaggtaggattttattatctgcttaaagtcatttgatttaggcaccactaaatgaaataccatctttctttaagacaatcatctggcttaaaggaacttgatctccttatcttcatttatctgtgcctatatatcaaacttaaaccgataaaagtactcacttgtagcccgccaggatgttcatcagcgtactctttccggctcctgagggtcccatgatagctgtgatctctccattccggaacttgcccgagacgctcttcaggatggtcttgaatccgcgccgatgactatcggtaactgagtaggatatatcacagaactcgatgtccaccggcggccgttggggcagatgggacaaggcgatggtacccttcttctggccattcggactaccaccgctgttgttggccaccttgggggccaaggcatggttgttactgcccaagccgccattgcacaggttgttctgggacctgaaagaaagcacagatgagtcatctttagttgcgagtcatttgaattgcatctccggtgcattgtgttgattcctacttgggtctttttttcagggcactgacacagctgccgttcttggtcagcttggtctgcaccaaggacatggagcgctggtgtccagcatcgcgcagcatttccgcataggccgcggcataggcggcagacctccggcgactgacatcctcctgggattgcgattgagaggcggcggtctcgaaactagagttctgaatgccaccactttccgcgctgacgcatcgggtcagcgtcagttccataattattcgctaacacccagcaccacactccttagcgcctcatgatggcgcccctaaacgacctaaatcgtcaatcaatggatcaatcagcagcagcgtcagtcatttagtgccccattcgtgtcccctcaacgatttgcacattatggcacagccgtcatccgccctcatccattcatctccatctcccacgaaaggaaagaccaaagttcacaccggttttgtttcattcatgaaacgtctgtcataccttgggccaaagagccgagtgcgttttcattagtgatttctcgcatgccgtcgaccgacttcgattgataagtccgccgacgccgccgatgcagcgggccaatgccaattaacattacatctttttgggtgcaaattagttgagctagttggtcaaaattgattgattgggaagccccgcgacaggcagtaatcagtagtgttgttggtggggtgtgcagcacgaggggattaaaggtcagtgtatctggccgaactacttatcactggcgtgctgagaactcgggaaaacctaacaatgtaaggtggaacagtgaagcctacaagatgatgaccaacagcagttcctatgtgaagttcgatagcagtaggtgagcaggtgagcagtactcactgcatataaagataaactgcatataaattcataaagaagtactaataatacagagtttcctttgtttcctccctatacgtgtgggtagtacaatccacgggattcttttagccacttagcacgcactatagagcccatttgtgtggagtaaccatgtacggagcaaccaattagcttctggaatccgcttcaatataatttctataatttcgaactgcaactcaaggcggtcgtaatggcaagacattaaattgaaattggtggaataggcggcgcggggaaagtcagctgttggcggtgggccatgctaagtgaattcagatacagatacaatgagagactagtaccaacacactccgataaacaactgcttgtgcgcttgcttttcttgtgcttgtgcttttgcttttacattgcttttgctttgctttgctgtggcctctttcagctacgataaatatgactctcagtatcggacaagctaagttgtatgggtgtgcgtggtggtattgcgaatcatttgccgcgaatatctcggtgcacgagcacccggagcgagtacatttcgagtgcgcatgcacccagagtgcaatgctagcgaaccaacctgaacccaactcaacttaacgaagactcgacgaagtctgaagcactttgtcttgcgaaatgcacttccaagagcagggatattatatatatatatatttgccatccatttagagagggggtagaataacaattgtgcgcaactcccgccagttgtcttctcgattcagccgctcaattggattcaaatggagtcggtcacgcaatcccttccgggttctttgattgcttatcaatcttaatgcgtggtaattgttgccaggttcgaaggcatcgattgcggggccctatttaattgattgatagccagtcataaagcagcagctgccgctggtaactcaatcagttgatatctgccggctactgcacacattctagttctagttgtagttctagtttctaaatttgtgaaccttggggccgcggggccagttacattgtgttcgcactgattaggcacaaccggaaatatcagctggcgttagatcatccccgcttaacggcaattaagcgatttataaatgccagcaacgaaggggcggcgagtccactgcgattaataaaagtattaataatagcaagtgtgccaacgttggcatgttgaacagcaggagtgtggcgcctatcaaaaagtgccaattaaagttgataaattcatgtggaatttctatgaatatgtagcgaaaaaccaggtccaagatcctttacaagctctcaaggataactcaatcaaatgtgctaagtaacagtcataagttttgagttatagcagcgaaatgatgattaagcaagcattttttgtgtaataaactttttatggtcattgggaactgaactttgggagcaattatatggcgttaacatttctgaacgagctcaacataatttttaaaagaatgaaattactcagcatttgctatgcacctccaatctatatctaaaaaaacacacgtggactcaaaatcggagacaattattcaagcattatgcatgggaacaatcatgtggctttaattcccgcaccatttacgttattaaggaaaacgcggcaaggccaatcaaatatgcaaacggatatgtgggcgggaaatggatgtggggggcggacgttttccgagccgtgggagcaggtcctgtccaggaccgctgctgctcttttccccgtgccctcggagcgggcgagaaggtcaacatgcctcgagtgttctgttggctgactggctgacttttgcggtcgttcgagcgactcaagggtgcacaggttgtcaaacgattggggaaaactttgcgacggcgtggcgcctcaaagtctaatactgcaaagcggacttttggctttgctaagtttgcggcaacttcacattacataaccggccggcgtacacgtcgcgtagtctcttgttcacttgccaaaaaataaaacaaaatagaggaaatcacacgtaaaaagccagcacgtggtggagcacgggcagttttgcagctcaatagagtgtggcgaatggccgttgaagcatttttctaataagcacataaatatttgagaccgaaaaccaaactgacggagtgccgcacacagacgcgatgttgccgcaggactaaaaagctgaaaagccgagcggagtccaactgctgactgcggcacgacgttggacagcttggcggcttgttcgatttttccaggcatgcggcgccgcgaggtccttttgctgtcctgctgccacacgaaaggggtatatcgactgaactaacaagttgagcgggggtattgcgtgaataaatagtaactatatttgttttctaataaaattataataaacttggcacgcatacttgaaagctttttacaaataagaaactgacatcctttatactatatatagattttgagaaagcttaagaacacattttaaaagctgtcgagtattttgcattcttttaaataattatcagttgaaacaaaaatattattcatctcgtggatatgtgattttgataagatggaaatagccccaaagtagagggcagcccacattcggtgctgatgtaaggaccccccaggacctcttttgtctgcccgccttgtattgttttgcttggtcttatggattttacggctttttgccttttggcggcgtttcattcactgttacttgtttttttttttttctgttgccttcggtttcccgctccgcacatatgtgcgtctgtttgtggcttattatttatggcagcgtcgacagggtggaccgggtcgaaaggacacgtaggataggttggcatttaaggcgctctttatggctgccttcctgttggcttcccatcgaatccttggacctggggcccagccagccaaccaaactgattgctggaattgtgcagcattcagagaggctgtccttaaaaaggccccgttcgcccactagtttaattacattgttgtacctgcactgattggttcgtgggcatgttccaataccaatagatttttcatttgcattttaattaaattggttagaaaaaaaaaaaacattccaaggctgctgtgagcgcagtgtgtcagtgtttcaattcgaaggcaacttaagacgcagggtttttagttcttgagcagtagctttaaaatgttcttagaagtctgcataatttatgaggaggcgtggctggcaccgtttccctgctgacacgcgatttgtgagacggagtagagtcatcgatttttcaggcatttgctgctgcttcttccttcctctttccacttccggcacacctcaaatgtcctggcaggtggcatgttccaagcggaaggaagatatgagcattacagatgcgtgctaatttagactcgtcggtcttatttatagctccctctcaaaatcccactctcagcgaatcgctttgatttttgaaatggttttatgcggttaggtgttaaaaatagaagtgtcacctcggtggaaaagtgacttgtgacagcgtgattagttgcccgatcctgggccgcctatccacccacaaccacttagccacttgcccacaggaaagtcagtgtccttggcttccacgagcggaaattgcagagtggccgcaggaacgattgcaatactagccagcagttcagggtcaggggacacatttcagctcactgccgcctataatcctcacaactggagtgacaggttcctgggtaacccaaaacgcccgcccattccagcctaatcccggttaatgcaattatctattgggtgcacagagggggcaaactcacttgatgatttgtaattggaaatgtgttacatcatcgtaagtagggtacttagtaaaaataatagattttcataatttaaacaactcacccgtgactgttctgcttcagatcgttggtcagcttcagttggctgagcagtggcactggctcctgtctggaattggtactcgcattcggatttggatttggattgccgctgcccgtggagagcgttgatagggacatgttcccgcttgtgtagagaacggcattaggtgccgtagtggctgccgaatcggagactctgttgggactcttggccgccggcaggatgaccgcgtgggaggagcacttgtccaccagcgggacactggaggcctgcagctcattcatgacgctagtttctgtgtagttctagttgagaatgcgtttagtttttgttgcaatcgcttttggcatatggcatcagcatttggctcaattgattaatgctttatatttttttgtgatacgtatttgcggatcttgaatgctgttatttaattgaatacgctggcgattggcatctgcattggaagtaaacgttatatgttgattgtaccactcagctttcagctctgcaatgaaagggaaatgggaaaagcgatgcatatcgagcataatttaaatgaaggtgttttgcctctatcgatttgacaagctcacacagccagatgcgtatatcaagcactcttgaacactctatccggatccacacacaactcggcatattacatcatagcccaggaagtaccgcccaccaaccccctcagttctaaaggtctacggctcaatagttgctcaatggcagctagcagcatgaatttctaattactgaacaatgcccagagacccagacacagatacagatacaagcacatatacagatacagatacagacacagatacaaaaaatacagacaaagacccagttgagaaacgacgacaccgtcaagaacaaccgataaacgctgaattcaatgccagacactcgagggctcagggaatgggcttcataaacagctgtgctcgctgtccggccaagaaaaagtgaccagtgcaccagcactgagatatagtgattcctagagctaatagctcgcaaagtccactgcatcgggagttgcgagctgggtttgcttgcactgggaaccaattttgcaggtggccgtctgataagatttcttgctcatgccgtttggcgatgagaattccgacttactcctacactggggtgaaatgttatcaaacggatcagttagagaatttcttatggggaaaggcgggaattctatacaagtggctcagaaccaatacaactcagttctattcaggataaatttatatgccttagtatctatatagtttgttctgtgaaatttctgcttaaccaatactcaggaaactttgtttatgttatcaacaaacatttctgcagaatattttactacctattcgcatatcacgtggttttgcgaagcgcaaaccccaaaaatttcatctcatcacataacaatttccctctttttgtttgcaagtaaattttccaatctttttttttgtaataggaaacagtttccacacttttataaattgagcgtgtaaacaaattaagaggatgtttgttatttaaaaattgaattactcgcccggatgcgtaagttcattttcaaagcatgataaatatgttcattctgtgacaatgtttagttcgtttgtggaatgagagtttcgctcagtgtacacgggtttttattacagatttgtttgcagttcgactagcgattagatgggcagaccgataggcttcctgctactgggcgcgggcttccttttcgctaatcgccgaagatgtaaggcgcgtaatcgcacacactgcgaactatagttatatggcccatccgtgcgattcaagttgacgcgactggccagctgtttgtcgcccaccgactcgttatctgggaacttggaacaccggcactcgaaactagccacgcacagctgcggatttggtaatctggtaatcaggtcgccggacgatggggagttttaaatttgggcttctcggaactgagcacttctctcacagatttcgtgggtggatgacccgagatgaggtcctaccctaaccgtaatcgaagtaggtcagtctgtacaccccctcgcgagccactgacccacgaaaatctggctggcccgatctggttttcattggtctttcgtattgttattttttttttcgggtggcgtgagcggctgaagactacaacctgctcagatgtgtcatctgctattaacaaatcgcgcggcggggcataaacatttgaaaacaacagccaccgccggagcattttgcaaataattgctcctgaaaagagagcgcaggcgctctatcgagatacaaacggcaggaaaacattaaagatacatatgggtctacccaaagggggaggcatattacatataactccggctgcgaagtttattatggtggtggtggtgggtagctggtagctaaataaatctgcgactgcgactgcagactgcaggaagcccgaaaaagacgcaattacttcactcgtgctcacctttggatttctattaagatggggcctatttccgagaagagcaaaacacaaatggcataaaacgtgtttttggtttattagcattatatatttttttttttcggccgctgccagaagagaccgtattcactgtaccgctcccgcgcacattagatactttcagaagatactgagacagcgagatactcgtgctcgtgcctttggcttctttgttgtattctgtgttatggtcgcggcagccagcaaacaaacaaacaaacaacgccagctatttaaatgcgccacaattcgacgattcgacgggagtgagaggaacagaatcgaaataccattaccagatggtaagcgaggcactccaggaatacgcaaaagtgtatcttttgcctaggcgaaacgtgtttttattcaccgcgatgcgatccgttgcgattggactcgattcctggccgaaaacgaaaatcccgctcgaccgcagaaggcaacaacattcaggcagcgcgaacgacgaagaactgaatgcgaactgaaattgaaactgcggcggctgctaagctaccagccaccagctgccagctgagagcgctttcgctcacgagtatccgttctggcattctggcactttggtacccgtatctgtatctgtaaatgtatctgtatctgtgtgagccagcgcagccatccggatagcaatagtgctgcctggctgcttgtacctgactctcggatacaaattataaataatagttaacgcatctttcagatacttggcatgtggagatataaagttcggtacatatgtaaatatatatactgagatacaaaattggcacaacaattattgtgtagttattgtacttcttttcaaatctatctcttcttgaagttacaaatgttagatactgatgtagctgatgctcccagttatctgatgtatatagtatctacttagtattactaggtacaacgcacgtgtacccttcccatcactcgactgcggatactacggctgtttcgtcaatggggaagtcacagctctctcgctttgtccaacgttcaattcaaatgctggcatacacttaaattaatccgcgtgtgtgtgtgagcggtagtgcgcatggcgcacaagtgtgcgttggcgttccgctgctccgaaaacagctgactgtaaacacacacaaagggggacggcccagtgggaaatccagtgcgattcgagttcagctgcacttggatttgatggagcgaaactccccgaggagaaagagagcggagtacacggcgaaaaaagccgttgtttcgtaattaaattaggcaattccatctttttttttaatgggattttaatctagaattaacacatggcacgtttcaagaccattttcagtcgaaagtgtagatcggaaaagccttgataagcagatgaacttttcatcgtgagccgcttgatttctcactctttagtagctggatatccctgaagagtt

SEQ ID NO: 5423 - DNA, 4497 bp, DROSOPHILA
tgttgccttctgcggtcgagcgggattttcgttttcggccaggaatcgagtccaatcgcaacggatcgcatcgcggtgaataaaaacacgtttcgcctaggcaaaagatacacttttgcgtattcctggagtgcctcgcttaccatctggtaatggtatttcgattctgttcctctcactcccgtcgaatcgtcgaattgtggcgcatttaaatagctggcgttgtttgtttgtttgtttgctggctgccgcgaccataacacagaatacaacaaagaagccaaaggcacgagcacgagtatctcgctgtctcagtatcttctgaaagtatctaatgtgcgcgggagcggtacagtgaatacggtctcttctggcagcggccgaaaaaaaaaaatatataatgctaataaaccaaaaacacgttttatgccatttgtgttttgctcttctcggaaataggccccatcttaatagaaatccaaagagctgaaagctgagtggtacaatcaacatataacgtttacttccaatgcagatgccaatcgccagcgtattcaattaaataacagcattcaagatccgcaaatacgtatcacaaaaaaatataaagcattaatcaattgagccaaatgctgatgccatatgccaaaagcgattgcaacaaaaactaaacgcattctcaactagaactacacagaaactagcgtcatgaatgagctgcaggcctccagtgtcccgctggtggacaagtgctcctcccacgcggtcatcctgccggcggccaagagtcccaacagagtctccgattcggcagccactacggcacctaatgccgttctctacacaagcgggaacatgtccctatcaacgctctccacgggcagcggcaatccaaatccaaatccgaatgcgagtaccaattccagacaggagccagtgccactgctcagccaactgaagctgaccaacgatctgaagcagaacagtcacgggtcccagaacaacctgtgcaatggcggcttgggcagtaacaaccatgccttggcccccaaggtggccaacaacagcggtggtagtccgaatggccagaagaagggtaccatcgccttgtcccatctgccccaacggccgccggtggacatcgagttctgtgatatatcctactcagttaccgatagtcatcggcgcggattcaagaccatcctgaagagcgtctcgggcaagttccggaatggagagatcacagctatcatgggaccctcaggagccggaaagagtacgctgatgaacatcctggcgggctacaaaactgcccaactcagcggctccgtactaatcaacagcaaggagcgaaatctgcggcgcttccgcaagctctcctgctacatcatgcaggacgatgttctgatcgccaatctgactgttcgcgaggccatgatggtggccgccaacctcaagctgggcaagaatatgatcagctacgccaaggtggtggtggtcgaggagatcctcgagacaattggcctcaaggagtcggtgaacacgctgacctgcaatctgtcgggtggccaaaggaagcgactgtccattgccctcgaattggtcaacaatccaccagtgatgttcttcgacgaacccacctccggactggacagctccacctgcttccagctgatatcgctgctaagatcgttggccagaggaggccgcaccatagtgtgtacaatccatcagccgtcggcgcgtctcttcgagaagttcgatcatctgtatctgctggcccagggccagtgcgtttacgagggcagagtgaagggattggtgccgtacctatcatcactgggctacgaatgcccctcatatcacaatcctgctgactatgtcctggaggtggcgtccggggagtacggcgatgctgtacccaagctggtggatgcggtgaagagtggggcttgcaagaagtacgcgcacaaggattatgtactgacgttggcccaaaagggctgcaacaatgacattatcaagggcagtggcagcggagcggagaatgcaatggccattttgaccctggaggatgagaaacccccgctggaggacagacagctggagccctctattcccgtcgatgatcctgcggagctaaaaccaccgaagctggagacgcagcagtcccagaactccgattgcagcgtggtcaatatgccgactaatgccgtggacgacagttgcagctttagctcctcgaagggcacacaaaatgctgtaggtggttcgggatcgggaggacccagtgccgttgttggctgcatgacctcgctgctggattcgcacgagagcgtggtcacattgcccaacaagacgggattccccaccagcggctggacacaattctggatcctgctcaaacgctcattccgcaccatcctgcgcgataaaatgctgacccacatgcgactcttctcgcacgtgatcgttggagccatcattgggatgatctactacgatgtgggcaacgaggccagcaagatcatgagcaatgcgggatgcatcttcttcgtttccctgttcaccaccttcacggccatgatgcccaccattctgacctttcccaccgaaatgtcagtgttcgtgagggagcatctcaactactggtactccttgaaggccttctactttgccaagaccatagcggacatgccatttcagattgtcttctccagcgtctatgtcctggtggtgtactacctaacctcacagccaatggaattggagcgggtctcgatgttcgtgctgatctgtgtgctaaactcactggtggcacaatcgctgggactgctgatcggggcggggatgaacatcgagacgggcgtattcctcggccccgtgacgaccatacccacgatattgttctccggattctttgtgaactttgacaccattccgggctacctgcagtgggtgacctacgtcagctatgtgcgctatggcttcgaaggtgccatggtagccatctatggaatggatagggccaagatgcagtgcaatcaaatgtactgccactatcgagtgcccaagaagtttctggaagagatgtccatggataacgctctgttttgggtggacgccgtcgccctgatcggaatcttctttgccctgcgcatcatcgcctactttgtgctgcgatggaaactgcacatgattcgctaagcggacagcttgtgggatttgttcatagtctaggaatatcattattaccatacgttagagatcacctgtacatagaaaggggtttggggcctagtgcgggggaggttgggatcccaggaaagctggattgtagctagttgtagctttatcgcattctaaaacttctcccgtcgcgctttgtacgtttatacagacagacagacatacacacacgcatcgcatcgcatcgcataggtatctggaagacgattctaaatatatacccatggatatatatacacccgtacagtagctgttctgcataccacaaaaaaaaatggaatttacatagaactatatatagagttaatactaggagtacccacgtagagccccacttcaacacacacttcaattgaggtacatataattcttgtgaccatgcagaaaagagtctgaacttaagtaggttgaaaacataacaaattgtagacaagatcctttagaacggaaaccgaatcggtgcagagtttaggacacgactttctcccaacgttcttcactccgtccctaagttgtactctcaaaaacacactataatcttcttttggcaatcgatttcgagcccagaaaggcagcagcgtgcaatcaaacggaagttagggcgagcgtgtaaagcggaaacggaaacagaaatcattcccttgtgatagcaagcggtgcagtccgggctggagaatccacataccggacgggaaaggtagaaccaacaaatcggagaagggaacctggccaactggtgatataaagcaattactatttttacgatgggatgcaatcggatttgtgttagctgcgcgtatttgtgattattacattttaatttagtacatgtttagtttaattttatacgtctacatttgtcatgccaaaataaatgcaattttcatttaaacagcacgctctccttccttcggcagccacacccaaagtaaattatttaatgatagccttggatgtaaaacacattggattgatacacaaaccaagtttaactacagaaatcggtggcaacatattcaggctgctttcaaaaggacagtacagcattgtaattatttattaagcaatctgttgtgaaaaccccccgggaaatattcgtttaagtatggtgtgttgtatatttcggtagtttgtagcccatgttacactgtacattaacgttaaagaatggccattactgtacacaaaacccatattaattactgtcaaaatctggtagagtatttttaataaagaacccaaaacatc

SEQ ID NO: 5424 - protein, 832 aa, DROSOPHILA
MNELQASSVPLVDKCSSHAVILPAAKSPNRVSDSAATTAPNAVLYTSGNMSLSTLSTGSGNPNPNPNASTNSRQEPVPLLSQLKLTNDLKQNSHGSQNNLCNGGLGSNNHALAPKVANNSGGSPNGQKKGTIALSHLPQRPPVDIEFCDISYSVTDSHRRGFKTILKSVSGKFRNGEITAIMGPSGAGKSTLMNILAGYKTAQLSGSVLINSKERNLRRFRKLSCYIMQDDVLIANLTVREAMMVAANLKLGKNMISYAKVVVVEEILETIGLKESVNTLTCNLSGGQRKRLSIALELVNNPPVMFFDEPTSGLDSSTCFQLISLLRSLARGGRTIVCTIHQPSARLFEKFDHLYLLAQGQCVYEGRVKGLVPYLSSLGYECPSYHNPADYVLEVASGEYGDAVPKLVDAVKSGACKKYAHKDYVLTLAQKGCNNDIIKGSGSGAENAMAILTLEDEKPPLEDRQLEPSIPVDDPAELKPPKLETQQSQNSDCSVVNMPTNAVDDSCSFSSSKGTQNAVGGSGSGGPSAVVGCMTSLLDSHESVVTLPNKTGFPTSGWTQFWILLKRSFRTILRDKMLTHMRLFSHVIVGAIIGMIYYDVGNEASKIMSNAGCIFFVSLFTTFTAMMPTILTFPTEMSVFVREHLNYWYSLKAFYFAKTIADMPFQIVFSSVYVLVVYYLTSQPMELERVSMFVLICVLNSLVAQSLGLLIGAGMNIETGVFLGPVTTIPTILFSGFFVNFDTIPGYLQWVTYVSYVRYGFEGAMVAIYGMDRAKMQCNQMYCHYRVPKKFLEEMSMDNALFWVDAVALIGIFFALRIIAYFVLRWKLHMIR

SEQ ID NO: 5425 - DNA, 5850 bp, DROSOPHILA
gatgagtttggatatagttatcggtattcccaaagggggcatactgagctctttcgagtttaaaaccagagtggtctttattgtgtcggagaagtctcctctagctcttggttactcaagtttttgtcttatagataagtgcttttggttttaagtgtacataggttcttaatgtaaatataataatttttttagattttgcaccacttacggggagcattttcgaaatgtattcaaacataaattggccagaagataagcaaataaagcaatagatccgctattcagctagtgagagcgggaccgatttttgaaactttctgatcaaaaatgtatatactttataggatcggaaaatcaaccttctgcctgttacatatttaataacgaatcttgtagtcaagggtataaaaaatatattccgttgttttatgtttcataatatgattttttcatgattttttatatataataactgcgagggtgtataagcttaggaaatgttatatttttattctattcataatttttttgaccaatttctataagtatgcccaaaaagattggccacgtccacaataaatgtaaccgctaccaggttgcaattgtgagtaatctcgtgaagagtgttttctaattttgttttttgtgtctccatttcccttacactcccacacgctgagtatcagaagggcgagaaacaaaattatagcgttcgctcttgtttttgaattgcaatttttgttcacaaataccattttataatacgttccaagatctaatgcaatgtacggtttataaaaataaagaattttgatgaatattgtgtatctaaaaataaaactctgagtatttttctgtcttgtggataaaattatctttgagttacatgacatacggaatatttatgttgtcttttttatttggttttaattgttgtttttgtttcaacaaaaatagttgcagagctatcatcgtattaagtctaaaatgttcctgaatgttgagatgcatccacagaagacacatagcccatatgtgttttaatcgcgtcaataccaagtttatttctcgtcttcaattgtttatttagcttttaattaacggagtgttcaattttttaatattagagattaatccaaagagctaaaaaaatgagcgtaagttaatcggcaaaaaaaataatcccagtataagtttccaagctacttcgagttaaaatttcaagattaaaggagtcaaaattatttcagatgatctcaatactgaacgtttttcagggtgcaatcagttcaaataaaataagtaacgatataacgttttatatagagagttaatgcttaacgcccacgttccagcaatgtttgctcgataacttttcaattaagtcagagaataaacatattgtacattcaactaatatttctttaaacatcattaaacagctcacacatgtatttgatttgcaaatactacatttttactttaaggaatcttacgtttttggtccgtctgtcagtcagtccgtctgtccgcatgtacaggtacatttacatctatatacacccattcttgatcactagtcgaatcgaccaggtcatgtccatcttcctgcctatctaaggtataacaagagagaatgctatagtcgagttcgcgaacgcgaattgcattatttttctgggatatcgacagatattggggagtaaaatgagaaaaaaataaagaaaagtgtgggcgtgaccgatttggcggctttagggcgtttgagtggcgtggcaaaaagttttttggcaaatctatagaaatttacaagaccttctagcttttatagttcctgagatctcgacgttcatacggacagacggacgtggccagatcgactcggctattgttcctgatcaagaatatatttacgttatatagtcgaaaactctttcttctgcctgttacatacttttcaacaaatctagtaaaccctctacgagtaatgggtataaatatcgaaatccgtggttaatttgaaagtagccttaaagattcttctgaatccgtcgtttctattttctagcttttatggatcccaaaatcgcgtgtatatgatcagaatagctgaccaactgacgaccagattgactcgggtagtggtcctgatactgattatgcttatacctatattctttttagggacgaaaaagcttctttctacaaaaatatcaaagatggggtttattgaatttgttacttttctaaaacagagattcatatttagaaagaaaaggtaaagaaagtgctctagttaacaagttaagtgggtcaagattagtgcagataagtggagctaacttgagaacatcttactaagaaatagaagaagagagaatgctatagtggggttctcccagttttctgcggtattatggcgttagagtgggcgcggcaaaaagatttttggaaaatcgatacaaatttaaaagacataaaagtttttttgcaaatcgatagaaatttacaaacaaaaaaatttaaaaatatcaaaacatttttaaaaagtgtgggcaattttctgcgatttgtggtcgttagagtgatcgtggcagcatgagtcaatgaacttgccttccgtatatgtctctagaatctgtaagcttaatttcagaaagctgaaatcgagacgctgaatacggacagacggacatggaaatatcaactcggcttttgatgctgatcaagaatatatatactttatatggtctgcctgtctggaaatctagttaacacttttatcctacgagtaacgggttgatagaaaaattgttttgcacgcccactctgacgcccacaagccgcccatttttctcattatattctctaatttctccctatgtccaaaaatgtctcgttcacacttccagctgagaaatagcaatttatcatgtttttgaagcctacggatatccgatcttttagagatccctctgtaattgcttacatatatttgtttatgaagaggtatcacggactcctcccatatatataaagggtaaagtagaggcttgcataagactttcgcacagagcctaagcactcagcgtgttaagactggcttaactcgctgaagatcgtaaagtagtgagctttcgtttgaagtggggcaaaatttcaatttggacttctaagccgcttaagagtaagggtgttcgtcggggaagtttaattcccacgatccctctttcatatttttcatcttagcttcaaactccttcaccaccgtacttttcggtcgaaaatcatcagaacacttcaaaaaataaaatgtcactcacgcaagaaaatttaatattttcctttttaatgttatcggctttggaagacaaatcttaaaattaaagtagacatgatgattggggacttcgggtactgtttattttaatgatatataaatcttggtaagcctatcacctctccaaaataatgagaattattattaagttaattttttaattaaaaaaaatgatttgttttcccaccgttcgtctgtcgtcaactctcactaccgcataaaagctgtcgatcatataacgatagggcagtgtgcccggcttaggacttgtcttagccgactagagtttttgttggtgttggctaaatgtttgtactgaatgaaatatttcgcccccggtttattaacttttccaataacttttccacttaccggaatagactcgtttattggcgattttctttcgttgctattagtgtgacccatcatgcaattcttggctttaaccttgaattttacaattttataaaatcaagcaaggtaggacctcctttggaagggacaattttagcaattcagctatgtacacaccacaaggcggctttaaaaatggcgaatattggaggaggaaagccgctttgcattccaatcgatttccaaaactatcgttgaccttacgtgaaataaaaactaatcactggcattagattgacatcaaaccacacatcaggcagttaacaattaagaattcaaacacagttaaagtcatgacgcataaatatattaaatgaaattgtattttagtattatgcctatattgtatatttctaaataaacacccttatttttcttaggatgaattgactaaggagcaaactgcatgtaagcttataacccatttactgatttcttaactaaaaagcatttccttatagtactacgtaatgcatttaatgcttttgaccctgaaaaaaatggatatatcaacacagctatggtgggtacgatacttagcatgttgggtcatcaacttgatgatgcaactcttgctgacattatcgctgaagtcgatgaggatggttcgggccaaatcgaatttgaagaatttaccaccctggcagcccgcttccttgtggaagaggacgctgaagctatgatggctgaattgaaggaagctttccgcctttacgacaaagaaggaaatggatatataactactggtgttcttcgtgaaatcctgcgcgaactagacgataaattgacaaatgacgacctggacatgatgattgaggaaattgattccgatggatcgggtactgttgattttgatggtatataaatcatacagctgaattacaaacgctttgctattttataacatatattattttatagaatttatggaagtaatgaccggtggcgacgactaaaacaatatcaaaagagtacatcgaaataagtattttaatttaaacaatgcaatcaaaattgaatgacatgagaaaaaattatattatattattttgtctaaagtaaataagtaaattgatcgtatgaaaacgtaaaatattttattcttacgcatttttttaaaacccttttaagttactttaagtagtcctgccaaatggaataaatctctatcggttccacgcaaatagtatagtttagttttgtatagtttagtttatagtttatagtcacgttggccgtgttgttagaggccttggactgcttgcgccactttagtcgaactgcattttctttgttgctatcagtctgactcaacgagccatttgtttcccccctttgcttcagactcttggctgctcggaatttaacgtttctgtaagggaggtggacgagtacggagcgttaagaaatttttggtacatcgcagattgaagtccaagcggattaacggattcactcgccagtcaatttagaaaaattagctggaagacggataattttaaggaattatgcgtaaaaacgacaaggattgtttttagtcaaaaagcacgaagtgataaacaatgccttaagagaattataaaaaagatattgtccgattaataaatctggagaattgaaaggtaaaacattaaagcaactagagcgatacaatgaaaatgatacaggccaatattaaattcctcattaagcatttataagagaggatagtcttatcactaagcttcgggtggtgtttgacgcaaagaccaaaacaacagatgggaaaagctttggtattcacatgactaggacatacatttagaggataggcagcacgtgctttcccctcccaccacctctagctgaccaaattgcagctgaagtcattgttctgcaagtgggtcattatctactctacctccaccgccgggaatgtcggtgtcagctagcgcagcatcagcaccggaagacaggctaacgactctggagctctgcagcgtaccgatgatgaaagggcatacggaccttgtgtttggctaagcgttgggccgctgagcttacgagcggctggcgaagcgctggccactcgttcgattttcgatttttttttt

SEQ ID NO: 5426 - DNA, 756 bp, DROSOPHILA
atgttgagatgcatccacagaagacacatagcccatatgtgttttaatcgcgtcaataccaagtttatttctcgtcttcaattgtttatttagcttttaattaacggagtgttcaattttttaatattagagattaatccaaagagctaaaaaaatgagcgatgaattgactaaggagcaaactgcattactacgtaatgcatttaatgcttttgaccctgaaaaaaatggatatatcaacacagctatggtgggtacgatacttagcatgttgggtcatcaacttgatgatgcaactcttgctgacattatcgctgaagtcgatgaggatggttcgggccaaatcgaatttgaagaatttaccaccctggcagcccgcttccttgtggaagaggacgctgaagctatgatggctgaattgaaggaagctttccgcctttacgacaaagaaggaaatggatatataactactggtgttcttcgtgaaatcctgcgcgaactagacgataaattgacaaatgacgacctggacatgatgattgaggaaattgattccgatggatcgggtactgttgattttgatgaatttatggaagtaatgaccggtggcgacgactaaaacaatatcaaaagagtacatcgaaataagtattttaatttaaacaatgcaatcaaaattgaatgacatgagaaaaaattatattatattattttgtctaaagtaaataagtaaattgatcgtatgaaaacgtaaaa

SEQ ID NO: 5427 - protein, 154 aa, DROSOPHILA
MSDELTKEQTALLRNAFNAFDPEKNGYINTAMVGTILSMLGHQLDDATLADIIAEVDEDGSGQIEFEEFTTLAARFLVEEDAEAMMAELKEAFRLYDKEGNGYITTGVLREILRELDDKLTNDDLDMMIEEIDSDGSGTVDFDEFMEVMTGGDD

SEQ ID NO: 5428 - DNA, 3364 bp, DROSOPHILA
aatgtcgcctaatctttcaaatgaagaaccttcttaagtttctaattcactttcaaattcaggacgacctcgattgcgcttccaactcgggtcgccagcaatcgggcatcatccaaggtgtacacctgagctttctggcggccaacacaacgacctttgagcacctgcaggctctgctcaagcagcgcgacggggagctgacccacctgcagtgggaagtgtcgcgcctgcaagcagagcgaagcgttctcgacgccgagatatccaatctgaccatcgagctggaaacggtaggagaatagcccatcttgacaagagataataatgaatactattcgtccaatggtagatgaaggagaagcagcagatgtacgaggtaatggagaagggatacgaggatctgcagcatcgctacgacgccctgctccagatgtacggcgagaaggtggagcgcaccgaggaactggagctggatctgaccgagctgaaggcggcctacaagctgcagatcgacgagctgctggccgccccgccacccaatctgcaacggccgtcgaagcaaacatgattgccggagcgcaggatcgtctccctgcccgagttgccatgtttgcgacggacgtggccaccgtaacgttgcccatctccgtctcccattcccagttgtaatgtattatgctttcaatactaatcgatacggatccggtatggggaacccacttccaagtcccaatccacccaaaacaacaaaaaaaaaaccaacacatgtacatgcgagtatatatattacctatgatttgcgtatgctgacaccttctagttatattataaattgatcgattgtgataatttaatttatatttatatatacataaagttatcgtctatgactatgtacaaaactgtttctgttccgagcagtttgccaggcggttgtgaagcagccagcagaagcaacagcctcttccaaatacatcaaatatcatttaatacaaagtaatcacagggactcccgcaggatgtccttaatggcctgggttagcggaaatacaggtttctcgctgtatttcaagtttggcataatgctgcatgagttcttgagatcatcggtgttcagcgagaagaccatgacgccacccagattgagggatttcacatagttcgccttgcaggcgatactcgtttgattttcgtacgatatccactcctgcagagcgctcaaatatggcgaacagctctcggcatcgtaggacaagtttggcttgaagaacttggtgacacactcacaagtttcggtcagtgtggtgaagcccagttggccacatttaccgtaaccggaagcaggagctcctatgcgatgatttaaaggattaaccaacctgtttggtgggtgaggaagtataattaatgagggattcattccataatacatgcagttactaacgtaaatgagtggccgtaggtgggcagacccacaaccagtcgctgtggctccagaccgctttttagccaccactgaaccgtgtaattgatgttgaacgtggccattagcgaacgttcctgcgagcgggcataaagcggagcatttaagccggtaaatggtgtatcctcgcggtagaagtggaaatcataggacattagatttacataatctgcgtacagatttatctctcggatgtcgtaggcatagaaggcgattccctcgggagcagccaccgccagcgagagaatatcattggtacgcttttcgcgccgccactccgttctaatctcgtaaagcagctgcgagagatgcattcgctcacgatcgtaggcactcggaaactcccagtcgagatcgatgccatccaaactgggataggtgcgcaatatttcccggagggagcgcaggaacaactttcgcatggcgtggttcgccaccatgagggcaaatgaccgcccactgtcggcgccaccgatccagagaagcaggtgaacctgcggatgggcagcacgaaaggatcgggtgtcgttctgtagtacctgtctgagggtatcgggaaggactatggtggcattatccaaagtggcgggtccgatattgatgtgggtgcacaggtcgccgggaacatccaaaaggctgagattgtgggtgccatcgcttgcgtagtagcacaccaaccgctgccccaccttgtgcacttccccagtttggatgccgagtaatcccaggccgatgaacccgaggcaaaggcacaacaaagagaacaacaaagcactccagcagaccaaagttcgcaggctgcaattccgttgttccttacgggacagctcatccgtaatcctccccgcggaactgccatccagtttctcgtagttccccatcttcgctgatattaataactgttatcatatcaaacgaaaaacaataacacaaggcaaaaacgatcagggatggcgtgcttcgaagtatttaaaacattccgtgttctagagaagttttagaaatatgtgttattattataaaagtatttattctacataagcctctacggactgaacttaagattagtagtacaaatataccaatagttagttttaataaggctccacttgctttatgtccattgtattaagtgcctactgtattctaacgctccatccctagtttatcgataacaacgctattgttaacaaaaacgccttctaacatcgataccatatcacaaaaagaaaacaaataaaattatagaaaacaaaaaaaaaaaaggatgctatgttctaaaaatgtacgttgagtgatttgcgaccaacgggaaatcccccacaaagacacgacaacgaaattagatcggaaaatcgagctccaacgcatttgtttatgtgacccaaggagcgccatggcggatccggaggattatgatctgaactttgttcagctgagtcgccagcaggcgctgcagcgatatgcgggtgcagtgcgtcagctgcgccggctggctgatcagcggtacggtgtgcgatcccttagcttcgacaattatgtgctgtttcagtatttccggcaacgcaattggcaaactggcgtcacgccacccgcccccttaatggcctacctcaagcttgaggtactgcatcatctgctggaccgacgacgacagatcctctgctggctgttctacctcacggtggtgtcgctctgcgtggccgcctaccgttatgaggtaaccagctccaccggcggacatcaggagcgcgttgtccaggccatggtctatcccgggatgcgcatgtggcggcggatgaccatgccgctgatccaacgattcccacagcttaccgaactctacgacgagtcctgcctgatgggcaatccgttttttca

SEQ ID NO: 5429 - DNA, 1299 bp, DROSOPHILA
atggggaactacgagaaactggatggcagttccgcggggaggattacggatgagctgtcccgtaaggaacaacggaattgcagcctgcgaactttggtctgctggagtgctttgttgttctctttgttgtgcctttgcctcgggttcatcggcctgggattactcggcatccaaactggggaagtgcacaaggtggggcagcggttggtgtgctactacgcaagcgatggcacccacaatctcagccttttggatgttcccggcgacctgtgcacccacatcaatatcggacccgccactttggataatgccaccatagtccttcccgataccctcagacaggtactacagaacgacacccgatcctttcgtgctgcccatccgcaggttcacctgcttctctggatcggtggcgccgacagtgggcggtcatttgccctcatggtggcgaaccacgccatgcgaaagttgttcctgcgctccctccgggaaatattgcgcacctatcccagtttggatggcatcgatctcgactgggagtttccgagtgcctacgatcgtgagcgaatgcatctctcgcagctgctttacgagattagaacggagtggcggcgcgaaaagcgtaccaatgatattctctcgctggcggtggctgctcccgagggaatcgccttctatgcctacgacatccgagagataaatctgtacgcagattatgtaaatctaatgtcctatgatttccacttctaccgcgaggatacaccatttaccggcttaaatgctccgctttatgcccgctcgcaggaacgttcgctaatggccacgttcaacatcaattacacggttcagtggtggctaaaaagcggtctggagccacagcgactggttgtgggtctgcccacctacggccactcatttacgttggttaatcctttaaatcatcgcataggagctcctgcttccggttacggtaaatgtggccaactgggcttcaccacactgaccgaaacttgtgagtgtgtcaccaagttcttcaagccaaacttgtcctacgatgccgagagctgttcgccatatttgagcgctctgcaggagtggatatcgtacgaaaatcaaacgagtatcgcctgcaaggcgaactatgtgaaatccctcaatctgggtggcgtcatggtcttctcgctgaacaccgatgatctcaagaactcatgcagcattatgccaaacttgaaatacagcgagaaacctgtatttccgctaacccaggccattaaggacatcctgcgggagtccctgtga

SEQ ID NO: 5430 - protein, 432 aa, DROSOPHILA
MGNYEKLDGSSAGRITDELSRKEQRNCSLRTLVCWSALLFSLLCLCLGFIGLGLLGIQTGEVHKVGQRLVCYYASDGTHNLSLLDVPGDLCTHINIGPATLDNATIVLPDTLRQVLQNDTRSFRAAHPQVHLLLWIGGADSGRSFALMVANHAMRKLFLRSLREILRTYPSLDGIDLDWEFPSAYDRERMHLSQLLYEIRTEWRREKRTNDILSLAVAAPEGIAFYAYDIREINLYADYVNLMSYDFHFYREDTPFTGLNAPLYARSQERSLMATFNINYTVQWWLKSGLEPQRLVVGLPTYGHSFTLVNPLNHRIGAPASGYGKCGQLGFTTLTETCECVTKFFKPNLSYDAESCSPYLSALQEWISYENQTSIACKANYVKSLNLGGVMVFSLNTDDLKNSCSIMPNLKYSEKPVFPLTQAIKDILRESL

SEQ ID NO: 5431 - DNA, 3187 bp, DROSOPHILA
gtgagcgacaagtataccaagatgtggcaggccatgcaggaggcgaagctaccggccaccctcgacgaagcggtggcccgggttagaaattcgacagctgccacgggttttgcctttctgggcgatgccaccgatatacgctacctgcagttgaccaactgtgatttgcaggtggtgggcgaggagttctcccggaaaccctatgccatagctgttcagcagggatcgcatctcaaggatcagtttaataatgcgtgagtaatgggaaaatatagatgtgagcttcttcatatcgttgtggtgctttagaatcctgaccctgctcaacaaacgacagctggagaagctcaaggagaagtggtggaagaacgacgaagctctggccaagtgcgataagccggaggatcaatcggatggcatctcgatccagaacattggcggcgtcttcattgtcatattcgtgggcattggaatggcctgcatcacgctggtctttgagtactggtggtacaggtaccgcaagaatccgcggatcatcgatgtggccgaagccaatgcggagcgatccaatgctgctgaccatcctggcaagctggtcgatggtgtgatccttggccactcgggggagaagttcgagaagtcaaaagctgcactgcgtccgcgctttaatcagtatccggccacgtttaagcctcgtttctagaattactcgtataccaatgaaacgaatattatggtaaaatgagcactcggatgtctacgtctagttttaaagaaatcagtcactttgtgcacttttattgaactcttaataaatgtttaaacaaaataattgtaaaacctttgtatttattatttttgaatttcaaataatatttcaaaagccgctggtatttctagtttagtattaaataccgccttctgctatcgagaaatcgacaccgataggttcggacaataaaacgcccccgatatcgataggcccgataaattcggacaaaaaagaacaacataaaattccgcccgcacccgcgctcaacagttttgtttttaactaaccgcgatgggagacagttcagatgaggaatatctgggcacggactggctggcttacagcgaacgctccgactgggaagatgtgcaaccgctcgcccaggacgacggtcccaatccggtggtgtccattgcttacagtcaaaagtgtgagtaatgcatgcggctttatctctggatgtcactttatctgagcaaatatctccgtacatcgtagttcgcgaggtcttcgactacatgagggccataattgcgcggggggagaagagccaacgtgccttggacctaaccacggacgcactgcgtctgaatccggctaactacacggtctggcaatacagacgcgacgttctgcgcgaactaaaggctgatctgtatgcggaactggactatctgaccgaggtgattggccagaactcgaaaaactaccaggtttggcaccaccgtcgcgtcatcgtcgagatgctgaacgatcccagcaacgagctggagcttactgagaacgccctggtcaacgatggcgatgccaagaactaccacgcctggcaacatcgccagtgggccattcgcagctttaagtgagtagtcgtatgtttattaagatttactttctataaattaatgtccactacttttagtctctatgacgatgaacttagctttgtggatcgtctcattagcgaggatcagcgcaacaattcggcctggaaccagcgcttctttgtgatcaagcattttggattcacgccggagctgatccagcgcgaactgtcgtacacgatgaatcgcattcgcatcatcaaaaacaacgagagtgcctggaactatttggtgggcgtgatgcggcagggcgacagtggaaatgccctgctgagcagctacccggatgtcgtggactttgtggaggagctctaccaggctggcaatcgatcgccctacctgctggccttcctcatcgatctctaccaggagcaggcgctccaactaaaggccagcgatagcgatcaactcgcccgcaaggtgtacggtctgtgcgaggacatggccaccaaacacgatgtgattcgtcgcaagtactggcagtatgtggccaaccatctgaagaaccagctaagcacggtcgaacagaagtagcagcagttgtccaggttacaaatccattattgcttagttttaagccacatacgacgtacttaggccttcttctttatacataaataaaatttaatttaccgtcaagtgagctgagcgccaagaatgttgcaaaaccccagtcacatactacacattgccacatgccctgatgggcggctgtcttcatctttgccgcgcatccgtccgactctgtttatctaagtgagctgttgtgtttgcacacgtaaatttcattaacaatgagcagataattttagcgcagtgtctgcgccagctgaggccagtcggcggctaaagtgagcttgtaaattatgcaaacaattaatatttttaatgctggactttagcaagagcttctgttttgtttgcaaatgaatgtgggaagtatcgtaaatactcaagaaaatatttctagagcaaaaactatctttaccttcagctatctgcgtttagttgccatcgcaatcgttatctttttcgtcagagacggaaagaaccttcagtgtgctgtctcaatattgttatttatttaaatttgcttcttttaggtttttgtgtttgtttttttttttctcattcgttttttagttcgagtacatacaatatagcagtttgtaatatataacttttcatttaatttgattttcttgcatacatattgagattcggtttttgcattttcgtaatcgaaagccaccaaagatgatccagattctcatcgaaaatcatccaaggggccagtgggaatcaggaattggtaatttggaatcgggtttgggggctatgtacttaaaatgaagcagaagacatctttggcgtgttttttatttcgtttgtttctttttagttcagctaaataggagcaaaatcattgagtactcgtttgcgtagtttaataaaatttcgtaatagtaaaatatatatttattttgtatttttgtttggttttcgcttcgtttcgtattcccttcatggggtt

SEQ ID NO: 5432 - DNA, 1059 bp, DROSOPHILA
aaaagaacaacataaaattccgcccgcacccgcgctcaacagttttgtttttaactaaccgcgatgggagacagttcagatgaggaatatctgggcacggactggctggcttacagcgaacgctccgactgggaagatgtgcaaccgctcgcccaggacgacggtcccaatccggtggtgtccattgcttacagtcaaaagtttcgcgaggtcttcgactacatgagggccataattgcgcggggggagaagagccaacgtgccttggacctaaccacggacgcactgcgtctgaatccggctaactacacggtctggcaatacagacgcgacgttctgcgcgaactaaaggctgatctgtatgcggaactggactatctgaccgaggtgattggccagaactcgaaaaactaccaggtttggcaccaccgtcgcgtcatcgtcgagatgctgaacgatcccagcaacgagctggagcttactgagaacgccctggtcaacgatggcgatgccaagaactaccacgcctggcaacatcgccagtgggccattcgcagctttaatctctatgacgatgaacttagctttgtggatcgtctcattagcgaggatcagcgcaacaattcggcctggaaccagcgcttctttgtgatcaagcattttggattcacgccggagctgatccagcgcgaactgtcgtacacgatgaatcgcattcgcatcatcaaaaacaacgagagtgcctggaactatttggtgggcgtgatgcggcagggcgacagtggaaatgccctgctgagcagctacccggatgtcgtggactttgtggaggagctctaccaggctggcaatcgatcgccctacctgctggccttcctcatcgatctctaccaggagcaggcgctccaactaaaggccagcgatagcgatcaactcgcccgcaaggtgtacggtctgtgcgaggacatggccaccaaacacgatgtgattcgtcgcaagtactggcagtatgtggccaaccatctgaagaaccagctaagcacggtcgaacagaagtag

SEQ ID NO: 5433 - protein, 331 aa, DROSOPHILA
MGDSSDEEYLGTDWLAYSERSDWEDVQPLAQDDGPNPVVSIAYSQKFREVFDYMRAIIARGEKSQRALDLTTDALRLNPANYTVWQYRRDVLRELKADLYAELDYLTEVIGQNSKNYQVWHHRRVIVEMLNDPSNELELTENALVNDGDAKNYHAWQHRQWAIRSFNLYDDELSFVDRLISEDQRNNSAWNQRFFVIKHFGFTPELIQRELSYTMNRIRIIKNNESAWNYLVGVMRQGDSGNALLSSYPDVVDFVEELYQAGNRSPYLLAFLIDLYQEQALQLKASDSDQLARKVYGLCEDMATKHDVIRRKYWQYVANHLKNQLSTVEQK

SEQ ID NO: 5434 - DNA, 2909 bp, DROSOPHILA
tcggccgattggagttggctcaattggcccgagttcaattcgatccgcaattgctgagctgcaaatggcaagtgacgctttttccagccgtttcgaacacatttgggccgtttcgaatcgttggcttcaattatgcgacggatacttggagttcctcactcttttacctcggcgcactggcacagaatatcaatcacaagccctcagcggaacggcgataaaaataaacgcggctcgaacgcgactcgatgcccccaaaaaaagcaaaaaataaacaaagagccaaggcaatacggataaaaagcaactcgaaaacaaacagctaacaacgtcttcacgctttgccggcagttgacagactcggcttaaatccaactcgaaaatgttgctggtgaaataccttaacgcttctcccgttgccatgttgccagatatttaacgaccgtacaatacaatacacgttttttcaatccgaaaaataaaatatatatacagtataccaaatatcaaagtcagttaaagagagtttttgggaatacatactcgccaagtaatgcaataatgcttaaattaaagaaaaatgtatgcaaactattatagttagctaattatattgataattatataattaaataatgattttttgttactgactcccaaatagtccactcaactttaacctttcattgtttggagctaccgattggccaaaagccatttcgatggctccttaaatggctataacacttggcactcgcaaaattaatgacctgagttattccgcaagacaggcttcactttaccacctgtgttcaaaattttcaaaatgccagcgaaaagcttttgccaagcttcttgttaaccatctcaactaaaaaggcctgaagttaggcaacacattcagctatggtgaacaatttgtatttattttttaaaaaactagcaatagatgaagcacaatgaaggaatatacaaggagtgcgtaggccacgagcaggactcaggcgtagggaccgccggaggagtccagccctcgcggagcattggcgtagctgtcctcagcgaatgtgtcgctcacgccggatccggaaacggaacccgaagatgagccggaaccggacaggacattttctgaggcacctgctgccgctcccgacgatcgaatgacatccaccgacttggagcgctcatcgcgagccacaaatggagtgggctgcgccacctgggcaacagggacaaccaccgccttaagggcatagggcacccggttgaccacagcattgaagccatgcacatcatccgccgtgtaggtcacggtgcgcttgtagccatcgggatcgatcaggctgtagaatccgcgcaccacataaccatcccgggtctcgctgtgctccttgatgtcaccggtgctcgcgtcgttcacggcatagttgaagctgtagctggcgggcggaaagacctcgggctcctggtgctggcgcagaacggagctgaccaccaacggttccgactgctgatgctgaactgtctgctgctcctgctgctgctgcgtcgatgaaaccacctccgagttctgctcgtggcggagaacgggcagcggcgagggcagcagcacggattcggcattggcggcactggccgcattctggagaagattggaggcctgaacactggccgtacggctgccggcggtgaactgattcctggcgggcgccacgtagtcatagccatcgggcgtggcctccgagttcagagcattgttgctgggcgtgtggtagtcgctcaggaaatcctcgccagaactggacgcactgttggccgccttcgcctccttctcgttgtagttgtactccgcttggctagtggccaaaagtgccagagacagcagggcgaaaaactgcaagtacatattgaatgtatttatcatgaatatatccatttggtccttgcatcctgatcacaactcaccttagctgccatctcaaatcgtttggatcttcctttcgtgggagtgcctctacaaattgtcagctaactaatgtcataattgaagcagcccggagtttttatacttcatcccaatacttcatgcagttcattacccaatgttggtagttatacaatgtcatgcgcctcaattgattgatttaccattgtccaaagtcgcgacacaatattggtaacactttcgttttcaatttgtgaccacttttatgctgcgtaagcgcaggccatatgaaaagatgatatggagtaggtgtgtgatcgtggaaacatcagaatggggacaaaagttggcaataaaagtggagaagaattcaagcatttttaaaatttgaaccacagctcattagtgccaaaaatactgcctaacttctcgattagcttaagattaactatttaaatttattcattgtttaaaaaaatattataatatcccaacccaattaattcagtatcccacatgcgcagtgatccctaatctcccactgaatcgtcgcagcttgatgcctcttgataagaaaacgaatcaaaccggttgctagccaactgactgatgccaagatgctgcttgattttggctgattgccgtctggctaaaacaaacggccagctgtcggcaatcgggaaccgatcgtcgcggagaacacaacgctcgtggagaatgacggccaagatgaagctgcggtcccagctgcatctgctcactggtttcatggctggattcgtgctggccttcgtgctcctcctctacgtctacgatgtcagcagggtgacgccctgctggagcagcacctccaccatgaccacggccacaacggccaggattgaggatggtccaccaccgcgcattctgtgcatggtgctcacctgtccggagaacgtgcagagcctggccagaagtgtct

SEQ ID NO: 5435 - DNA, 909 bp, DROSOPHILA
atgtacttgcagtttttcgccctgctgtctctggcacttttggccactagccaagcggagtacaactacaacgagaaggaggcgaaggcggccaacagtgcgtccagttctggcgaggatttcctgagcgactaccacacgcccagcaacaatgctctgaactcggaggccacgcccgatggctatgactacgtggcgcccgccaggaatcagttcaccgccggcagccgtacggccagtgttcaggcctccaatcttctccagaatgcggccagtgccgccaatgccgaatccgtgctgctgccctcgccgctgcccgttctccgccacgagcagaactcggaggtggtttcatcgacgcagcagcagcaggagcagcagacagttcagcatcagcagtcggaaccgttggtggtcagctccgttctgcgccagcaccaggagcccgaggtctttccgcccgccagctacagcttcaactatgccgtgaacgacgcgagcaccggtgacatcaaggagcacagcgagacccgggatggttatgtggtgcgcggattctacagcctgatcgatcccgatggctacaagcgcaccgtgacctacacggcggatgatgtgcatggcttcaatgctgtggtcaaccgggtgccctatgcccttaaggcggtggttgtccctgttgcccaggtggcgcagcccactccatttgtggctcgcgatgagcgctccaagtcggtggatgtcattcgatcgtcgggagcggcagcaggtgcctcagaaaatgtcctgtccggttccggctcatcttcgggttccgtttccggatccggcgtgagcgacacattcgctgaggacagctacgccaatgctccgcgagggctggactcctccggcggtccctacgcctga

SEQ ID NO: 5436 - protein, 302 aa, DROSOPHILA
MYLQFFALLSLALLATSQAEYNYNEKEAKAANSASSSGEDFLSDYHTPSNNALNSEATPDGYDYVAPARNQFTAGSRTASVQASNLLQNAASAANAESVLLPSPLPVLRHEQNSEVVSSTQQQQEQQTVQHQQSEPLVVSSVLRQHQEPEVFPPASYSFNYAVNDASTGDIKEHSETRDGYVVRGFYSLIDPDGYKRTVTYTADDVHGFNAVVNRVPYALKAVVVPVAQVAQPTPFVARDERSKSVDVIRSSGAAAGASENVLSGSGSSSGSVSGSGVSDTFAEDSYANAPRGLDSSGGPYA

SEQ ID NO: 5437 - DNA, 2621 bp, DROSOPHILA
cagcagcagcagaaggtcctgtaaaagtattttataagtttacgtttccaagaaataggagaaagtaaggcaacctacacaaaaagacatcccacaatgcggtttagttcactggcccaccacttcagatcattttgcaccacactcagatccttgattccgcaggcggggcactcgatctccacgggctcgcgtggcaggttgagaaaagtgcctgccaggggcgtggcaaagttctcgtagatcttgcgctcctttcggtcctccagagccttggcctcccgctccctgatctcctgctgcgtttccgcttccttctccggcagcgttgtcgtcatgatcgctcaacaatcgaactgaaagcgaaacgctgccaagcacgctggcaacctgtttccaaactcaaaagagaacgtgagtgcacagagagaaataatatggaatttttggccaatatattcccccggttttccgcccaaaaatatgcagtttttttgatcgaaaaagtaaaaataatgagccaaatatggaatgggttacatcgttgaattcataatacaattttctatcgactggtgttgaagccttagattttcaaattttcgcctttttttgcataatatcatgatgttaccccttataaaaaatgcgaaaattaaaaaaaaaaaaattttgaaatcaaactaaaaagtattttccttcgttagtttgcttaattaggtgcacaaaacagtatttatcatagcattgtgactcttttttctgaacttatggaaaaaacactgtttattgaaaatgtacttgtgataactttgagtttttgaaaaaaaaaaaaactatgaataaattctcaacagttaagctatataaaaaaagtatacttttgttctcaaatagtgtttaaacaagtacaggttttatttctgtaagtgtattttccaactctggcaaagagtatgagtatgatttttgaaagagcatagaaagagcagcggcgaaattgatttacagtgtgtctttaattgagttagacgcgtaatagaattatagaacagataaatatttggcattaatttcgatttaattggtccgcgggatgggctacttggccttgcgctggattcccactttgccgccacacgagctgcagtaaacgcccttggtggtccactcccgattgcaaccgcaccaggtgcacacgcagcagatccagaagagcggaaagatgctggaaaatgaaatggaatagttggtgcaaggaacgagatcccagacagtagatgtccccttaccaggatagcaggctgaggcagaaactggcgtccttgcagctggctgctctcatcacagccgcctcactcctctcgcggcacagtggacacaacagcttgtaggtggagggcccaacggcgtagtaccggatggatggttcctgttgggcggcggaaagtggagcagctgactgctgggggatcagggtcaccttctccgacgcatgatcatcgatgaagggcaccagaccatcctccaggaccacattggcaataatattcctggcacgttcctccgccgttccggcgggcaccaatctcacccgtaacctctccacctgctgctccatggtaactgactgtctgatctccgccagaacaagcgaatctcaagcgagagccaatcagctagctaaagagtatttcaaagagagattctagagaagaattcgaacacgaccctggagctatgatgtcatcagcagctagctagctattcggtggatattcattcggtgtggcccctcaaccagaaccagatcaacagccaagcatgcgtcgaatatttgtatacccaatatatagagcagtcgcacccaaaccacatggaaaacgtttcgaaatactttcagaaattttttttgggagggagactttaaatgcattaatttatggacatattctaataccttatgagaggaacaaaaatcaatttatatacatatatcgtaccatttaatgagtattctcagtgtgctactatattaaacgtgtttctacgtttaaccggcaaaaacagctgataactacgactgtttatgttttccgatttgtttatgtttatggtcggaagcgtttccgaccatattaagtatattcttgatatattatattatgaatattcttaattagatatattcttgatcagaatcaatatcaactgtctgtccttctgtaggaacgtcgagatcccagaaactataaaagctacaatgttgagataagggtcacagcttcccgagacatagtcgcagcctttgttgaaccatgtaccacgcccactctaacgcccacaaacataatgggcaaccgacatttaaacaatcactatagcactgaaaaagctgacaacctcaaacttcatacgtttggcagctcggccagcatttcagttcattgatatacagaacattgttcagtctacatcaattttgaattgtgaatattcggtaaagattattgtgataaaaatggaaacccaaagcgagtttactgaggaacagaaccaagaccaacccacccaggaccaacctacctaccagccgcgtctgaacgaggtggcccaaaagt

SEQ ID NO: 5438 - DNA, 557 bp, DROSOPHILA
atggagcagcaggtggagaggttacgggtgagattggtgcccgccggaacggcggaggaacgtgccaggaatattattgccaatgtggtcctggaggatggtctggtgcccttcatcgatgatcatgcgtcggagaaggtgaccctgatcccccagcagtcagctgctccactttccgccgcccaacaggaaccatccatccggtactacgccgttgggccctccacctacaagctgttgtgtccactgtgccgcgagaggagtgaggcggctgtgatgagagcagccagctgcaaggacgccagtttctgcctcagcctgctatcctgcatctttccgctcttctggatctgctgcgtgtgcacctggtgcggttgcaatcgggagtggaccaccaagggcgtttactgcagctcgtgtggcggcaaagtgggaatccagcgcaaggccaagtagcccatcccgcggaccaattaaatcgaaattaatgccaaatatttatctgttctataattctattacgcgtctaactcaattaaagacacactgtaaatcaa

SEQ ID NO: 5439 - protein, 151 aa, DROSOPHILA
MEQQVERLRVRLVPAGTAEERARNIIANVVLEDGLVPFIDDHASEKVTLIPQQSAAPLSAAQQEPSIRYYAVGPSTYKLLCPLCRERSEAAVMRAASCKDASFCLSLLSCIFPLFWICCVCTWCGCNREWTTKGVYCSSCGGKVGIQRKAK

SEQ ID NO: 5440 - DNA, 3442 bp, DROSOPHILA
aacatggggtcgtcactgcaaccgagtgatttactatggcagctttccgggcactactatatctggcttggaaatagtgggtctgaatgccagtgatacccgcagtaagttgtggggcaaaacaaaggcggcgtttcgtcatgcgtacaggaattacggtcacgaggtggattggttctacaaggcggatgacgatacctatgccgtaatggagaatatgcgcaaactgctgaaaccctactcaccgagcaatccgatttactttggctccccattcaagctgggatccactctctacatgtccggaggagccggctatgtcctgagcaaaagtgccgttgagctattgaatcttggcgccgccgaaaattgccagccaggagatcagggcaccgaggactatgtgatgggcaaatgcctgagcctattgcaagtccaagcgggagactccagagatctgctcggacgacagcggttcttctccctgtcgctggaacactttctcattccgaatcgcgatgatgagggcttctggctgcaggagtatctctaccaaacaactggaacggtgagtataaagcgatttctaagtaatcatagaagagatatgtatctgtactttactttcagggattggaatgctgttccacctattcaatttccatacacaacgtctctccgtacgaaatgcattttctggaaacgattttgtataaaaggcgaccatatggacttctagctggacatgctcctccaagaagattaagcaaaaatcgtctaaggaaacagcagtataatttatgattatatataatatagtattttaaatatacatgcatttatactacataacaaatgaaagcttattgctagatggcatctactaaacataattcttaagtttcaggagcagttttagactcatttacgatatcttggttttactctttggcatagtctgttgcagtcaatccgaaatgaatgtattaaagtgccaatattattttttaaacttggaagtggtcttggttctgtaatttggtgtagtgacgttttttcttggcatcattttaatgagagcaatatggccgttttcctcttttgtggtctgtaaattaatcgacattggcctagaactggctttcttttttggcagtggaccaagttctctgtttatgccaaaaattcgtagcttgtagatgatatattcgagcacgtagaactcctgtgcgttgttgtagtgaaacgagatggccgtatttgagcagcagtcactggagttctaatacaaaggtgaataagtgtttaaataattcagtaactcatatttgtgagattccttacatctggggatgtgtagtagagtagtggctggtaccaatccggtggctggggataccagtgaagtggggagaaaggaatgaagcgacttaacccctgctcatcccgggaatcaccacccacgacgcccacaccggccagacatcgtcccagttccacatcctcgtagccataattgcgattggtgcaaatgctgctgttgctgaaacccagtttaatcagccgatggagggccattttactcagcacataaccagctcctccagacatgtatccctaaaaaaaaagattcataatttcttaagtggatttggagtttgaagcacactttttggcgactcgctgtaaatactggccttatgtagagaaaagaaaaaaatctaaactaaatatgactataactataagatataaaatttttcgaattctatattatacctcttttacatgctggcggaacttgtttccaaaataaaccggttccctgaaattgtgggcgtgtagaaaggcgcgcaggttctccatgataaaatagctgaaagagataataaaaatatagtttatttataaaaattaaaaagtatatttcacttacgtgtcatcgtccgctttgaggaaccagtcgtacttctggaaatggtgcttatagacgtactgcagcgccgcccgggtcttgggccacaaattggagtagccctccctcacattgagcgccacggatcccagttccttgtccgccttggtgctcatgaagatcagcttgttgcagcgccttccccaggtgcgtttgatgtgaatggcgcgggtgtggtgcgtctttggactggtcagcaccatgcacaggacacgcgtctcgttgaagagtcgcgcggccaggatgtccggcggtggattcgtggtcgaaggagcaatggtgggtggggtgcgtaggttcctgctccgctggctgctcggaaagggactgctctcctccttcagccgatccgcatgattctgccagcgagttcgtttcatcagctcggacagaagtattccccatgccagaccgatcagcaacattagcatcagctccaaacgttttcgattcggtcgtactcccatcattctgatgctcctcttgaggctttacggagaaaatacacttatcagtatatgataatatacacttatatatgacaatatgataagcaatttgataagctatcgaagtatctataagatattcacttgatacaggacagtaaggttttaggttttaagttgctaaatgaatctaataaacaacctaataaacaatctatatatcaataaaggctatataaatattttcaaaaatatttaacactcttttctcggcgttattcatagtattcactttcatagcttaaagattgatgtatggactgttggattcgcttcgattttatctctgcttattttctcttatttttacgatccgcgtttgtttacttttttatgcaaattttgctgctgcgaccgaccgaccagttgtcgttgatattgtttttgaatcaccgaattaacacattcttgagccagtgacgcagagtcgaaagcctgtaaagatgcggtcgaccttcgggaaaacactcagttggctttctgctcaggtgtgttgtgctgtcggccgattggagttggctcaattggcccgagttcaattcgatccgcaattgctgagctgcaaatggcaagtgacgctttttccagccgtttcgaacacatttgggccgtttcgaatcgttggcttcaattatgcgacggatacttggagttcctcactcttttacctcggcgcactggcacagaatatcaatcacaagccctcagcggaacggcgataaaaataaacgcggctcgaacgcgactcgatgcccccaaaaaaagcaaaaaataaacaaagagccaaggcaatacggataaaaagcaactcgaaaacaaacagctaacaacgtcttcacgctttgccggcagttgacagactcggcttaaatccaactcgaaaatgttgctggtgaaataccttaacgcttctcccgttgccatgttgccagatatttaacgaccgtacaatacaata

SEQ ID NO: 5441 - DNA, 1158 bp, DROSOPHILA
atgggagtacgaccgaatcgaaaacgtttggagctgatgctaatgttgctgatcggtctggcatggggaatacttctgtccgagctgatgaaacgaactcgctggcagaatcatgcggatcggctgaaggaggagagcagtccctttccgagcagccagcggagcaggaacctacgcaccccacccaccattgctccttcgaccacgaatccaccgccggacatcctggccgcgcgactcttcaacgagacgcgtgtcctgtgcatggtgctgaccagtccaaagacgcaccacacccgcgccattcacatcaaacgcacctggggaaggcgctgcaacaagctgatcttcatgagcaccaaggcggacaaggaactgggatccgtggcgctcaatgtgagggagggctactccaatttgtggcccaagacccgggcggcgctgcagtacgtctataagcaccatttccagaagtacgactggttcctcaaagcggacgatgacacctattttatcatggagaacctgcgcgcctttctacacgcccacaatttcagggaaccggtttattttggaaacaagttccgccagcatgtaaaagagggatacatgtctggaggagctggttatgtgctgagtaaaatggccctccatcggctgattaaactgggtttcagcaacagcagcatttgcaccaatcgcaattatggctacgaggatgtggaactgggacgatgtctggccggtgtgggcgtcgtgggtggtgattcccgggatgagcaggggttaagtcgcttcattcctttctccccacttcactggtatccccagccaccggattggtaccagccactactctactacacatccccagataactccagtgactgctgctcaaatacggccatctcgtttcactacaacaacgcacaggagttctacgtgctcgaatatatcatctacaagctacgaatttttggcataaacagagaacttggtccactgccaaaaaagaaagccagttctaggccaatgtcgattaatttacagaccacaaaagaggaaaacggccatattgctctcattaaaatgatgccaagaaaaaacgtcactacaccaaattacagaaccaagaccacttccaagtttaaaaaataa

SEQ ID NO: 5442 - protein, 385 aa, DROSOPHILA
MGVRPNRKRLELMLMLLIGLAWGILLSELMKRTRWQNHADRLKEESSPFPSSQRSRNLRTPPTIAPSTTNPPPDILAARLFNETRVLCMVLTSPKTHHTRAIHIKRTWGRRCNKLIFMSTKADKELGSVALNVREGYSNLWPKTRAALQYVYKHHFQKYDWFLKADDDTYFIMENLRAFLHAHNFREPVYFGNKFRQHVKEGYMSGGAGYVLSKMALHRLIKLGFSNSSICTNRNYGYEDVELGRCLAGVGVVGGDSRDEQGLSRFIPFSPLHWYPQPPDWYQPLLYYTSPDNSSDCCSNTAISFHYNNAQEFYVLEYIIYKLRIFGINRELGPLPKKKASSRPMSINLQTTKEENGHIALIKMMPRKNVTTPNYRTKTTSKFKK

SEQ ID NO: 5443 - DNA, 3227 bp, DROSOPHILA
gcaccagcaaaagtacacctccatctgtgattatctccaggaacgcatacggactatggtggcgcgcagcgccaaggcaatggccacgtccggagtgtcgtccacggtcaagacgatgtcggcgtaaggggatatcgcagttgggagacgacgactccaaagtacctttatgcacaataccctaatgttccaaaaacgcaagaggatggagatgcgagtgtttggcaatagaatggggggattcaccaccatttggagtcgaattggaagccaggttaatgctggtttggctatattcgaagtaccctgacttgaattgctcagtgaggcactcacttccgcacaaaaattaaccaaaagatggaaaaaccactagtaagaacacgtccaaaatcaacttaatggcctaacccaaggaaaccaaactatttattagataagccgtatcattcatattaaaaccacttggagcttgtattttgaatttaacactaaccataacaataacactaacgttaaagataacaattactataaaaatgttaacatggacccggaaagagatcgttacactgtcccctgtacataaccatatatatatacatatatatatatatactataacttaaatatatacctatatttaaataaacctaatgctacttatagacctactctaccctaagcaattgttgacgagtgctttaagtttaaacgcctttttgtctttaaattagaaattagttaacaccgatggttttccgcttgtttctttgtaaattaggtacgataattaattaatttcttactttattaacacttaagtatagtccaccattttgcaagtttaataaattgacacacgattacagatgagttttatttccaacaatgattcggtgatatcaatttaaaaattcctttatcttttaattttgaagctgaagcgtaaaccgctttttgttaacaagtgttagtcacttggttgtttaaaacctggctaaaaagctttcgattttagcgcatctttttcagttggtataactattggaattaccaatttacaacttgaatttagtttttttataaagttcaaaaagaagcttaaagtgtagattaattttctaatattcatagtcagctggaacgtcttgatcagaaccaattcgtggtgctccttgatccttttcggcggcgggattatatttaggtggaagcgattctacaatctgttttcgtccaaaagtccttaatctatagatcatatactcgaaacagtggatatagcgatgttgaacgtagtgaaacgataccgcatagttggaccaagcgaaaattccctgggatgaaagcaaatattataagaaattataatgtataatatcttaagactacatacatcttgcgttctgtaggcgaggaacttccaaaaccagatgttcgaatcatagtgcagaaacagatttgatctggcctgcggttcgatgagatacatgcgcctacgtccctcagaatcgtaagtattgcccgccagcacattcacattttcgaggcactccctcagcttttctgcggtgggacccgcattcttttgctcgcatttggagggattgggcagggatagctcaaccaagcgacgcagtgcagcacgactcatcacagtgccgggtgagccgaaatagatggccagctgtggactgtagggatagaccatgtatctcaggttctccatcaccacgtacgtctcgtcgtcagcctctaggaaccaatcggcatcgtttaggtgatgatcatgaaggtacttcaaggccatcttcgtttttagccacgactcccggaagtaggggcttacgggcagttccacagatccagttagattgagatcagagcggctgctaaagaagatcagcttgttgcaccgcctgccccaagtttccaaaacggcttgggcctgagtcttgtgattaatgggtttggtgtacacatagcacaggactcgcacctcatcggtcaaatcgatgtccagtgaagtcgatgcacccgtgcgattcgtgtgcgatttgagatccataattggccatacaagaaccttggtgatcagatagccaattccgatgcccaggagcaggaaaagtactggacgagctgttgatggcgacgttgtattcggctgggaatgattgctccgatcaagaaaaacacactccttcctttccattttcgccattactgcgctcgttctctaagtccataaattatatatatatttttcatcgtcacaccttttcgttacgccgagatattaaaaatgctcactaagtcatctctcttatagagatatcactttatatatacatacatgatgtacaaatatatactatatgatctataccaatttaaattgattaatgggtattattggatgtgaggaaatttcaaacaaatggtgacgtatttctagtcattttgactgattttataggtttcatcgataggacgttatatatgttaataatttctaaaaaaaaagaaattcccggattaatcagtatatactctaaatattttatttcattagtcttttgtgcttcagcttatcgctatgaaacgcacagatttcaattaccagaacagtctaggaatctgttcgattgggagaagatgtcgcggttgtgcacttctttggtcatcattttgggtctcatcctctcgagcggtggcactcacatatgcctgagctccaatctgtgtgttcccagggaaaattgtcgtgaagagatgccgttcttcgactttagttccaccattgagtgctccgacgaagaagtgtgctgtgaaaagtcaaatgtggtaggtttatatatttatttacatacatatttctaccaaccgtattaacgagctttattctgtttcaaagataggcatgagtaagagtcctccacaacattcagtggacacacttcttaggacaagttatccaaatgccctggatggaagccctcaggtgtttggtgaccaaaccaaaccgaatcaatttccctgggtgacggctttgttcgccaagggatcttatctgggaggaggatctctgattaccccaggacttgtactaaccgctgcccacatcctagcgggattatcccccaatgacatcatggttagagctggcgaatgggatctatcctccagtgagaaactaaatccaccgatggatcgtcaagtga

SEQ ID NO: 5444 - DNA, 1168 bp, DROSOPHILA
atggcgaaaatggaaaggaaggagtgtgtttttcttgatcggagcaatcattcccagccgaatacaacgtcgccatcaacagctcgtccagtacttttcctgctcctgggcatcggaattggctatctgatcaccaaggttcttgtatggccaattatggatctcaaatcgcacacgaatcgcacgggtgcatcgacttcactggacatcgatttgaccgatgaggtgcgagtcctgtgctatgtgtacaccaaacccattaatcacaagactcaggcccaagccgttttggaaacttggggcaggcggtgcaacaagctgatcttctttagcagccgctctgatctcaatctaactggatctgtggaactgcccgtaagcccctacttccgggagtcgtggctaaaaacgaagatggccttgaagtaccttcatgatcatcacctaaacgatgccgattggttcctagaggctgacgacgagacgtacgtggtgatggagaacctgagatacatggtctatccctacagtccacagctggccatctatttcggctcacccggcactgtgatgagtcgtgctgcactgcgtcgcttggttgagctatccctgcccaatccctccaaatgcgagcaaaagaatgcgggtcccaccgcagaaaagctgagggagtgcctcgaaaatgtgaatgtgctggcgggcaatacttacgattctgagggacgtaggcgcatgtatctcatcgaaccgcaggccagatcaaatctgtttctgcactatgattcgaacatctggttttggaagttcctcgcctacagaacgcaagatggaattttcgcttggtccaactatgcggtatcgtttcactacgttcaacatcgctatatccactgtttcgagtatatgatctatagattaaggacttttggacgaaaacagattgtagaatcgcttccacctaaatataatcccgccgccgaaaaggatcaaggagcaccacgaattggttctgatcaagacgttccagctgactatgaatattagaaaattaatctacactttaagcttctttttgaactttataaaaaaactaaattcaagttgtaaattggtaattccaatagttataccaactgaaaaagatgcgctaaaatcgaaagctttttag

SEQ ID NO: 5445 - protein, 344 aa, DROSOPHILA
MERKECVFLDRSNHSQPNTTSPSTARPVLFLLLGIGIGYLITKVLVWPIMDLKSHTNRTGASTSLDIDLTDEVRVLCYVYTKPINHKTQAQAVLETWGRRCNKLIFFSSRSDLNLTGSVELPVSPYFRESWLKTKMALKYLHDHHLNDADWFLEADDETYVVMENLRYMVYPYSPQLAIYFGSPGTVMSRAALRRLVELSLPNPSKCEQKNAGPTAEKLRECLENVNVLAGNTYDSEGRRRMYLIEPQARSNLFLHYDSNIWFWKFLAYRTQDGIFAWSNYAVSFHYVQHRYIHCFEYMIYRLRTFGRKQIVESLPPKYNPAAEKDQGAPRIGSDQDVPADYEY

SEQ ID NO: 5446 - DNA, 4122 bp, DROSOPHILA
ctgctcccgcaatcccaagtgcccggagccctgctgcggtccttgtggcccctgtggtccctgcggcccctgcccaccacctcccagctgcggctcgtgcccaccgcctcctagctgtggcccaccatgtcctccaccctgcgacccctgcgatccgtgcgatccctgcagtccctgctgtggcggcggaactgccaccggcgggcccatggataagaagggctgcaagggctcgtgtgcccagcctccttgtcgtcgctgtacaatggtggatccttgtgccaagcgagttgagcctccggcaaagtgcctcaggtactactcgtgcaatctggacaagctctgtccctgtgactactgcgaggacgagttcgatagaggtgactataatctatcatcagcatatataaatgcttccttttaatgatgtaatgtatatacttcttcccagaatgccccactgttcccacaaagcgttgcaatctctcgccgatcgaacaaaagctgcagaaatgcggtccctgcggcggaattccaccgtacccacgcttcatccaggagaagatgcaggccgagctcttgaacaaaccggaaaaggatcccaagaaggacaaggatggcaaaaagggtggcaaggatggaaaggacgcaaaggatggaaagggtggcaaggacgacaagggcaagaagaagcgtcaggctggaggtgctgtttgccgcgtaggagacgagaatagtccgtccgccgtctacgaagactgcgatcctgtctgcgcaggagtcctccaggcgaccaagaaaattcggtacaaggagcccactgtcaggtgcaacggacgggaggaggagtacgaaatggcctgtgatgaaggtgagctcatatatgtatgtatttagaaaacgatttcaactgggatttcgagaatgccaagtaggcttcgaaatgaacaacaacacaaacgtctcgtaactccagcgaaacatttagtaacatctagtagtcggggtgtagaagatcactcgtttagcatttgttttatacattcgaacgggaaatgttgtctgccgcacaaaatacagaaaaataaaatctttcgttgttgttacccgagttttggatggaaattaaaacagagaatcagtacgtccgaactattttttttcctatcaagttaaaaaattttcgaagcgatccactaacccaaattcaattttcatttcagcgcgaaaacgagctgtgcggaaattgcgccacttactggtgaagtacaatatccaaattgagaattgaaggctttcggaattgagatttcagcttgagcctagtgaataattgtattgacttacacactcaatcactcaaccgcacaacatggccaagaagaggggaagaaagggcaagaagggcaagaagccaaaggtcgactgcaagttcaagatcaccaatgagatgctcaagcccatgaacgagagtaagtacacgcggatccctgcaccgaagctcgggcttaaggatgattcatcccttccaattggtatcctcagatgtggacgactgtgatggctgctgtcagtgcgcctgcgattgcgactgcagtccggagttggctccctgcttcatccagccgaccaagccggatccgggtccggaggcgtacgacgagttcgaggcctgcctcaatggcagcggtctgaccatacgcgtactcaagaacacccacaaggtggagagcgtgatggatggcagcgagactgcgcccaatctgggcgcaggcgatgatccctgctatcgcgatgaccccaatgactgcgagcccgcaaaggagtcctgcctgcacgatatgctccagcgcagctccttcgctcgcaaccacatcaagcgccggaccggcggccgcatcatcaaccacccgaacatccccaaggtgcgagccaatatcaagtactctgggaacgatgcctgcgagaccgacaactactacgtgcccttctcgaagatcaaggaggcctgcgacttccaggaggccaaggtcgactgctaccgccagcgactctgcggcggatccgatcccatcgtgcccgcgcactgtcccgtccagaaccagcgatcatgttgcatgcaggtcgagcggaaggacatcatggacaccatgaagggtgtcaatttggacacaaggcgcaagggtatcgaggtgagtccatcctatattcatttgcgcagcactgagtggcctaaggaaatccatatttcaagaatgttcgatcttaaatcattaaccacaatcgccgatcgcctccgcattccattttttaagttcgccagttacgtgtgcggatgcggaatgtggatcgattggtagtccgtgactttgcccccctaaacgttgttgcaggtggtgcaactatgccacttctgccacttcgggaaggctttcgattgcctcaattgtggggcagttgcgtaacatctgccagctccaagtgtggagcactcttttcagtttgcggtggcaatccgctacagcttttttatttatggtaatttctgcgaaagatgcaacgcgttgcattgagactattttggttagctgttgcatagtatctaaaaagatttgtcgcttttcttatttttcaggtttgctacaagacctgcgaggagaccgacagcgacgtgttcctagtaaaactgggaagtaaggccaagtcgcagcacaagaagaataccatcgagatcgagctgcggacgcccaagcagcccgtaacccttccgatcagcaaggtgaccacggagacctatgtttccgaggagatgctaaccggtggcaagaaggggaagaagggcaagaagggcaagggcaagaagggcaagggcaagaagaagaagtagaccaagagatccgtaggcggatcccattcccatcgaccggacttgacgcttaccctttcggaacacatcctttggcattttggaagcgactctttgaaaattcacagcagcaattattgaaatttggctctggtactaacccattcatattaacccgtccagtaagatgcacgaacactcactttttcgactagttacgtaaatgtatgcttttgattgaattaaaattaagaaaaaaaaaaacaataattctagtcccatttatgattagttgatctgatccctcactgattgatctgatgtagataccctaacccgcagtaatctgcttgcaagtgtatatgcccatcttcattaagggcacttaactgcccagtcaaggccgcggaggtgtttcatctgcaattgaggcgggtctaaaaatagccgacaaaaccaattcgcgatgcagaactctgatgccgatccgatccgatccgaccatcttcatctattgcacacctgtaattaaaagccagaaatcttcgcgggagggagcatcgaggaggaggaaaagccgccgttggatgcagcggcagcttagcggtttggtcactttgcagtgactatactatacggagagggagagatccgagagaccagagatcgcagatcgggccagctgaccgatccgatcggtggctcggagaggagtcgagcgaggaactcgttttagtcgcgttcaaacgctttagtctgtaagttaacacggcgagtgcgaacgcaggaaagagtcgagaaatcgtgaagcagtgccccagcctagatgttaaccattcagcggatcggccccgaatgtgagcaacttctgagatcggtccacgacagaccacaaaaccagtgaggagagaccatccgctccagttcgctcgatccaattcaatttctgcctctcgccgcgaaagcggaaagaaagtgaattgagtggagtagatttgggcgattacttaatccgcgttcgcctccacgaccaggcatcggacgaacaccgggctcccagtccgaattcgagggcgcaaattaatggccctcgtttagagactcaacccgccccatccagcgttgacagttgggcggagaaaagcatagtatttgaatattaaaaactaaatccgagagataccacaacatttccccaaaactttgataatttagaaagcgaagctgcataccaaataggcccccgatctagagac

SEQ ID NO: 5447 - DNA, 1524 bp, DROSOPHILA
gtcggggtgtagaagatcactcgtttagcatttgttttatacattcgaacgggaaatgttgtctgccgcacaaaatacagaaaaataaaatctttcgttgttgttacccgagttttggatggaaattaaaacagagaatcacgcgaaaacgagctgtgcggaaattgcgccacttactggtgaagtacaatatccaaattgagaattgaaggctttcggaattgagatttcagcttgagcctagtgaataattgtattgacttacacactcaatcactcaaccgcacaacatggccaagaagaggggaagaaagggcaagaagggcaagaagccaaaggtcgactgcaagttcaagatcaccaatgagatgctcaagcccatgaacgagaatgtggacgactgtgatggctgctgtcagtgcgcctgcgattgcgactgcagtccggagttggctccctgcttcatccagccgaccaagccggatccgggtccggaggcgtacgacgagttcgaggcctgcctcaatggcagcggtctgaccatacgcgtactcaagaacacccacaaggtggagagcgtgatggatggcagcgagactgcgcccaatctgggcgcaggcgatgatccctgctatcgcgatgaccccaatgactgcgagcccgcaaaggagtcctgcctgcacgatatgctccagcgcagctccttcgctcgcaaccacatcaagcgccggaccggcggccgcatcatcaaccacccgaacatccccaaggtgcgagccaatatcaagtactctgggaacgatgcctgcgagaccgacaactactacgtgcccttctcgaagatcaaggaggcctgcgacttccaggaggccaaggtcgactgctaccgccagcgactctgcggcggatccgatcccatcgtgcccgcgcactgtcccgtccagaaccagcgatcatgttgcatgcaggtcgagcggaaggacatcatggacaccatgaagggtgtcaatttggacacaaggcgcaagggtatcgaggtttgctacaagacctgcgaggagaccgacagcgacgtgttcctagtaaaactgggaagtaaggccaagtcgcagcacaagaagaataccatcgagatcgagctgcggacgcccaagcagcccgtaacccttccgatcagcaaggtgaccacggagacctatgtttccgaggagatgctaaccggtggcaagaaggggaagaagggcaagaagggcaagggcaagaagggcaagggcaagaagaagaagtagaccaagagatccgtaggcggatcccattcccatcgaccggacttgacgcttaccctttcggaacacatcctttggcattttggaagcgactctttgaaaattcacagcagcaattattgaaatttggctctggtactaacccattcatattaacccgtccagtaagatgcacgaacactcactttttcgactagttacgtaaatgtatgcttttgattgaattaaaattaagaaa

SEQ ID NO: 5448 - protein, 332 aa, DROSOPHILA
MAKKRGRKGKKGKKPKVDCKFKITNEMLKPMNENVDDCDGCCQCACDCDCSPELAPCFIQPTKPDPGPEAYDEFEACLNGSGLTIRVLKNTHKVESVMDGSETAPNLGAGDDPCYRDDPNDCEPAKESCLHDMLQRSSFARNHIKRRTGGRIINHPNIPKVRANIKYSGNDACETDNYYVPFSKIKEACDFQEAKVDCYRQRLCGGSDPIVPAHCPVQNQRSCCMQVERKDIMDTMKGVNLDTRRKGIEVCYKTCEETDSDVFLVKLGSKAKSQHKKNTIEIELRTPKQPVTLPISKVTTETYVSEEMLTGGKKGKKGKKGKGKKGKGKKKK

SEQ ID NO: 5449 - DNA, 3775 bp, DROSOPHILA
catgttgttgaatggggtttacgaactttaaaaacaccattaacaaaatacttatattccttaatctttagttttatgcagaaatatataaagagcgtctaacaaatccttgctaaactataaatttgcacaacaaaaatccccctgagcaagggaaatatttaaaacgcacatcctctgtaagcctcgaaaacccttttcgaacttcctgcaaatttggccagagtccgcaaacagagacattttgcccacctggcattagatttccatttagcgctcgttccggcccagaaatgcaaccgcaaaaacaagaactatgaatggcagtttaagccaaattacacaaaggccaagagcaacaacaaagtcgtatagtggtggctgtttgaacggaagccatatgcagaaaattcggtaaaggcagcgcaccgaactggacccgcccctcgaaaagcagccatttcactcgctccttcgcagctaggccatatctgcagggtagataaaatccacaaggcgcgcgcaaagaagacggccatactacaccgagcacagtgcctcccgctctggcccgataaactggtttggcctgtactggcgaagagagaagactcgccgcagctcagctctcttcgagtagcgcacacttggtggtgttgccgggcttaccggatttattcagacatcgaacgtcgtcgagagcacacgtctatattctccgtcttccgacacaaaaaataagaaaaacgagcgcgtcgatcgccgtagagcacaagtcttgacaacccgagtgtgtgtgtgattaataaagtaactaaacgtatatatgaaagcgtttccaatgcgtcgcttagtgtgagaaaatcaacgaaacatagagagttacaaataaggacttcccagaggattagacaaacagaacagattagattaaacagaaaaccgtgcttaaaccctcgaaaaaaaagccgccaacatagccgaactaaccgccgtatttatgactaagatgattccgccggttcccaccgccgctgcagccgtcatgatgcccacaccaaagcagaagatcggtttcagcatcgagtccattgtgggcaatgatgtcagcaccgccggcggcaattcgacgcccgatctatccggtccccagagtccgccgcccggcgagcgcaatgtgcccggttcgccgccccaaacgccaccagccacactcaccttgatcccaggctcgcccccgcaccatctgatggctcctcctgcccacggactgccctatccgcatccgcatgctcagcagcagcatttgcaggcaccacatccgcatccgcatctatcgcctgcgcagcaacatgtgctccaccagcacctcctcatgcagcagcaacatccgggcacacccaagagccaccaggacattcaggagctgctgcagaggctgcaccacaatgccgccatggccagcggcctgagtccgctgcagacacgcctctcccccgaaacggagcagccccagatggccgtctccctcaagcgggaacgctcacctgcaccacctgccatggagcaggccgagaatcccgcccagcgcatccagccaccgcacacgcctcccaaatccgtgagcccccagtcctcgcagccctcgtcttcgcccactctgctgatcagcagtccacatgccacaccgccacagcagcaacagcagcagccgcccccgaattatccaaagcccgccatgatgcatcccggaggagctggacccatgatgatgccgggcatgccgcccgctggactcgttcgcccctttcccatgggacccggaggaccaccgatgccgcagggtcagcccggcttgccggacatcaaggcgctgccgccctacatcaacgctccgccggagctgccgcctcagcacaatccgcatctcattgccgctgcccagttccagatggccgccgccctgcaagcgggtcatgtgcttggtccagcggccgccgccgctgctgccgccggcctgccgccccatgccgcccagtttatgcccaatccaggcatggccagggatagctatcagctgtacccctggctgctcagccgccatggaaggatcttcccacaccgattccctggaagtaagtatcttttggaatgattctttatatgcgaaacaaaaaaaggagatttagggaaaaaaatagttcttggagtccaaattgaagccaaaaaatgagaaatttctttaaagtaataattctaaaccttcataaatgtaataagaaatgaaagatgctaatatgttttaaattagttttgatgagtctcttataattgcattatattgtcattgctaatttattgctgtgagttatgatcttaaataccgatgactaaccgaaaccctttcttctttgcctctttcaaggtttcctggtgcccccgttccgcaaaccgaaacgcatccgcaccgccttctcgccgtcgcagctgctgaagctggagcacgcctttgagagcaaccagtacgtagtgggggcagagagaaaggccctggcccaaaacctcaatctgtccgagacgcaggtgaaggtgtggttccagaaccgacgcaccaagcacaagcggatgcagcaggaggatgagaagggcggcgagggaggatcgcagcggaatatgcacaacggcagcggcgacgaggacgacgacgaactgatcgacatggagatggacgagtgtcccagcgatgaggagcacgagctggacgccagccactgagagaagcggccaggagatagtcctgcggcggtccgtgagttccttatcctggcgaatgcagtccagttccagttatcgagggttcccagtcgaatctcggcgagagtaacatagtttgttttgttgtgatatattcttagagcgatcccaaggcgttaggctaagtgtatatagataggaaagtattagagaccctttctctccatccacacttctctctcaagatccgtgccaaatccttgcgaagtttcgaggttgagtagagctcaaagaatgcaagttgtttcctttctttcccaaatatcaaatgcaaaaaaagaaacactgaaaaaataaacctaggctagacaccaccaactataactgtacaaattttatgacttaagcctgtaaatattcatgacattacttttaattagtgaattcttcaaaacaaatcgtactcgatccactagctattgtataattcttgtatattgtatgacgatctagcatttatttatgtttagtcttaagcacgaacctctagagtccctcaactgcagctggatattatttaaagccgtctaatataaagccctagttgctagtaactacatcctaagctaatacgattgtaagaaacacaaacgaatatgatcatataaaatataaaatattcattatgaaaagaaatcgaaagagaaatgtttgattgatttatgtgttgggggcaaccacttattatccagaatactagataatttatttataatttaaacaatattggtatgttttgagttatgggtgtgaactttaacttctcattcagctttattactttccttcaacaatattttactttagtttattttttcttgtttaagccttggcatctccgcccctttttaattgagttcgtcccactgtgtgacagagtaaaaaattatgcgccgtcaattaattagcgtgtgacatttaacattgttgttgctgtttctgtccactggaaatggtgaca

SEQ ID NO: 5450 - DNA, 1485 bp, DROSOPHILA
atgactaagatgattccgccggttcccaccgccgctgcagccgtcatgatgcccacaccaaagcagaagatcggtttcagcatcgagtccattgtgggcaatgatgtcagcaccgccggcggcaattcgacgcccgatctatccggtccccagagtccgccgcccggcgagcgcaatgtgcccggttcgccgccccaaacgccaccagccacactcaccttgatcccaggctcgcccccgcaccatctgatggctcctcctgcccacggactgccctatccgcatccgcatgctcagcagcagcatttgcaggcaccacatccgcatccgcatctatcgcctgcgcagcaacatgtgctccaccagcacctcctcatgcagcagcaacatccgggcacacccaagagccaccaggacattcaggagctgctgcagaggctgcaccacaatgccgccatggccagcggcctgagtccgctgcagacacgcctctcccccgaaacggagcagccccagatggccgtctccctcaagcgggaacgctcacctgcaccacctgccatggagcaggccgagaatcccgcccagcgcatccagccaccgcacacgcctcccaaatccgtgagcccccagtcctcgcagccctcgtcttcgcccactctgctgatcagcagtccacatgccacaccgccacagcagcaacagcagcagccgcccccgaattatccaaagcccgccatgatgcatcccggaggagctggacccatgatgatgccgggcatgccgcccgctggactcgttcgcccctttcccatgggacccggaggaccaccgatgccgcagggtcagcccggcttgccggacatcaaggcgctgccgccctacatcaacgctccgccggagctgccgcctcagcacaatccgcatctcattgccgctgcccagttccagatggccgccgccctgcaagcgggtcatgtgcttggtccagcggccgccgccgctgctgccgccggcctgccgccccatgccgcccagtttatgcccaatccaggcatggccagggatagctatcagctgtacccctggctgctcagccgccatggaaggatcttcccacaccgattccctggaagtttcctggtgcccccgttccgcaaaccgaaacgcatccgcaccgccttctcgccgtcgcagctgctgaagctggagcacgcctttgagagcaaccagtacgtagtgggggcagagagaaaggccctggcccaaaacctcaatctgtccgagacgcaggtgaaggtgtggttccagaaccgacgcaccaagcacaagcggatgcagcaggaggatgagaagggcggcgagggaggatcgcagcggaatatgcacaacggcagcggcgacgaggacgacgacgaactgatcgacatggagatggacgagtgtcccagcgatgaggagcacgagctggacgccagccactga

SEQ ID NO: 5451 - protein, 494 aa, DROSOPHILA
MTKMIPPVPTAAAAVMMPTPKQKIGFSIESIVGNDVSTAGGNSTPDLSGPQSPPPGERNVPGSPPQTPPATLTLIPGSPPHHLMAPPAHGLPYPHPHAQQQHLQAPHPHPHLSPAQQHVLHQHLLMQQQHPGTPKSHQDIQELLQRLHHNAAMASGLSPLQTRLSPETEQPQMAVSLKRERSPAPPAMEQAENPAQRIQPPHTPPKSVSPQSSQPSSSPTLLISSPHATPPQQQQQQPPPNYPKPAMMHPGGAGPMMMPGMPPAGLVRPFPMGPGGPPMPQGQPGLPDIKALPPYINAPPELPPQHNPHLIAAAQFQMAAALQAGHVLGPAAAAAAAAGLPPHAAQFMPNPGMARDSYQLYPWLLSRHGRIFPHRFPGSFLVPPFRKPKRIRTAFSPSQLLKLEHAFESNQYVVGAERKALAQNLNLSETQVKVWFQNRRTKHKRMQQEDEKGGEGGSQRNMHNGSGDEDDDELIDMEMDECPSDEEHELDASH

SEQ ID NO: 5452 - DNA, 2980 bp, DROSOPHILA
ctgggatacccgtggcacgtcgttgggatcctggaacctgtcttccagcccggacttgaccatgtaccatcccatcagaccttgcaggccaatcagtgtgcccagcagcaggacgctcttcttggtcttcgcacagaagtatccctttctccagaagtaaacagcgggcaaaaggaagaacccgccgatggcacgaccccacatcctgtgcatgtactccatcatgaaaatgaacttgaactcctccacggtcatattcacattctttctgaaagcagaagtttgcatgtagttcctggcgttggatgaatctggggagtactcacagcttgtactctgggtattgctggtagagattgaactcctgcacccattcctcctgggttcggggcatacgttcacccgtcagcttccaagtgaccatggacagtccggactctgtcagtcgggttactccgcctggaagagattcactttcgcaaggaactacaaactttacattttgttattggttacctagaccaacggccacgaagaccatgccgctgactcccaggaaccatcttccgacggtcttgtcgcttttcggagtgctgatgggctttatcactgggatttcctgaaaggtgcggcattaacaaatattactttataaataaaaacatatttttatatgtaatcagtgggatattaatgcaacctttatcgctgtttgcgcaatcgtctggtgaagtcgggggccgggtactactagctttatgagattggttctcttctggagcaatcgcagcattgtgttatttcaagtttggagagattaacttaagcttacagcaaatattaaaggatatattttgttttttaactatatttacaaagccgctaccaagtgtgaccgcagcagtggggtatgcgcatatactaaaatcattttgaaaagtaccggcgaatgttatcgactcgatagcctggccacattatatcagttttgttaataaaaacaacttttgcggcttctgatttacaatttcgccaaataaaatggaaacaatattgaacacgcagttcgatcagctgcaaaaggccatagagggaattaaggaggcgaagagcaaggtaagtccgatttccgtgccagagtacagctctaaatccgtccacatccgtcacgagcaggggcaatcgacggatgaggctcgcattgccaccaccttgatgttcgtggctctgaagcacgccaaccgcgaggtgaagcacaagatcaaagcggggcgcgacaagctgcacctggaaaagtgcaaggtggacctcagccggctgcagctgcagaatcttctgtacgaagtgagccacctgaagaaggagattgtgcgctgccagaagttcaagagcagggacaccagcttggagctgctctcggaagccgagtactccagcgagctgccagacatgcccaacgacgcggaggagctgtccagccacaagcagcaccttcatcgcctcgactgcgagctgcgtctgcggaaggcactcgacaagcagtacagcgccctgctgagctccaagcaggaactgctccaggacaatcttagccacgcccagcggtacgtctccttcgcacccgccttgcgcactctgcagagcgccacaaagccgctgcacgatgcactccagctatccctggacgtggaatggaagctaagcgcagtggtcaagtacctgcccaagccgctctacgttttgttcattgtcctgcaatcgctgcagcgggtcagcgaggagcagtccttcaccgccgaggtggttggctatgagagcgaggctcaaatgcaggagttgcttaaggagaaaaagtgctccacattgaactacagacagactaaaaaggaaagtggagaccgggaaaagattgccgataaaaacaacttggacgactcactcgctcctcacccactacacatttgtttgacggtaggatgacatggtttgctcattccaaaacatttattaacctaaactttaaagattggagcggctggatcgaatcagctcgttttgcagattcgctactttgattttatcaagtgtgccactgtctggggccaacttaactgctccaggaatgccaacggccaggggtaagtttggaacacacctaggaaaaaatcgcataaataactaggcattttttcacagtgacacaaactttgttcaccacctattgcggcatttgtaccccaatgacttgggcaatgaattacccattccgggaatccaatacgaggtaagaacttccttatccaacgttggacaaccaattaaattacgctctttcagctacgaagctcggatttaacagccgaggaatgtgtgcgctacctcaaggccaaggactacggaaaacccttctgttggctgcaaagtatgtgctcgattgcaaccgtcaacagttcgatgctgtacaaacacgaactgaacttgaataagaacaacaaggagattattgaccgcattgccaggcgcttgaactcttggcagcgtttaagccagcagattcgcgggctgaccttcaaggatatcgatttgtatagcttgcaggagaacatctatccagccggcctgtcgtgcagtctcgtccaatggactgccatcacacatgaggagcttcactcgcaaatttcagacgcactgaattcttcgtcagcggacaagggtattacgtacaactcttaccgcgctgtcatcgtccggggatcggccaaaatggagtgctttattagaataccgagtaactatccactggaaatgcctctatggattctgaatgtgcactggaacggatgccttaccgcgcaaaacaattcggcgatcaaggtttgaacttattcaggtattatcctccaattagcttttaaacttgtattcctcagatgatggagttctggaccaactccctgcagcccaaacatttggagcccaa

SEQ ID NO: 5453 - DNA, 920 bp, DROSOPHILA
acaacttttgcggcttctgatttacaatttcgccaaataaaatggaaacaatattgaacacgcagttcgatcagctgcaaaaggccatagagggaattaaggaggcgaagagcaaggggcaatcgacggatgaggctcgcattgccaccaccttgatgttcgtggctctgaagcacgccaaccgcgaggtgaagcacaagatcaaagcggggcgcgacaagctgcacctggaaaagtgcaaggtggacctcagccggctgcagctgcagaatcttctgtacgaagtgagccacctgaagaaggagattgtgcgctgccagaagttcaagagcagggacaccagcttggagctgctctcggaagccgagtactccagcgagctgccagacatgcccaacgacgcggaggagctgtccagccacaagcagcaccttcatcgcctcgactgcgagctgcgtctgcggaaggcactcgacaagcagtacagcgccctgctgagctccaagcaggaactgctccaggacaatcttagccacgcccagcggtacgtctccttcgcacccgccttgcgcactctgcagagcgccacaaagccgctgcacgatgcactccagctatccctggacgtggaatggaagctaagcgcagtggtcaagtacctgcccaagccgctctacgttttgttcattgtcctgcaatcgctgcagcgggtcagcgaggagcagtccttcaccgccgaggtggttggctatgagagcgaggctcaaatgcaggagttgcttaaggagaaaaagtgctccacattgaactacagacagactaaaaaggaaagtggagaccgggaaaagattgccgataaaaacaacttggacgactcactcgctcctcacccactacacatttgtttgacggtaggatga

SEQ ID NO: 5454 - protein, 292 aa, DROSOPHILA
METILNTQFDQLQKAIEGIKEAKSKGQSTDEARIATTLMFVALKHANREVKHKIKAGRDKLHLEKCKVDLSRLQLQNLLYEVSHLKKEIVRCQKFKSRDTSLELLSEAEYSSELPDMPNDAEELSSHKQHLHRLDCELRLRKALDKQYSALLSSKQELLQDNLSHAQRYVSFAPALRTLQSATKPLHDALQLSLDVEWKLSAVVKYLPKPLYVLFIVLQSLQRVSEEQSFTAEVVGYESEAQMQELLKEKKCSTLNYRQTKKESGDREKIADKNNLDDSLAPHPLHICLTVG

SEQ ID NO: 5455 - DNA, 8256 bp, DROSOPHILA
acattttttttttttaattttatataaaagaattactattgctggctagcggtgtttcgataaaaaaaacatattttttgtattgcaagtaattaaaactatttacaataataatgttaaagaaatccaagccatacattgtacattcgattaaattttgtatgatgcaacatagtttcaaaagaaatcgacatgtaactgacgagaatataaaagctgagacggataatgaaacatatctttaatgttataaattacaaccagtttgtttccaaattttttttcattgacatacttattgcgtcaagtaataaactaatttaaaataagcatatgtaaaataataatgatacaattagttttttttataaatgaaaacatttataattatatgtttgtcaaaaaatgcattataaaatgatataaacgtttgaaaatatacagtacccaaaataatatttgtattcttaataatctcgttagttatccgtaacttgtggtattcatatatatcgctataaacatacgactttagctatatgaatgtatttgaatgagatgtgcaataagaaaatcgttacctttttttaaacagcttattgtgaattcaattatgattatcataattcattatggagaccagacattgtttattaaacttattgcttttaaatgttagaacaaattttaattgccagagaaaacttacttataacaacttataataagtgtataaattacgaaaatcttaaaaataatgcactcaatacattcatcgattgcaaccccgtcctcgttgttatcgattggtgtgctgccagcattatacatcgcctatggagcgtggtgttttcgacctactttcacaacggtcacacgctttctatttgatttttttttcaacataatttttgttaaacaatttgccgtgaattttgttgtgtgtgtggatgtggacgtgctgacagccaaaaaaattaaaataaaaaaaaaagaaaagtgttcgcaagtcgagagcagaatcgaacggcaaaaaatgctggcgaacaacaaatcatcaaggtaaaactgcgcgccttggtcattaagtctttcatcgaggataaaagaccgatgtcttttaacgttattgctgtaagcaaaagcagaaatcacaatctactcataaatcctcgatttggtgcaaattaaaggaaattcatcggtttttggcggccagttgcaaacacaaaatactaaatacgctagatggagcacgcatacacgcaagctcgttggcgaacgtaaattacatacatcatatagatagtcgtcccgcttgcactgcccgtcacagcgagggctgcgagagcgagagcgggagagagaaaggcctgagtcgctttttcttcttgtactttatatattttttattgtttttttgtgttgtgttgcgttgtacgtgtgtgtgagagtgccaaatgtcaacggaaattacaacactgcgagacggagaagtctaaaaggcagaagaagaagaagcagcagcaggcagcataaacaaaactcgggggaaaaccacaaaaaataacagagggagaagcaggaagatgttgcccgccaataacaggagtagcaccagcacccataccaacacaaatgccaacacaatcaacgccactaccaataccaccaacagatgcctcatcaatacggccatcgaaaaaacggtagtccgtttgcgagagacggcagcgaatagcggtactttccaggactcagatgagtcgtccgtggaatttgatattattaactattatggggacgacggcggcacaacctccagcaccagctccagccacagcctccgttactcgccacggcggcagcagcagcggcaataacaacaataacagtgcatgccatccagcactggatgccagcagtgatgttgttgttgttgaaccggcagcggtaggagtcgcacaggaggaagaggaagagccggagcaaaggccagagaggatcagcatacccattcccgacctggcgttcaccgagatggaagcatatgccgaggatatagtcgtcgatatggaggggggatcaccagccaagcctttaaatccaaagaaacaacgtttaaactcagcaacaaccacaacaataaatcgctcgaggggcggcggagcggcacagagtcgattacgccggtcggcggccatcgttccaccgcgatcgattccagagagctgtgccagcagcagcaattccaattcgagcagcagttccaacagtaattccagttccagctccgctacaggaagtagcgcatccaccggcaatccgtcgccgtgctcctccctgggcgtcaatatgcgcgtaactggacaatgctgccagggaggccggaaatacatggaggatcagttctcggtggcctaccaggaatcaccgatcacccacgaactggaatacgcattttttggcatctacgacggacacggcggtcccgaggccgcgctcttcgccaaggagcaccttatgctcgagatcgtcaagcagaagcagttctggtctgatcaggatgaggatgtcctgcgggcaatacgcgagggatacatcgccacacatttcgccatgtggcgggaacaaggtgagcaagaaatagctgggaaactaagccatcttacagttgagacaacccaaagaaagcagttagttggcataaagattttaaatcatacgaaaaaaagagaatataatatacttgtatttgtatttgtttttgtgccttctctcatgcaatttcatatcaaaattgttgccaatgccaagcgaccgttagagatgcgcgaaaactgaattaactgccagttggcggcattcaaaccgcgtaagtccccgttgtcagggttgccgtttcgcaccacccccccacccacacaaaaaaaagttgcctcaagtttcgagctgctcccttgggtctcccatctctaggtaattatgcaaccgtgtgtggcgatgactcaaccatcgctcaattgctcatctctattgtcagcccacactaaaaagatacaagtacagcagcagatacagatacaaatgcacacacacacttagttatcgcgagtggaatattccacggacttgccatatggctgtactctcgccaagcatggcaaccccgctgtgagttagagcgggacgtccgtatggcggcgcggcccaccaaggcgtttcgaaatgcgagaacgaaagagatgcaacgagtgagagagcgagaggtggccaaagagaaaagaaaataaatgtgtgcccattttcctattcgcataacaaaaacaatgtacacagaaattcaagggatgccagaaacgcagatacacgtttgtaggtgtgtatctgtgtgggaaatatcaatatccgtcgtttcgatataccaatatattcagttaagcgccaaaaatccaggggccttagaaaatgattttttcaactgcttgcatcatgtaaagtggctgtttaaatgctattactcattgcctcattaaatatataaatataagtagaaattgtatttagttgtttgggaaaatccagaattttaaagcgatttggtattgttttctttttgtccttaccctattcattttttataatttcattaagttatttaggttttctgttaaaatgaaggaaattttatgacttacacaaccatttttttttttttttgttaaggcttaattcttctttgataacgtataagttaagttggaattatggaaaattctaaaatctggtattatcctttcccaaccccgcagagaaatggccacgcactgccaatgggcatctgagcaccgccggcaccaccgccacagtggcctttatgcgtcgcgagaagatctacattggtcatgtgggtgattctgggatcgttttgggttaccagaacaagggcgaacgcaactggcgtgctcgtccactgaccacggaccacaagccggagtcactggcagagaagacgagaatccagcgttccggcggcaatgttgccatcaaatcgggagttccgcgagtggtatggaaccgacccagggacccaatgcatcgcggtcccattcgccgcagaactctggtagatgaaataccctttttggcggtggctcgttccctgggcgatctctggagctacaattcccgcttcaaggaattcgttgtgagtcccgatccggatgtcaaagtggttaaaataaatcccagtacctttaggtaagtgatcctgattaattagctaaactgctggacatcttaatattgaataatttgcctgcagatgcttaattttcggcaccgatggcctgtggaatgtggtgaccgcccaggaggcggtggacagtgtgcgcaaggagcatctaatcggcgagatactcaacgagcaggacgttatgaatcccagcaaggcgctggtggatcaggccctcaaaacctgggccgccaagaagatgcgtgcggacaacacgtccgttgtgactgtgatactaacaccagcggcccgcaataattcgcccacaacgccaacacgttccccatccgcgatggcacgcgacaatgatctggaggtggagctactgctggaggaggacgacgaggagctgccgacactggatgtggagaacaactaccctgactttctcatcgaggagcatgagtatgtgctggaccagccgtacagtgcattggccaagcgacattcgcctccggaagccttccgcaacttcgactacttcgatgtggacgaggacgagttggatgaagatgaggaaacagtggaagaagacgaggaggaggaggaggaagaggaggaaaccaaatcggtgggaattctacagcaaagtttgttcaaccccagaaaaacgtggcgcaagtcaaccatcaacaattcctggagtggcgtcaccgaaccggaaccggaacccgatcccgaaccagatcgaatagatgtcttaacactggacatgtactcccacaccagcattgacaagggcaccaattatggcggcagcatagcccagtcctcaatagatcctgcggagacggctgaaaatcgtgagctgagtgagttggagcagcatctggagagtagctacagtttcgccgagtcgtacaactccctgttaaacgagcaggaggagcaggaggcacgctcacgttcagcagcagcagcagccgccgccgcagaagcagcagcagtagaagcacaacaaaccactgcccattccgcatccgttgtgctggaccgcagcatgttggagatcatccaggagcagcagcactatcagcagcaagagggctattcgctaacgcaactagagaccagacgtgaaagggagcggctgaccgaatcgtggccacagcagccggctgagctgctcgagctggatgctctactgcagcaggagcgtgccgaggaggagcaggtagccctggagcagcagcagcagcgcgaacagcaaatggagcaaatggaggtggaggccattagtagttcgggacagcacgaatttgcttacccagtgaccaccgccacagccagcgagtggtgtgctacattacaagaagacgaggaggagttggactccacagtaatagacatagtaattcaacccgaacaagagttgcaggacaatgaagtgagctccacgttgcccgccacacccactcatgtggagcctgagcagattgtggacaagatggagcccctgaaggttcaggagatgctaaccgcggtcgaaaaacctccatccaagcaggaaaagaagctgccgaagaagcaagagaccaaacaggttgctgtgctagatacagtggccgagatgcccaaagaggatgcccatgccgtgcactatatattccagcgcattcaaaaggttcaggactctgaggcaacaccagtggccgtgacgaattccacaatggctgacgccctgcccaccgaatctagtggactgggaggatctatgaccgcgccccgaatccgacgctatcgcaacgtgcccaacgagaaccatcagcacatgcagacgcgtcgtcgtcagatcttcaagcatgtcaagccaaagtccttcatacagtccagtgctgcggcgattgtggcctatggagacagcaccgaaacggtcggaggaacagccggagcatctggcacacctgcagctgggcgtgtaggcgggggcggtggcggcggcggcggcagaggatcggccagtggtgggagcagtccagcggtggcagccaatagtcggcggagcgtcaatgtggtggccaatgcgagtggaaacagcgctagcaaagttgtgcccagcagcagttccatgatgatgacccgccgcagtcacaccttgacggccagcggtggtgtgaacaaaaggcagctgcgcagcagtctctgcaccttgggcctgggtgtgggtgtcggtgtcggtctgggcatggacctggacatgaccaagcgcacgctaaggacaaggaatgtacccgctttgtcgggcggttcagccacgccatctagcaattcgtcgccagccagcggaggcagcagtccagccggtttcacaagcccagccagtccggtcatcacgtccaggggaagcggatcgcgtactaccgcctcgccagccaggcgcctaaaacgcagtcatgaggatcgggagcaaagaatgagcttgcgacggagcactctgagtggcagtgccagcggcagtgggctggtgggcactggtgggtcgccctcgaatgtgaaatcaaatcgcctgcaggcctgcaatggagccatctctgcgcgtccgccgccctcgccgaagaaactgaatgcagccgtgcccacattggcaattggaacgcgtgcatatacggcggcgttggcggcggcggcggatcacctgaacaagcggtggtcgttgcgcagcagcagtggcaactctggcaatctgataaccgccatcagttgctacagtgacaggagcagggcggcgactgcggcgggatcaccgggatctggaggcggggcagcgggaccaccaggagcatctttggccgcatccacagtcggcacgcgaaggcgctaggctagattgtaacgaaacatgcgagcaacttgcaagtacaaatcctaagcaacggaaaattttagatcctagtatactactttactgaaaacgcaaaattgcataatttaaccaatttttttatgtgcacaacacacacacacacacacacatcttttaaatgtatatataaaaaactgtataagccgccgcataaaaaaaaatatatatattgatatatatacatttatacctacgcctaaacaattaaacaaattcatagtgtagctataagtcgaagttagtaaatagcaaaaagtacataggaatatatatatagatatatatattttttgtatcgcccaaagtaagaagttctccaacatccgaaagttttcctcaacataaatattctcttttctaactaaatcgtttcgttcagtgtacggcagactggaaagtatttttatctcgtctcttgtgtttaactgttttacgctatgttgtctaagatagttgataagttaggctaacacgagagaagctaatatttttaggtttatcatttaatttttttttttgttcttcgcttgtaaggtgttcaccacttgcgtttgcaagtcattttcatgtcatcgcgaaatattttcaattgaaatacatctatttttacataattctatgggtttttggattttcattcaatttagcatatggattctcataatcaaatttaattttaaagtaagacattttttcaagtgtcgataattatggttgaccatatagcatggtcacactggcatggtttgctataaagtgaattaaatgttttgcgtcccaagtaaatgcaacaaaagctgggaacaaaatgtcattgctctcaagagttttgtttcacctattgggcggatgtttatcaataagtaaagaagaatttttagaaatttattgcaacatttaaacccaacggctatgaccagctgatttgctataaatacagtatattagtgtgaaattcagtattttccatagaagtaggcccgcattatgtatggtatgttttagtcactccacgaacggtaacactttggcttgtttgcttgaaaaaacgtaactttttttgttgtaatgaaggaagcagcacgggcagtagaccaac

SEQ ID NO: 5456 - DNA, 4901 bp, DROSOPHILA
tgttcgcaagtcgagagcagaatcgaacggcaaaaaatgctggcgaacaacaaatcatcaaggtaaaactgcgcgccttggtcattaagtctttcatcgaggataaaagaccgatgtcttttaacgttattgctgtaagcaaaagcagaaatcacaatctactcataaatcctcgatttggtgcaaattaaaggaaattcatcggtttttggcggccagttgcaaacacaaaatactaaatacgctagatggagcacgcatacacgcaagctcgttggcgaacgtaaattacatacatcatatagatagtcgtcccgcttgcactgcccgtcacagcgagggctgcgagagcgagagcgggagagagaaaggcctgagtcgctttttcttcttgtactttatatattttttattgtttttttgtgttgtgttgcgttgtacgtgtgtgtgagagtgccaaatgtcaacggaaattacaacactgcgagacggagaagtctaaaaggcagaagaagaagaagcagcagcaggcagcataaacaaaactcgggggaaaaatgttgcccgccaataacaggagtagcaccagcacccataccaacacaaatgccaacacaatcaacgccactaccaataccaccaacagatgcctcatcaatacggccatcgaaaaaacggtagtccgtttgcgagagacggcagcgaatagcgcaccagctccagccacagcctccgttactcgccacggcggcagcagcagcggcaataacaacaataacagtgcatgccatccagcactggatgccagcagtgatgttgttgttgttgaaccggcagcggtaggagtcgcacaggaggaagaggaagagccggagcaaaggccagagaggatcagcatacccattcccgacctggcgttcaccgagatggaagcatatgccgaggatatagtcgtcgatatggaggggggatcaccagccaagcctttaaatccaaagaaacaacgtttaaactcagcaacaaccacaacaataaatcgctcgaggggcggcggagcggcacagagtcgattacgccggtcggcggccatcgttccaccgcgatcgattccagagagctgtgccagcagcagcaattccaattcgagcagcagttccaacagtaattccagttccagctccgctacaggaagtagcgcatccaccggcaatccgtcgccgtgctcctccctgggcgtcaatatgcgcgtaactggacaatgctgccagggaggccggaaatacatggaggatcagttctcggtggcctaccaggaatcaccgatcacccacgaactggaatacgcattttttggcatctacgacggacacggcggtcccgaggccgcgctcttcgccaaggagcaccttatgctcgagatcgtcaagcagaagcagttctggtctgatcaggatgaggatgtcctgcgggcaatacgcgagggatacatcgccacacatttcgccatgtggcgggaacaagagaaatggccacgcactgccaatgggcatctgagcaccgccggcaccaccgccacagtggcctttatgcgtcgcgagaagatctacattggtcatgtgggtgattctgggatcgttttgggttaccagaacaagggcgaacgcaactggcgtgctcgtccactgaccacggaccacaagccggagtcactggcagagaagacgagaatccagcgttccggcggcaatgttgccatcaaatcgggagttccgcgagtggtatggaaccgacccagggacccaatgcatcgcggtcccattcgccgcagaactctggtagatgaaataccctttttggcggtggctcgttccctgggcgatctctggagctacaattcccgcttcaaggaattcgttgtgagtcccgatccggatgtcaaagtggttaaaataaatcccagtacctttagatgcttaattttcggcaccgatggcctgtggaatgtggtgaccgcccaggaggcggtggacagtgtgcgcaaggagcatctaatcggcgagatactcaacgagcaggacgttatgaatcccagcaaggcgctggtggatcaggccctcaaaacctgggccgccaagaagatgcgtgcggacaacacgtccgttgtgactgtgatactaacaccagcggcccgcaataattcgcccacaacgccaacacgttccccatccgcgatggcacgcgacaatgatctggaggtggagctactgctggaggaggacgacgaggagctgccgacactggatgtggagaacaactaccctgactttctcatcgaggagcatgagtatgtgctggaccagccgtacagtgcattggccaagcgacattcgcctccggaagccttccgcaacttcgactacttcgatgtggacgaggacgagttggatgaagatgaggaaacagtggaagaagacgaggaggaggaggaggaagaggaggaaaccaaatcggtgggaattctacagcaaagtttgttcaaccccagaaaaacgtggcgcaagtcaaccatcaacaattcctggagtggcgtcaccgaaccggaaccggaacccgatcccgaaccagatcgaatagatgtcttaacactggacatgtactcccacaccagcattgacaagggcaccaattatggcggcagcatagcccagtcctcaatagatcctgcggagacggctgaaaatcgtgagctgagtgagttggagcagcatctggagagtagctacagtttcgccgagtcgtacaactccctgttaaacgagcaggaggagcaggaggcacgctcacgttcagcagcagcagcagccgccgccgcagaagcagcagcagtagaagcacaacaaaccactgcccattccgcatccgttgtgctggaccgcagcatgttggagatcatccaggagcagcagcactatcagcagcaagagggctattcgctaacgcaactagagaccagacgtgaaagggagcggctgaccgaatcgtggccacagcagccggctgagctgctcgagctggatgctctactgcagcaggagcgtgccgaggaggagcaggtagccctggagcagcagcagcagcgcgaacagcaaatggagcaaatggaggtggaggccattagtagttcgggacagcacgaatttgcttacccagtgaccaccgccacagccagcgagtggtgtgctacattacaagaagacgaggaggagttggactccacagtaatagacatagtaattcaacccgaacaagagttgcaggacaatgaagtgagctccacgttgcccgccacacccactcatgtggagcctgagcagattgtggacaagatggagcccctgaaggttcaggagatgctaaccgcggtcgaaaaacctccatccaagcaggaaaagaagctgccgaagaagcaagagaccaaacaggttgctgtgctagatacagtggccgagatgcccaaagaggatgcccatgccgtgcactatatattccagcgcattcaaaaggttcaggactctgaggcaacaccagtggccgtgacgaattccacaatggctgacgccctgcccaccgaatctagtggactgggaggatctatgaccgcgccccgaatccgacgctatcgcaacgtgcccaacgagaaccatcagcacatgcagacgcgtcgtcgtcagatcttcaagcatgtcaagccaaagtccttcatacagtccagtgctgcggcgattgtggcctatggagacagcaccgaaacggtcggaggaacagccggagcatctggcacacctgcagctgggcgtgtaggcgggggcggtggcggcggcggcggcagaggatcggccagtggtgggagcagtccagcggtggcagccaatagtcggcggagcgtcaatgtggtggccaatgcgagtggaaacagcgctagcaaagttgtgcccagcagcagttccatgatgatgacccgccgcagtcacaccttgacggccagcggtggtgtgaacaaaaggcagctgcgcagcagtctctgcaccttgggcctgggtgtgggtgtcggtgtcggtctgggcatggacctggacatgaccaagcgcacgctaaggacaaggaatgtacccgctttgtcgggcggttcagccacgccatctagcaattcgtcgccagccagcggaggcagcagtccagccggtttcacaagcccagccagtccggtcatcacgtccaggggaagcggatcgcgtactaccgcctcgccagccaggcgcctaaaacgcagtcatgaggatcgggagcaaagaatgagcttgcgacggagcactctgagtggcagtgccagcggcagtgggctggtgggcactggtgggtcgccctcgaatgtgaaatcaaatcgcctgcaggcctgcaatggagccatctctgcgcgtccgccgccctcgccgaagaaactgaatgcagccgtgcccacattggcaattggaacgcgtgcatatacggcggcgttggcggcggcggcggatcacctgaacaagcggtggtcgttgcgcagcagcagtggcaactctggcaatctgataaccgccatcagttgctacagtgacaggagcagggcggcgactgcggcgggatcaccgggatctggaggcggggcagcgggaccaccaggagcatctttggccgcatccacagtcggcacgcgaaggcgctaggctagattgtaacgaaacatgcgagcaacttgcaagtacaaatcctaagcaacggaaaattttagatcctagtatactactttactgaaaacgcaaaattgcataatttaaccaatttttttatgtgcacaacacacacac

SEQ ID NO: 5457 - protein, 1400 aa, DROSOPHILA
MLPANNRSSTSTHTNTNANTINATTNTTNRCLINTAIEKTVVRLRETAANSAPAPATASVTRHGGSSSGNNNNNSACHPALDASSDVVVVEPAAVGVAQEEEEEPEQRPERISIPIPDLAFTEMEAYAEDIVVDMEGGSPAKPLNPKKQRLNSATTTTINRSRGGGAAQSRLRRSAAIVPPRSIPESCASSSNSNSSSSSNSNSSSSSATGSSASTGNPSPCSSLGVNMRVTGQCCQGGRKYMEDQFSVAYQESPITHELEYAFFGIYDGHGGPEAALFAKEHLMLEIVKQKQFWSDQDEDVLRAIREGYIATHFAMWREQEKWPRTANGHLSTAGTTATVAFMRREKIYIGHVGDSGIVLGYQNKGERNWRARPLTTDHKPESLAEKTRIQRSGGNVAIKSGVPRVVWNRPRDPMHRGPIRRRTLVDEIPFLAVARSLGDLWSYNSRFKEFVVSPDPDVKVVKINPSTFRCLIFGTDGLWNVVTAQEAVDSVRKEHLIGEILNEQDVMNPSKALVDQALKTWAAKKMRADNTSVVTVILTPAARNNSPTTPTRSPSAMARDNDLEVELLLEEDDEELPTLDVENNYPDFLIEEHEYVLDQPYSALAKRHSPPEAFRNFDYFDVDEDELDEDEETVEEDEEEEEEEEETKSVGILQQSLFNPRKTWRKSTINNSWSGVTEPEPEPDPEPDRIDVLTLDMYSHTSIDKGTNYGGSIAQSSIDPAETAENRELSELEQHLESSYSFAESYNSLLNEQEEQEARSRSAAAAAAAAEAAAVEAQQTTAHSASVVLDRSMLEIIQEQQHYQQQEGYSLTQLETRRERERLTESWPQQPAELLELDALLQQERAEEEQVALEQQQQREQQMEQMEVEAISSSGQHEFAYPVTTATASEWCATLQEDEEELDSTVIDIVIQPEQELQDNEVSSTLPATPTHVEPEQIVDKMEPLKVQEMLTAVEKPPSKQEKKLPKKQETKQVAVLDTVAEMPKEDAHAVHYIFQRIQKVQDSEATPVAVTNSTMADALPTESSGLGGSMTAPRIRRYRNVPNENHQHMQTRRRQIFKHVKPKSFIQSSAAAIVAYGDSTETVGGTAGASGTPAAGRVGGGGGGGGGRGSASGGSSPAVAANSRRSVNVVANASGNSASKVVPSSSSMMMTRRSHTLTASGGVNKRQLRSSLCTLGLGVGVGVGLGMDLDMTKRTLRTRNVPALSGGSATPSSNSSPASGGSSPAGFTSPASPVITSRGSGSRTTASPARRLKRSHEDREQRMSLRRSTLSGSASGSGLVGTGGSPSNVKSNRLQACNGAISARPPPSPKKLNAAVPTLAIGTRAYTAALAAAADHLNKRWSLRSSSGNSGNLITAISCYSDRSRAATAAGSPGSGGGAAGPPGASLAASTVGTRRR

SEQ ID NO: 5458 - DNA, 9253 bp, DROSOPHILA
cctgcgcagatgaaacacatcgtaaatgatgtcatcatccagtttaatgataaacttggcctgctttttgcactcctcagagacccactttaatcccattacgtgtttgtagctcagattgcgatagtcctcgatgaaattcccctggagaaggtccccgaaacgattctgttcgctggccagttgatcctggcttataaaatgctctcttgaaggcagggctgccaagagaaaaactcttcgcaggcccatttcttccagtttgctttggggaattgcctgtcggtgagctgatcgcaaggcatcgtgtccggcatacgaagtaactattaaaacggctaatcgggaattacaaaaatgattaaggattccttacaatggttgattaaagcaaagaacttacctaagagttctctttttgcctttcgacacacattactggccagcaagtagtggaagtccgtgagattcagaagattacttaacggagtattagggttagatggattcctcttcgtttcgagtggtaagtgcagcaagaaaccgtttttgcgggactggcttgaatccctcaagtgattcgaaaagtaacagagactcagtaggacgatcaaaagaagcgacaaaataatcggaagcaatcttcgtccgcgcatgcgcatttttcttacattctacgtgggattcccctcgcactatgccgtctgtaagtatatgtggcttggtctatcttgctaaactttaataaacacaatgcctaaaacgattatatattaagaaaaaaataaattgagatgcgttaataacaattgttttcacgcctttgccagtgctgccctatcaaattagcgatagctaaattgggaaccgtgtcaccctattttcttttagcgattacacattccaagcagcgttgccatgtccgataaacatcgatttttgtgccatgccagctctagttgttgtgttgttgctgttctttacggataacagttttcagcgcgaagtgcgtgcgtgtgcgtgcgtcaaaaacgcagttctgtatgtgtgttcgtgtgcttttcttatatttttctaaagtaatgttattgaactggttgcctatgtaaagagaaagccacgaaaactacaagcatttgtaaattcgttgaaaaatttgcagcttaccaattccaaaatctcaaaacagtgactgcaacaccaacaaaaacgcagtagcagcgacgtcggcagagaaacaacaagaacaacaatcttggcgttgaagcgatgtgagagagtgtaatatttgacagcatgtgagctaatcagcaaagcagcgatttctgcaaacattttgagcttcttaagggcaattaatgaacgaaaaagtggaaaactatagtaaatatatagtaagaaatatagtgagaaattttgtatttttacgttttgttctctagaaattaaaaaaaagagaggatacaaaaaatttagctgtgaccaccaagaaacgcagtcgacttcgctgccggcagaacgaagaaaaagaaagagcataatataaagcagaaaaaccagattttaatgtctaaattttaaagattaaatgttttattttgccttatgtttgcccatttatactcaaaaatatcggtgtcaaaatagttgcaaattcagaacagcaaagcaacaacaaaggctgctgcttgtacgaccgatgcacaaatcttgtcgggaaaaatagggttctgaaagcgaaattatgtttttattggcttaaagatggaaaattgactcctgaaatcgaaaatcaaagaaactaatacgcaaagtaatcaaatagtgacaattaaggcaagatgacggactttgttgagctgatgaacagcatgtccagtacattcaatagcgactgtgctacttcaacagcggagggtggtactttgctaaatctgaacttggcggaagacaaaaccctcaagtggcgtaatttggccaataaccagttcgctagtaaagaaaagaagcacaaggacaaggaggaggaggagcgcaaggaggcaaggaatcaagaggaaatcgaagacatcaaagcacttttggcagatgttgtcgatgcggccgctgtcaagctggaagaagaagaagcgcagaatgcagaaaaagtcgaaccacatacaaaatgcgaaatagaggaagaaggtaggaaggaaatggagtacgatcaagatgtcgcaaaacaagactccgaaatggaaaaaaagcagaatggcaaagcaacatccataacagtaaagatggaaagcaacgagcgtgcagagaaacacgcaacggaaattgcaacgacgtcgacagagagatgggaaaacgaaagctttaaaactgagcagcaaaataaaaaagctgctgagaaagaagaagaacccatactagcagcaacacaaaaattggaagcaaatgcagaaccactgacaacaacaagaattgaggtagcagtagcatctccacttgttgttagttctgctagcgttaaactcgctgctgacgcaaccaaccaaatgcgagcagcgacgtcggcaggagcagcgacattagctgataaaaatgtaagtaaatgtgtgtgtgtttgtgtgtatcagcttcgaaattcttgctttttcttttatattttaatttatttagatgttagcccttgactgctgagttcttttctttctagtgtttcacgtgtagtttaaatcaaatacatacgtagttatgattgatgtacacatatttatatacataaatatcctaatgtatggcattgttttggttcataccaatcataaaaaaggttagggatttatttcatttctctactttttgtatgtcatacaaattaaagacgtattatgttggagaagttactatttgttaattcatttagaagttagcccttgactgctgagttcttttctttctagtgtttcacgtgtagttttaatcaaatacatacgtacatatgattgatgtacgcatatttatatacataaatattctaatgtatgtcattgtttttgttcagctgtttgtttaatatggttaggtcataaaaaggttagattacaattgttagtttgtcataattccagagggatttgaatacaagaaagacttgaagtaattgcatccaattttaagagggttaagccatccattcattcatcctcttggtcaacagacctcttatgtttggtagaaacagttgtctaggcaaccgatgaaggcatttgaagctttctttgaggactggtacttctagttagtatgtctctatattatataatatataatattatcctgagtacttctttagtcggcacattcaatgagtctctgtactttgcaggtacaagtttcgcccggtggaacgcgacggtctcgaagaacacccagacccatagacacgcccacttcagttactgatgaacatgttcaggtggagaataaaaaatttggaaagtcggagcagtatacggattgtagtagccatctggagaggttcacactggacgataatactgctattgtcagactgcagttgaaaagtgaaccggacaaaccgtcattaactgcattatctcctgaggaaaactcggctcctgctccgaagcgaggaaggggtcgagccaggaaaataagacccgatgccgaggtggaaaccagtgaggttattttaccctgcgaggattcattaggggagaagaaaccaggacgcaaaaggaaactcccggatgaaccgatagatcagcagcaactaagcgaccttgtcgtggtaaaaacagagcaggaggaattgggtgacgctcccttgggagatgttaagagaatgcgacgtagcgttcgtttaggcaatcgattacacgccgatggaagcccttgggaggaggtaaagacagaggcacttcacccgcagccttctgcagaactttcctttgcggaggtcacttctgagatcttgccactagctgtcttagatgagaagaccccacccaaaaagcgagggcggaaggcaaaaacgccctgtgtgaagttagaatctgaaacatcctgcgggctaccgtttgctaatggcaacaagaaaacgaattcctctggtggatgcgaacttcagctgcccaagcgttcaaaaagaagaataaaaccaacgccaaagatattagaaaatgacgaactgcgctgtgagttcgaaacgaagcacattgagcgtatgacccagtgggagagtgctgcagcagtagatggggattttgaaacgccaacaacaggcggtaatgggtccaattcctcgacctcaaggcaaaagagcgacaagtccgacgggagcaacttcgaaggtggtccaggacatcctgcaggcacaagtgccataaagaaaagactattttcaaagtcccagcgggacattgagaactatggcgcagcaatgctagccaaaagtaagttacctccgtgtccggatgtcgaacaatttctaaacgacatcaaggcatctcgaattaacgcgaatcggtcaccagaagaaaggaaattgaacaaaaaacagcaacgaaaactggccaaacaaaaggaaaagcacctgaagcatttgggcctgcaaaaaaatcacagagatgagccctcggataacgacagttccaatacggacaatgaattctttcctactacaagggtgcaagtgggaaaaccaagtgttactttgagagtaaggaatagtgttaccaaggagcttcccaccacagccactttgaaatcacgccggaatccagtcgtgcaggcagccaaactcacgagaaggataggtgcaagagccgccggtgaagttactgaggcagcccgagcaagtgtgccaatttctacacctgatgcggagcagcttcactcgttggacacttctattcaagctgatgttacgcccataagagacttagatatgaggcccagcacctccagagtgtcaaagtttatttgtctatgtcagaagccttcccagtattatgccaggaatgccccggattcatcatactgctgtgccatcgatcacatcgacgaccaaaaaattggctgctgcaacgagctgtcctcagaggttcacaatctactcagacccagccaacgcgttagctatatgatcctatgcgatgagcacaaaaagcgcctacaatcacacaactgctgcgcaggatgtggcatattttgtacacaggtaaagacagaattattattgtgaactgcaatcaaatactttaattatatttcagggaaaatttgtgctatgcaagcagcagcacttctttcatcccgattgtgcccagcgatttattctaagcacttcgtacgagaaggaactcggcgatgaggaagatcagggcgtcaaattcagcagccctgtcttagtgcttaagtgcccccactgcggattagatacaccagaacggacctccacggtgaccatgaagtgtcagtccctgcctgtctttctgcgcacgcaaaagtacaagatgtaagtaaatagtattgcagattgagcgtgttttagatttaattcaaatatttgtcaaatgtattaataaattcttcactaaccatgcagcaaacccgctagattgacaacctcttcgcatctaacccaatttggaacagttgagaatgccaataccccaggagccaccgccaggaacaagggaggactatccaccgccgtaaccttaagcgcggcatcaagtcctgcctcaaaaacaaatggagcccagagaggcagggcgggcacctccaattctaactccaggcatgctcttaattcgatcaactttgctcaacttatacccgagtccgtaatgaatgtagtgctgcggggccacgtggtttctgctagcggtcgcgtgaccgcagagtttaccccgcgggatatgtactatgcagtccaaaacgatgacttggagcgtgtagcggagattctgggtaagtttgcttgcactcggcatttacgatataaaggcttaatgcttttggaatagctgccgacttcaacgtgctgactcccatacgggagtacttaaatggcacctgccttcatttggtggcccactcgggcacacttcagatggcctatctccttctctgcaaaggagcaagctcaccggatttcgttaatattgtggattatgaactgcggactgctttaatgtgtgccgtgatgaacgagaagtgcgacatgctgaatctatttcttcaatgtggtgcggatgtggccattaaggtttttatgcctccttactccaaatgatctataatcattataaactatactttcaaaagggtcccgatggtaagaccagtctgcatattgctgcccagttaggcaacttggaagccacacagttaattgtagacagctatcgaacttctcgaaatattaccagttttttaagtttcattgatgcccaggatgaaggcggttggacggccatggtctgggcagcagagctggggcacacggatatagttaggttggcttctctgccccaagcggttttcttaaagctaattaatatttttctcttcattagcttcctgcttaaccaggatgctgatccaaacatatgcgacaatgacaacaatacggtgctgcactggtctacgctgcacaatgatggtctggacacgattacagtactgctgcagtcaggggcggactgcaatgtacagaatgtagagggcgacacgcctttgtgagtttttttttaccaatcaatggagtgatgttatataacatatatataaattttaggcacattgcttgccggcattctgtcacccgcatgtgcatcgcgttaatagctaatggagccgatctaatgattaagaacaaggcggaacaactgccctttgattgcattccgaatgaggagtctgagtgcggtcgcactgtaggttttaatatgcaaatgcgtagtttcaggcctttgggcctccgtacctttgtggtttgtgcagatgcgtcgaatggcagggaggcacgaccaatccaggtggttcgcaacgaactggcaatgtctgaaaatgaggatgaggccgattcgcttatgtggccggattttcgctacgtaacacaatgcattatccagcagaattcagtgcagattgaccgacgcgtttctcaaatgcgcatctgctcctgcctggatagttgcagtagcgatcgctgtcagtgcaatggagcctcctcgcagaattggtacacggcagaaagtcggctaaacgccgactttaactacgaggatcctgcggtaatcttcgaatgcaacgacgtctgcggttgcaaccaggttagagtcttggctatcggaaataatccattttatactaaacttaaactttttctattccttaaatagctgtcctgcaaaaaccgcgtggtgcagaatggtacacggacacccctacaaattgtcgagtgcgaggatcaggcgaagggctggggagtacgggcgctggccaatgtacccaaaggcacttttgtgggcagttatacgggtgagattttgaccgcgatggaggcagatcgacgcaccgatgacagctactactttgacctggacaacgggcactgcatcgatgccaactattatggaaatgtaacccggttttttaaccactcgtgtgagccgaatgttttgcccgttcgtgttttctacgagcatcaggactacagattccctaagatcgcctttttttcctgccgtgacatcgatgccggagaggaaatatggtaagtcgacccaaccatttgaaagcaaagagatagatagacaaacgataattattttacagtacatttttaaagacataaggaaccacaaataagcatttgcttcttttttaattgttatgtttctgctaaaatataaatattcgttgcatagtaggtaaaattgaaaggattcgtttgatcagaattaagggttggaaatttttgttgaccctatttagattgatcactcaacgtgaaaatcactctttgttgtttcctttagctttgactacggagaaaaattctggcgcgtggaacatcgctcctgtgttggatgtcgatgcctgacaacaacctgcaagtacgcctcccaatcctcaagcacaaatgcctcgcctacgaatgcaacaacggcaccggaaaatgaaacgggaacgctgtcgtctacaaatacggagaaaattggacacgcgtaggctaaaaccacctaaacctgagatgattgcagatttcacagtctcatccaacaaataaaatccccacctaaaccatcagcaaccagatgagccgggcatataaaatcgcagcaaccccaaattcgataacaatatttgtaatataaacattgaatcgttatcgaagcccggtcggctttctttcttttttgactgccaaatgtttcgtggttaaccactttttatctatttttacgtatacaaatagtgtttgtttattattaattttgtttgatttgtattaatgttttacgccttattaataatgtttttattcttagtacctgtaaaaacaaattagtttatactttctgcgcgaaacaaactaatgacataagaagggcatatcaaaattgtttcccgatattgtgggtgtgcgtgtttccggaacgtaaatgttttaaacttaaaattagacttggacattaccaggcataaaatagaattgtaatggaggaaagaccatctagtcataagaatgaaggagacaaagtatttccatagaaaagagaaaaaaaattttttttaatagaagtagtcggtttttttttttaatttgtatgagctctggagcatacatatgtaaatacgtgatacgaaaaagtaatacgtttgattttaccgttaaccatgaaaattagaccgtttaaattgacctgtaatgggcaactaaatgttactcgcaaccaaaagtaaaggaggaattatttagcaaaaaaaaaaaacattgtctatattatggattacatgttttgtgcagggtgaagtacatacatacccccaattgattaccactctaccaatcccatcaaatctgaagtctatcacgtatacaaatttttcagtttgctaagcaagccaagccacaagtgcctaaaagaaaattatttcttacccggttgccctttaggataaccctaattttactataaagcaatatagtttttttaggctgtaaatg

SEQ ID NO: 5459 - DNA, 5445 bp, DROSOPHILA
cgcgaagtgcgtgcgtgtgcgtgcgtcaaaaacgcagttctgtatgtgtgttcgtgtgcttttcttatatttttctaaagtaatgttattgaactggttgcctatgtaaagagaaagccacgaaaactacaagcatttgtaaattcgttgaaaaatttgcagcttaccaattccaaaatctcaaaacagtgactgcaacaccaacaaaaacgcagtagcagcgacgtcggcagagaaacaacaagaacaacaatcttggcgttgaagcgatgtgagagagtgtaatatttgacagcatgtgagctaatcagcaaagcagcgatttctgcaaacattttgagcttcttaagggcaattaatgaacgaaaaagtggaaaactatagtaaatatatagtaagaaatatagtgagaaattttgtatttttacgttttgttctctagaaattaaaaaaaagagaggatacaaaaaatttagctgtgaccaccaagaaacgcagtcgacttcgctgccggcagaacgaagaaaaagaaagagcataatataaagcagaaaaaccagattttaatgtatgacggactttgttgagctgatgaacagcatgtccagtacattcaatagcgactgtgctacttcaacagcggagggtggtactttgctaaatctgaacttggcggaagacaaaaccctcaagtggcgtaatttggccaataaccagttcgctagtaaagaaaagaagcacaaggacaaggaggaggaggagcgcaaggaggcaaggaatcaagaggaaatcgaagacatcaaagcacttttggcagatgttgtcgatgcggccgctgtcaagctggaagaagaagaagcgcagaatgcagaaaaagtcgaaccacatacaaaatgcgaaatagaggaagaaggtaggaaggaaatggagtacgatcaagatgtcgcaaaacaagactccgaaatggaaaaaaagcagaatggcaaagcaacatccataacagtaaagatggaaagcaacgagcgtgcagagaaacacgcaacggaaattgcaacgacgtcgacagagagatgggaaaacgaaagctttaaaactgagcagcaaaataaaaaagctgctgagaaagaagaagaacccatactagcagcaacacaaaaattggaagcaaatgcagaaccactgacaacaacaagaattgaggtagcagtagcatctccacttgttgttagttctgctagcgttaaactcgctgctgacgcaaccaaccaaatgcgagcagcgacgtcggcaggagcagcgacattagctgataaaaatgtacaagtttcgcccggtggaacgcgacggtctcgaagaacacccagacccatagacacgcccacttcagttactgatgaacatgttcaggtggagaataaaaaatttggaaagtcggagcagtatacggattgtagtagccatctggagaggttcacactggacgataatactgctattgtcagactgcagttgaaaagtgaaccggacaaaccgtcattaactgcattatctcctgaggaaaactcggctcctgctccgaagcgaggaaggggtcgagccaggaaaataagacccgatgccgaggtggaaaccagtgaggttattttaccctgcgaggattcattaggggagaagaaaccaggacgcaaaaggaaactcccggatgaaccgatagatcagcagcaactaagcgaccttgtcgtggtaaaaacagagcaggaggaattgggtgacgctcccttgggagatgttaagagaatgcgacgtagcgttcgtttaggcaatcgattacacgccgatggaagcccttgggaggaggtaaagacagaggcacttcacccgcagccttctgcagaactttcctttgcggaggtcacttctgagatcttgccactagctgtcttagatgagaagaccccacccaaaaagcgagggcggaaggcaaaaacgccctgtgtgaagttagaatctgaaacatcctgcgggctaccgtttgctaatggcaacaagaaaacgaattcctctggtggatgcgaacttcagctgcccaagcgttcaaaaagaagaataaaaccaacgccaaagatattagaaaatgacgaactgcgctgtgagttcgaaacgaagcacattgagcgtatgacccagtgggagagtgctgcagcagtagatggggattttgaaacgccaacaacaggcggtaatgggtccaattcctcgacctcaaggcaaaagagcgacaagtccgacgggagcaacttcgaaggtggtccaggacatcctgcaggcacaagtgccataaagaaaagactattttcaaagtcccagcgggacattgagaactatggcgcagcaatgctagccaaaagtaagttacctccgtgtccggatgtcgaacaatttctaaacgacatcaaggcatctcgaattaacgcgaatcggtcaccagaagaaaggaaattgaacaaaaaacagcaacgaaaactggccaaacaaaaggaaaagcacctgaagcatttgggcctgcaaaaaaatcacagagatgagccctcggataacgacagttccaatacggacaatgaattctttcctactacaagggtgcaagtgggaaaaccaagtgttactttgagagtaaggaatagtgttaccaaggagcttcccaccacagccactttgaaatcacgccggaatccagtcgtgcaggcagccaaactcacgagaaggataggtgcaagagccgccggtgaagttactgaggcagcccgagcaagtgtgccaatttctacacctgatgcggagcagcttcactcgttggacacttctattcaagctgatgttacgcccataagagacttagatatgaggcccagcacctccagagtgtcaaagtttatttgtctatgtcagaagccttcccagtattatgccaggaatgccccggattcatcatactgctgtgccatcgatcacatcgacgaccaaaaaattggctgctgcaacgagctgtcctcagaggttcacaatctactcagacccagccaacgcgttagctatatgatcctatgcgatgagcacaaaaagcgcctacaatcacacaactgctgcgcaggatgtggcatattttgtacacagggaaaatttgtgctatgcaagcagcagcacttctttcatcccgattgtgcccagcgatttattctaagcacttcgtacgagaaggaactcggcgatgaggaagatcagggcgtcaaattcagcagccctgtcttagtgcttaagtgcccccactgcggattagatacaccagaacggacctccacggtgaccatgaagtgtcagtccctgcctgtctttctgcgcacgcaaaagtacaagatcaaacccgctagattgacaacctcttcgcatctaacccaatttggaacagttgagaatgccaataccccaggagccaccgccaggaacaagggaggactatccaccgccgtaaccttaagcgcggcatcaagtcctgcctcaaaaacaaatggagcccagagaggcagggcgggcacctccaattctaactccaggcatgctcttaattcgatcaactttgctcaacttatacccgagtccgtaatgaatgtagtgctgcggggccacgtggtttctgctagcggtcgcgtgaccgcagagtttaccccgcgggatatgtactatgcagtccaaaacgatgacttggagcgtgtagcggagattctggctgccgacttcaacgtgctgactcccatacgggagtacttaaatggcacctgccttcatttggtggcccactcgggcacacttcagatggcctatctccttctctgcaaaggagcaagctcaccggatttcgttaatattgtggattatgaactgcggactgctttaatgtgtgccgtgatgaacgagaagtgcgacatgctgaatctatttcttcaatgtggtgcggatgtggccattaagttaggcaacttggaagccacacagttaattgtagacagctatcgaacttctcgaaatattaccagttttttaagtttcattgatgcccaggatgaaggcggttggacggccatggtctgggcagcagagctggggcacacggatatagttagcttcctgcttaaccaggatgctgatccaaacatatgcgacaatgacaacaatacggtgctgcactggtctacgctgcacaatgatggtctggacacgattacagtactgctgcagtcaggggcggactgcaatgtacagaatgtagagggcgacacgcctttgcacattgcttgccggcattctgtcacccgcatgtgcatcgcgttaatagctaatggagccgatctaatgattaagaacaaggcggaacaactgccctttgattgcattccgaatgaggagtctgagtgcggtcgcactgtaggttttaatatgcaaatgcgtagtttcaggcctttgggcctccgtacctttgtggtttgtgcagatgcgtcgaatggcagggaggcacgaccaatccaggtggttcgcaacgaactggcaatgtctgaaaatgaggatgaggccgattcgcttatgtggccggattttcgctacgtaacacaatgcattatccagcagaattcagtgcagattgaccgacgcgtttctcaaatgcgcatctgctcctgcctggatagttgcagtagcgatcgctgtcagtgcaatggagcctcctcgcagaattggtacacggcagaaagtcggctaaacgccgactttaactacgaggatcctgcggtaatcttcgaatgcaacgacgtctgcggttgcaaccagctgtcctgcaaaaaccgcgtggtgcagaatggtacacggacacccctacaaattgtcgagtgcgaggatcaggcgaagggctggggagtacgggcgctggccaatgtacccaaaggcacttttgtgggcagttatacgggtgagattttgaccgcgatggaggcagatcgacgcaccgatgacagctactactttgacctggacaacgggcactgcatcgatgccaactattatggaaatgtaacccggttttttaaccactcgtgtgagccgaatgttttgcccgttcgtgttttctacgagcatcaggactacagattccctaagatcgcctttttttcctgccgtgacatcgatgccggagaggaaatatgctttgactacggagaaaaattctggcgcgtggaacatcgctcctgtgttggatgtcgatgcctgacaacaacctgcaagtacgcctcccaatcctcaagcacaaatgcctcgcctacgaatgcaacaacggcaccggaaaatgaaacgggaacgctgtcgtctacaaatacggagaaaattggacacgcgtag

SEQ ID NO: 5460 - protein, 1624 aa, DROSOPHILA
MTDFVELMNSMSSTFNSDCATSTAEGGTLLNLNLAEDKTLKWRNLANNQFASKEKKHKDKEEEERKEARNQEEIEDIKALLADVVDAAAVKLEEEEAQNAEKVEPHTKCEIEEEGRKEMEYDQDVAKQDSEMEKKQNGKATSITVKMESNERAEKHATEIATTSTERWENESFKTEQQNKKAAEKEEEPILAATQKLEANAEPLTTTRIEVAVASPLVVSSASVKLAADATNQMRAATSAGAATLADKNVQVSPGGTRRSRRTPRPIDTPTSVTDEHVQVENKKFGKSEQYTDCSSHLERFTLDDNTAIVRLQLKSEPDKPSLTALSPEENSAPAPKRGRGRARKIRPDAEVETSEVILPCEDSLGEKKPGRKRKLPDEPIDQQQLSDLVVVKTEQEELGDAPLGDVKRMRRSVRLGNRLHADGSPWEEVKTEALHPQPSAELSFAEVTSEILPLAVLDEKTPPKKRGRKAKTPCVKLESETSCGLPFANGNKKTNSSGGCELQLPKRSKRRIKPTPKILENDELRCEFETKHIERMTQWESAAAVDGDFETPTTGGNGSNSSTSRQKSDKSDGSNFEGGPGHPAGTSAIKKRLFSKSQRDIENYGAAMLAKSKLPPCPDVEQFLNDIKASRINANRSPEERKLNKKQQRKLAKQKEKHLKHLGLQKNHRDEPSDNDSSNTDNEFFPTTRVQVGKPSVTLRVRNSVTKELPTTATLKSRRNPVVQAAKLTRRIGARAAGEVTEAARASVPISTPDAEQLHSLDTSIQADVTPIRDLDMRPSTSRVSKFICLCQKPSQYYARNAPDSSYCCAIDHIDDQKIGCCNELSSEVHNLLRPSQRVSYMILCDEHKKRLQSHNCCAGCGIFCTQGKFVLCKQQHFFHPDCAQRFILSTSYEKELGDEEDQGVKFSSPVLVLKCPHCGLDTPERTSTVTMKCQSLPVFLRTQKYKIKPARLTTSSHLTQFGTVENANTPGATARNKGGLSTAVTLSAASSPASKTNGAQRGRAGTSNSNSRHALNSINFAQLIPESVMNVVLRGHVVSASGRVTAEFTPRDMYYAVQNDDLERVAEILAADFNVLTPIREYLNGTCLHLVAHSGTLQMAYLLLCKGASSPDFVNIVDYELRTALMCAVMNEKCDMLNLFLQCGADVAIKLGNLEATQLIVDSYRTSRNITSFLSFIDAQDEGGWTAMVWAAELGHTDIVSFLLNQDADPNICDNDNNTVLHWSTLHNDGLDTITVLLQSGADCNVQNVEGDTPLHIACRHSVTRMCIALIANGADLMIKNKAEQLPFDCIPNEESECGRTVGFNMQMRSFRPLGLRTFVVCADASNGREARPIQVVRNELAMSENEDEADSLMWPDFRYVTQCIIQQNSVQIDRRVSQMRICSCLDSCSSDRCQCNGASSQNWYTAESRLNADFNYEDPAVIFECNDVCGCNQLSCKNRVVQNGTRTPLQIVECEDQAKGWGVRALANVPKGTFVGSYTGEILTAMEADRRTDDSYYFDLDNGHCIDANYYGNVTRFFNHSCEPNVLPVRVFYEHQDYRFPKIAFFSCRDIDAGEEICFDYGEKFWRVEHRSCVGCRCLTTTCKYASQSSSTNASPTNATTAPENETGTLSSTNTEKIGHA

SEQ ID NO: 5461 - DNA, 4272 bp, DROSOPHILA
ttttccaaggcttcagtttttttacacggaattttgaccgttttgtttttcgtttgtttttatttgttgtctgttgttgttggtttccgcagcacaaatgaaaattcgcgtccgtttcgcacgagtgttagtgatgtaaaaaagcatcgaatgcattgaccaccgatgtttctcgacgatacatttcagtgcttgcgcttggtatcgattggcttctgttaacctcagtggcacagcttgcagtctctagcacggactcaaacctgtatgttaactttttaatatttaattggcagggacttcaaccaaagatacatatgtgaatgacttctactaaccacattgcatctgagagctttttagcaatttcgaaaggaaggctttaaaacagagagacataaatgcatcaaatataaatatagtaatattaaatatatactcatcatacgtggacaccgattgtttttcaaaatatccgggtgaaaagcttgagccctcgggtggtaatcgataggcgcagtcagctgttcttcgttcctatcgtcttgcttgcacaataatttcagcggcatatttccataattcactgcattttccccatttaccgaatcaaaatgcgtctaactaacgttttgttcaaaaaggtgaagagcaagtgagtaatttggacatccaatttgttctttttgttaaaaccaaccgtttttacaggcgcatcatggtcgtactggaaagtgtggtcagtggacatcagtttaatgcttttcgcgatcgcttggccgacaaattggagataatacgcttcgatccgtacagtgagtgccggccatcactgactttatgcatatgcactgatgttgcccatgtttctttttcagttcaacaggaaagcctttatcgtgaacgcaagaaaatccgcagcgcctaagataaccattttttgttagtgaaaaaaataaaatttacaactattggaaacaccaaaaaacaaccgagatatatgtgcgaatgtgggtgctttattttcggcagaataggagcattataaatctggttacatatttatacaaaaatattaatttacgctcgttttagatacacattcgcatcgatacttaattctaattatcaacagcaactcgctttcgattgccgtctacttaaacggcttctcggtcataagaagaccatgctcccacagggcggtggcgacctctatcttgcgagctgaagactccaatggcaactgatcaatggtgaggtaaaatggataggccgatatgaggagctcaacggctttagcttcctctggcagaatctccatgaaatagggctcgtacttgcagtaatccaggccattgtccacatggtggtagatacgcacgctgccatcggactcggtcaccagacgcagaatgttggcacgcagcaggcgcacggatgtctttttattgaatttgtaatcgcagacgcagttgccctgctcatcggcatcactgcgtgccccatgaacagtgcgcacctcctccgagggcaatacgatcggcggaagtgcctcgtgctggaacttcttggccatctggtcgacggcctcatcaatatcatcttcggagggcatcaagtaattggtcaccagcttctgcacattctccaccagctgtttgcgcgacccgcagtcatttcccttgtaggcattgcccaaaacttgaaaagtgtgcagcggcaagccgcgacgcaaggccacactccgatcgacggccttcttaagaaccatgggcattagtgtctctagaagattggcatatgcctgctgttggtaaacactcaaggtaatgtgcagcgagtgctgttgctcttcggtgatggcctggtgaacagcgcctctcgggaaatatagtacatcgccggcgcttagtacctcatcaattatgggcttacccagctgctcttgatcatagttgcccgacgagatcctggccagttgatcggccttcttgggcggctcgtacaaaagccagcgcttgcgtccctccacttggataacgaaagcctcgatgtcatcgtaatggggcgcaaagccctggctattgggtggggttaggtatagatttgcccccaccttgcagtgaaagaactcctgcaaaacggtgcacacctgacgcaagcgaattagataggtggaaggattcagtaaacgaatgctgcagccgtccgaatagaagccccacacagctggtggcaaggcacgaccctcgggattcagtgtctcacgcttgccgttcttgtaagtggtcacatccacgttgacggtgaagtccaaatgatggcgaatcagtatttcgtcaagcatcttgaatgatatcatactttgaaagtatttgggattagagcgctgcaccaggcaggcggtgtgctcccagaagtctttgaagaagactttagtttggaccggaaagagtatccactgcaggacgcgacgaccctcttcgacgctgtcggctttgtgagtttctattgtttcagtctccttttcgtcattgttattattgccctcttcggtgggttccgccttaattattttaactaatgagttcacggctgctgggtcctttttgggcggctgaggacaggaattggcctcccctgggggcagcgatttgcgcaccaaagggcaggctaaagccgcgccattaacctggatcggcgaggtgcgctccagtcccagactacgtgcttgcttgcgtttggtggccctggctccttgagtagcttccgattccttggtcaacttaccggcttttccggtatcattattgttggcatccgcctcggcctgaagacgtcgcttgcgatctgcggtcttagcggctgcggctgaccctgactgggtctttttggatgttgatggaccggcgtcatcgtcgaataatttagagaaaaaggcatgcacctcttggtccttggttacggcgagcatatcagataccgaattggaatcattcgattctttatctagattgggcttcttcttgtctttagctgtgccgttatttgcgtttttctgcattttgctgttgccttgagacttggcggccgcggaagtagtcgcctttttcattttgcagcttttttaaacgacactaggtcttaatccttaaagtcttaaacactcacgcctggctgtagacacgtacttatgagcttgactagtagcagaatgatattgctttttttacacatacctgtattcaaaacgttcctgcacgtgcctactgttacaactattattcgcgccgggttatcgatgatttctgcgagctgccgtatcgatggcatggggtaagtggattataaggtatgtctctatgtttttacaaaaatcgcttgctgtatctaaacaattgcgctaaatgagcaaatttaagaaaacttttaactgaattagagacaaaattgccgtatcgatggcatggggtaagtggattataaggtatgtctctatgtttttacaaaaatcgcttgctgtatctaaacaattgcgctaaatgagcaaatttattaaaacttttaactgaattagagacaaaatattgccgtatcgatggcatggggtaagtggattataaggtatgtctctatgtttttacaaacatcgcttgctgaatctaaacaattgcgctaaatgagcaaatttattaaaacttttaactgaattagagacaaaatattgccgtatcgatggcatgtggtaagtggattataaggtatgtctctatgtttttacaaaaatcgcttgctgtatctaaacaattgcgctaaatgagcaaatttaagaaaacttttaactgaatttgagacaaaattgccgtatcgatggcatggggtaagtggattttaaggtatgtctctatgtttttacaaaaatcgcttgctgtatctaaacaattgcgctaaatgagcaaatttaataaaacttttaactgaattagagacaaaatattgccgtatcgatggcatggggtaagtggattataaggtatgtctctatgtttttacaaaaatcgcttgctgtatctaaacaattgcgctaaatgagcaaatttaataaaacttttaactgaattagagacaaaaaaaaaagttttcatatatattaaccttttgttctctaaccatatcgcggtagtctggcagccctgtcacaaccggtaccgataaccacgaccagctgattgaaccggcatatttgcgaaattaaatccttagcgattg

SEQ ID NO: 5462 - DNA, 2210 bp, DROSOPHILA
taggcacgtgcaggaacgttttgaatacagccaggcgtgagtgtttaagactttaaggattaagacctagtgtcgtttaaaaaagctgcaaaatgaaaaaggcgactacttccgcggccgccaagtctcaaggcaacagcaaaatgcagaaaaacgcaaataacggcacagctaaagacaagaagaagcccaatctagataaagaatcgaatgattccaattcggtatctgatatgctcgccgtaaccaaggaccaagaggtgcatgcctttttctctaaattattcgacgatgacgccggtccatcaacatccaaaaagacccagtcagggtcagccgcagccgctaagaccgcagatcgcaagcgacgtcttcaggccgaggcggatgccaacaataatgataccggaaaagccggtaagttgaccaaggaatcggaagctactcaaggagccagggccaccaaacgcaagcaagcacgtagtctgggactggagcgcacctcgccgatccaggttaatggcgcggctttagcctgccctttggtgcgcaaatcgctgcccccaggggaggccaattcctgtcctcagccgcccaaaaaggacccagcagccgtgaactcattagttaaaataattaaggcggaacccaccgaagagggcaataataacaatgacgaaaaggagactgaaacaatagaaactcacaaagccgacagcgtcgaagagggtcgtcgcgtcctgcagtggatactctttccggtccaaactaaagtcttcttcaaagacttctgggagcacaccgcctgcctggtgcagcgctctaatcccaaatactttcaaagtatgatatcattcaagatgcttgacgaaatactgattcgccatcatttggacttcaccgtcaacgtggatgtgaccacttacaagaacggcaagcgtgagacactgaatcccgagggtcgtgccttgccaccagctgtgtggggcttctattcggacggctgcagcattcgtttactgaatccttccacctatctaattcgcttgcgtcaggtgtgcaccgttttgcaggagttctttcactgcaaggtgggggcaaatctatacctaaccccacccaatagccagggctttgcgccccattacgatgacatcgaggctttcgttatccaagtggagggacgcaagcgctggcttttgtacgagccgcccaagaaggccgatcaactggccaggatctcgtcgggcaactatgatcaagagcagctgggtaagcccataattgatgaggtactaagcgccggcgatgtactatatttcccgagaggcgctgttcaccaggccatcaccgaagagcaacagcactcgctgcacattaccttgagtgtttaccaacagcaggcatatgccaatcttctagagacactaatgcccatggttcttaagaaggccgtcgatcggagtgtggccttgcgtcgcggcttgccgctgcacacttttcaagttttgggcaatgcctacaagggaaatgactgcgggtcgcgcaaacagctggtggagaatgtgcagaagctggtgaccaattacttgatgccctccgaagatgatattgatgaggccgtcgaccagatggccaagaagttccagcacgaggcacttccgccgatcgtattgccctcggaggaggtgcgcactgttcatggggcacgcagtgatgccgatgagcagggcaactgcgtctgcgattacaaattcaataaaaagacatccgtgcgcctgctgcgtgccaacattctgcgtctggtgaccgagtccgatggcagcgtgcgtatctaccaccatgtggacaatggcctggattactgcaagtacgagccctatttcatggagattctgccagaggaagctaaagccgttgagctcctcatatcggcctatccattttacctcaccattgatcagttgccattggagtcttcagctcgcaagatagaggtcgccaccgccctgtgggagcatggtcttcttatgaccgagaagccgtttaagtagacggcaatcgaaagcgagttgctgttgataattagaattaagtatcgatgcgaatgtgtatctaaaacgagcgtaaattaatatttttgtataaatatgtaaccagatttataatgctcctattctgccgaaaataaagcacccacattcgcacat

SEQ ID NO: 5463 - protein, 636 aa, DROSOPHILA
MQKNANNGTAKDKKKPNLDKESNDSNSVSDMLAVTKDQEVHAFFSKLFDDDAGPSTSKKTQSGSAAAAKTADRKRRLQAEADANNNDTGKAGKLTKESEATQGARATKRKQARSLGLERTSPIQVNGAALACPLVRKSLPPGEANSCPQPPKKDPAAVNSLVKIIKAEPTEEGNNNNDEKETETIETHKADSVEEGRRVLQWILFPVQTKVFFKDFWEHTACLVQRSNPKYFQSMISFKMLDEILIRHHLDFTVNVDVTTYKNGKRETLNPEGRALPPAVWGFYSDGCSIRLLNPSTYLIRLRQVCTVLQEFFHCKVGANLYLTPPNSQGFAPHYDDIEAFVIQVEGRKRWLLYEPPKKADQLARISSGNYDQEQLGKPIIDEVLSAGDVLYFPRGAVHQAITEEQQHSLHITLSVYQQQAYANLLETLMPMVLKKAVDRSVALRRGLPLHTFQVLGNAYKGNDCGSRKQLVENVQKLVTNYLMPSEDDIDEAVDQMAKKFQHEALPPIVLPSEEVRTVHGARSDADEQGNCVCDYKFNKKTSVRLLRANILRLVTESDGSVRIYHHVDNGLDYCKYEPYFMEILPEEAKAVELLISAYPFYLTIDQLPLESSARKIEVATALWEHGLLMTEKPFK

SEQ ID NO: 5464 - DNA, 4143 bp, DROSOPHILA
ctgttccgtatgtatatatgttcgttcatccctggatagcttgcgtgtcaatgttactttgaaatcagatattaaaccatttctttgttcgacaacaggatctgcaggatgagagccagcgcttcgatggtgataagtatctggccagcattaagacggccgccaagcgagacattgtggctgccgatgaggtcgagactctggacgaataaagccatcaatcgagcggctcgaactgacaatatagagtgtcccggggtgaagtgcctgctcccagacggagctgcagtatgcttcaatgcttttggccatggccacatctaacaatcgcaaactcaaaacgaccaaaacaaaacaaacaaaaaaaaaagaatattgaaaaatatgcaaactaaccctagaaattaccaacgaaataatcaaaaatttcaaaataactagaaaattcaacgaagctcttagttaagttcaatcgaaatgggaatccggaatattcccaatatatactaattcaaaaaatgcagctaaatgaaaagcctcgaagcggccctaacttgataatatggcccaaatgaaatggaatgcatttttagtaactcaatagagaatgacacgtttttagttggaaatttgtttctcatccttacgcaaactttgtttctcccaaccaaataattctcaaaacggaaatggaaatgtattaattcatctatgtgttttattattattattttgtaattctcttgtgacttgcgctgaatgtcacttttcaagatttgaaattgtattttgttttctctagtctatgcatcatagaaatttgtatactattttgttaaattcacaccaaattctttgaatttctgtttatgctttagttaatttattttatttattttgtacaaatacaaatcatatattcttcaaaaagatatttgcaaggaaataaaatggaatcaagatcaaaacacaccttctttcgcccaaaactccaaatctttggttatttaatttggttaatgtacatttacataaatttatttatcacacacaatggaacataaatataacaatagtttaaagtttgatatgtatcatcatagaacgttggctaggaggagtaaaatagatcgaatgaccacgtcgattgtgcggctagcagaatgtgctccgagttgcataacaagtcaagtgtagtggaaatggcattagcatcgcaattggttattggttagtaacaaacagaatcgatctattgcacatagttgcccaataaaggccgcctgttcatgtggcggcactgcatcgcgcttttggcatgtacacaaagcaaatatacatttagaaaaagaacgttaattagtcaggggctgaagtggagaagtgtcatcatcggatatgggattagaacacaacagcaagacatcaatagcatgctcaactcgactcaatattcacgtacatcgaggtgtggtatgtggcccgctgggcaggtgacatgttcaagttgccctggtgcttgcggttgtaggcccaaatcgcacaggtggccagcagggagactggaaaatgcgatggaattaactcgtattcaacacacagcgcatacatatgagcagattagactcttacccagcaggaaggacatgaagaatacctgcagccagaagtgactgccgccgctgctgtccacaatgatgcccgctgcaatggtcaccaccgctagtcccagattctgcacagactgacagctgcaaagggaacgattaaggattgaacagcttgaacagattaatgatcttacaagccatatgcagtgcccagttgatattcgggcacaatcaatgaaaccaggggccacagactggctgccaacatggaataggacagtcccattatgctcatcccgatgtacggatccaaatgggtgaaggtcagcaggaagtgagctagcagcgtggagatggtggcacagaacacccaggtcacattccttccgaccttgtcaatcacaaatccaaacagtggcgatgctatagcagagatcaggtagacaatcgagtttactgtgttcgcctcatccggcgtcatgtggaaattgctgacgaagaaggcctggccaagagccacgaaaggaaagatggcaacgtagtaggccacacataccacggacaccatccagaagtccagcttgaaggtgactatatcgcttagtttggccaattctccaccaggattgttatttcgcttaaggattctctccgcgcgcttgtccatccaacctaagtaaacgtgaaatcgaataatataaactgatatttaaatacacaagtaatcctacctagaatcaaggtgcaaaccagggacatgacgcacgttgaggaggccaggaacagggccacgcccagacccttgtagccggaataggatttcgaaacgtatccatatagtggttgcataatccaaaagttgacggtgctgccgaaacgggctaccgacaactgcagtccaaagaccatgttaatctccttgcccttgaaccatagcaccgcatagctgttttgggccacagccagcgactcagccccgatgccgaaaacaaagcgtcccacgatcatcaaccaaaagtggcccaggactccgccggtggcgaagatcaactggccaacgagcacgatcagcatgtagataatggtgcccaggcggatgccaaacacccggtcgatgaggaagccgcccacaaagcagagcacaatatttggccacgagtagatggagtaaatcagcgtgaactcggtggagctgagttgcagttccttttggaaaacgtcctgcagtgcgccgggattatcgtagcaaaaataggaacctattaaaggagttatttaagtaggtatggtcccaagtgttgttgcaaaggaattcacgttcttaccaaaacccaagaggcacataaagagcagggcgaggaagcgatgtggcgtgctcgtcggatcacagcatccggcatccttctggtgaccggctagctctgtgtcccgagtgctgcgtcgccgcaccacaggatgcacttcgtcatcgctgctgctgcaggtgctgctgctcgacgagctaacgatgggtttgcgctcctcgcgtgacattattgccacttttcgttgacagaatgatggagggttgacgggaaatttgagttgtgcgatggtaattgctatttgtggctgctcctcttttccggaattcctgttcctcgaccggtggtgggtggtgggcggtaggcggggggttgggggcgggctgtggccctactgttgctgcttatcactagaccacaccataattccgtgttgttgttgttgctgctgttgcctcagtatttgtgcagtattgattattcccgcacacagagatgatggaaattggaaaggttggaatggggggtgtttcggttaatctgcaaaaaagccaagattgaaaattgcattcccacacacacaaaacattttacgccctctctcacacacacacactcatacacatgcagatgcaggtatgtacatatatgtcacgggtgggtgtgcgttagtgtgtgcttgctaggtaaacatgaaagatctcgttgtccgttggctgactaacggttaatgggtaatcaattaagcgcttgcatgcgcataacatttagttgacacctgatttaaggctttactacgctatttgcgtattgaaagcagctctactgtggtataaattcgatatgtacacacacccacgtcaataaataggcatatgtaaatgccgtatatcaacaacaaaaaaaagggattaacaagcaaatgccccgttatcgcagtcaacaaacgaagtcacacactaattaatcactagtccacggtcttattttgcattatttacattcgatattttcgaattgcgattgtggcgggcttacgatccaggaaaactttacttaatatttcttgatgtatttatgttgattatcaacaatgtattgtgatgagaaagtcctatcacgcctactatatgttcaacaagtcgtggacttacggtttatttctgtcccctgtcgggagaagaatggtcggtattacctggtttccctacctgtagctgtagaaatgg

SEQ ID NO: 5465 - DNA, 1733 bp, DROSOPHILA
atgtcacgcgaggagcgcaaacccatcgttagctcgtcgagcagcagcacctgcagcagcagcgatgacgaagtgcatcctgtggacgttttccaaaaggaactgcaactcagctccaccgagttcacgctgatttactccatctactcgtggccaaatattgtgctctgctttgtgggcggcttcctcatcgaccgggtgtttggcatccgcctgggcaccattatctacatgctgatcgtgctcgttggccagttgatcttcgccaccggcggagtcctgggccacttttggttgatgatcgtgggacgctttgttttcggcatcggggctgagtcgctggctgtggcccaaaacagctatgcggtgctatggttcaagggcaaggagattaacatggtctttggactgcagttgtcggtagcccgtttcggcagcaccgtcaacttttggattatgcaaccactatatggatacgtttcgaaatcctattccggctacaagggtctgggcgtggccctgttcctggcctcctcaacgtgcgtcatgtccctggtttgcaccttgattctaggttggatggacaagcgcgcggagagaatccttaagcgaaataacaatcctggtggagaattggccaaactaagcgatatagtcaccttcaagctggacttctggatggtgtccgtggtatgtgtggcctactacgttgccatctttcctttcgtggctcttggccaggccttcttcgtcagcaatttccacatgacgccggatgaggcgaacacagtaaactcgattgtctacctgatctctgctatagcatcgccactgtttggatttgtgattgacaaggtcggaaggaatgtgacctgggtgttctgtgccaccatctccacgctgctagctcacttcctgctgaccttcacccatttggatccgtacatcgggatgagcataatgggactgtcctattccatgttggcagccagtctgtggcccctggtttcattgattgtgcccgaatatcaactgggcactgcatatggcttctgtcagtctgtgcagaatctgggactagcggtggtgaccattgcagcgggcatcattgtggacagcagcggcggcagtcacttctggctgcaggtattcttcatgtccttcctgctggtctccctgctggccacctgtgcgatttgggcctacaaccgcaagcaccagggcaacttgaacatgtcacctgcccagcgggccacataccacacctcgatgtacgtgaatattgagtcgagttgagcatgctattgatgtcttgctgttgtgttctaatcccatatccgatgatgacacttctccacttcagcccctgactaattaacgttctttttctaaatgtatatttgctttgtgtacatgccaaaagcgcgatgcagtgccgccacatgaacaggcggcctttattgggcaactatgtgcaatagatcgattctgtttgttactaaccaataaccaattgcgatgctaatgccatttccactacacttgacttgttatgcaactcggagcacattctgctagccgcacaatcgacgtggtcattcgatctattttactcctcctagccaacgttctatgatgatacatatcaaactttaaactattgttatatttatgttccattgtgtgtgataaataaatttatgtaaatgtacattaaccaaattaaataacca

SEQ ID NO: 5466 - protein, 431 aa, DROSOPHILA
MSREERKPIVSSSSSSTCSSSDDEVHPVDVFQKELQLSSTEFTLIYSIYSWPNIVLCFVGGFLIDRVFGIRLGTIIYMLIVLVGQLIFATGGVLGHFWLMIVGRFVFGIGAESLAVAQNSYAVLWFKGKEINMVFGLQLSVARFGSTVNFWIMQPLYGYVSKSYSGYKGLGVALFLASSTCVMSLVCTLILGWMDKRAERILKRNNNPGGELAKLSDIVTFKLDFWMVSVVCVAYYVAIFPFVALGQAFFVSNFHMTPDEANTVNSIVYLISAIASPLFGFVIDKVGRNVTWVFCATISTLLAHFLLTFTHLDPYIGMSIMGLSYSMLAASLWPLVSLIVPEYQLGTAYGFCQSVQNLGLAVVTIAAGIIVDSSGGSHFWLQVFFMSFLLVSLLATCAIWAYNRKHQGNLNMSPAQRATYHTSMYVNIESS

SEQ ID NO: 5467 - DNA, 3509 bp, DROSOPHILA
ataacattttaaataaacggcgaaatgccttgtgctttagttcgggctcaaagctaaataaattgattatgatatgatataggaatatttattaacgtagttaaagtagcctgaaaaccaaatattcaaagaaatgaaaataaaaattgcttccactcacagtaaacaaaatctaaacaatgaaattgttataaaagataaatcaaaactaattttaaacaagcgaatattgtgaatataccgaagcaaaaaaaaaatatatatatatatagtgagaacgatcacaaaatgtgtggaatgtacataaagatagcgagtgggtatcttaagaaagactgtagttaatatttaagacactttggcctgcgcttttaccaatatttttgtggcccaacttggcccgaactccttggttccaacaatattttgcattgatatgctagagctaccaacaagtatatagtattaatatttctaacaattcggaatgtgcacttaactaagcgaagattgaaactaaaaatcagaagatggaaacatcctatttaaataggtggaagtttaaataagcaaaagtctctcgcctaagccctgatcctaaactcttggctgtatttctaattgttatcgcttcatgttgaggtttattgttataacgccagcctcccatgagcaatactccccccaaattaccgtaaacaaattattttctaatctgagcccaagccataagtggagaagattagacctcaacaccacaaaaacaccgacaacaataaaataaatctaagtttacaaaaccaaactacgatatttacttttgattttgttcccttttttttgggatgatctattagactattatagttcctaaatgatttaagataaacaaaatagatatttttaagctctttatcgagcgtttatttgctgaatttcgcgatgtgctcgttaaatgtttaggtaatctcaagaaaagggccaatatgggttcaacttagggactacagtgtttgtgtggttgggtggttgtttgttgtttggtagttgccattccaggtgtccagagtaagcagactcatccttactggtagtccttgctgtcctggttggtgttccacgcctggtggacaccgtggtagctgctctgcttctgggcgggtgcgttgcggccgaaaggagacttggggttcacctgcagaatgtagtcaccctcgagatcgtgagcggtatcgatgcccatgtaggcacgcttgccgaatccatcgttctgcttgtactgctgcagggagttggctggcacggcggggaagctcctctcgtttccgggacgcacggactcggcgaagtagcgggtggcacgcatggcggcctccaccacgttgctggctccgggaacaccggcggcaggtccattgggatagaagtcaacatcaccggagcggatgggggtgcccatgccgtagaccgaggtgtggatggcgtcaacgaattcagcatcaccgcgagccagaccggtcagggtgttcttgctcttggccacgatcttggagggatccagaccggtgacacggcgcagcttgtgtccggtgagacgggtgaattcctgggcagcggcaccggcaacatgggcacccacattctggccaatcaggtgaatggtatcgaagggcatgtccaactcgttgaccatctggacgatccacttgccgatcttggcgccggtcttctcaatgtcgagcatggcataacgctcataggtgttcagcttggagcccaaatcgatcacaatgatgtcgccgctttgggtcttggcgttcttaacctcctcgctgtagtcctcctcgctgctggtcctctggttcttcctctgttcgttgctctgatcctggtagtcctggttgccgttcttgccgtgctggcgctgctgctgcagattgtagcgctgcatgtaagcctgaaccagcttcctggtcgccttcttcacggtctcgctggtctggggcagtccggtcacaatgatggtcacctcatcctcaccaaagttctgcttctgcttcaggcgctggatcatctcgttcaggggagcaacggtcttgtcaccattgggcttgggcacatagacctggatgccgctgggcacatagttgggctcaacgttgtggtggatctgcgacaggtggtctacaaaggatatatatattccatagaatattcgatgttttttttttttttttttatctgcatctaggattactcacagacttgctgcagcagctcggcgccacgctccaggttcatgttctccagacgctcaatggtgaaatcgtcgagggcgggaatggcctccagctgggatccggagagccactgcgacggcttcaatgcctggttgacggagttgtccatacggccattgggcttggccaaggcggcgaccgccaagcaagccagaaggctcagcactctcatggggttcatggttcggatttgggatttggtcctgcggatgcgacttcaacactgagtgagttgaactggccttccaaatccaacgatggtggtttatataccacaatttgcgctgagcgatttcccattttctgactcgcttttcgctggctcaggccttaatcggtcacttgtgctgagtaagggttttcgggtgcctgggaatcggatgagtgtatatgctatcgatagcggaataaattgtatacatacaaaatagacacggggcctacctatagctgaccccactgatgacttagcagcacctgctgccgcctgattattttaatttgtaatcactttgtaggctccgctgattgcaacattgtagttgtgcaccggatttgatcaaataaatgcataaaatatagatctaacatgggcattagttggttattatatacaacattttattgattttttttgtttataagtagatttatatttggcacttttcttctgcttaattaaaagtccataattttgcattttcaattcaaggccgatacagttcattgattcctagatgtttgccattgatacgaaaagtatggaatgtttgtagtttccaaggcaagatagtaagattatatttgtttttggactttagaaatgaattgattcaggggaacgtttttcaaggagattctattttaatatccgggattcgttttataatatatgatcttatcgatgctatttcatgtaactcattctacttattaaaaatatatgtatatttcgatagatgtaaatatttatatttataatattataatttataatatatttattttgcatttccctgaaagtgctatctgcttatagaacaatttagacaattcttttggcaaacacttaaatagttgcataaatttcacaaaattgccaaatatttttttcaaacaaaagctttatcttgacctgtgcatgagttcaagtcgtgcccccactgtcaagccccttaatggccagaccaccttttgtttatgttatga

SEQ ID NO: 5468 - DNA, 1534 bp, DROSOPHILA
ccgcaggaccaaatcccaaatccgaaccatgaaccccatgagagtgctgagccttctggcttgcttggcggtcgccgccttggccaagcccaatggccgtatggacaactccgtcaaccaggcattgaagccgtcgcagtggctctccggatcccagctggaggccattcccgccctcgacgatttcaccattgagcgtctggagaacatgaacctggagcgtggcgccgagctgctgcagcaagtctaccacctgtcgcagatccaccacaacgttgagcccaactatgtgcccagcggcatccaggtctatgtgcccaagcccaatggtgacaagaccgttgctcccctgaacgagatgatccagcgcctgaagcagaagcagaactttggtgaggatgaggtgaccatcattgtgaccggactgccccagaccagcgagaccgtgaagaaggcgaccaggaagctggttcaggcttacatgcagcgctacaatctgcagcagcagcgccagcacggcaagaacggcaaccaggactaccaggatcagagcaacgaacagaggaagaaccagaggaccagcagcgaggaggactacagcgaggaggttaagaacgccaagacccaaagcggcgacatcattgtgatcgatttgggctccaagctgaacacctatgagcgttatgccatgctcgacattgagaagaccggcgccaagatcggcaagtggatcgtccagatggtcaacgagttggacatgcccttcgataccattcacctgattggccagaatgtgggtgcccatgttgccggtgccgctgcccaggaattcacccgtctcaccggacacaagctgcgccgtgtcaccggtctggatccctccaagatcgtggccaagagcaagaacaccctgaccggtctggctcgcggtgatgctgaattcgttgacgccatccacacctcggtctacggcatgggcacccccatccgctccggtgatgttgacttctatcccaatggacctgccgccggtgttcccggagccagcaacgtggtggaggccgccatgcgtgccacccgctacttcgccgagtccgtgcgtcccggaaacgagaggagcttccccgccgtgccagccaactccctgcagcagtacaagcagaacgatggattcggcaagcgtgcctacatgggcatcgataccgctcacgatctcgagggtgactacattctgcaggtgaaccccaagtctcctttcggccgcaacgcacccgcccagaagcagagcagctaccacggtgtccaccaggcgtggaacaccaaccaggacagcaaggactaccagtaaggatgagtctgcttactctggacacctggaatggcaactaccaaacaacaaacaaccacccaaccacacaaacactgtagtccctaagttgaacccatattggcccttttcttgagattacctaaacatttaacgagcacatcgcgaaattcagcaaataaacgctcgataaagagcttaaaaata

SEQ ID NO: 5469 - protein, 439 aa, DROSOPHILA
MNPMRVLSLLACLAVAALAKPNGRMDNSVNQALKPSQWLSGSQLEAIPALDDFTIERLENMNLERGAELLQQVYHLSQIHHNVEPNYVPSGIQVYVPKPNGDKTVAPLNEMIQRLKQKQNFGEDEVTIIVTGLPQTSETVKKATRKLVQAYMQRYNLQQQRQHGKNGNQDYQDQSNEQRKNQRTSSEEDYSEEVKNAKTQSGDIIVIDLGSKLNTYERYAMLDIEKTGAKIGKWIVQMVNELDMPFDTIHLIGQNVGAHVAGAAAQEFTRLTGHKLRRVTGLDPSKIVAKSKNTLTGLARGDAEFVDAIHTSVYGMGTPIRSGDVDFYPNGPAAGVPGASNVVEAAMRATRYFAESVRPGNERSFPAVPANSLQQYKQNDGFGKRAYMGIDTAHDLEGDYILQVNPKSPFGRNAPAQKQSSYHGVHQAWNTNQDSKDYQ

SEQ ID NO: 5470 - DNA, 5519 bp, DROSOPHILA
acgcccgctccttggagcaccagttggccatccagctgctccttcttattgatgaaatcccgaaatttcgcaacatcttgcaaggactttgtgtgctacttccttcaccggaactgggtttcctcgattcagatctgcctcgtctgcagatcacaccattcaaattgaacttagatcctggctatttttcgtttgcggccctcaggaatttgacgtgctcgtgtttaggtaacaacatttggaaataaaatactcggcaaaaatcatatggtcgttgggctgcagtgtggccagactgtgtgtaatgtcccaatagctgcgagtgccagtgtggatgttaggggaactcccgttgtccagggttgtcatgccggattagtttcacaaattaacttccgcaaccggaagtcatgaaaatggaaaatataacttatttggtttgaatttagtgtttcaagcttattacatgaaatatgttgtctcttttttgaagtgcaataatctcaaacacttttcatttatgtaagtacatggttttggagttgccttatgcggttttcttggttgttcttctgataaatgtttggtacctcaacaagcatcgaatccaggcactcgcatccgcatcgaatcccacaggaggcgtttgacgagaaactgttgcactttacagtactaaatggttttgtgcgcagacttgctgcgcagaccaatttgttacaagctcgaatcacacacaaatctgggggcatacacatatatctgtctgcaggtaaacacgttgtttacagccacccagctatataacactaatttgagctgaggagctttcgctggctgaaaaatcgacttttatttgagcttaaacccatagagcctcgtactatgacgcgctaatcggtgaccgtattattgagtgccaaattctcgacttagttgcaatgtctactcgactctgctagccctagtattgagaaaaatcaataggaagtaaataaaaatgctgcatgcctgaaactcgctttgcggatactcttaaactacgtataatcaatttttctatcggtaaccgagctatccaaaatgtacggaatcactcaatcaactgttaacgtaagtacccaaccggctgtccgggataactttccgttctagtcctcagcgattattgattggccttgaaacccaaccaactgccaatgtgggctctccttcccctctccagaatcaacgctttcgagttcgtgatatggataacgagcagatcatgtccacttttgggaacataggtcacctgctgaacattgccgtggagcgatttataaccattggcgagatcatcgccgaggagaatattgacatcaagggagacatgtacgaggcggcgaaggaggccagagatgcgggtaagaagacatcctttccagcctggtacatccttttcattgtattttgttgtacgataggaaaatcgattgaacgactttgtgatatttcacctctaagcggcatggagctgcgccaccacatcgagccccttaaggactatggagccatcattttggcggcccgctccctgctgtcgtccgtcacgcgcatcctactgctggtcgacatcatagttgtgaagaagctgctgaccgccaagaagcgggcctccgagagcctggagaagctggagtcggtcatgaacttcacggaattcgtgcgcgccttctccgtgttcggaaccgagatgattgagctggcctacctcacgggccaccaccgcaactccttcaaggaggagcgacggcgggcgcagatgttctcggcccgccagatactggagaagtccatcgccatcctgttgacgtcctcgaagaacagcctgatccacagcgactgcgtgatcgtgaaggagaaccgggacactgtgttctgccagatccgcagggccatggacctcatccatttcgtggtgaaggacagcatcttcgacacggccaagcacatgccgttcgagaagcaggcgagcaacccgaactacgagaacgagagcatctacacgacaataaagcgcattgtgaacctcatcaagcggtacaagtaccagatgagctactacgagggctctggcgagggcaacaacaactccgacgcctacttcagtttcctggacgatgacctgtggaagtcggagaagaacctgccctccgcggcgggcggcggccgcatggtgaacaacacgaacttcaggaagcacctcagctccgagagcctggacctgcgcgaggagctctcgctcgccttcgagaagctgttcgagaaggcacacgacttcaccgactccccctacatcagccacaaccatcggaagaacatcctctcctactgcgacaactgcaagctggagttcgacctctacctgaacaccatcatgaaggatcagcacgagggtggcggtggagccggtggagttggaggagtgggcggaggccaggtgaagggtcggtcagatcccgaactgggtatgctgagcagcctggaggagctgtgcaagcagttggtcgtctccgtgtccagccagatcgaggatttcaacgagtcgctcaagatctgctccaagctggtcaagtcgttccacgtactggcaacgaactacgacatcgacaatctgaaccagcgctcctcgaagttccacgactgctgcgatcacatcttcgacatctgcaagctgctgcagcacattgcgcccacggagcggctgcaggtgcaggccaagtgcctggcgatcaacctgcggatctacgggccgcaggtcttcatcgcggccaaaatcctgtggaagtactccaacagcagtgcggccaacgagaacttcgagtccttctcggacatgtggaagtggctgacgaacgagatctccatgatcgccaagaagatcctcgtctcgatcaacaccaccaagggtgacagagatgctgatgctgaggtgggttgctgcccagagtgggcgaggtaatcactaacttacttccgatcttccccagaaatgcgaaagctcctcagacaaactaacaaaatccggtgtacctgcaacagaagacggagaaatggttgagtattctggcctcgaaggcaagaacaacggagatctgaacacatatcaatcaaaatggagcgaagacttgtcggacgacaacgacatactgaagagagccaagaacatgtccgcgatggctttcctaatgtatcagtttaccaagggcaacggttctctaagaacaactcaggatttgtttactcaagccgaatattttgcggaggaggccaatcgactttacaaagtcctccgccacttttcataccaggtaattatcggttgataatgggcatccgtgtcgctaactctgcgcttgtttaggttcccgccagtgacaacaaaaaggatctcctcaacattttagatagagtgccgacttttgtccaagcactccagtttacagtcaaagaccacacggttggtaaagccgccaccttcgtgaaggtcgatcacgtcatcagggaaaccaagaaccttatgaacgttataaacaaagtagtgtcgaagtgctttgagtgcgcaactaaggtaaataggccgaggcaggcccacgcggccatttcctatatgtagtggatgatactacagactttctcaatgtgtatgatttctatagtttactgtgatattaaagcatgcattattacaggtatgattttagagctttcgtttgttgccaggggcgcaggagaagccttttggtttttgaggatgtgcttcaatccccgtttctaaactctcaatcttattagttacatctcttactttcgactttgctaatgtagatggcgctgtatcttaatcttaatcgctaacttttgtatttcacgcatgtatgtacatatgtatcttgatgtattgagttttgagttgagttgagttgatagcttgataagatcccccatcgtgtgtttatctaacccaactgtgacctttaaccaacaattggttttggccactcataagctgcagtgccagctcctctacgaactccatcctaatcctaatccccttgctccgccttgcagtacaaactaaatttaactggcataaccggaggactcacctcggagcggtcgaacgagaacatggccggcggcatgtgcgattccaaggggacgacgagcagcagcgacattccctgacattacgggatggctcgccgagccaagggggatgcgcgaaggacgagggtgtccttcctgctgttctgagaggagcccgggggttttgctatcgtagtctacactgttggcactgcattccgttttgtgtacgcgtattagttggcggccgcttctagcgttgattaatgtcgaaaactttattaacatacgagtccaattagttgtttcagcagcacgatcttataatgcatattttgtttcactacattcgatgttacggcaataaaggtaacgcagatgcagatacatatgtatctcgagctctttcacttgggtctacaagtcggtgcgtagatagttcctgctgctttcgttcacgatgtgagtgcggggcatcatgttgcagcagctcatcttcggttcctgcgaaagattgtacaccttgagggccactgtttccttcgactggtctgtttggacggtggagtccctcagcttcagcaggttcttgaagaacatcaggtccagggcgaacagagcggcgcagatgaagcaaagtgctcccaatgcataggcaaatatcagcagatcttcggacagctgctccaccgtgaagaatatcagtagtcctggaggagagagttcatcactctgacattactgcatcccaggagccatattaccctctatggtgaagaacagaacgccacaggtcaacagaattatctcacaggtgccatagtttgaggtgccctcgatgatcctaagaggagatggtcttagcatatcatatatatatatgtcatagtcactgggtggttagttacctcgtgagcagcagcacagctgcaatgaaggtatagcccacgaaggtcagcgtgccgaagtcatcgccctccttcgaccaggagatgctgttgaggagggtccactccctggactgcttcttgttgatggcgaacacccgttccgagtgcttgtccgacaatcgctttacaatcagggccgccaccgtggcaatctaatggggatgtatctctatcattcaaggtaactcaaagtctccttctaactcgaagatactcgccagttggagaactttggtgcagatgcaagctggtagccccatgttagacgatcttgacgtgcactttgctactgcggcacgtacgttccgaatccgcctgacccatgcaaattttctcacattcaatttcgcagtttagcgtgggaaaagacgaactcaaagaagttggcctcatggcccatagtccataatagcccaaaaccttgaactgctcaacgaa

SEQ ID NO: 5471 - DNA, 2780 bp, DROSOPHILA
atgctgcatgcctgaaactcgctttgcggatactcttaaactacgtataatcaatttttctatcggtaaccgagctatccaaaatgtacggaatcactcaatcaactgttaacaatcaacgctttcgagttcgtgatatggataacgagcagatcatgtccacttttgggaacataggtcacctgctgaacattgccgtggagcgatttataaccattggcgagatcatcgccgaggagaatattgacatcaagggagacatgtacgaggcggcgaaggaggccagagatgcgggaaaatcgattgaacgactttgtgatatttcacctctaagcggcatggagctgcgccaccacatcgagccccttaaggactatggagccatcattttggcggcccgctccctgctgtcgtccgtcacgcgcatcctactgctggtcgacatcatagttgtgaagaagctgctgaccgccaagaagcgggcctccgagagcctggagaagctggagtcggtcatgaacttcacggaattcgtgcgcgccttctccgtgttcggaaccgagatgattgagctggcctacctcacgggccaccaccgcaactccttcaaggaggagcgacggcgggcgcagatgttctcggcccgccagatactggagaagtccatcgccatcctgttgacgtcctcgaagaacagcctgatccacagcgactgcgtgatcgtgaaggagaaccgggacactgtgttctgccagatccgcagggccatggacctcatccatttcgtggtgaaggacagcatcttcgacacggccaagcacatgccgttcgagaagcaggcgagcaacccgaactacgagaacgagagcatctacacgacaataaagcgcattgtgaacctcatcaagcggtacaagtaccagatgagctactacgagggctctggcgagggcaacaacaactccgacgcctacttcagtttcctggacgatgacctgtggaagtcggagaagaacctgccctccgcggcgggcggcggccgcatggtgaacaacacgaacttcaggaagcacctcagctccgagagcctggacctgcgcgaggagctctcgctcgccttcgagaagctgttcgagaaggcacacgacttcaccgactccccctacatcagccacaaccatcggaagaacatcctctcctactgcgacaactgcaagctggagttcgacctctacctgaacaccatcatgaaggatcagcacgagggtggcggtggagccggtggagttggaggagtgggcggaggccaggtgaagggtcggtcagatcccgaactgggtatgctgagcagcctggaggagctgtgcaagcagttggtcgtctccgtgtccagccagatcgaggatttcaacgagtcgctcaagatctgctccaagctggtcaagtcgttccacgtactggcaacgaactacgacatcgacaatctgaaccagcgctcctcgaagttccacgactgctgcgatcacatcttcgacatctgcaagctgctgcagcacattgcgcccacggagcggctgcaggtgcaggccaagtgcctggcgatcaacctgcggatctacgggccgcaggtcttcatcgcggccaaaatcctgtggaagtactccaacagcagtgcggccaacgagaacttcgagtccttctcggacatgtggaagtggctgacgaacgagatctccatgatcgccaagaagatcctcgtctcgatcaacaccaccaagggtgacagagatgctgatgctgagaaatgcgaaagctcctcagacaaactaacaaaatccggtgtacctgcaacagaagacggagaaatggttgagtattctggcctcgaaggcaagaacaacggagatctgaacacatatcaatcaaaatggagcgaagacttgtcggacgacaacgacatactgaagagagccaagaacatgtccgcgatggctttcctaatgtatcagtttaccaagggcaacggttctctaagaacaactcaggatttgtttactcaagccgaatattttgcggaggaggccaatcgactttacaaagtcctccgccacttttcataccaggttcccgccagtgacaacaaaaaggatctcctcaacattttagatagagtgccgacttttgtccaagcactccagtttacagtcaaagaccacacggttggtaaagccgccaccttcgtgaaggtcgatcacgtcatcagggaaaccaagaaccttatgaacgttataaacaaagtagtgtcgaagtgctttgagtgcgcaactaaggtaaataggccgaggcaggcccacgcggccatttcctatatgtatacaaactaaatttaactggcataaccggaggactcacctcggagcggtcgaacgagaacatggccggcggcatgtgcgattccaaggggacgacgagcagcagcgacattccctgacattacgggatggctcgccgagccaagggggatgcgcgaaggacgagggtgtccttcctgctgttctgagaggagcccgggggttttgctatcgtagtctacactgttggcactgcattccgttttgtgtacgcgtattagttggcggccgcttctagcgttgattaatgtcgaaaactttattaacatacgagtccaattagttgtttcagcagcacgatcttataatgcatattttgtttcactacattcgatgttacggcaataaaggtaacgcagatgcagatac

SEQ ID NO: 5472 - protein, 748 aa, DROSOPHILA
MDNEQIMSTFGNIGHLLNIAVERFITIGEIIAEENIDIKGDMYEAAKEARDAGKSIERLCDISPLSGMELRHHIEPLKDYGAIILAARSLLSSVTRILLLVDIIVVKKLLTAKKRASESLEKLESVMNFTEFVRAFSVFGTEMIELAYLTGHHRNSFKEERRRAQMFSARQILEKSIAILLTSSKNSLIHSDCVIVKENRDTVFCQIRRAMDLIHFVVKDSIFDTAKHMPFEKQASNPNYENESIYTTIKRIVNLIKRYKYQMSYYEGSGEGNNNSDAYFSFLDDDLWKSEKNLPSAAGGGRMVNNTNFRKHLSSESLDLREELSLAFEKLFEKAHDFTDSPYISHNHRKNILSYCDNCKLEFDLYLNTIMKDQHEGGGGAGGVGGVGGGQVKGRSDPELGMLSSLEELCKQLVVSVSSQIEDFNESLKICSKLVKSFHVLATNYDIDNLNQRSSKFHDCCDHIFDICKLLQHIAPTERLQVQAKCLAINLRIYGPQVFIAAKILWKYSNSSAANENFESFSDMWKWLTNEISMIAKKILVSINTTKGDRDADAEKCESSSDKLTKSGVPATEDGEMVEYSGLEGKNNGDLNTYQSKWSEDLSDDNDILKRAKNMSAMAFLMYQFTKGNGSLRTTQDLFTQAEYFAEEANRLYKVLRHFSYQVPASDNKKDLLNILDRVPTFVQALQFTVKDHTVGKAATFVKVDHVIRETKNLMNVINKVVSKCFECATKVNRPRQAHAAISYMYTN

SEQ ID NO: 5473 - DNA, 2564 bp, DROSOPHILA
ggaaaatacggcgaaaagtaaggggattattatgcttttgtttggggtgcacatgaatgtacatacgtacatgcatatgtacattagtacgtaatgctctataaggtaaggaactactcaccatgtactgtttgcgaaaatatgctagttacgaagtctgcctaatactgtccaagttgctgtggcgtccgtgtggaaatggttatgctattgcatcacatttatatattcttgtaactgagcaagttgcttaacaatttgttgcctctttgttgttctttgtcacatattttaaaggacgcgcagtttccgtttccaattggattccgttttcgttatgttgttgtggtaccaaccgactgcttgtaccctaaactactacaactacaacagcaccgtcacatttggcccccaggaatgggtaaatggttgttatgcctcgcaaatttaatatatatataactttttttcgtttcgcgacgcgatgaaaatcactcgagctctgaacttgcagtgtgaccgcgtttgctgaactagagatggccaagcatcgattgcactatcgattacctatgcattctcaaaaattcgcatccacaaagtaggaactatctgtttcgactaacggtcatactatgcaataaattcaaaatttgtttatactttttgcggacgaagagttatatatttcatattctgttttgacaaaggattgctgtttgtttataatcgtaatacaaagcatatgctattttggatatagaacactagaattcccataggcgaacttattcaaatatcaaattaattggttcctgaaagcacccgtaaattcttagtggctgaaaagtcttattggaagtcagaataattactccacacactaagcatcttagttatgctttgctttgagctaatcctggttctaactgccaccgaaaaatgattccattgtttatgccagaagtaaataaaacaatttcgaacgttatacgttaaattacaaagggaaatcgctttattaccaaatcaaaatctagctatgggtacgccacgcttagaagttcctgcaaggcgaaaaatgcgcgattagtggatgtccatcccggggattctagcacaaactcacttggtaatgatgccgtccttcttggccagacgcacgatgcagtcgtcggactcgcccatgcgacggatctcgccgcagatggcgtaggtcttggaaccgtcggtctggcgaccggtctcggggtccacatccacgatgctcagctgcacggaggcgtgatccttggcgtggatgatcctgttggacgccgagctgcagggaagggtatcggctggtcagtaatccattcggcaaattgtgcggggaacacgtgtttcacttaccatttgcggggcacgtacagatcaacattctcaccggcgtcgttctccattttattgggctgaaaggtaagggacacaattagcttgctttttattcagttttagtggcggccactgctggtttactcacttttttgtagaaatttacaaatctagcgaccgcaactcgtcggtgaaggcgaaaaagagaaagaaatgacagctggacgtgaagttggctgcgctgcgcgtggcgccccctgtcggaagttttgcgtaccagctggttttggggtgaccagctggcaaaggttttggtatttatttaattgtacatttttgcaagatatttccattcccctttaatgaataggcatgtttcaattttggttatgcaccaaaatgtattttaaaattaaatgataattaaaaaaaaatttcacttggttttgtaagtaaatatcaatagatttaaatatatattttcccgcattagtggaaaataccaaaatctaatgaatgacatattagatacatgttccagcagcgactggtcacactttcgaaggcctgagcgaaggctgcagatttcgcgtcgggaaaattctattgcatatttaggggcgcatcaagtaaatggctcccattagagtggctcaatatatattattcgcaagctcccaactgcacggacttacttatttagcatgtgagtattgattttgcaacagccagtcagtcagtctgtgattttgttttcgctggatgggcgttcagcgcgactgccctttgacctcgctcgatgtcagcagcgattttcgtcaatggatgcggacccccactttttattgccacttcgcgtgtgtttgtgcggctgttggggcgccccaagtgggcggcattgttttcatcgcgcgccatgtcgcggaattcgcagtccacgttgcctatttataggcgtcgctcactcaatgaactctctgatcgcatttcattgtgagttcggacttagctttttcagttggacgccaactttggaagcaatcggttcgcttcgcgtcgctcgatttcaaaaatcccaaacggcgtgacttttgccttattgttgttagttgtgttttttcgactgaaacttcttgaggtgagatttcacaagtggttatgctgcttgttgaccttttgtgtgtgcaaat

SEQ ID NO: 5474 - DNA, 360 bp, DROSOPHILA
cgacgagttgcggtcgctagatttgtaaatttctacaaaaaacccaataaaatggagaacgacgccggtgagaatgttgatctgtacgtgccccgcaaatgctcggcgtccaacaggatcatccacgccaaggatcacgcctccgtgcagctgagcatcgtggatgtggaccccgagaccggtcgccagaccgacggttccaagacctacgccatctgcggcgagatccgtcgcatgggcgagtccgacgactgcatcgtgcgtctggccaagaaggacggcatcattaccaagaacttctaagcgtggcgtacccatagctagattttgatttggtaataaagcgatttccctttgtaa

SEQ ID NO: 5475 - protein, 83 aa, DROSOPHILA [sequence omitted]

SEQ ID NO: 5476 - DNA, 12462 bp, DROSOPHILA
tttgtagtaaataagtgtaaaataaagtttaggcttaaacgaaaactacttgaaatgcattcttactggtggggatacaacaatggactcctttttagaaaacacttaaaaaacagtttgcgttttataaattgtattttatttgttagttttatcacaaaaattgtatggtaacttaaattgtatgttggattctttccttttgtggattttgttttgtttttctttgctttgacaaattttgtgtagtaactacaataaaatttatatatatatattatatatgttcgtgtgtatgtatatatgggcgcagcttatacaaatcagtttcttaaggagtaaacttaaaggttaataagaaacgtatttccatcaagtacaaattaaaaacttgtttgcttaatttaatattcgccaagtactcgtgttttgcttgcttcttgtttgcatccatggatgaaaccgataatgaaatgaaggaaatcaaaatgctttcataatttaggtgtaaataaaagaaaactataaactataaatcagcatggggactgactcactggcgcatctaagcactatcttctcgcttattcgctcttcaggctacttggcaacgcgttcgtaatcataatctcaggatgttctcgtttctgtttccgtttccgtttcgctttcgcaattgatactgacctacacttattctacgtaatatttggcttcttgtaatacactttgcttctggaaatctgcatgataatttgagagacgaaattcactcgttaatcgaaacgcttttcgctactcttcttgtctactcgctagagatttaaacctatgtacacggttgaggatagaaaggcgggtgctaggacccacctcgcgtgtgatgtgtaaactaataattgagcattgagcaaaacctgtgcaaaacgcatgctaaactaggtaagtaagtaagtaatgttttgtctgtgggggttcagctgatgtgtgtggtagcctcttaggacgcagctcccgcccgaaccgcctctgcggaggtgctggcgctgacctcctcgcaaatggtgtgcaacttctccatctccgagctggtcacgatgttgattgagctaactttggcccgctgataggccaccacggtgttctcgcccaaacacttgacgcacacatagccaatgagcacggcgatgcccactgtcatcacgcgcaccagcggatcaacgtacatttggatcaccacccaggcggtggcaccggttacgcacatcaaggtgatcaatataaccgtcttggaccaatgctgaatggtgaagcccttgtcccattcgagtctgtaatagagtgtcgtgttatcagttatttaccatcagttataaaatggtctaactgatagctatgtggcggtgacccatttccctatttgcaaatggcacttactttttggacttttcgatctcgtagggatgtccgcagaccttgcacgacaactgcgcctccgaattgctgcagctctccaccagccagcgcttgagacactcgtggtgcaccgaacttacgtcgccagtgcagcggcagggctggatgaggggctctggcttgtcggagtcgtaacagatccagcaatcctttttggttaaaaacgactggccctcttcgggcgagagcttgttggtctccgcatttagagtgggtatcgacggatcaatttggcgggatagaagcttgcgaggatttagaatccagagctgttcaggagccatcgagttccaaaggcagcagggaaaccagagagccacaccgatctcggcgatgcgaaaaatgatgtcatgccagttgcgcgagttaactggaaccctttgtggtggcgaaaagaaaagctttttgtcaaattggcagctgcaaaactaattaaaagcctctactcacttggtcttccagaagtcgcccaaagtttcggaagtcagaaagcccacaatcacgattagcatcacggcctgaaacagcagtccgaatcgcgactgatgcaattgtgaggcattcacaattgcctcgctgggaccgagaatcttgcccgtctggtcgtaaacgaaaccgccgcgcagcttaaagaacacttccacgccgtagatgaggaagaagaccaccacgatcaggagtaatactgcatagcatccgttgaagatgtgggcgtagtcgcgacgctccgcgttgatcagcgagttgaagacctctatgccaaacaggctgtacagaaagaagttgaaggccacgaagccgaggaagctcttcgacagaaactgcgacttctcccagcggatgtcgcgcaggtgaaagatctgcaatggcgaacgtagcaaatgtgaatgagtacccacgccgatttggttaccactaaaagtcgcccgcagttactatttatattccagatcaagtgctaatatacgtatgtacactcgccacccagcttaattacttgtgtcagcctatcgggaggccccaagataagttgtgccaaacacaataaaattggctcgagtacaattgcactcgactcgttatcgcgcatctgttagatacgaaatatggcaagtacaattggacgcactttgctcgataatggaattcacatcccagtactgaaagttctcagggttcgggtgcgatcaaatacgactacgtcaggctgtcgttcaatcgccatatttaagttagtggtggactcgtgacttgaaatactgcctataagttctaacttatcaccaaaatttataagagtttgtagcaccgcggaaacgttatctgtatcttaagtgttaaagacgcttagggatgagaataaaatgaaatattgcaggtcttgcttacatatagtactactggacaaaagctattcgatgcaattgaagaggtatattattatgtaatatttgcagatagtaacgtttacttgtttacaaccttatcttttgctcatgactgtcatagtcctaattgataccattaagatttcattttcaaaagtacacaattaagcgaaattttctattctcatttatccttccttaaatatctagcttatcgtggactcacctcggcccacatgcagacaattagcgaggcgcaggtcatgagcaatggatagtaggcggacatcagggtgacagcccattgtggctgcagatccagctgaaatgcaaggagattgatgaaatcaaacgatccgatcgaagtgggattgcgtttactcacgggtgtggtgaagtaggcacctcgcaacgaggccgccacaaagaccatgaagtagagcagtttctgggtggtgatgcgacaggcgcggagtacggagggctgcttcagccgctgatattcggccacgatgcagatgagcagctggatgaccgagacgagggccaccacgtagaagacggtggagattccggcgtagtagggcagattgaagatgtcgcactcgttgcccgcgtaccgaatgtcgcagacgcaggtgttgttgacgcaatcgccccgtcccgagcagctgagatcgttgtccggcgtaaaggggccgtagatgcccccggcggccgacttgctgtgcccattccgcatctggctggccgccgcctccagcggcgattgcagaactcgcttcgagcaacgcattaaggtatccaggctcggcagcatcctatgctaaatcaactgcaaatagagcgaacgtacatcttaattaatacatcagggcagcgcaaatcgatagtccggctagataagcaacaaacatctaacagcatgatactccccgccaaatgtggggccaaagggtgtcatttaaataaacattgaattctggtgtctggacgggctgctcgctggctctaaaagcaaatgcaaatgtttgcacagccgacgcagggcaatggtggcattaggggtactctctctacaactcgagtggttcactttctgtggcccacaaagcatgcacaaatgaaatataaattgaaaaacataactatggttcttacaataggaatacatatctacctttaagaacaaagaatacccgaattctttaggcgatagttgaaaaatgtcatatgcgtgtttcaactacctacgattcatttaattaaatagtatctggcctagattctatcttcgatcttagctatacactatacttaaaacaaatatgttaatggaatatggttcaacccctaccaaccacaaacacacaactgacagccacccagagtgctgatggcacacggaggaatatttcaagagggtaaactgggcccgctggcacttggcattattatgccagcaacgattctaagccggcacagcccaaccttccgcttccgtccgtctgttctgtccgtctatcaatcaaaaagcacacagggacatctgaaatggcgagagactggggcatcgataataatgcctgccagcaacttgacacccacgatataacacaatgaagtacgagtaaataaaaccgatccaacatcgggacaggccacaaactgcaattccattgagctgtcgttctacattagccaattgaaatgctcttcttgctgtggtcaaaaccaattgatccacatggccacatagggaaggaaaggtgtagaaaagggtaggaaagggcgtaccgacaattattacctattaactgggatattaattacaatgcgatgcttaaaaaccttttttgagctaattgctaaatttgtttttaatggttatgaggtcgttgtgtccgtcacagcaaatatatttgctcgtttcgaccgagcgcaagtgtgttctttttttttatcattgataagaaacgttttcttagaaaagcttctctctattaagtgctcctagttcggcggaaaaagcgtttataggtaattggaaaaagcaaatccgaaatacataaacaatagattttaaattgttcacctgggctcaataataaatttatttttagagctgttgctcaacgcgcagaaagcaaaccaaaagggttactttcgttccaaaattgtggattttctatttagtcaagaccaggcgaaagcggaaaccagactgaaatatcttcataaatcatgtgttgccatagtggaaaatccatttaaggccgaaaacaaataataaaatgagccggctaacaaatcataaataaggtgttaaggttatgcatttgcacacccatttggatgtttttttcccccattttagtcgagtgtattagtttagctttttgctgacggcgacaaactggcgataagataaagccagtcaaaagtcaaagacaaagccaactgagcgagactttttttcaaatttcaaatggaacgtggagcttttgtacagaaaaataagtttatcgagaaagtaaataaattttaccttatagggaatacaaaatgcatgattcatgctcctagaagttagtgtaatttgtcttaatttgataatgattaattgacttgatataaacacactgtatacgatgagtttgttgataagatacttatatagttcaagaagtatatcatgattactttggcaattcgcaggtaacaaacttgacaagacgctatatttatttgctataattttatattacaagtcatagcaactgcgttgctgaaatttaattagaatatttatacgataagagagtatcatgcctgcatagcctgaatttggttttgtttgttcaaatttggtcaaagtgcgttgccagcgaaagtttattagagcggaaatattgaaatacacgcaattgcaattcccagttggtccgattaaagtcacccaccattgtaataaattgaattttctgcgtttcgctttcggtttcatttgtggcacagacgatcatgggaaaccggaaaatgcaggcgcgcagcggacatatccaatagttttgcgtttatatctttcttttttttttttttttggggcagcactatcttctgttgtagtgtattgtaacaaaaatagcactagaaagtaaacagaatacgcgatatatttatgagtgccagccagtgcacatatgcgattagttagcagatacgatccgaacgatcagcgcccgactcgcaaagtattcagactgaagtgagtacatttttacgggcgatcctcgcctgctcgtaagttcatatgccactcaaagtgagtctccggctctccggttctctttcactcgcacttttgagtggcttcatcgagtgctgtgcgtactcgaattctttttctttattaacccaccaccaccagcaagtcggcaattaatttccatcacgagtcggcggcccgtccgctttggcttaataaatgtatccataaacaaacagacgaagttctcgttgttttttatccccggcggtatttggaaatggaaataaatttaaaattcgcatggactagcagcctatctctttgagcaattaagaatgccctgccaacaaatatttgaattgcataatcgcttatcagtggccaagtaagctcgaatgcaggaatttaattatttaattatttttaaaaatagcgattgcagcagaaacggaagcataattaaacaaacaagtcgctggattaatatccattaacttcaagtgcaaaacactcagttgtgcgtgctgaaagttattgttgttactcaacattaaaatgttaaatatatgggtataataatgtaaatatttcctgttagtggatgccttagaggaactcttcaacccacccatgcagtccaatcaaaagtgtgactcccctgcacctaagcacctaaacaacttttattccacacaaagaaaggcaaaaagtgctcaatcgtcgaaactagttttcatacgtccgcagctgagtgcttttcaacaggtttttcgaatctgtgcagctctccggagagacccgaatagataggtatagatatagatatataactatagatgccaagagctgggggcccttggttgaacgaacgctgggcaaaagttgtgggtttgtcgtgttttatttacacgtaccgagagtgcaaacacataatgttgatcacgtcacgacagtctttataagcaggtactccccatgtctttgttttttttttttttttttttcgtgagtctagcccattttagagtacgttggttggcagtgcacgccatttggctcgcccgtgcccataattgtgcctcaaataatgcatggtaattttaatttgattacgcttctaaggcgctcgtacatatacacaagtgatagaatattttataaacagctaattgctgcgacttccactggccatgagtatgaagtattaagtataaagtataaagtacggaatgtatatggaagtggcgtgtccgttacgcccataaacaaaattatagtaagtgacaagcgctgaacgaataatgatacccatttggctgagaggaaagttttgggcatgtaatttggccgaaaggcaggagcggctaactccttgagatagcaaatatcaacttgtatacaaagaggttaggcgcaccgaagaaggcaagtgagctagtgaagattgcacaactgcgacacgagccaaagaatatttgaattttaaatgctcttttcggcctacgtgaggcgtctcgttgaattgattgataataaattgatcaaatgactgaggaatactcgaaatgccagctcacgaccttcaaattaactggaaagcggtcgcctgagccaaaaagtttgccacactagttcggcgcgcataactcaattaatttccatttagccgtcattagcgttcattaaagaggaaaacgaaataatctcacaggcattattcgatcccatgaaacgtgcaactttcgagctgctaatcgagtctataatggagggaatgaatattctgcaaacaattttttggaaagccacgacaaattaaatcctcaaaacaaacaaaaattgtcgtatatgcatatgtatctgttcctttagtttatataaaagtagtcggcaatcaaccggtttggagccagttaaacgtggaccataaccaatattgtcagcttatatgcggttgggattctgatattattgtatacatatgaaagccatttttccgcattattttccgatggcaatcatgcttttaccaccttaaatagcatgactaactactatcttttgagatatgatgggcgtgactcacgtgtaattaacaataaagtttgattcaattgcatggtgattcatgtgcagagcaaatagtctatttcaatcaattgcatgtaaacaattgagtttcgcaagagcaaaataatacgttttaactcgattttcccaaagataatttgaacttgttaagtttgataattgaccagagcaacgccctcaaatttcttatcacccctaaaaacattagtagtagttaattatgatgtcacggaacttgaggttcgacagtgatagtcttttctttcttttaaaagtaattatagatatgtccatgcgtacaacacaatgattaaatgaaaagtaagtgctgctgaccttatatctgcaaatttgattcacaatttggcgcattgtgacgaaataatggcataatttaaaaatactgcaaatgagacaactaaaacctcataatgaccaactatttttttaattcttgtacattcggcgtaattgcatcattatttcggatattacgcaaatcccaggattgacgttgccattaaatcagggaagataaatatttcagctcaatcgattttgcaattagatatataattgtttatcaacaactgtaataaatcagcgagcaaaactggaaactactataaaaacaacatttccatgcagattacgtactaaataaacaagtcatgcgtttttaatggcttttggggcaagaaacaaacacctgtttctaagtacttacaaagtatccatttgagcgctacggtttttggagccctattggggtaatatgagtgcaaactgtggcccactatgttgtgctaagcgtatgctgaaagagaagcgctgatgttagccaaatactgaatatttaagccccaaacaccagaggctgcagagccatcggaaaataaaacaagagtaagtcatccacaaggcctctcgaaggcaaaagaaaactaaacaggccacacaaaaaaagggtggtactagccgtattatatgaatatattatttatggctttaaaagtggtggtatagaacgtatagaatctattgatatccccatggaaattatactaggttcattgcatacatttgagagccttagatctagcatttgaaaatcccaagacgtagttgataacacgcttgagctgccaaagtccttgaaaaaggttaatgaattacctaagaatttaacctacaaacaaaccgaattccttttacttcgtctccccagcttttcccacccaaaaggcgacgcttccgtttattcggaatacagaattacctgaatacatttgcattcgatatttgactacattacttgggcagatgccttccctcaaaagtttgcctttgagcgagcgcgtgtcatcgcaacttggaaaagcaaatcgtgcaatcaatgtaagcgaattaatgtacatatttacttatattggcaaagaagtgcgcggaaattgaccgttttcactgacctgggaaaattgcgagcgttgcagacaaatcatgagtgtaaacaaaaagattgacatattttacttattcatgtacatggggtgcctaaaagtgcacacaagagtacgatcaattaaactgattgaatcacttttaaatgaaatgcttcggcattgcgtgtgtcgattggagaagtgaaaagacacggagatcttaaaggaaaatacagtgaaataaatatatatactgaaccatatattattcaaaaactttaaaaattgcttatcagtcgtttttttttttttttttgggtgcaaatatcgcagcgaattcttgagagcttacattttgatttcaagtgggaaaaaactttattaaaatttaaaacgtacttttaacaacaaatctcgtcgtgcttatcgttcttttgaattaagctatttaagataccacagcgaatttgttagttttattttgcgaatttactgccttaattcttagtcataaagaaccagtctcctaatgaccgtttgtcattgaaatcaagggttccctgtactcgccaatcaacttttgagtgcaagtcaacagacagaagatatttatttgcggacacgtagataagttcagctgcttcttctttttttctgtgtctaaatatgataaaaatcatatgggagagcaataacaacaaagagagcaccgaggcaaaaacaaaaacaaatttggctgaatggaggtgggcttttgtatctgtgtgcgtgtatttgttatgtgtgtgtgcgacatgtatgaatgtttgaaagccgttactaatggcgaatgacgcggcaaagagcatggggcgtggagagcggaggaaagggaaaggcgcccggtgcaaattgagtgcaatttgggtgcaagtgcaccgggcggaaagtgggcggcgcacagtggggcaaaagcagcacaccttaaatgtcaaggttttatgtaagcaattgcccgcccctatttagttttatttatattgttattggctgttataggtttggtttttggcaacgatatatattgtaatatattattgaatatttattatgaggcatggcatttttaggatacagcaaaaacaattcaaaagtaatcaatgccaaatgcgaaaataacttctaagacctaatgattcttcagctaatgtaaatggaaataggttttttcgccattatggtacttatgattatcactgaggaccgtgcacctggaacggctcgttagtgagtcaggaattcagcacgcgacaacgcgagaatggaaaatacggcgaaaagtaaggggattattatgcttttgtttggggtgcacatgaatgtacatacgtacatgcatatgtacattagtacgtaatgctctataaggtaaggaactactcaccatgtactgtttgcgaaaatatgctagttacgaagtctgcctaatactgtccaagttgctgtggcgtccgtgtggaaatggttatgctattgcatcacatttatatattcttgtaactgagcaagttgcttaacaatttgttgcctctttgttgttctttgtcacatattttaaaggacgcgcagtttccgtttccaattggattccgttttcgttatgttgttgtggtaccaaccgactgcttgtaccctaaactactacaactacaacagcaccgtcacatttggcccccaggaatgggtaaatggttgttatgcctcgcaaatttaatatatatataactttttttcgtttcgcgacgcgatgaaaatcactcgagctctgaacttgcagtgtgaccgcgtttgctgaactagagatggccaagcatcgattgcactatcgattacctatgcattctcaaaaattcgcatccacaaagtaggaactatctgtttcgactaacggtcatactatgcaataaattcaaaatttgtttatactttttgcggacgaagagttatatatttcatattctgttttgacaaaggattgctgtttgtttataatcgtaatacaaagcatatgctattttggatatagaacactagaattcccataggcgaacttattcaaatatcaaattaattggttcctgaaagcacccgtaaattcttagtggctgaaaagtcttattggaagtcagaataattactccacacactaagcatcttagttatgctttgctttgagctaatcctggttctaactgccaccgaaaaatgattccattgtttatgccagaagtaaataaaacaatttcgaacgttatacgttaaattacaaagggaaatcgctttattaccaaatcaaaatctagctatgggtacgccacgcttagaagttcctgcaaggcgaaaaatgcgcgattagtggatgtccatcccggggattctagcacaaactcacttggtaatgatgccgtccttcttggccagacgcacgatgcagtcgtcggactcgcccatgcgacggatctcgccgcagatggcgtaggtcttggaaccgtcggtctggcgaccggtctcggggtccacatccacgatgctcagctgcacggaggcgtgatccttggcgtggatgatcctgttggacgccgagctgcagggaagggtatcggctggtcagtaatccattcggcaaattgtgcggggaacacgtgtttcacttaccatttgcggggcacgtacagatcaacattctcaccggcgtcgttctccattttattgggctgaaaggtaagggacacaattagcttgctttttattcagt

SEQ ID NO: 5477 - DNA, 2165 bp, DROSOPHILA
attttcatcgcgtcgcgaaacgaaaaaaagttatatatatattaaatttgcgaggcataacaaccatttacccattcctgggggccaaatgtgacggtgctgttgtagttgtagtagtttagggtacaagcagtcggttggtaccacaacaacataacgaaaacggaatccaattggaaacggaaactgcgcgtcctttaaaatatgtgacaaagaacaacaaagaggcaacaaattgttaagcaacttgctcagttacaagaatatataaatgtgatgcaatagcataaccatttccacacggacgccacagcaacttggacagtattaggcagacttcgtaactagcatattttcgcaaacagtacatgcatacgcttagcacaacatagtgggccacagtttgcactcatattaccccaatagggctccaaaaaccgtagcgctcaaatggatactttttgatttagcataggatgctgccgagcctggataccttaatgcgttgctcgaagcgagttctgcaatcgccgctggaggcggcggccagccagatgcggaatgggcacagcaagtcggccgccgggggcatctacggcccctttacgccggacaacgatctcagctgctcgggacggggcgattgcgtcaacaacacctgcgtctgcgacattcggtacgcgggcaacgagtgcgacatcttcaatctgccctactacgccggaatctccaccgtcttctacgtggtggccctcgtctcggtcatccagctgctcatctgcatcgtggccgaatatcagcggctgaagcagccctccgtactccgcgcctgtcgcatcaccacccagaaactgctctacttcatggtctttgtggcggcctcgttgcgaggtgcctacttcaccacacccctggatctgcagccacaatgggctgtcaccctgatgtccgcctactatccattgctcatgacctgcgcctcgctaattgtctgcatgtgggccgagatctttcacctgcgcgacatccgctgggagaagtcgcagtttctgtcgaagagcttcctcggcttcgtggccttcaacttctttctgtacagcctgtttggcatagaggtcttcaactcgctgatcaacgcggagcgtcgcgactacgcccacatcttcaacggatgctatgcagtattactcctgatcgtggtggtcttcttcctcatctacggcgtggaagtgttctttaagctgcgcggcggtttcgtttacgaccagacgggcaagattctcggtcccagcgaggcaattgtgaatgcctcacaattgcatcagtcgcgattcggactgctgtttcaggccgtgatgctaatcgtgattgtgggctttctgacttccgaaactttgggcgacttctggaagaccaaggttccagttaactcgcgcaactggcatgacatcatttttcgcatcgccgagatcggtgtggctctctggtttccctgctgcctttggaactcgatggctcctgaacagctctggattctaaatcctcgcaagcttctatcccgccaaattgatccgtcgatacccactctaaatgcggagaccaacaagctctcgcccgaagagggccagtcgtttttaaccaaaaaggattgctggatctgttacgactccgacaagccagagcccctcatccagccctgccgctgcactggcgacgtaagttcggtgcaccacgagtgtctcaagcgctggctggtggagagctgcagcaattcggaggcgcagttgtcgtgcaaggtctgcggacatccctacgagatcgaaaagtccaaaaaactcgaatgggacaagggcttcaccattcagcattggtccaagacggttatattgatcaccttgatgtgcgtaaccggtgccaccgcctgggtggtgatccaaatgtacgttgatccgctggtgcgcgtgatgacagtgggcatcgccgtgctcattggctatgtgtgcgtcaagtgtttgggcgagaacaccgtggtggcctatcagcgggccaaagttagctcaatcaacatcgtgaccagctcggagatggagaagttgcacaccatttgcgaggaggtcagcgccagcacctccgcagaggcggttcgggcgggagctgcgtcctaa

SEQ ID NO: 5478 - protein, 562 aa, DROSOPHILA
MLPSLDTLMRCSKRVLQSPLEAAASQMRNGHSKSAAGGIYGPFTPDNDLSCSGRGDCVNNTCVCDIRYAGNECDIFNLPYYAGISTVFYVVALVSVIQLLICIVAEYQRLKQPSVLRACRITTQKLLYFMVFVAASLRGAYFTTPLDLQPQWAVTLMSAYYPLLMTCASLIVCMWAEIFHLRDIRWEKSQFLSKSFLGFVAFNFFLYSLFGIEVFNSLINAERRDYAHIFNGCYAVLLLIVVVFFLIYGVEVFFKLRGGFVYDQTGKILGPSEAIVNASQLHQSRFGLLFQAVMLIVIVGFLTSETLGDFWKTKVPVNSRNWHDIIFRIAEIGVALWFPCCLWNSMAPEQLWILNPRKLLSRQIDPSIPTLNAETNKLSPEEGQSFLTKKDCWICYDSDKPEPLIQPCRCTGDVSSVHHECLKRWLVESCSNSEAQLSCKVCGHPYEIEKSKKLEWDKGFTIQHWSKTVILITLMCVTGATAWVVIQMYVDPLVRVMTVGIAVLIGYVCVKCLGENTVVAYQRAKVSSINIVTSSEMEKLHTICEEVSASTSAEAVRAGAAS

SEQ ID NO: 5479 - DNA, 14283 bp, DROSOPHILA
cctagtatactactttactgaaaacgcaaaattgcataatttaaccaatttttttatgtgcacaacacacacacacacacacacatcttttaaatgtatatataaaaaactgtataagccgccgcataaaaaaaaatatatatattgatatatatacatttatacctacgcctaaacaattaaacaaattcatagtgtagctataagtcgaagttagtaaatagcaaaaagtacataggaatatatatatagatatatatattttttgtatcgcccaaagtaagaagttctccaacatccgaaagttttcctcaacataaatattctcttttctaactaaatcgtttcgttcagtgtacggcagactggaaagtatttttatctcgtctcttgtgtttaactgttttacgctatgttgtctaagatagttgataagttaggctaacacgagagaagctaatatttttaggtttatcatttaatttttttttttgttcttcgcttgtaaggtgttcaccacttgcgtttgcaagtcattttcatgtcatcgcgaaatattttcaattgaaatacatctatttttacataattctatgggtttttggattttcattcaatttagcatatggattctcataatcaaatttaattttaaagtaagacattttttcaagtgtcgataattatggttgaccatatagcatggtcacactggcatggtttgctataaagtgaattaaatgttttgcgtcccaagtaaatgcaacaaaagctgggaacaaaatgtcattgctctcaagagttttgtttcacctattgggcggatgtttatcaataagtaaagaagaatttttagaaatttattgcaacatttaaacccaacggctatgaccagctgatttgctataaatacagtatattagtgtgaaattcagtattttccatagaagtaggcccgcattatgtatggtatgttttagtcactccacgaacggtaacactttggcttgtttgcttgaaaaaacgtaactttttttgttgtaatgaaggaagcagcacgggcagtagaccaactcgaaatcgcgcattgccaacacgtaacgtaccagcccgtgtaataacagaagaaaccccgagccgcaacaacaacccccgaaaagcggtagttgtaagagttttcccaaagtggcagcggcaattacacggcgagaaacgagttcgcgtcgcgtccagctgtttgaaaatcaaaattaaccgtttttagcgcgtgaaacaagacgtttagaaccgtgttcaaaatgtaagtgccccagaaaagccgtagattacggaaaaactaaagctgtggtaaagtgtcagctagtctagtctgctagtgtgtgtgtgtgtgtgtgcgctttgcgtcgatgtgtcttaacagttatgtctggcatagataaccgtctttttctcccctccctctctaaaacactcttctccatttcaattttccattgctagctgtacattgtgtgcgagtgggatgcagcataacggagagtcgaacgatctcaccctctcccgctcccgctctctcactcttctactcctctccttgtctgcctaataggaaaaccaataacaatagaaaaaaccacaacatatttgattgcaaattgccaagttaaatatttaaacgcagtgtgctttttgcgatttggatgccatgtccttgacataaatgcagttttttcatcgtgttgtgtttttttttttttgtttcgttacggccatcgattattcccgtgcagttgccctcccatgtgggggttgctttcgttgttgtctgtggtctgttatcattccagctttaatgtggcatgataaggaggtgaagtttaaaaatgtgaaacgcagcgaggtgcagacgtaaataaccacatcccccggatttgatttcttatcggccgctgcggttttcgatttctcgattgtcgtatttatagagcctggaatttccttggcattttcttctcccacagagcgctctttatctctatctgcctccacccattccagttgaccttccacttccaatcgctccttggaagtcatgcactaaaaatagtacgaacacatgcacgaaacataaacagattgtcttagatcacagacagcgtgaaaggaaaaacaatagcaggccaagttcattgtccttgatcactgacggagagatactgtgggtgagagagagagagagagagggggagttctgatggtagagtgagagagggggggagtactgatgagagagagggtaggagtcgtggaaagtgacgtgtcaccttccatcgaatgcactgtgtgggtgcgacagagagggggcgaacgggttcagttgcctggaaaagggggtggcatcaccacaacagccccagaaaatatcacttattcgatttggctatgaaagtatcttacaattccaacttttcaaagtaactagctttcaaagatcacttaaatctacggatcaaacattatttattgataatgtgatagaacctaaaagatcaatcaatcagttgtaatgcgatcacgtattgtttactgggggggggggggggggctttccatgtaaatatgtgtatttcgaaacctcccccagggagcattttatttgcactagcacaactttcacacgggcgccaatatgagggagaaacgaaaccctacccctattttttttcaaaccttatcgcagttggcttcatttaacgcttatcggcgtaagtcgccgtcttgtattttgttcctgcgacttgggcttgggcttgagtcatgaattatttcagcaggcgtgtgggtagatatttttggaaggtaacgtttacttggcatcggagcaatcggagttatcagcgttctgcattctgtgtacctgccgcgggcggtacctgcgagtcaatatcaataggtttggtcttatctgcattccaggccgggaaacggcagcgaggcgaagccataacagagtttttactttccaggcggatcagtaacctgtcgactgttgtcattactgtccgtctatagtttttagctcctcaagtttcacatatatatatatatatattttttataaagcaaaagaacggctataaaagtgtaatagaaaaacgaaagaaaaaagccgcagttcaattcaccccgactcggaagtgttttgactgagtgagttttccgcttctggttacgctgctgtgcatctataggttctttaagaaaaacacttcttcccaaaaggaaaaacttgcagcgccgccgcaaacaagcaacacttaacgcccataaattaattacagccaggcacgctaggaatataaatgtgaaataaaaaaaaaaaaaaaaatctaggaaaagcgactagatcgctggggcggagctaattagcggcgaatagagccgatcatatttcatattttgaccaagagttagccacaaaaagctggtcgagctgtaccaaaagttgatatagttaaaatgtttcaatttcgaactttttttttttttttttttgtacggagatcgcagcgaatagcttcgttttcttttagcttcttcggtatgcagaacgccaccgagggtagatacatccaaaatacatgacagcccacccgctgtctcttcccaacatagccgccatttattctattctaagccgtgattgatacgcccccaaaacgaaatgggtgcgaaaaagaagtaggggggcgaaatagaaaggcaattgtcgggttgattagccaggcccaaagcacagagcccaaaaggccaaattcaattccagacgttgattaatggcttttggggccaccaaaatgtcgctgtagtccgtcgaaaaacagcacaaataaattacaattttattcaaattcgaaaaacaacaccgcaatacatagagcaaccattctaattaattatttttatctgcttttttttttgctctcttgcagccctcgtacataaattgtgtgtacatttatatatatatatattttctacgccacgttaaccagactttttaagttttaaattaaaactaaagacgtattatttttttttttttgagtgtttatatttttttttttgcaagttttgtttggttacatttgagtttgtgttgagtttttgccagccaaaggcgcttaagatgtttagtcccgagtacgagaagcgcatcctgaagcactacagtcctgtggcacggaatctgttcaacaacttcgagtcgtccactacgcccacatctctcgaccgcttcataccctgcaggtgagttggttaccaaattttcaaatgatagaatggtttctgtaactttgtaactttgtttgggtgcattgaactctgcacgagccgttatttttttatttttttttatttttttgctacgtcatctcttccgctggcgaaagcaaagaacgaacagcagcaacctatgaatttcccgcctggctgcgcctcgtttaggtaacggtgctcccatgtccgccggcgggcagaagtagcaacaaacaaataaacaaagtgtagcaacaaacaaacaagcatggccagcgataatttacatgatattataatagtggaaaaactgtgcacctacgacggtgtcaattgataggattgaaatatttgaactgcattctattttctatctatattattgtttaaactaatttaaaataaatgtaatcataacgaaagaacttgcgtatttctgcttcattcgctaatgagttccgcgtagaaatcaaacacgaaatgagttaaagaagcgaaaaaaagcgacattaaccaaaaacttcatgggaaaacggggaaatctgaactcttgtgtggcaacatgggttcaacgacaaggcccaaaccgacgtgagagttcagcggacgagtcgaggagaagagttggtaggaaacagaaaaatggagaaacacagtcgtcgagttggtcattattttcagcgttgaaacttaattagtttccggttagaggtggcatattatatgtatatatatatatatatattttttttttgattgaattgtcattcgttgcgcctgcattttgtatatgggatatttttcaacgctcaaattgcgtcccccaaccgtttatgaaatttgatttattcgaggtggaagtgagcacttcaaatgcgtttgccagatataatcattaaaaaaggggtaaagtcggtgggggggggttggtattatttgcctttgtcaaatgacacacagcgaaaacagccaacgcctattgcattcgtaaacagtttttcgcaatgcagtgcagttctcagttctcacacttgggcaaatttcatggcgaatgaatattatattgtatatatttagttgttgtttctcgcaaatttttgcacaattcgaccgtcaataatttttttgcacgttgcacacgttttttatgtttttaatggatagaaataataacaattgttttgcctgtgcagtggggaaaagggggttaggtgggttgggggggtggaatgccagacgatatggctaaattgaatttgaacgcgtttgcataaatttatttagtctgcgttctgtgtgccctcccgtgattccattgtggatttttgatataaattatttatgtaaggctaagtacattttgatgtgcactcatctaccttttttcccattgctgcaacgaagcgaactcttgaaataaaaataaaaaaaaaaaagttgaggaacccagtgtaatggtatttattcataggttggaaatggggatttcacattttgtagtaccaataaatcatagaaaacacagtgctacagtaatatagcaattttcctcttctagtcttaattaatgaatggcattttcatcgcattaacatttccgtgcttcctatcttttcctcgtgcagagcgtacaacaactggcagacgaactttgcgtcaatcaacaagtccaatgacaactcgccgcagacgagtaagaagcagcgggactgcggggaaacggcacgcgatagtctcgcctactcctgcctactgaagaacgagctcctcggatcggcaatcgacgacgtgaagaccgccggcgaggagcggaatgagaatgcctacacgccggccgcaaagcggagtctcttcaagtaccagtcacccaccaagcaggtgagttttatccattagcattttgtgttttcagttccagtggggctttcttttttaatatatatgctaagctaatatgcactggtagagataatatcggaataatcggaattatcggaattttagttatcgaagattacgcacaagttggccaaagcgttgaaatctacattttccagcaatgggagtgtaatgtacaagttcgatcgaaatgatatcgaaaatatcgatagacaaaatgtttcaatattcatacaaagcaaaaaaagcgtttccttttatcaaactccacttgatttctttgatgaattcttgtgccaggaatgcttcaagctgaaaggtcagcgaatttgactttcgattgaggtttcgcatggcattgtgtgctgcagaatgcatttaattgaatttgcagtcggtgttaattgagtttttcttctgctgctcgaaatgaaaaagtagcgatatcaaatggaaagttgaataaaccgcaagagcaacgaatcgtgggaatttgatttctttgcctttatactccatcttctcataacattacctatgatatttgtacatatgtagggtatatatgtctttttcgatccattgttgattgtctgctgaaaatgtctgacgtttttccgaccggaaaaacaactggccggcattcaagactagccgcgtcgagtcaagtctctgtctatctaaccgtctatctattgatcgatggaaaccggtttctgtgaaaagtctttgctttcgtctaaggagaaaagttgccacgaccaaaactcgaggttaacacactcttctggacgcccatgtgcgccgcgtgtttgtagatccagatcccaacgtccataaaaggcagcacatcccatctcatctagccatgtaattgtattcgaatgtgtatgactggtggacggacgactgattgttcaagtgtttggtcaaaaagtgaaataaatgggaaaaccagaaattgaaacagaaacagaaaaaaaaccagatgtgtggagcgggtaactatggccacttgtcattagattcgtggcatcgccggtgatctaccacatcaccactatcgccatcgacatcgtaattattattattgcagacctgacatatttgcccgcttatcagatttatgttgcctcaattgccaactccaaaataaataaagaggtacgtgtggggcacgtccgctgaccgtcgtcgtcgtcgtcgtcgttggcccttctcgactttgttgaatattttgctttgactgatttttgacagttgacacgttgccgcagcagcagaagcggttgaaaaatcatcggcagccaacgaaaaaaaaaaaaaaaaaatgaaataacaaaaccgaattccctacgttcgaaacaaataagtgagcaacactcacgcactcacattttagataatgaaaagtagtcaaatattcgaataccctttgcattggatgctgcttagattgattgcttgctatttgcttgtgattagatttgacagcaagatgcgcgatagcagacgtccagattaatcgtgtttgggatttttctcatggaacactcaactatgagtatctaaaaaaaaaaaatagcaacattttgcatataccccattcgcaatcgaagagtgtgtggtggtgggtaatggaatggaaagaaacgcaacttgaagtggtcgagagattggagtgaagaattcttcattcttcaactactacttcagtggtctaaaacggcacttgagtcaatataactgagatttctgtgtgcccatttgggcaccgtagtttggccatttcaatttcagcgttggcaagagggaaaaagtcacttgggtccactttgtatctcggatatatatatatatatatttttttttttttctgattaatagcgagcacggcgagttgatttcttttcggcctaatggttttgccaactgtcgagagcttttgttttgattttgaatttgaattatgattttgagtaacactgcaattattcaggcacaaatcaagcggccattcatccacatcacgcccacgcaattaacgcgccacgcccacttcctatgtagcccttatattttcatacgcccctatggtcacaacaaacgatatgtaattcaattatgtgcggtcgcaaacttattgtcataaataatgtggtttctacagtagtttctcgttgtccagcagacacccaaaaaaaatatatggtctcaacacatttttcgacatttgccattgtttcgattgaaaggaaaggaggattggggttttggtcgtgaattgattgacgagtggctggattatgctggaattctttgcaatgaatgaatggggtatcattattagtcagagcaggtagtacatacactctgttgattaaatcgtatatagtaagttactactatcaaatatagataaatagatctagtttcttaaactagttaagcttgctagatactctatatgcgctatatgcgtgctgctttatgctatctcgttgtgcttataaataagtttagttattaataagttaaagctacatttcgtgcacctgttgatggcttcttcttgacttttagccccccccccctgtctgttcatttcgaatagccattaagttggggtattataggcaagacgactaaagcagtgaattctcatcttttatagttcgcctttgttgtctctgcgttttattgttataataattattaatttatgcagcagacatttgcattaacatcgcattagcgatgactattttcgtggcagcgtgattaagttggtccgaaccgattcgagatacgaaacgatcgccgcgacaggttcaacattaacattaaacatgggttaaatacccaccgctcacccctcaccactttgcttaaccctttttcgacaggcacttctttttgaaatcacgcttttataattcttctctccagctcgttttcttcgtcgtttttttttttatttttttgtttctgttctcgctgctggttggttgtttatttgtttaatttataagcctgcctccaagcgccgcccaccgaccagaaataaaaaaatatatatatataaccaaaaagccggccggcaagctgtttttttttccactatttttcttggttagcagctcagctcgcatttttgtcttttgtttggtgtttgctgggcggcatgaatgaatgctttttgttttctgccactgtgacatgccgttttgtaccagactgtactgcaattaacagagctctcttaattgaataaagcaattagcttgacgctggcaaaacaaaacaacactacaaatataaagtaatagtaagtaagtaaaacagactacagaaatagttgataaataggcaaagtcgaaaggttgaaaataagatgggctcactgtgcgattttaatcggctacaagttttcggatttccttttgccatttgtcagtggatttttactgccacttgccacccccccccccccttggactccccgccgatcgacaaactttaagcgttttagcaattgaatttctaataggcttttacccaccacctcgtggtttttgtttcttcactctgcatggcatcgaaaaacatttaaatttaatggcagttgcttgtacgctttatagagtgagagacccaaaaaaaaaaaaaaaaaaacaaaaaaaaaaccattaaatcgttggcttctctgggctgtgatataatttttaattctttccaaagtgtaaagtgaccattagaagatatatatcttctatatatggtgaagaactgcggtttccacgttctgtaattaagttcggttatatctcatctcgtttttcgctggcgagcggtcaacttctctatgttcttaattgaattaaattttaatttactcaacgaattagcaggagtccgtggcaggcggcatgacgtcaagtggctgctttcgggtcaggtcaaagcagctcaaccccatccaatccccaaatatgtgcaatttgtatgtgcgtgttcattttatctggtgcgctctgtttgccgggatgtttgccccctttatcggtatcgcgaaacgagaacctgaccaaacccataatgacaaatggtgttccaaaaaccgcgtgtcataacaatgaatgtatcagcaacagcgaaatgcgaaatgcgaaatgagtcggacttgaaatacatatatctgcacatagtacatataattcataataaatgccatgagtgcttaactattagtcagaactaaaactcaacttggctgtactaatcattagtgctaatgccaattcatatcccagcatcagaattccctcagttttatcgcagtgttaaatttaaatttagtaaagttagtaattatgtgaaatgaccaccagcattctttaatctattgtcatgaattaaaaacgaatgtggaatcgcatgcatttggaatgtaatccggagaaagaagctcttatcctgaccatttccatttccatttccatttaattaacatttctatgtgaaactttgccttacttttttccatcttgcaatgcgttggcacgcacaattccgttgggttttgagtccatctatctatctatgtaccgccgactcacgcatttcattgcgtaagagtgggcgcagggggggggggcgtggccgtcggaggtccgatgtctatgactactggcccttcacgcatacgcttaacacacttctctgcccgcattttctatgcaaacaaaaaagccggagagcagagcttccagcgaagcggaatgcgtgccaaatgcgaattgtaaggttacacggtgagaaaagcatctcaactttaaattgctactcttatggaagaaatatcttcacttttatcgcttgtagaaatggtcttgttaaggggtagtgtgtcgtttttttttttttttgtgtgtgtacttgaggaacaaggtgagggagcagcatatgaccagggggcagagattgcgacgcggtcgcagctcttagcacgatggcgttaattgctgaacgccaagtacgcgggccgcaaacaaagcaaactccaatgctattcccgcaccgagaccacaattgagacacatacgcgatttggcaatttcttgctcggctggagcaactggaacgcctgcaattagcatccaattcattcgtattcaactaataccctttttcgtcttttcgttgcaggactacaatggcgagtgtccgtactcgttgtcacccgtcagcgccaaaagtcagaagctgttgcgatcgccgcgcaaggctacgcgcaaaatctctcgcattcccttcaaggtgctagacgcgcccgagttgcaggacgacttctatctgaacctggtcgactggtcgtcgcagaacgtactggctgtaggcctgggcagctgtgtctatctgtggagcgcgtgcaccagtcaggtgagtcttgtacattaggcaatatgcctgcactttgtgttcataaactaatcaaatgatttttcccgatcgatatgtgataggttacccgcctgtgtgatctcagtccggatgcgaatacggtgacctcggtgtcgtggaacgagcgtggcaacaccgtggccgtgggcacacatcacggctacgtgaccgtctgggatgtggcggccaataagcagatcaacaaactgaatggccattcggcgcgtgtgggcgccttggcatggaacagtgacatcctgtcgagcgggtcgcgagaccgttggatcatacagcgggatacgagaacgccgcaactgcaatcggagcgcagattggccggacatcggcaggaggtgtgcggactgaaatggtcaccggataatcaatacttggccagtggcggcaacgataatcggttgtatgtgtggaatcagcattccgtgaatcccgtacaatcatacacggagcatatggcggctgtaaaggcgatcgcgtggtcgccgcatcaccacggactcctggccagcggcggtggaacggcggataggtgtatccgtttctggaatacgctgacgggccagcccatgcagtgcgtggacacgggctcgcaggtttgcaatctggcctggtccaagcactcctcggagctggtctccacgcacggctactcgcagaaccagatactcgtgtggaaatatccctccctgacgcaagtggccaagctgacgggccattcgtatcgtgtgctctatctggcgctgagtcccgatggtgaggctattgttacgggcgccggcgacgagacgctgcgattttggaacgtattcagcaaggcgcgcagtcagaaggagaacaagtccgttctgaatctgtttgccaatatcagataaggacaataactccaagcgagcgaagactgagcgagcgccaaaggcaaacacaacacaacacaaaacaaaacaaaacaaagcaaagtataatataaataaaatggatacttgaaaccgaaaaacaaagccaaccaaccaatcagcaaaaaccaagctgaagctaacaaactaatcgagcctatatgctatatatatacaaacgattcttgttcagcagtcgttttgtaaattgttgtgtgaccccacagcagcaatagattaaataaatttaagttaagcaatctgtatagaacggtaattagcaacatttacgtaggtaaacacatgcaatttatgaaggaataacatcaagagagatggctgaaacaagaactgaaaatgaaactaagtctatggaaattgtaagtaattggaaaatcaacaacaccacactcacacactatctttaatcgacattttttgttgctgcttttttaaatgtattgttttttttttgtggtacacctacactacacctaagaaaattggatacccctacatatacatttatacgtttatatatatatatttttttgctagcctctaagtaactaactttatttcaagcaaacatttatacacatatttcgctcactagaaacactcatacccccgaaaacacaatgtatattaaataaacttatacaatttcaaaatgtgccccaaaaagtatgcttgttttttttgccctagtagtggcctagtggagtttaaaaccgttcgaaacggttaagcggtttttggggcttagcgggggctcaatccgcaaagctgtgagcttttgtctgccacctgtctgcgaaaagctcttcgttatttttttacctaacttttggacgcatcttcgtgggcgtggccaggggcgtaggcccaaattaagggggctcaagaatatgtgggaagtacccactttcgatacgaaagcagctggaaatgcatgcacataagcagtttcacaaattcacaaagatgaaaagcaagcagtatttcaattgaatttgaacttaatactgaatactggaaaaaatttgcctttggccaaaacccccgtgggccacgcccctgggcgacctgcagcttccgctggcgacgacgtcggcttctcggtttcggtttcttggcctggctcgctgcttttcaatttgttggtgttttttgttttttttttgtttttgtgttttcatgactttttcatgtcttttttggtttttggccaagtccaagtttaacagcgctcgacgcgccagaatcaagttcagttgcgccgcaaacgcgtcgcggaaatgtttcgctgcttcagctgctgctgccaccgtccgaaagaaatcgaaatcgaaaccgaaatttaatttcaattttcaataaaaatttaaagccacaatttaagcaacgcgccgccgtcctctttgaattccgcatccttggcaaccgttaccgaattagaacacatagtaaaacccgatacaacgaaacgggaattcaaaccgtttgataatttactccttcctccctaaagttctcaggtaaaaattgtgttgcatttgcttgttttttttttggtgttttttgggtgttttttgaatgtttcccatgtgaagtgcgtaaacctgtccttgctgtttcgttgcggtttttcctgctgctgccttttgaaggtcactcacgcacgaag

SEQ ID NO: 5480 - DNA, 2645 bp, DROSOPHILA
ctttggcttgtttgcttgaaaaaacgtaactttttttgttgtaatgaaggaagcagcacgggcagtagaccaactcgaaatcgcgcattgccaacacgtaacgtaccagcccgtgtaataacagaagaaaccccgagccgcaacaacaacccccgaaaagcggtagttgtaagagttttcccaaagtggcagcggcaattacacggcgagaaacgagttcgcgtcgcgtccagctgtttgaaaatcaaaattaaccgtttttagcgcgtgaaacaagacgtttagaaccgtgttcaaaatccctcgtacataaattgtgtgtacatttatatatatatatattttctacgccacgttaaccagactttttaagttttaaattaaaactaaagacgtattatttttttttttttgagtgtttatatttttttttttgcaagttttgtttggttacatttgagtttgtgttgagtttttgccagccaaaggcgcttaagatgtttagtcccgagtacgagaagcgcatcctgaagcactacagtcctgtggcacggaatctgttcaacaacttcgagtcgtccactacgcccacatctctcgaccgcttcataccctgcagagcgtacaacaactggcagacgaactttgcgtcaatcaacaagtccaatgacaactcgccgcagacgagtaagaagcagcgggactgcggggaaacggcacgcgatagtctcgcctactcctgcctactgaagaacgagctcctcggatcggcaatcgacgacgtgaagaccgccggcgaggagcggaatgagaatgcctacacgccggccgcaaagcggagtctcttcaagtaccagtcacccaccaagcaggactacaatggcgagtgtccgtactcgttgtcacccgtcagcgccaaaagtcagaagctgttgcgatcgccgcgcaaggctacgcgcaaaatctctcgcattcccttcaaggtgctagacgcgcccgagttgcaggacgacttctatctgaacctggtcgactggtcgtcgcagaacgtactggctgtaggcctgggcagctgtgtctatctgtggagcgcgtgcaccagtcaggttacccgcctgtgtgatctcagtccggatgcgaatacggtgacctcggtgtcgtggaacgagcgtggcaacaccgtggccgtgggcacacatcacggctacgtgaccgtctgggatgtggcggccaataagcagatcaacaaactgaatggccattcggcgcgtgtgggcgccttggcatggaacagtgacatcctgtcgagcgggtcgcgagaccgttggatcatacagcgggatacgagaacgccgcaactgcaatcggagcgcagattggccggacatcggcaggaggtgtgcggactgaaatggtcaccggataatcaatacttggccagtggcggcaacgataatcggttgtatgtgtggaatcagcattccgtgaatcccgtacaatcatacacggagcatatggcggctgtaaaggcgatcgcgtggtcgccgcatcaccacggactcctggccagcggcggtggaacggcggataggtgtatccgtttctggaatacgctgacgggccagcccatgcagtgcgtggacacgggctcgcaggtttgcaatctggcctggtccaagcactcctcggagctggtctccacgcacggctactcgcagaaccagatactcgtgtggaaatatccctccctgacgcaagtggccaagctgacgggccattcgtatcgtgtgctctatctggcgctgagtcccgatggtgaggctattgttacgggcgccggcgacgagacgctgcgattttggaacgtattcagcaaggcgcgcagtcagaaggagaacaagtccgttctgaatctgtttgccaatatcagataaggacaataactccaagcgagcgaagactgagcgagcgccaaaggcaaacacaacacaacacaaaacaaaacaaaacaaagcaaagtataatataaataaaatggatacttgaaaccgaaaaacaaagccaaccaaccaatcagcaaaaaccaagctgaagctaacaaactaatcgagcctatatgctatatatatacaaacgattcttgttcagcagtcgttttgtaaattgttgtgtgaccccacagcagcaatagattaaataaatttaagttaagcaatctgtatagaacggtaattagcaacatttacgtaggtaaacacatgcaatttatgaaggaataacatcaagagagatggctgaaacaagaactgaaaatgaaactaagtctatggaaattgtaagtaattggaaaatcaacaacaccacactcacacactatctttaatcgacattttttgttgctgcttttttaaatgtattgttttttttttgtggtacacctacactacacctaagaaaattggatacccctacatatacatttatacgtttatatatatatatttttttgctagcctctaagtaactaactttatttcaagcaaacatttatacacatatttcgctcactagaaacactcatacccccgaaaacacaatgtatattaaataaacttatacaatttcaaaatgtgccccaaaaagta

SEQ ID NO: 5481 - protein, 478 aa, DROSOPHILA
MFSPEYEKRILKHYSPVARNLFNNFESSTTPTSLDRFIPCRAYNNWQTNFASINKSNDNSPQTSKKQRDCGETARDSLAYSCLLKNELLGSAIDDVKTAGEERNENAYTPAAKRSLFKYQSPTKQDYNGECPYSLSPVSAKSQKLLRSPRKATRKISRIPFKVLDAPELQDDFYLNLVDWSSQNVLAVGLGSCVYLWSACTSQVTRLCDLSPDANTVTSVSWNERGNTVAVGTHHGYVTVWDVAANKQINKLNGHSARVGALAWNSDILSSGSRDRWIIQRDTRTPQLQSERRLAGHRQEVCGLKWSPDNQYLASGGNDNRLYVWNQHSVNPVQSYTEHMAAVKAIAWSPHHHGLLASGGGTADRCIRFWNTLTGQPMQCVDTGSQVCNLAWSKHSSELVSTHGYSQNQILVWKYPSLTQVAKLTGHSYRVLYLALSPDGEAIVTGAGDETLRFWNVFSKARSQKENKSVLNLFANIR

SEQ ID NO: 5482 - DNA, 5159 bp, DROSOPHILA
cgtttggtaaaattgtgcagattttgttaaaattacgagctaaatgatttcatctaacttctcactacattgttcacatacatttagccagcgaccactgtatcaagtatcaatctgcttacaattagcaatacttaaaaaataattgtataaggttagttaaaaaggggaaaacgagaatgagaagagagaaaatttaaatgtaaatatagggactatagaagaaagggaggataaaatagttaaataaatcaaattcattttggcctaaatagctttcttctccaaaatatatcccattctgctttggctctataaaaaatggctcgatttgccaccttcaatttaaattgcgcccagacttaagttctactacatgttagcacactgggtttcattttccattctatagtattttgatttcgattaaatatgtaagtgttatcgcttattggcttattggtttacatttgatgcagctctttccgtatcgcttagtccaaagacatctcatttcttttcgcaagaagggggctctcctcctcttgtgttcggggccaaatcctcatccgtttccggtgccgccgagtcctggcagctgagtgtaagacgcagccgggaactggactcatcgtagagcgtctctacggttttcgggtttcgaaggaaaggggatcgtgaatggacggtacaaaatgtagcatgtttcggggcggtaacaagagaataaatttacaagttaagcacattttgaaattatttctgctcggattaacagagaaatgcatattaggaaagtagaaaaagttaagataagctttaaaaatctataaaacgttcttaattggtattcgataaatgtttttgacttaaacattaaaagacgccataataaagaagaagaaaacggctcgatataatttaatattaataatgattttggttcaggcgcatacatgttcatcgttttagatacaataaaaaacaaatatatgtttttatggaaggtaatgtataaaatatatatattaagaatcaaaaacaatttttattaatttaagttggtaaaaatatcttgtatacttatatatataaaagggtaatggaataaaacgtgcaattattttagatacacaattttatataataggaataaagtgtaatgtattaaaatgatattgacaactaagtaatgagattcattttaaatgagataggcttaacagacactcggatcaaggacaacaataaactttacgactccaacgtttttttctttggatttcaaaatcctttctatcagacaagtacaaattgtagtgtttaaattgcattttttggttttaggcggacaaagttgaatgaattgtatctctgcgcacttgatctcattacttgaacatattaaagtacatttatgaaaatgctctaactactattaggaaaaggaataaaaaagaacacagaaaaagccactcagccattcaattgattggatcatttttcatttgtagctttcgcttttttggtaaacaatttttggttttttgttttgatgggtggtttatgtgtcggattcattggaatcatcactaccgggcggtatggtcggtgtctcataatcgtaatagaccggataacgcggcttaaagggctcacttgtggtaacatcagcctgagcggacaaaatgctgctcatgctaacgttggtcaagaactcagtgtcatcgctgaacttctcacttagagccatggcgtcttcatatgatggcggcactgaaagaaacgagttttaatagagcctattttattgcacaacaatatacataaatatagtactatattgatgtatttaaatacaaaagtttctgagcattcaattattccatttgggtgggcaaactgaataattcttactcatgggtatatagtccggcggattatcgctatcactggtcaccaaaatcgctggcatggccgttggcctgagggcggcagttgttggcgttgatgagggcgtggagcttgtgggcgtgggactgacattcgttatcatattcatattgctattggtcggcagtagtccgcccacaaggcgtccatgattgttgttgttgttgttgatgctgctgatacgtcgctgctgaactgaggcacttatccggtcccgatctcgatctcgatctctttcgcgatccacattcatatcacgatcacgatcccgatccctttgacgctgctgcgtcgacatttgtaaattttgactaactacttggtgctgttgctgctggcgattgaaacgcaacagggcctccggaccatccatgatcggtatactgccgatggtcagcggaatcttcagcttaagtttccagtgaaactccgtggggttcacgatgatcttaatcgaatagttaacgctaatggggcacgtgggcttcaccgaagtgggcggtatcgacggcaggtcgagatacccacggtacacctttctcgaccatctcagcacgtttccgaactgcttccgcgcaatcaggtgcttgtcgtagcggtactcatgctgcggatcgtgcgactcgtagctcacctcctgcttcagcttgacctcgcattcgattatgtcgatcgaggactcgttgttgatgtacagcacgaagtggatcttctggccgggcgcatatccgcagtaaggcgtcgagaacttcaccgtcagcgggcctgtggggcagcagaagctccagaaccgtttccgatcgaggatctccagaggaacctggaaaaccccagtggattagttatactttagaacaatcatgatagtaagaaaaactctattagctcattattattaaaccactgtgcctaactaatttcttaagttctctctatgtagacttttaagttgaaaatggttagcaaactacaaattatactaacattttattgtagatcaccctactacgtcgaataaacacataccctgtaaattgcatctgcgttcaggtccagcggttgtattacggtaaatggcagcttaaagaccttcgggtggcgagcggccctttcgatcgttgttatgatctcgtagtggatctggccatacttgccgtcgaaggacgtaggcagattgtcgggcagaatcacgtggaaggtgtacgagtactcgccggccggccagtcgatgctcgagttgttcgcgcaggatccgaggacgtaggaccgcgaggacagatacgatcggtaggcacggcacatggcgcgctcgctgtcgcgcggatatcccttttttatccagcgtatcttggcatagccgctgacggtgacgtggatgcctgcaaggatgccccacccgctgtgaataagaattgccaaattgaattgcaagtggagaccgctgagcagcgactcatcgaatttacaggcggcctacttaaagtagggatatatggcaatgtgaataatctaaatctataaatgaatcttttttgtcaaaaaatttgggtgtaacaagacggaaatttataaaatagacttgcttaaattaaatgcagtaggtatggcctttgcttagaataaatgtattataaagttgtacaatgcctatatatttaaatgatagtttaaaaagagtacaaaatattcaaagttagtctaaactcaaaagtctgagcgactattttgcgagtgtaaacgaatttccacaaaagggaaagctaacaaataaccacgcctttaacgagttcatggataactgaaaatggcggcatgccaagagcagcacaacaactgcaggatattccacagtgacagtcacaacagccacatatttttgggggcagggcgccaagagcaacgattaatagtggagcacgttcgaatcggcgtccggggggagatacattttaatattgccattagctcgtggccttcgtgcatttaaatgcaccgagtcgccacaccgcaccgaaatgccaagtgaccgcatcactcatacgccccgtgagtcatggacaccgttttcgtagtatacgttagggggctcacctttaatgcgcttcgtggcgtcgacgctgagatcaacaacgccggatagctcctgtccggcatagtagacaccttgtggattattatcaaatgatataaggcactcaatgggcatatattgctatatagttgtcgtttgtgtttgtgcgtccgcttgttcccccgcccgtctgtccgtctgtccgtccgaccgttcgtccgtctgtgttagtggtgtctttgtgtatgtgtgtgagtttgttactgtggcctgtgcaaaaatcagaccacagatgtataaatatcacttttcccctgctggctggagagtatgaattgaagaaattgggaaatgggctgtttcgttcatttgctatatgtcatcatgccatttgctctttgcctttgtcgcctttgtggcactcgcactgcattttctcggcaccgagcggcctacacacatgcacacgaagaatttgtgaacgctttccacgagccaccgaccgtccgacctcaaaattccttccgccgtaacctacttttctctgcacgcactcaaccgacggggcaatcacttatggaaattggtaactattcgcagcattaacacagccgtggcatattaattatatttggtgttttcatgtggccccctgattgtcagtctgtctgtccgctcgtccgcctgtcgcaacgatttctggtttgagcttcctttttttagcttttcggtttctttcgattcgattcgatttaactcgctcgcagctcacggctaacacgtccagcagccgttcgtgttggatttactctatccgcatgtcatcatgtcgcaagggtacaagcccagagccgagcgtatgatatacgtactcgggtcgctcgggagatccgacaggacctgcggctcaccaaaacaacaaccccctcctgagaaagccaccgagctgagagtcacgcacacgtgctgccgctgtctgtttttgtatacatttttcgcaatgccagggttgacaagacttcgaatcgaatagtattttttgagcttggcgtttaggcaattttataggcgtttcaaaaatgcaagccacaaggaacagaattccggcaagaaacacaacttcttaaagttgtat

SEQ ID NO: 5483 - DNA, 2244 bp, DROSOPHILA
atgcccattgagtgccttatatcatttgataataatccacaaggtgtctactatgccggacaggagctatccggcgttgttgatctcagcgtcgacgccacgaagcgcattaaaggtgagccccctaacgtatactacgaaaacggtgtccatgactcacggggcgccgcctgtaaattcgatgagtcgctgctcagcggtctccacttgcaattcaatttggcaattcttattcacagcgggtggggcatccttgcaggcatccacgtcaccgtcagcggctatgccaagatacgctggataaaaaagggatatccgcgcgacagcgagcgcgccatgtgccgtgcctaccgatcgtatctgtcctcgcggtcctacgtcctcggatcctgcgcgaacaactcgagcatcgactggccggccggcgagtactcgtacaccttccacgtgattctgcccgacaatctgcctacgtccttcgacggcaagtatggccagatccactacgagatcataacaacgatcgaaagggccgctcgccacccgaaggtctttaagctgccatttaccgtaatacaaccgctggacctgaacgcagatgcaatttacagggttcctctggagatcctcgatcggaaacggttctggagcttctgctgccccacaggcccgctgacggtgaagttctcgacgccttactgcggatatgcgcccggccagaagatccacttcgtgctgtacatcaacaacgagtcctcgatcgacataatcgaatgcgaggtcaagctgaagcaggaggtgagctacgagtcgcacgatccgcagcatgagtaccgctacgacaagcacctgattgcgcggaagcagttcggaaacgtgctgagatggtcgagaaaggtgtaccgtgggtatctcgacctgccgtcgataccgcccacttcggtgaagcccacgtgccccattagcgttaactattcgattaagatcatcgtgaaccccacggagtttcactggaaacttaagctgaagattccgctgaccatcggcagtataccgatcatggatggtccggaggccctgttgcgtttcaatcgccagcagcaacagcaccaagtagttagtcaaaatttacaaatgtcgacgcagcagcgtcaaagggatcgggatcgtgatcgtgatatgaatgtggatcgcgaaagagatcgagatcgagatcgggaccggataagtgcctcagttcagcagcgacgtatcagcagcatcaacaacaacaacaacaatcatggacgccttgtgggcggactactgccgaccaatagcaatatgaatatgataacgaatgtcagtcccacgcccacaagctccacgccctcatcaacgccaacaactgccgccctcaggccaacggccatgccagcgattttggtgaccagtgatagcgataatccgccggactatatacccatgatgccgccatcatatgaagacgccatggctctaagtgagaagttcagcgatgacactgagttcttgaccaacgttagcatgagcagcattttgtccgctcaggctgatgttaccacaagtgagccctttaagccgcgttatccggtctattacgattatgagacaccgaccataccgcccggtagtgatgattccaatgaatccgacacataaaccacccatcaaaacaaaaaaccaaaaattgtttaccaaaaaagcgaaagctacaaatgaaaaatgatccaatcaattgaatggctgagtggctttttctgtgttcttttttattccttttcctaatagtagttagagcattttcataaatgtactttaatatgttcaagtaatgagatcaagtgcgcagagatacaattcattcaactttgtccgcctaaaaccaaaaaatgcaatttaaacactacaatttgtacttgtctgatagaaaggattttgaaatccaaagaaaaaaacgttggagtcgtaaagtttattgttgtccttgatccgagtgtctgttaagcctatctcatttaaaatgaatctcattacttagttgtcaatatcattttaatacattacactttattcctattatataaaattgtgtatctaaaataattgcacgttttattccattacccttttatatatataagtatacaagatatttttaccaacttaaattaataaaaattgtttttgattcttaatatatatattttatacattaccttccat

SEQ ID NO: 5484 - protein, 559 aa, DROSOPHILA
MPIECLISFDNNPQGVYYAGQELSGVVDLSVDATKRIKGEPPNVYYENGVHDSRGAACKFDESLLSGLHLQFNLAILIHSGWGILAGIHVTVSGYAKIRWIKKGYPRDSERAMCRAYRSYLSSRSYVLGSCANNSSIDWPAGEYSYTFHVILPDNLPTSFDGKYGQIHYEIITTIERAARHPKVFKLPFTVIQPLDLNADAIYRVPLEILDRKRFWSFCCPTGPLTVKFSTPYCGYAPGQKIHFVLYINNESSIDIIECEVKLKQEVSYESHDPQHEYRYDKHLIARKQFGNVLRWSRKVYRGYLDLPSIPPTSVKPTCPISVNYSIKIIVNPTEFHWKLKLKIPLTIGSIPIMDGPEALLRFNRQQQQHQVVSQNLQMSTQQRQRDRDRDRDMNVDRERDRDRDRDRISASVQQRRISSINNNNNNHGRLVGGLLPTNSNMNMITNVSPTPTSSTPSSTPTTAALRPTAMPAILVTSDSDNPPDYIPMMPPSYEDAMALSEKFSDDTEFLTNVSMSSILSAQADVTTSEPFKPRYPVYYDYETPTIPPGSDDSNESDT

SEQ ID NO: 5485 - DNA, 2855 bp, DROSOPHILA
caccgacgagctggccaatgagcgtttcgaggagaagttcgagaaggccctggaacaggccaccgagaagtcggcccagacacgtgtgcaggctctgcaagcgatttgcgaactgctcatgcaccgctacatgccggacttcgtggaggaccgcaagatgaccctgatggatttcgtggagaagagcatccgtcgaggcaagggccaggagcaggtgtggggcgcacgactcgcgcccctgctggtgctccaaatgggcggggatgaaggcatatccaaggcgatgaatcaattcctgttgaacaccgttcaggacaagtccgtgggcttcgatgcccgtgccaagtgctgcacagctgtgggattgttgagcttcctgggctgcgaggatgttggggagttggtacacctgatgcagagcttcgaggccatcttcgcaggcagttatttgcgtggcgatgacaagacaccggtatccgtcaccgccgaagctgggactttccatgcggaggccttgaacgcctgggggcttctactaacacttataccttcgggggattttgtttcgttgatgaccactggccaaaacatgtttccgtaagtttgaagagcaagttccatttaactttcaaacccattgctataattgtttaaactaaactttgcagatctattaagaagttcttgggtctcttgcaatctacacatttggacgtccgcatggccgctggcgagaccattgctttaattctggagtcgggacgtgctcacgaagaggatttcctagaagatgacatcgctgagttatcggaggccgtcaagcagctggccacggattcgcataagtaccgcgccaagcgcgatcgcaaggcccagcgtgccaccttccgtgatgtgctgcgatacctggaggtgagttgaagatttgcacgagtgctacgcttaaacaatagggattacatttatttatttgactcgagatgcactagtctttggacgattacttcatgtcagtgcaagtgaacttgagctcgtgcttgcagtacttggccaagcacttggagtgatcgtgcaacttgttgcgcatgatgacgcagccgttccggcttatcgagtccatgtactcgctgaaggtcggcaccttccggtatgtggtcggggcggagttccagtgcgaactgctgccggattcgatggtctgcgaggagtccgagaagctggtcttgaatggcttgtagttcttttggcactcgtcgctagacatctcgtagccagcggacgcctcccgctccagttcgttcatcacgttcgagcggaactcgttgcagggtccacgttcgctcatcagcttgttggcgttcttggactcgtcctccgtctttaggctctcataaataccctccgggtactcgttcatgttacagtaatcgatctgataggtggtgttcatacggttggtctccagcctgcggctcagctcctccttgggcatgaccttcaggcgttcatacagatccgggtagactgtacgtaagatcttgagaaagcggttgggttgcagcttaaagcaatctgtttccgcggagaaggccatcttgtccacctggtcctgagtcagctgggtgggtatgatacgcggatccaccagctttcccattggcgctatgcccgtccactcgacgccgccacagtccttagacgcgttcggcggcatcatgatcttggactcgtcgacgcattcgcactccttgacctgcggaccactgtgagcctcggcgcccctgggccgcgttagaaactcgtaccgtttggcactgggcgggacatagtcgtgctgataggttgatagcatcatcttgataacgaaatctacaaaactaattggccaaaacaattttttttagtagtttttttttttttaacgagaaatttggtctgtttgatctgatagagaaactaatagtgatacatttcaaaatcgtacgaaatgagattagaatatttgctcgtagcctagcctgattttaaagttttttttatctcgttgcaggaggacatttccccagagattagcattcgtttcggtaccgagtcgctgacactagattcctggtccatccatcatcagtattcggccatgtgcactgtcatgggtcccgggatgacctcgcagctgcaggagaacgagttcatccgtgacatcttccagctgggaccacgacccacgaacacaggcatcaatggaaacgccaaggtcaagccgaccaagctggagcgggtaagttgattgaaatgtgttaacattcgcttcaaattttaatatatttatatttgttgcttttgcagcaccttgtgaatgctgctgcattcaaggcacgctccataacacgtggaaagaatcgtgacaagcgatcggccgtcgtcacttaaacctgtgcttcacccaccaaccgttcccatccacagacacccaaaccaaccatctcaaaccccgttagccaactctggacttactagttgaattgtttctaattttagcttgaaccaggcaaagcgtcgccaaagctgaagaactaagtctaaatttaggataattcagtgtaatctacaaaatttctctagtttattaaccacatgttggagccattgtttgaatattatgaaatatttattgcgtgcacgcacagtggttgtttatcagtaagtgcatggctggctccagcttggatcttattctttgtgaatttaaattaacactgcgattgttacgactggcatttacgctttgcgatttgggttaacctcttttgttgttgatctttttaaattacaagcgtaggaaaacatagtctgct

SEQ ID NO: 5486 - DNA, 855 bp, DROSOPHILA
atgatgctatcaacctatcagcacgactatgtcccgcccagtgccaaacggtacgagtttctaacgcggcccaggggcgccgaggctcacagtggtccgcaggtcaaggagtgcgaatgcgtcgacgagtccaagatcatgatgccgccgaacgcgtctaaggactgtggcggcgtcgagtggacgggcatagcgccaatgggaaagctggtggatccgcgtatcatacccacccagctgactcaggaccaggtggacaagatggccttctccgcggaaacagattgctttaagctgcaacccaaccgctttctcaagatcttacgtacagtctacccggatctgtatgaacgcctgaaggtcatgcccaaggaggagctgagccgcaggctggagaccaaccgtatgaacaccacctatcagatcgattactgtaacatgaacgagtacccggagggtatttatgagagcctaaagacggaggacgagtccaagaacgccaacaagctgatgagcgaacgtggaccctgcaacgagttccgctcgaacgtgatgaacgaactggagcgggaggcgtccgctggctacgagatgtctagcgacgagtgccaaaagaactacaagccattcaagaccagcttctcggactcctcgcagaccatcgaatccggcagcagttcgcactggaactccgccccgaccacataccggaaggtgccgaccttcagcgagtacatggactcgataagccggaacggctgcgtcatcatgcgcaacaagttgcacgatcactccaagtgcttggccaagtactgcaagcacgagctcaagttcacttgcactgacatgaagtaa

SEQ ID NO: 5487 - protein, 283 aa, DROSOPHILA
MLSTYQHDYVPPSAKRYEFLTRPRGAEAHSGPQVKECECVDESKIMMPPNASKDCGGVEWTGIAPMGKLVDPRIIPTQLTQDQVDKMAFSAETDCFKLQPNRFLKILRTVYPDLYERLKVMPKEELSRRLETNRMNTTYQIDYCNMNEYPEGIYESLKTEDESKNANKLMSERGPCNEFRSNVMNELEREASAGYEMSSDECQKNYKPFKTSFSDSSQTIESGSSSHWNSAPTTYRKVPTFSEYMDSISRNGCVIMRNKLHDHSKCLAKYCKHELKFTCTDMK

SEQ ID NO: 5488 - DNA, 10690 bp, DROSOPHILA
agtgatgtttgccggctcggcacagtttattcacagaccaaatttggagcccacatttgaaatgcatccgattccgggcgaaaattgcgtaatccgagaacccagatcaaattctcagctcatatgagaacagaatagaacacatcggtgcggagtatcgaaaaccgcagtgatgaaaccagaattctgaaatgattccactttgcagtttgtacccggtagttgcagagtgtattaaatgagcccagatttatgcgagttctttcgcttaatgtgtagtcaatttatattttatttaattagctggtgagtcaatggtatttcttggcgcagatcttccgggtacacggaaagaatgaaccaagaagaacttcacttgataaatttatctactatgaagtagaaaagatactgtgttttgttttattttttttttttatgaataatctgtggctatcgggtatctcatattcgagccacttaactggagcgttcttataaaggcttggtgttcacttcacgtcatggttcaccttgggaggcttcgtattcggattccgatgcgactggagctctcgatctccagctggtattgtgtcaagtgtttgacaaacaaccgcaagtgtccgccgaccgctggccatgtccatatacacgtatgtataacgcatttggccgatctcgggtgatgttaatctttcgggctcgattcgctttttttccagcaaacaagttggtctgcaagtcggagatcttgggctctctcaaaccagttagccagctcaaaagctgaaaagccgaagcgcaatgagtgtgtttccccagcagcatctcctagccatcttctgctccaagagagacagagagagagagagagagagatatccccgaaacctgcggcggacggaattctgccttggtttgagccaagttgggccgaaagagttagttcttcgacagccgacggtcagtttgggcgcacgccagcgcaatccgtttaacacgatccaaaatcagtagtttccgtctccgcattttgccaactttcgatttcatgcgataagcatctatttgtatttaaaataattcataattcaaatcgaaccgaagcgaacaatcaacgaccgagcaagatatgcgttgaaatccaaaagcgaaatttgttcgatacgcatttacagatattttcggaattttcagggtaaaagtgtgcggaagtgtgtgaagcagaaaacaaacgcataaaaccaaatttacatatagctcatacataaaacatattcaaatccaaccattcaatatgcaaaagtatttgattctgtctgtgataatctccctccaactgctgtgccttttggacaggacaatggcaacgccgccgaaaggacctggtcctgtagctggtatgtgttaatctggaaaatctgaaaaacaaactattgcataacgctaaacactaaaggaatcctgcacgaaaaacggtatcaaaagcaaactcactttcactttctcaaatcggttggttggttagtcggttggctgggatatgtgtgtgaagttgggcatctaaatggaggagttttgtgccgaaacggatgatgtttggacagctaccgaattccatttgaatttatcgcgccaatcgatttgttttgccttttctgaattggatcgaaattagtaaaatgcttgtttgcacctgcctgcattttattgcctttactgttggctgttgaaatgtttgcaataaaacaaaccattccgtgttgacacaaacaattcgtcaggggagttagtatatgtatgcaaaatccaatataaatcaatagaaaaggaaatcaggccccattaatgaaatgaagtattttaatgaaggtcagggtaaaatgtgtgaagcactatcaataaggattaaaacggaaaaaaacgttggctagtagcgtggtccgtcataaatctgatagatacaacgttttatctactgcttaaataatttgccacttattagagagaacataattaataataactaatcacaagtattagaacaatgcaaaaacccatataattatactcgaaattctattgtctgctggcatgtttaaactaattagcataaaacacgaaaatgttctgttgcaaaggtgtttatataaatttagcaggaagcggcattcgcttgaatatcagtttaataacgccgataaaattaagaaaataaaggatacataacttcgaaacaggtttataatcgtcatgataaatcgcctctacatataaaaagctataatcgaattttgtttgctttgaaaattaataaacaatcaaaatatgtgtatatctcctttaacggttatctttcaagttgattggcgaacaaaagctgcatttgagtttcatgtttgctcggatcttaatcaatttggcacctttaatttgtttcaagtcagagaaaatgaaaagttcagctggcaaacaatttaaccggtctttaaggtggggaattaattaacagagatggcttaatttcattatgcaacatttgcgaaaaatttatgaaaactgcaaaatgcagggaaagtataggattttaattaaaagtaagaggtgctaaaaatggattacaaaactaagtgaatccccttctagtcagactgtaaattaccaaaacaggcatcaccataaatctattaaactaacacctatcattaacgctcatcataaatagcaagttgtacgacggccttaaatgtagacacaattttccacttataagaacagctttttcctgagattttttttggtaatttgccacactccccacacctaaaactcttgccaaatctctgcattgtttcagccattctctaaacgcctcattgcattgtttacgacggagtcaaaatgttaactgctttttgttcacgttttcacacggacttggccaaagtaaatttatttctttttcgagtgaatcccatgtcactacgccccctttataaatcagccgcattcgacaatcgccatcaacataaaacgaaattcagcacggccttcgcagagtggcagacatggcgtatgattaattaataaacattggcgcgaatacagttacgaaacaaaagggaaaccgtttcggtttctcgtgggtagaacgtagcgtaagtgaccttcacatacttcggagcaaacaaaagtttgaccagaccctgattcactaatccgaaatgagttctagttccatctggaccgtctttatgcgtcactgcggattatgcttaagcatcttggacaagtcgaactggttctcggatatttcctaagaggaacaagttcccagcgaatatgcttccccttgacatctggacaaactttcttaactcaattcgggggtacaacaaacacatcaaacgcatcgttcgcaattagtattaacgtctttgtccacctggtctctaatatgtccgcttaaggtacataaaatcacaaatcacaaaatcagcgatcatttagagatgagtcaagcgaaaagtgaaagaatacgggaaagaactctagtcccaattagactccaatttatagactgccatataatttatagtgattttctttttttggcatttcgacatccatagacgacttacgaccaagtgagaatcaagcacaaggcaacctacataataaatgtttatggcccaaaagaatcgcgaagcgtcggcatgtcaacagttttgggcgtttaaacggcgtagctaaccagtttaagtcctttaaattttacgaactaaccgagctcatttttagtgtcacagaaaccagatattcgtatacctagtgcgattatagatattttattactgagattgaataaaatttcaatgggatgacaatgacctcgagtgggtagcagtaggaacaaggaaaaaactatctctaggaaagctcaaaaaccgaaaaagtgtagagcaaagattttaaccaaaaactcgtaggaagtataaaagcaccatcagtcttgactgatatacgtactaaaaatcatataaagttaagattttctgtatgaaaacaaaaaacataaatttgatagtttatattataatattttttaagattttattttctgcctgcgacataaggaagcggttctccgttatccttaagtcgaaaccaattgtgcctcgttttttctcgttaattccgttaagatcgctttttctcgcaagacactaatccccatccttcccgatccctatttttagattgccccaactgcgtggacgagtcgcagtacacgccgaacaagtggacgatgccgctgctgaagctcggggagaagcgctactacctcggcatcttcttcaaggtgagccgcattccacgccccacaaaacggtccatagccgcaatccgaatgcaactgacccaacggccaacggactgcaagtccggtttgatgggtctccgatttctcagctgccgttgattgcaagacgcttgcatatggaatattgcagcagggacggcagaagaggcttaactttgagtcttacactgctcagcaggtttcaggttgagttgctttgttggtcgagcgggcgagacgagggaacatcgtcctacgcactttttaaacttttactagaactttctcggtccttaaaggtgaaagatataggatctggccgaaatcattggtctgtagaaactcgtgttcaatgcagcgtgtgagttgatatcataccctggcctcagaacagatatcaacgacatatttcaattcaaagctgatcaaagaaatataaaaccaatttggccatgaatagaaatatctagggtatcaaaaagaggctcgtgcttggccacggatggttggattggagtaatgtggctaacaaagcggctattcatattaaaaacgaattagtcaaagcatcaaaaaggcgttcacatcgagggaccgctatcgtgtcggtccacacgtcgtatgagtaatagaaagagccggcaacgcagtggagaagcgagacggtaggcgtgggtatactaaagttgaacgtaatactggttccacgtcaaactgaattatattttcatattcataaactgcacagcagagtctccttgaactttagaggcagggccataaaatataaactgcttcaccattgtaaaaataatcagatgcatatcgtttgtattaatcaatcgacgacgcctttcaggaagaggttaaatttttggatttatagaggttgcactggtggattgatggatttgcaagattgtcttcgcatattgccaattttggatttcgagcagtatggttttgtttgcgatgagtcaaataaaaggcaaattttgagataatttgaatattccaattgaattccaaagatacccatcaggcaataaatgaatcagtcagaaaccagataggaataccgttgaatcccaaacacaatctttaatcccaattgcttggcataataaaaatgtatccattaatttgtacagcaaagcgatgacaaataaatcaccgcattttaaattcgacatttgaacgctttaattgcagcgaaaagcagaaagcaaataaataaatataaataaatatttaatcaactttcgccacatactttggtttatgaacgcttctgagcgggcgtgtaaataaaacaattctatttggaatatgccggcgtatgaacaaagaaatgaattaattattggctcgttaattaacaaataaacatccatctccctctaaccagtctgttgccaaaatgcataaatattcccaaatttgttttgtctaacggtaccacgccttctggccacatcttccgtcccactcactcttcaattgtcaaagagattaaattgtatgcatcacgaaaactcatacggttggcattttaatttgaaattaatttgtaattcgatttattcgatcttaccctaactgggcaataggtatatacatacaacctttcaaagctcacataaaaattaatatctatcaattttaaaatttaaatatctattgttactatctaaattacctggcttttaatacaatggtatttaattattgaatattttaaatgcatcttaattgccattgattattatataccaagctagaaggtaaaaacaaatggttcaacgttcttatttatctatgaatatttgaatattcattatctttacgacttcgaaattatcataattgggtaacagttttcattaactaataacaactttcaagagcatttccaagttcgttgatcagatcagaaagttcaaatatttaattattagatatctttctttcattttcgaacggccgagttaattaaccaggcttatcaattccaaagtgttttccgattatttatgggaatatctaattaggaattctaccgcagccgtttataaatatcccaaaattcgttcattttgcgtttttttttcccatttttcagcagtgccacaatgttatgcaatacatatgagcagttaaatgcaaattcatttcgcgtgtaaatatgcaaatgaagcaattaacttctttttggccaaaaataaggcttgacaaccaaacggcggccgtcgaaggcaataatgtcatttgcacttcacgcaggcgcaaatcaaatcaaactaattgagagacacctgggcacctgggaaaatggaggggggaaatgggtggctaaggtagccgtgctaatgacattaacaacctggccaacactttgttgccactcaattgagttttgtgtaaacttcagtcgccaaattgcacatgatttaacagaattttgtgggctgcaatttgattaggccaaaagcggttgccaaaatattcgagaacagagtgtggcagagaagtcgaatttgacattattatacaaaatataattaacttgtgaggaatgtgtaggaatgtgcatgcatgaaagtacttactaaatcctgcacaataaactttcaaactcttaatgagattttgtgtgtaatatcaaatgctttgacccccaaggtaatcacaatatttgtacctaagcacaggatctctttgtgcgttaaccttgtgaaaaccctgacaacctttgaaattgctcttagctttctttattcgcctcgccgaaatcaaagtgcgagtcagacaaaacattgaccctcggcagtttccctggcagccattctgggccattaaaaggagccggcgaactggctttgttgcgaagcagagccccagtttcacctcggcacaccaagctaattgactcctcggcggtgagagatgaatcttttacaacccaataaacacttccaggcgaaagacaagtgaaggcattcaacgccctccgtctcgcgcgattctgccacatgtggcatgtcaggatgccgtacctccgcatctgccgttttattcgcgcacaattacggctaatacaattaaagccaagttaatggcgcaagctgggtggtgcgagcagggcaggatgcaggacggatagttgcgtaatcgatttatgtgcgggagatccaaggtgggcccctaacccaaaccaagccaaaccaaatgattttttgcaagcatccatttctgctaatgaccaatggccaaagtccattagagttcattgaatatgttgttttgcgacggacaggatatggacattcgccacgttgtccgcaaaacaattccgattcggatgtcagtctcgattcagatagcgttcagataggccaaccgcatcacatacagatacagatacgcatcagatacagaaccaacactaattggctacattcccaaccagatccagagataaactcaatttccatgcgaatgcgtgaccaatgccgcccccttcacacatgtactgccgcaaagaaaaaaagataatggagaaacaggagcaacaaatccgagccgagttttattgacaagtgtcgcttggaggaccgagattgaatggcacctttcagttgcgcggaattgagatctctcgactcggaaactgggtcaaccgattgcgcaatcacaattatataatctctaacttgccatacatcttaaattcaatgcactgcaattcaattcgatcccattcaactctatgtgtgtttttccattgcaggcaaactggttcaaagccacacaatattgccgataccacggcatgcatctggccagcatttcatcacaggaagagaacgatagactggagaagcacatacgtgactttggtaagttggcgaaacaatgatttatgcaggggtcaagtgattcgaccatcgaggatagttcctcaaatatgagtgctgtttgcaaaactgtattcaaactttattgccaagctatggggttggtaaactagaagcatttggaagcactgttcaacagtatgctacacgaaatatacaaatgtatcttaagatactaagtcacttaaggatgagataaatcaaatgcgcgtgcataattatttctagtctattgggtatcaactagtctggaggtggcaggtagagccctttaaagcttattgctagtgtttacccaccacttcgtgagtgggcgtggctgccgcccatggccctgcggcggtcagctttcaacaaaaatgtgcaacattcactttttccgtttgtctgtttctattgccatgtgtgttttatggagatttattcaatggaaagtgcaccggagttcgttactccagctccagttgcaactccaactgcagctccaggtcgcaatctccaattcgccaactcgacccccttctcaatgggttttcggttaccaacttccgtgtattatggcactagaaagtccactgaaagtgcagtccagttcacaagtcgccccgtttcattcctgcggcttttccaaatgcttttgttagctagccgactctgttgtcatattgatcggattttcaaccgatttcagttgttgcatgtcgagtagtctgtggcaatatgaatgcagctgttcagctgtcaaataccagagttttgtcacggcaaagatgttttgattggctgtgtcgagcagtctcggtagacttaacttaataccttccaaagcacggtaattcaatcaattccattccatttccaggcctgggccacgaacatttctggatttccggcacggacctggccgacgagggcaacttcttctggatggccaccggcagacccatcacattcaccaactggaacgccggcgaacccaacaatttccggtacgagaacggcgaggaggagaactgcctagagctgtggaaccgcgatggcaagggcctcaagtggaacgactcgccgtgcagcttcgagacctacttcgtctgcgaggtgcagcccaactagagggcacctccgtcctccggccagccggaatccgtacccatacccgtactacattcacatccacatgcgactaagtgattaactggttggctccaactggtcttagctggcgattactccggtgaatttgaatgttcatttcggacactcattgctgacagatctaaattcgcgtattcttagcttagatgcgtaagtgtataaaattcttgttgataattagctagtaaactaattaaattatactaggatcgcttgtattttctcatgtaaaatataaataaaatgtatcttaaaaactagacagctactcgttttttctcaatataaatacaaatttataacttatttagtatttgctattttaataagcttttagctttgagtatataaaccacaagaatagttctttgtataagtacggcatttatttttttaattagcctaatagtgggcatctatatgtgatttaatctgaaaaacgatatccatcatagctcgctcatttttgggggaaataagctcatcatctaatcggcgtttcccatggggtgcaacggtgcgtatgagcaattcattttgaacagcaccgcataccacacaccactgcccttctcccttctccatctcagtaatcttgtttcgccataatgcgcgcaaataaaaccgaaagtgctgtcagcagttttccccgaagttctgctctctcattttgccaccatttttctccaggggaatgcagccacctgtctgtgtggcaactgaacaaaactactgccgatagaataatcagctggagaggaaagccgaaaggactcatcctcttcgagattttcatccttgattgactgctccagtgacgagagaagagcttttcgcgaacattgttgccagcgattcgcgattcgcggcgttcgtcttattgtccttatcccagtaacagtcttctatcgtcctgtcccacctaagtgtccttgtgtccagctgttttgccaggactcacctccggatccctcttgtatcctgcgaaacggtcgccgccggcaagggctagtcgcaaaaaacaggactcaggggaactcacaggatgctttcgattcgccaagagagaggataagagaggacatgcgcagtatgatccgaaagagaggatacgaaaggagaaatcagctggtgctgccaggacttttaagtgtcaatcaaaaaaatgcacaaatagggtattttatagcaatgcaatcatttagggagaaatagataagtatttgtgatctgaaaggatacatttcaggat

SEQ ID NO: 5489 - DNA, 1161 bp, DROSOPHILA
acacgatccaaaatcagtagtttccgtctccgcattttgccaactttcgatttcatgcgataagcatctatttgtatttaaaataattcataattcaaatcgaaccgaagcgaacaatcaacgaccgagcaagatatgcgttgaaatccaaaagcgaaatttgttcgatacgcatttacagatattttcggaattttcagggtaaaagtgtgcggaagtgtgtgaagcagaaaacaaacgcataaaaccaaatttacatatagctcatacataaaacatattcaaatccaaccattcaatatgcaaaagtatttgattctgtctgtgataatctccctccaactgctgtgccttttggacaggacaatggcaacgccgccgaaaggacctggtcctgtagctgattgccccaactgcgtggacgagtcgcagtacacgccgaacaagtggacgatgccgctgctgaagctcggggagaagcgctactacctcggcatcttcttcaaggcaaactggttcaaagccacacaatattgccgataccacggcatgcatctggccagcatttcatcacaggaagagaacgatagactggagaagcacatacgtgactttggcctgggccacgaacatttctggatttccggcacggacctggccgacgagggcaacttcttctggatggccaccggcagacccatcacattcaccaactggaacgccggcgaacccaacaatttccggtacgagaacggcgaggaggagaactgcctagagctgtggaaccgcgatggcaagggcctcaagtggaacgactcgccgtgcagcttcgagacctacttcgtctgcgaggtgcagcccaactagagggcacctccgtcctccggccagccggaatccgtacccatacccgtactacattcacatccacatgcgactaagtgattaactggttggctccaactggtcttagctggcgattactccggtgaatttgaatgttcatttcggacactcattgctgacagatctaaattcgcgtattcttagcttagatgcgtaagtgtataaaattcttgttgataattagctagtaaactaattaaattatactaggatcgcttgtattttctcatgtaaaatataaataaaatgtatctt

SEQ ID NO: 5490 - protein, 188 aa, DROSOPHILA
MQKYLILSVIISLQLLCLLDRTMATPPKGPGPVADCPNCVDESQYTPNKWTMPLLKLGEKRYYLGIFFKANWFKATQYCRYHGMHLASISSQEENDRLEKHIRDFGLGHEHFWISGTDLADEGNFFWMATGRPITFTNWNAGEPNNFRYENGEEENCLELWNRDGKGLKWNDSPCSFETYFVCEVQPN

SEQ ID NO: 5491 - DNA, 5591 bp, DROSOPHILA
cgtagattgatttacacgcgtcaacgaaacggtactaaattaatcaatttaattcgagaaagagaacgagatagctgcagtgttggcgaaaaagagcgggagagaaaataaaatcatgtaaaccatttaaacgcaaatgaactttattctcaatgggcgcggcaaaaaaaccttcttgtgtccaacgatctcattaaaaaccaactctctctctctctctctcttgcagccgctttgaagccaggatccgtgacggttgccaggtcgtccaagagtggagcaactgcatccgcgccaccggctggcagcgatgaggagagcgtccagtataccggcctcgcaccgctgaactgcagcttctgcggcaggccgctcaagtcggtgaacgcgctgcggcgacacatcgcctccaggcattcggagattcagggcaaggagcacgagtgcttcatctgcatgaagagcttcaagacaaagtggtccctctccacacacaactcgcgttttcatcgcgaaatgggctgttcgaccaagggattcaccaagatcgagtacagcgatcactgagacagcggtatgccattaatgtatcatttagtacgcccaactatctgcacatgaccactgctgccttcatggctggctatcatttagaggagttgaattgcaggcaagcagggcatttggaaactaacaccatagttaccaaggatacttatgcccattgattagcaattgttgcaaagatacttaaatacatttattgaattcccttgcatcatctgaaacaaaccactcatctcgaataacaaagcattgtttcgtgtaaatactagatactccattccaaaaataaaactccatagctatggtatgtaaactgaaatgcgtttaatggcttaactactaattcccacttatgatattaacaagcggacttttcgaggatgtaaatcgtaaggcgaacaaaagaaaaagggacaaacaaagcaggcagcacctacagggtctccaggccgggcagcgggaatttcctgctgaactgggccacattcttgcggatctcgtccacctgggccttgagctccacattctcggccagcgtcttgtggtaatcggttatcttgggactgccggccagcttggctgcctggacgccaacctttagggcagcatcgatgaaggccaccacctgctcgatgtcctgctcggcaaggccgcgagtggtcagggccggtgtgcccagccggatgccggagggattcatggcggacttgtcgccgggcacagtgttcttgttgcacgcgatgcccacctcctcgaggatgtactcggccttggcgccggtcaggccagccttacgcacatcgaccagcaccaaatggacgtcggtgccgccggtggccacctgatagcctcgcgaaatgaggccatcgcacagggccttggcattcttgagcacctgcgtctggtaggccttgaattcgggactcttggcctgcttgaaggcggtggcaatgccagccacggcgttgttgtgcggaccaccctggagtgatggaaacaccgcctggttgatgcgctcctccagatcgtagagtaccttgtctccattggccttggtgctgcgcacgcccttgcggaagaagatcacgccggcgcgcggacctcgcagtgtcttgtgcgtggtggtggtcacaatgtcggcccattcgaacggcgatggtatcaatcccgcggccacaatgcccgccacatgggccatgtcggccatcaggtaggcgcccacatcatcgcaaatctgtcggaaacgcgcatagtccagcagacgggagtagcacgatatgccagcaatgatgatctgcggccggaaattcttcgccgcctccgccaacttatcgtaatcgatgatgcccgtctccgggttcactttgtacggcatgctctcgaagaagatcgatgtggccgatatcttcttggtgggcgtgaagaaaccgtgcgtcaagtgaccgccatcgggcagatccaggcccatgatgcgatcgtggggccggcagacgcccgtgtagacagccagattggccggggatccggaataaggctgcacattaacgccccacttctcatcgtccaggttgaacagctcgcgtccgcgttgctgggcgagcagctctatgcggtcgatgtactcgttgccaccgtagtacctgcaagtcaaagcgatgaccaggattagagcaggatcaccagggattcacatgccatagagccaataaggtgatctctaccagtaagtatgatatcagaactagtatagaatcatttaaagatccgactatgatgtcttcttgcagatccgtgaggaatcttatatgtgcacccacctcttgccgggatatccctcggagtacttgttggtcaggcaggagctcaggctctcgagaaccgccaccgaggtgaagttctcactggcgatcatctcgagtccttcgcgctggcgctccttctccttcttgatcagctcggccagctccggatcgccctgtgccagcggggtttgcagcagtttctgatcggccatattctgttcggatttatatagtattgtatattatatatatatatatatagtaattggaatgctgtgcaatgtgcgatgcgctcgccaagacgatcgttgaatatgtgcggaccgtggaaaatgaacggctgcctggtcagctttatgccatgtttttaataacgcttcgaaacaaaaataatatttatgttcccgccgccgatggttgcgaaaagttacaaacaaatacgggttcaatgggttcaaatagcattggaaaagttccggcgataaggcgcagctatcgccaaggcgaagattacgcctggatgcaccatggcaaccactcgagaggcgctcccccgattccctattcccgatccacgattagattggccaaataccagggaaaccaagtgacttgggtgcaataacacgcccatgatcgaaaatgcgaccccccatggatgggagagcgcgtctatttgcgatccgcttatcgtcaagtgattatcatccgtctgggtcaccagttcaagtcgccggacgacgataaggacactgccccccctttgcagctgacgcacttcggaaagatcgggaaacgtacgtatatagtcgaaatggagaatattggcagaaaatggacaagtttatatgtatgtagcttcctccagcaaattacgtatctctagtaccattttgttgttcaacgtttccagctgctaactaataatccctggaagattcttctattttcaacgcagaaatgaattggacacgcaaaattttagctgcaaaaactggaaactggtgattcccactaaattgaatgctaatttctggccacaagttgagtgcaaaatgcatatacatatgtatgtatgtatatttatatacaaatctgcccacacgaatgggaaattcgatttaatggccaatgccagattcttttttttttttgcgttatcagtttaaatatttagacaagtgcaaacgagaatgacaacaacaatgctcgatagggcgcaaacagccgagaaattcgagtaggcccaaaaacgagtttcaggccgaggtagcgaatgtgaatcaaaaagattcaaacttggcgcatggcgacgttttgaatacactaacagtacactgatacaaatacggtacatatatgtacatatgctataagatctcaattaaactacacatgtacataggtacttaacaatgatactactataaacaacactttcagcggatcgatggcatgccatccacgtagggatagtgcagtgtgggaacacatggctgaatgaaacgcatgaagcacatggcgattagccgggcatgccaggagccgcaaatggaagcgaaacacaaactttctgagcaccgcgatcactgcaagaattaaaggcaatcgaaatgcgagtcccccaaatggttcaattagccacactttttccaccctccccttcactttgcctgggactttcccggcgaactcaccttcaaagtgctctgcttggagtccgaatatcgtctgatcgccggtaagaatggcgttggtgatggttgttttttggcggcgatgcgagttaaagctccgctaagctttccagtctcgaagttaaccgggttgccaactttggtgttcaggtcccgactaaggcaaaaccgaagcttttgtgtcagtgtagagcgcgcccgctgcatgtctttgtaactgtaataagcagaattttatagattttagtggatgtttttcaacaatccttggtaattattagtactcacacggctgcgttcgaatcggaactgccgcaaagtgagaagagtcgccggcgctgagatgacgccgccgctggctgataagcgataacgataacccgtgacccctgaccgacccagtgataagtccgcccaagagttccgacccgatcgctgcgctatctcttggccagcatccaaaatattcgacaccgaaaatacaacgaagcgaaaacacgcgttacgttggtaaacaacatttaccaggctaacagatatcagctgtttgggtagttggatcgctggatttagaagcttttggcgccgtctggcaacgctagcgatagctaccaattcttgtataaatatttacaatttgtggaaatgttaagcgtgtgtgcctcttcaattaatattaacactttattttatatcataatatgcgtttctctcaatcccttaaaatgtacgtagttatcaaacgcgcgataacgttaaggcatttaaagtacccgccaaattgctggtactgcgaaccggtttaagttgccaaccgattgggagagtgcaacatctctctccagcaacattgctgccagccaaagtctatataagcaacaacgaaagttcaattcttttcactcaaaaatccgtctcctccgcggtacgtttcacttcgctgcgccgctaaaagaaaattcctggaaaatattaacaaacacatgagcctaacattcttaacaattccaaaacagaacatttatttttggtgaatttcctgacaatttagtggttagtgtttaatgttaaaacattgctgtgcgcatttaccgttatccgctcgcaaggcaaaagaaaaagcgcgcgttttgaattcgctgtttcgcattatttttttttatgttaaaaaacaaaatatagaaatgaaacaaaaatggcaagccagaaattaaatgaatgaatgaatttttttcgacacaattctgctgcgtgtgcaattcgattcgaataacaaaacaaaaagcataaaggaaaagtaaaagaaattcgaggggggaaaaaaacgccaaaagaaaagatagcgcgaaaagtcataaagaaaaggtgagaaaacaaattatttatttcatgtgctaaaaagacacgcaaaacgaacgtcgttttatttttagccaaacaaaagttgtgtgttatttgtgcgattttctgtttttgttcgccgctctccccttgttttttatcgtttttgtttttcaatcatata

SEQ ID NO: 5492 - DNA, 1861 bp, DROSOPHILA
gtaaatgttgtttaccaacgtaacgcgtgttttcgcttcgttgtattttcggtgtcgaatattttggatgctggccaagagatagcgcagcgatcgggtcggaactcttgggcggacttatcactgggtcggtcaggggtcacgggttatcgttatcgcttatcagccagcggcggcgtcatctcagcgccggcgactcttctcactttgcggcagttccgattcgaacgcagccgtttacaaagacatgcagcgggcgcgctctacactgacacaaaagcttcggttttgccttagtcgggacctgaacaccaaagttggcaacccggttaacttcgagactggaaagcttagcggagctttaactcgcatcgccgccaaaaaacaaccatcaccaacgccattcttaccggcgatcagacgatattcggactccaagcagagcactttgaagaatatggccgatcagaaactgctgcaaaccccgctggcacagggcgatccggagctggccgagctgatcaagaaggagaaggagcgccagcgcgaaggactcgagatgatcgccagtgagaacttcacctcggtggcggttctcgagagcctgagctcctgcctgaccaacaagtactccgagggatatcccggcaagaggtactacggtggcaacgagtacatcgaccgcatagagctgctcgcccagcaacgcggacgcgagctgttcaacctggacgatgagaagtggggcgttaatgtgcagccttattccggatccccggccaatctggctgtctacacgggcgtctgccggccccacgatcgcatcatgggcctggatctgcccgatggcggtcacttgacgcacggtttcttcacgcccaccaagaagatatcggccacatcgatcttcttcgagagcatgccgtacaaagtgaacccggagacgggcatcatcgattacgataagttggcggaggcggcgaagaatttccggccgcagatcatcattgctggcatatcgtgctactcccgtctgctggactatgcgcgtttccgacagatttgcgatgatgtgggcgcctacctgatggccgacatggcccatgtggcgggcattgtggccgcgggattgataccatcgccgttcgaatgggccgacattgtgaccaccaccacgcacaagacactgcgaggtccgcgcgccggcgtgatcttcttccgcaagggcgtgcgcagcaccaaggccaatggagacaaggtactctacgatctggaggagcgcatcaaccaggcggtgtttccatcactccagggtggtccgcacaacaacgccgtggctggcattgccaccgccttcaagcaggccaagagtcccgaattcaaggcctaccagacgcaggtgctcaagaatgccaaggccctgtgcgatggcctcatttcgcgaggctatcaggtggccaccggcggcaccgacgtccatttggtgctggtcgatgtgcgtaaggctggcctgaccggcgccaaggccgagtacatcctcgaggaggtgggcatcgcgtgcaacaagaacactgtgcccggcgacaagtccgccatgaatccctccggcatccggctgggcacaccggccctgaccactcgcggccttgccgagcaggacatcgagcaggtggtggccttcatcgatgctgccctaaaggttggcgtccaggcagccaagctggccggcagtcccaagataaccgattaccacaagacgctggccgagaatgtggagctcaaggcccaggtggacgagatccgcaagaatgtggcccagttcagcaggaaattcccgctgcccggcctggagaccctgtag

SEQ ID NO: 5493 - protein, 537 aa, DROSOPHILA
MQRARSTLTQKLRFCLSRDLNTKVGNPVNFETGKLSGALTRIAAKKQPSPTPFLPAIRRYSDSKQSTLKNMADQKLLQTPLAQGDPELAELIKKEKERQREGLEMIASENFTSVAVLESLSSCLTNKYSEGYPGKRYYGGNEYIDRIELLAQQRGRELFNLDDEKWGVNVQPYSGSPANLAVYTGVCRPHDRIMGLDLPDGGHLTHGFFTPTKKISATSIFFESMPYKVNPETGIIDYDKLAEAAKNFRPQIIIAGISCYSRLLDYARFRQICDDVGAYLMADMAHVAGIVAAGLIPSPFEWADIVTTTTHKTLRGPRAGVIFFRKGVRSTKANGDKVLYDLEERINQAVFPSLQGGPHNNAVAGIATAFKQAKSPEFKAYQTQVLKNAKALCDGLISRGYQVATGGTDVHLVLVDVRKAGLTGAKAEYILEEVGIACNKNTVPGDKSAMNPSGIRLGTPALTTRGLAEQDIEQVVAFIDAALKVGVQAAKLAGSPKITDYHKTLAENVELKAQVDEIRKNVAQFSRKFPLPGLETL

SEQ ID NO: 5494 - DNA, 3724 bp, DROSOPHILA
ccaaacatcaatggcctgcaaggcctgggaacaaattagcataagcccagcgtttcgacggaccgaagaggagctcctgcagcccgagggaggattcgcacactcgggaaaagagtagcttatttaataaaatatatataagtatctattgaaattgggtttaattttggtgattcgtttctagttgaaaacgcttagctattttatatgtttaataaaacgactattaagcttaatagttaagaattcagagacagctttataaatatacactcatttaaaaaggaagtacttaatttcttcgagtgcaggaagaccgagttaaggaagagggaatggcccaggcatcgcaggaatgccacattgatgcagtcactttgatagcgcgacattagcagcaatttatatgcaaatgcagcagcgcagggcagatgaggagcgaatggtatgggatgcaacggcgagttcagtaccaactgattgatggtcccatttcaaaagatgccaaagtgcgtgagcccaacagccaaaggcagggcaagaaacaggagtctggagtctggagtctggccaagattgggagcagcggcagtgggccatgtaggccagcatcattaatgcgaatcattagcagtgctcgctgataagatcgggtgcaaattatgcggcagtcgcagctggaacaaagcgctcgaaaagtctggccatgattatgattgccgaaaggcggcgagtgcgtaatttttaattgccaattaaaattgcttcaattaagatgtgaaagctgtcccaaaagtccttcgaacgtaatttgaggggatggtccgaattaaacctattactcaaacacaactattataaataaacacgaacaatgcttacaaaattgttaaatgcattaatttcgtataagataattagagttcaaatatttgaactacgcgccttgctccagtatttccatttccagtgcttagtattttcacaagtgtgcccagctaaacggccttccagtggctccagcttggcgttttcgtgggcgcagagaaaaaaataccgaacaaaaaatcacagctggcgtgaaaaaaggaataaaattagaagaaaccataaaagtgcggaaatgaaaatggagctcaaataggcgacagacggcagctggtggaacaggatgagcggcgtggaggagcaggcgagtctgctgcgcgtactgatcaactgtgcggagaaggcggccaacatagccaggatatgtcgctccaacgagcagctcctggcattgctggtgcaggagaagatcggatccgaggccaatgagcgcttcgagcacgacttcaagaccctggccgatgtgctcatccaggagacgatcaagcacgaggtgggtgcgctctttcctgccatgaaggatgccatcctgggcgaggaatcgcccaatttcaccaaccaactgggcgagagtgtcaccattgcagtgggtgccactgaggaggacaccgccgcctgtctgcaggctgtactcagcgggcacgaggatgcggccagtgctctggccaccgaagtccatcgggatgtcagcttcagcagcgaaaagctgggcgagattgcccaactgccggacgaactggattacggcaatttgggcatctggatcgatccaattggtttgtagcttccacaagtatttacaaggatatgttaactatatgttaaccaactataatatgttaaagtggatctgctcactttgtttatatataattaattatacttatagatcgtatgagtaattctttctagtttttgtttatttatgtgtgtctgccttgattatgatatcaccatcacaagcaatcgcaaaccgacgagctaatacactaagttcattttgcgaatctcaattgtttatacatttttctgactcatccgatattgaaatactttgcagacgctaccgccgagtacatttcgggtgacaccatgttcaccgactttcccggcatcacgtccactggcctggactgcgtcaccgtgctaattggcgtctacgaacgggacaccggcgtaccggtgatgggagtggtggctcaaccgttcggggagaagctggaggagaacgtgtacagctcctcgatgttctggggcgtctgcctgccgacggtaagggcacacaactgcgactttgaggcgcgcgatgagaaccgccgtttgggcatcttctccagctcggaacagtccgatatccttcagcgtttcctcgatctgggctacgagtttgcattctccgccggtgctggacataaggccttgaaggtgattacccacgaggtggatgtgtatctgcttagcaaaggctccaccttcaagtgggacacgtgtgctccgcaagccatactccgtgcgctcggcggagatgtgctggactatgcggccagtgtggcggagcaaaaggcagtgccattgaagtacctgattgaggatgctgaagccgatgccgattggaagcgaaacgcgggtggtataatctctgtgcgcaatgtcgatgttgtggatgagctgctggccaaattggccgagcaatgagtgttgttattatgttatttgttgtaaacccattattgctgttgtaattgatttgatgtaattgcactacgagtcagtcgaatttgtaggcatagaaactactacaagaaaatttgctaataaatgaaaccggcgaacgtgtaaaacattcatttaaattaagtaacaatctacaaaaggattatagctgctgtttggaagtacgaatgccaccacatctggggttagctagaattgtccgtatcccataataaaaaatagataacaaataacaagaatggatgatatttcttctctcttctcttaagtgtagcctacttattggagtttctgtgcggtaaaaacaaattctagtcaatgaaacaaattaaagaaattctgtatgaacgatcaacatctttatatggtgtcaagtctcttagtcgaatcactctgtgctggaataaatgtaagcgaataattgtcaaaatcatgttcgaaaatacactgtggtcgaaacttatatcgaatatcgaaataatgtttgaacatacacttttggtgtacacttaatgctaaagtcatatgaaggaatgcgagttcttaagttaaattatgcaactggtgtgtttagaatagtctccatatccggaattgtaatgagacgagtatcgggttcagggcctttcttaactccgcataagaatcgaatcttacgcacaagaaactgctccagagccgcaaaattctttgatttgtcgaagcctgcaacgaagtgtttattaatggtgatccgggcaaaaattgaatgcgattatgcgcataccatttatatagcactttgtgacattgacggcaattagcaaatcctgtgaaatcggtttcacgtgtctcacggccacatattccgtatttccaaaatcgcagaatagaattttgaccatattgtccttaacctcctggcagactccgcgataccagttcttatcttcgctgtagatcgccaggcacagttcaccaacgctgcaattgggataaagtgcgtgttaagaaaaggacaagcaaatatcgaaagcgcattactttggtacgtaacccggaacaacattgtggtcacatgctccctgacttgatgtcaagctaaggattttttcaaattcct

SEQ ID NO: 5495 - DNA, 1440 bp, DROSOPHILA
aaacggccttccagtggctccagcttggcgttttcgtgggcgcagagaaaaaaataccgaacaaaaaatcacagctggcgtgaaaaaaggaataaaattagaagaaaccataaaagtgcggaaatgaaaatggagctcaaataggcgacagacggcagctggtggaacaggatgagcggcgtggaggagcaggcgagtctgctgcgcgtactgatcaactgtgcggagaaggcggccaacatagccaggatatgtcgctccaacgagcagctcctggcattgctggtgcaggagaagatcggatccgaggccaatgagcgcttcgagcacgacttcaagaccctggccgatgtgctcatccaggagacgatcaagcacgaggtgggtgcgctctttcctgccatgaaggatgccatcctgggcgaggaatcgcccaatttcaccaaccaactgggcgagagtgtcaccattgcagtgggtgccactgaggaggacaccgccgcctgtctgcaggctgtactcagcgggcacgaggatgcggccagtgctctggccaccgaagtccatcgggatgtcagcttcagcagcgaaaagctgggcgagattgcccaactgccggacgaactggattacggcaatttgggcatctggatcgatccaattgacgctaccgccgagtacatttcgggtgacaccatgttcaccgactttcccggcatcacgtccactggcctggactgcgtcaccgtgctaattggcgtctacgaacgggacaccggcgtaccggtgatgggagtggtggctcaaccgttcggggagaagctggaggagaacgtgtacagctcctcgatgttctggggcgtctgcctgccgacggtaagggcacacaactgcgactttgaggcgcgcgatgagaaccgccgtttgggcatcttctccagctcggaacagtccgatatccttcagcgtttcctcgatctgggctacgagtttgcattctccgccggtgctggacataaggccttgaaggtgattacccacgaggtggatgtgtatctgcttagcaaaggctccaccttcaagtgggacacgtgtgctccgcaagccatactccgtgcgctcggcggagatgtgctggactatgcggccagtgtggcggagcaaaaggcagtgccattgaagtacctgattgaggatgctgaagccgatgccgattggaagcgaaacgcgggtggtataatctctgtgcgcaatgtcgatgttgtggatgagctgctggccaaattggccgagcaatgagtgttgttattatgttatttgttgtaaacccattattgctgttgtaattgatttgatgtaattgcactacgagtcagtcgaatttgtaggcatagaaactactacaagaaaatttgctaataaatgaaaccggcgaacgtg

SEQ ID NO: 5496 - protein, 375 aa, DROSOPHILA
MSGVEEQASLLRVLINCAEKAANIARICRSNEQLLALLVQEKIGSEANERFEHDFKTLADVLIQETIKHEVGALFPAMKDAILGEESPNFTNQLGESVTIAVGATEEDTAACLQAVLSGHEDAASALATEVHRDVSFSSEKLGEIAQLPDELDYGNLGIWIDPIDATAEYISGDTMFTDFPGITSTGLDCVTVLIGVYERDTGVPVMGVVAQPFGEKLEENVYSSSMFWGVCLPTVRAHNCDFEARDENRRLGIFSSSEQSDILQRFLDLGYEFAFSAGAGHKALKVITHEVDVYLLSKGSTFKWDTCAPQAILRALGGDVLDYAASVAEQKAVPLKYLIEDAEADADWKRNAGGIISVRNVDVVDELLAKLAEQ

SEQ ID NO: 5497 - DNA, 3568 bp, DROSOPHILA
attactgcatcccaggagccatattaccctctatggtgaagaacagaacgccacaggtcaacagaattatctcacaggtgccatagtttgaggtgccctcgatgatcctaagaggagatggtcttagcatatcatatatatatatgtcatagtcactgggtggttagttacctcgtgagcagcagcacagctgcaatgaaggtatagcccacgaaggtcagcgtgccgaagtcatcgccctccttcgaccaggagatgctgttgaggagggtccactccctggactgcttcttgttgatggcgaacacccgttccgagtgcttgtccgacaatcgctttacaatcagggccgccaccgtggcaatctaatggggatgtatctctatcattcaaggtaactcaaagtctccttctaactcgaagatactcgccagttggagaactttggtgcagatgcaagctggtagccccatgttagacgatcttgacgtgcactttgctactgcggcacgtacgttccgaatccgcctgacccatgcaaattttctcacattcaatttcgcagtttagcgtgggaaaagacgaactcaaagaagttggcctcatggcccatagtccataatagcccaaaaccttgaactgctcaacgaatcgagcacatctgagcatctgtgggcaattgctgtgccgcctatgcttcctatcggcagtgtaaatattaatataataaatatatatgtttatatgccccataaacaaaaggcgagacaaaagcagaggctttatgctctttcttatcagcgcgattacaaaaaacaagcacagcgattcatacggattgcgaatgcaagatactctcattagacttgcataattttactacttaaaggcctcagcgaacctctcaatgaagtccaagtacccaacttttgcagggctatcaggcggggaagccaaagagctcatcacggtgcgatcctcagtttcgtggaggcaatcggcgtgtagaaagcaatcccggcctatctcacttaggatcgcagctagcaattaaaattaatataagctgtaaccaatactgtaatatgatgagcgtttgcataattggggccggaaccgcgggtctttgctgtgcccgccattcgattgcaaatgggttcgagaccactgtgttcgagctatctgaccgaatcggcggcacctgggtttacaatgaggcaacaggggcggtcaatggcatcgatgtccacagcagcatgtacaagaacctacggtacgtaaatctttcgaaaaaccatttgatattctaagagtttccgggcctcttcaaagaaccaacctgcccaaggaggtaatgggcttcccggacttcgaaatcggggcaaacgaggcttcctatgtgagatccgacgagatctgcgacttccttaaccaatacgcgaaccatttcgacctgaagaagcacatcaagttcgatagctatgtgattcgagttttgcagaggaaaacaaagtggcaagtaagtcgtggagtcagctttatatataaccacttaactgaaacgtttgcaggtacttttcaaagacttggtcaccaacaagatagagttccagtacttcgacaaggtcttggtggccaatggccactaccacactccgaattatagccaaattccgaatatggaaaggtttaaagggcagttcctgcacagccacgacttcagaagtagggaggttttcgaaggtaattaaggaataacttctattaggttatttcacatggtgttccattctgctcaaggtaaatccgttctggtcattggagctggtcccagtggcatggacctgtcgaacatcatttcccgaacggcggatcgggtcaccataagtcaccacttgaccgatatcgggcaacactcattcttcgagaacgtacagcagaaacccgatgtgcgggagctcgatgagaagggagcctttttcgtggacggatcgtaccaggagttcgacaccgtcttcttttgcacaggttacaagtacgcctttcccttcctgaccgtcgactcgggcatctatgtggaggacaactacgtccaggagctgtacaagcagtgcatcaacatcaggaacccatccatggctctgatcggactgccgttttacgtttgtgccgcccaaatgatggacatccaagcgaggttcatcatgagctactacaacggatccaacgagttgccgtccacggaggatatgctcaaggacacccgcgataggatgggcaaactgtgggcggagggactaagaaaacgccatgcccacatgctgggtcccaagcaagtgcgatgcaagttggctttacttctctatctggttattaattctattctcatttattatcaagatcgactatttcacggacttgtcgcaaactgcaggagttaagaacatcaagcctgtgatgaccaaattgcacaacgaaagcagcaagtgcttcaatgagaatttgctccacttccgggaggacaatttcgcgattctggacgacgagacattcattaaactcaactagatcctgaatcaatcaataggagcattagattccaaaacatcgtttttggacttcccttcgaaataaaataaatttccaattcttgtattccaaaacaacagtttaaaaaatgagcttttattctcgaacaaaaactttttgaacaccggcaaacatttgtttgaacatgtttgttggtatttttccaaacagctgattgcgggcagcgcacattcaccagctctggccacactcgcccgcctcctcgcaatcaccttcttgcataattttcggaacacctcacttcgctttcaaagttcgctgatttaggtcgggtcttcaaaagtggaatagcgcctcgtcatgcagtgtccgttcttgaaccgcttcaccgccagcttcatccgcaactacgcggagacgctgtgccaatcctacgggagccactgtcccgtggttgggaagaccttggtatccggcgagaagaaactttcactcgtcgccgcaagtgttacaaggtctcactcgacgggggcgaacgcccacgccaatgctggtggccccgcaactgccaacgccaccgctcccgtctccgcccccgcctctgccgatcctggcaaggcatccgccaaggagacctttccctacgagcgcttcttcaacgagcagatcatgaagaagaagcgggaccattcctacagggtcttcaagaaggtgaaccgcctggcaggcgacgggcttttcccccacgccctggagtactcggagcggacggaaaagcccattacggtgtggtgctccaatgactacctgggaatgtccgcccaccccggcgtcaagagggccgtccaggacgcgctcaataggcacggatcgggggctggcggcaccaggaacatttcgggtaactctcttcaccacgagcgcctcgagagtaagctggctgagctccaccagaaggaggctgcgctgctgttcacgtcgtgcttcgtggccaacgattccactctctttacgctcg

SEQ ID NO: 5498 - DNA, 1336 bp, DROSOPHILA
gcgtgtagaaagcaatcccggcctatctcacttaggatcgcagctagcaattaaaattaatataagctgtaaccaatactgtaatatgatgagcgtttgcataattggggccggaaccgcgggtctttgctgtgcccgccattcgattgcaaatgggttcgagaccactgtgttcgagctatctgaccgaatcggcggcacctgggtttacaatgaggcaacaggggcggtcaatggcatcgatgtccacagcagcatgtacaagaacctacgaaccaacctgcccaaggaggtaatgggcttcccggacttcgaaatcggggcaaacgaggcttcctatgtgagatccgacgagatctgcgacttccttaaccaatacgcgaaccatttcgacctgaagaagcacatcaagttcgatagctatgtgattcgagttttgcagaggaaaacaaagtggcaagtacttttcaaagacttggtcaccaacaagatagagttccagtacttcgacaaggtcttggtggccaatggccactaccacactccgaattatagccaaattccgaatatggaaaggtttaaagggcagttcctgcacagccacgacttcagaagtagggaggttttcgaaggtaaatccgttctggtcattggagctggtcccagtggcatggacctgtcgaacatcatttcccgaacggcggatcgggtcaccataagtcaccacttgaccgatatcgggcaacactcattcttcgagaacgtacagcagaaacccgatgtgcgggagctcgatgagaagggagcctttttcgtggacggatcgtaccaggagttcgacaccgtcttcttttgcacaggttacaagtacgcctttcccttcctgaccgtcgactcgggcatctatgtggaggacaactacgtccaggagctgtacaagcagtgcatcaacatcaggaacccatccatggctctgatcggactgccgttttacgtttgtgccgcccaaatgatggacatccaagcgaggttcatcatgagctactacaacggatccaacgagttgccgtccacggaggatatgctcaaggacacccgcgataggatgggcaaactgtgggcggagggactaagaaaacgccatgcccacatgctgggtcccaagcaaatcgactatttcacggacttgtcgcaaactgcaggagttaagaacatcaagcctgtgatgaccaaattgcacaacgaaagcagcaagtgcttcaatgagaatttgctccacttccgggaggacaatttcgcgattctggacgacgagacattcattaaactcaactag

SEQ ID NO: 5499 - protein, 416 aa, DROSOPHILA
MMSVCIIGAGTAGLCCARHSIANGFETTVFELSDRIGGTWVYNEATGAVNGIDVHSSMYKNLRTNLPKEVMGFPDFEIGANEASYVRSDEICDFLNQYANHFDLKKHIKFDSYVIRVLQRKTKWQVLFKDLVTNKIEFQYFDKVLVANGHYHTPNYSQIPNMERFKGQFLHSHDFRSREVFEGKSVLVIGAGPSGMDLSNIISRTADRVTISHHLTDIGQHSFFENVQQKPDVRELDEKGAFFVDGSYQEFDTVFFCTGYKYAFPFLTVDSGIYVEDNYVQELYKQCINIRNPSMALIGLPFYVCAAQMMDIQARFIMSYYNGSNELPSTEDMLKDTRDRMGKLWAEGLRKRHAHMLGPKQIDYFTDLSQTAGVKNIKPVMTKLHNESSKCFNENLLHFREDNFAILDDETFIKLN

SEQ ID NO: 5500 - DNA, 3099 bp, DROSOPHILA
ggtaacaagctgacgcctcctccaccttcaactgacccactaaaaacgacagaaacaaaaaacaaaaaaaaaaaaaaaaagaagcggcgccgctcttcctggctgtttattcaattttatttcgtaccattcgaaaaaatgtttttttttttcatttcggctgaggtttggccgttggggtaggtcactaactgggggtcttctacagctacaccccccaacccccccaccatcattcaatttaataccgttcgttcgtaagccatcgccttttattttgcaaattgtcttggctgccttctttttgtatctttgcccacgatcatttgttttgcgatgccttttgttttgatcgcgggctttacagtggtacgcgataaaaaaccatataataaatgatcaattttagtataacaattaatgaggaaataactaaaaaaaatcttattttgattcaaaaccatttgtaaattttcaaaaattctaaagatttgaaagtatttctttgcctgtttccattgttttcatttatttttttatttatttttctgaaatttagtagtatataacatgtttcatttcactactatgagcggacatcatgaaaatgataatttgagcgcatcaaagttgtgattatcataacaaaatgccaagtttggtcattcatattcatgtagatgatattgatattgatatagttgcatacttaagtcatagacccctggccactgtgcgcagttatggatatttgattctgttcgcggccagaggtcaaatcgcataagcggtccatagaaatgcaaaaagcgagttgctaatgatggcccacatatcacatatcacataacacatatgtacatacatgtaccactcgcatcatatcgccacattatcgcgccgtcagctcaaccaagcagatcttacatcttaccggatcagccacgccccctaattgctatatatatatcctcttttattttcgatctcagttggcgccatgagggaaccactgcccgtggcggtggtgacgttgctcctgttcctgtggctcggttcggcgatgccacccacatctggttcggcggtgctcatctccgacatgaccatgagcgtcatggtggagctatcctcgcgacatcccttctgcaagatgcacacagatcggtgagtcctgcagcgcggactgtttttatagctgaataaacctgaaataatacatcttattgtccgctagtggtgatatccagcgcatgttgctgcaatcggatccgcgacgcatacgccaggtgccgcgggagtcggtgatggagctcgaggaggtgtgccgccgtcagggatcctatggccacgagtttcgcggcggactgggcttcatctatccgggcacaaagtggtgcggaccgggcacagcggccaccagctacgacgatctcggtgcgcacgctcgcgaggatcgctgctgtcgcgagcacgacatgtgtcccgatgtgctaaatgtgggcgaatgcaggcgaggattgtgcaatcgcggcacattcacgagaagccactgcgattgcgatgcccggttcaggcgatgcttgcaggcggcaaacacggagacggccaatacgctgggcgccatcttctacaatgtggtgcaggtgacgtgcttccaggagcggagtccctgctcggcacaccagaggttcgaggacttctactaccgcaccgatcactgtccggcggaattccggcaggcggatctctatgtgccgccgcacggtgacaatctgatagccaagatcctggcccatccgcagggccgggccctggccgctccgtcctggacgattcccgccaagtcgacggcgcgccgttggggcgttaaattggccagcgttggcttggcggcggtgaatatcctgcgggaggtggtgcagcgaccccgactcctgtgggatagcctgcaggcgccggtctccagggagctaccaccgccgcaaagatatcacgatccgggctatcactacgagcgacccggacccggctcgtcctacggatatggccaatacagtggtcgcggttacgggggcttcgactccccttggagctaattgcggtatcacgaatgcccccggaagactgttctgagcgattgggtggagtccactggtcacgcgaaaatatgttccgtatggcgagtaatccaaaaggcagttgtaaatgatatacaagtacatactaggttagagattagacaggattaaagatagacattcaattgccaaagaaaagcgcagcaagtacactttaagaaaatatcgctttcatacttcgaaacgtgtgtatgaagttaatcggcgcgaattctttgtttcatcctgttttatattctggtaaagtttttcattctgtcggttacttattattctggaaaagtttcactgtcatcagatttgccatcttcgcgtgggaagagaatgggaattgatactttaaatgggtttttttttgtgtaagataaccttttgtgagtcactaagtggtaaggtagagagatagcttttaagcagacataaacttcattgtaccgatgcgtatttttttttttaacagaatttgaagattactctgccaatcggttaactatttgctagaccacacatggattgaaccgcccaactgctcccgcttagtattagtagtcataagttgcagttacggctccgctagggagtcgcaatcctagctaacttagctgcatgtgtgattgccattaacgttatgcatgtaccgtgttcactagttgaccatttgaccatttgacagttgtgctttagaaataaactcactgagaattcgcatgcctgcgctcttcctttccggtaaatgaattcgattagagccggatacaatcaaacggaacaggaggccatctgcgcccagtggcagtatcagccgtcggagaagtatgtgcccagccagccgagaacctcatcctaaatgggcaacgttgacgacctggaccagctgatggactcatggaatcggttacaaatctacacggcattagcttatcgcctagctatagttatcctcgattgcaattcttaa

SEQ ID NO: 5501 - DNA, 1029 bp, DROSOPHILA
atgagggaaccactgcccgtggcggtggtgacgttgctcctgttcctgtggctcggttcggcgatgccacccacatctggttcggcggtgctcatctccgacatgaccatgagcgtcatggtggagctatcctcgcgacatcccttctgcaagatgcacacagatcgtggtgatatccagcgcatgttgctgcaatcggatccgcgacgcatacgccaggtgccgcgggagtcggtgatggagctcgaggaggtgtgccgccgtcagggatcctatggccacgagtttcgcggcggactgggcttcatctatccgggcacaaagtggtgcggaccgggcacagcggccaccagctacgacgatctcggtgcgcacgctcgcgaggatcgctgctgtcgcgagcacgacatgtgtcccgatgtgctaaatgtgggcgaatgcaggcgaggattgtgcaatcgcggcacattcacgagaagccactgcgattgcgatgcccggttcaggcgatgcttgcaggcggcaaacacggagacggccaatacgctgggcgccatcttctacaatgtggtgcaggtgacgtgcttccaggagcggagtccctgctcggcacaccagaggttcgaggacttctactaccgcaccgatcactgtccggcggaattccggcaggcggatctctatgtgccgccgcacggtgacaatctgatagccaagatcctggcccatccgcagggccgggccctggccgctccgtcctggacgattcccgccaagtcgacggcgcgccgttggggcgttaaattggccagcgttggcttggcggcggtgaatatcctgcgggaggtggtgcagcgaccccgactcctgtgggatagcctgcaggcgccggtctccagggagctaccaccgccgcaaagatatcacgatccgggctatcactacgagcgacccggacccggctcgtcctacggatatggccaatacagtggtcgcggttacgggggcttcgactccccttggagctaa

SEQ ID NO: 5502 - protein, 342 aa, DROSOPHILA
MREPLPVAVVTLLLFLWLGSAMPPTSGSAVLISDMTMSVMVELSSRHPFCKMHTDRGDIQRMLLQSDPRRIRQVPRESVMELEEVCRRQGSYGHEFRGGLGFIYPGTKWCGPGTAATSYDDLGAHAREDRCCREHDMCPDVLNVGECRRGLCNRGTFTRSHCDCDARFRRCLQAANTETANTLGAIFYNVVQVTCFQERSPCSAHQRFEDFYYRTDHCPAEFRQADLYVPPHGDNLIAKILAHPQGRALAAPSWTIPAKSTARRWGVKLASVGLAAVNILREVVQRPRLLWDSLQAPVSRELPPPQRYHDPGYHYERPGPGSSYGYGQYSGRGYGGFDSPWS

SEQ ID NO: 5503 - DNA, 3668 bp, DROSOPHILA
agctgcgattgcaatatggcctgggatttgaatttcttggcgcgcaattagccagtgctggaaaatgtctgggaccgcacagatttgccattcagagggaatcccacgtggtggtgtctgcgtatcggtgtgcactgcaatctcccccagaaatatcacgatggccagtgattctggcagcgattatgaggtggaggctttcttcaatcccaagcgagttcaacgcacagtcaacgacgacagtgcggatctattgggaaacttcgatgaccagaagcgaagggagatcttcgagggcacgtatgtggacaaggaggacggacggaatcccagtgacccggaggatagtaagagcgaggatgaggccaagtccgacgacgaggcagccgctgagggcagtgctgcttccggagccgaggaagaggaatctgcggaaaatgggcagataaccagtgaccagctgagttcactgcttcgaggagcctccaaaaccaacagacacgtcctgtacgtgacgaacctgaacttcgaaaccacaaaggacgacctggagctgcacttctctgcggcaggcacggtcaagtctatccgcattcccaagaagcgacgagggggcttcgcctttgtggaaatggccgacctaagcagtttccagaatgccttccagctgcacaacacagagctgcagggacgcaacatcaaggtgcagatctccgaggcgggcaagaagaagtcggccaacaagaagaacatcatcaaacagaagaaccgaaagctggccgagatgcgcaacgagcagaagaccttcacgaagagcggcaagttttacgacaaggacctgaaaaaggagaaggccaaggaaatgctggcgcgaaagcggtggcgcaaaaagcccgcccccagacccacataaatagcataagttcttacaatgtaagccattctatgattatttaacaacaattaaaagttaacattaccggataagaggtttactgttaactattgccagcgcacaatatagaagttgcgtttgcccacgcgcagcagagaaattccgttgcgcaggatgtgcacgcccgtagttagcacttcggcgatattctgcacccgcttctggttaacgtaaaatccgcctgcgtttataatgcgtacagcatccgctaaagagtgatcacaaatcgattatgccccatatttccaaagagaaagataacttactctccgtgggaaagcacttcgccttcatggcgagctctaggatggacattcctggctcggtcaacaggttcaccatagtagcaccctgaaaagtctgctggatctcggaaaggttgagttccgctaaaccctccacgttgcctttgtataaggcattggtcacacgttccgcctgcttcagcccactttctgtgaattgaaaacttctatactactgatataaaggaacaatgatatagagtacaacctccatgaaccagcagagtcacgtcctcagccagcagagtctgcgccttccgcttctcgggctccttcgtgtgctcccgcatcaactgctccacctggggcagcgggatgaaggtgaacagcttcaggagcttttcgacctcggagtctggcatgcgcaggaaaaactggtagagggcgaaaggcgaggtcttgttaccgtctagccacactgcattgcctgccgacttgccgaacttatcgccctcttccgtcgtgaccaatggcagggtgagcccgaagacctctcgctttcgctctacgcggctaataagctcgtgtccagtcattaaattgcccgtctgatcggagcctcccatttgaaagcagcagttgtggcggcgcagtaggtgcagccagtcgtaggcttggaaaatctggtaggtgaactcggtgaagctcattccgtcctccgactccaggcgggactgcaccgaggatctggagagcattgaccccatgcgaaagtgtcgtcccatgttggccacaaagtcgatgagctgcaggtccgcataccagtcggcattgttgacgattctgcggagattagaaagagattaacacgacctgatgtaggctacacactcacattaggggagccagtggcaatttctgtttcttagagtcccaaaggcagttctcgtgattttcgaacacccggcgaagctgttgctcgatagcctttagattggtctcgatcaccgtctcgcccagttggttgcgctctgtcttgcgtccactgggatcccctatgagtccagttgctcctcctactagggcaataggtctgtggccggctctttggcagtggatcaggcccattattacaagcagattgcccacgtgtagactgtcagcggtgggatcgaatcctgcgtagatgctctgttggcctctggtaaaaagctgtttcatcctgggactgtggagcagcggttttcatagataaaatggaaatcttctctctttgtagatggtccaatacttacgccgctgtatcaggaaatatgccgtggaaaaagcctcgatctgtgagctccaagaggttcttctgcgacatctggcggtggctatgtcggagtacatcctggagcggtttgagcaaactccggcgcagaggcagcattatgcgaagttcgttggaaattttaaattcctagagggactgattttgaggttggagccatcagctgatcggcgcgcggtgaatgacaaaatctgacttgttttggcttgcaaacagctggttgtcgctgcgaatggcaacatcggagtccaaacacaaaggttccatttggagccaacgcagttttccatgacaaggggctattcataatcaaatctagagataatgctgctgaagatacgccacgccctgttggaggtcaccagtccaccggctgcaaaacagtccgcgatcattattaacaacgaactcatcatcagttctggaagcattctgcaaccacatttggccgtagacggggacaaaggagcgcagaacaaggcaattgttgccagattgcagaggggtcaactgctggatgttcagaatgaggagcaggaagaggatgcgcagatccgctcactacattttgtggccaccttcgatccgcagcaacgacggccgaggccaatcgcagcacctgggtcgaggcaaccacacatcctctcccgcttcactgcccatccgctgtacgtgttttgtgcgaacgaagtttgccgcaacctgcaccacatactactcaccgctgactccggcgatgcgggtgaggtgctgcgctccagtttcgtggtgctgggcctgcggaagcccgaaaaggagaagtccttcaagcgcttcctcgcgcacatcgctaactacttgcgatacctgcagcccatgcacactttggacgacgtgctggtcatgtgctcgccctttggcctggagaacttttacaagaccatcagcattggaaaggtgtctaatgttatgggacgaagtggctgcttgtttgccatttcaaacgctttgcccctgggctgtgaaggctctgcagtgttcaacaacaagctgtaggtgatgaatacgttacaaaaccgtaatataccaaaaatttccgtttatcaggcggctcgttggcattgtgatatgcacctcatttcaacgccatcacgaa

SEQ ID NO: 5504 - DNA, 1433 bp, DROSOPHILA
ctctaggaatttaaaatttccaacgaacttcgcataatgctgcctctgcgccggagtttgctcaaaccgctccaggatgtactccgacatagccaccgccagatgtcgcagaagaacctcttggagctcacagatcgaggctttttccacggcatatttcctgatacagcggctcccaggatgaaacagctttttaccagaggccaacagagcatctacgcaggattcgatcccaccgctgacagtctacacgtgggcaatctgcttgtaataatgggcctgatccactgccaaagagccggccacagacctattgccctagtaggaggagcaactggactcataggggatcccagtggacgcaagacagagcgcaaccaactgggcgagacggtgatcgagaccaatctaaaggctatcgagcaacagcttcgccgggtgttcgaaaatcacgagaactgcctttgggactctaagaaacagaaattgccactggctcccctaataatcgtcaacaatgccgactggtatgcggacctgcagctcatcgactttgtggccaacatgggacgacactttcgcatggggtcaatgctctccagatcctcggtgcagtcccgcctggagtcggaggacggaatgagcttcaccgagttcacctaccagattttccaagcctacgactggctgcacctactgcgccgccacaactgctgctttcaaatgggaggctccgatcagacgggcaatttaatgactggacacgagcttattagccgcgtagagcgaaagcgagaggtcttcgggctcaccctgccattggtcacgacggaagagggcgataagttcggcaagtcggcaggcaatgcagtgtggctagacggtaacaagacctcgcctttcgccctctaccagtttttcctgcgcatgccagactccgaggtcgaaaagctcctgaagctgttcaccttcatcccgctgccccaggtggagcagttgatgcgggagcacacgaaggagcccgagaagcggaaggcgcagactctgctggctgaggacgtgactctgctggttcatggagaaagtgggctgaagcaggcggaacgtgtgaccaatgccttatacaaaggcaacgtggagggtttagcggaactcaacctttccgagatccagcagacttttcagggtgctactatggtgaacctgttgaccgagccaggaatgtccatcctagagctcgccatgaaggcgaagtgctttcccacggagacggatgctgtacgcattataaacgcaggcggattttacgttaaccagaagcgggtgcagaatatcgccgaagtgctaactacgggcgtgcacatcctgcgcaacggaatttctctgctgcgcgtgggcaaacgcaacttctatattgtgcgctggcaatagtt

SEQ ID NO: 5505 - protein, 464 aa, DROSOPHILA
MLPLRRSLLKPLQDVLRHSHRQMSQKNLLELTDRGFFHGIFPDTAAPRMKQLFTRGQQSIYAGFDPTADSLHVGNLLVIMGLIHCQRAGHRPIALVGGATGLIGDPSGRKTERNQLGETVIETNLKAIEQQLRRVFENHENCLWDSKKQKLPLAPLIIVNNADWYADLQLIDFVANMGRHFRMGSMLSRSSVQSRLESEDGMSFTEFTYQIFQAYDWLHLLRRHNCCFQMGGSDQTGNLMTGHELISRVERKREVFGLTLPLVTTEEGDKFGKSAGNAVWLDGNKTSPFALYQFFLRMPDSEVEKLLKLFTFIPLPQVEQLMREHTKEPEKRKAQTLLAEDVTLLVHGESGLKQAERVTNALYKGNVEGLAELNLSEIQQTFQGATMVNLLTEPGMSILELAMKAKCFPTETDAVRIINAGGFYVNQKRVQNIAEVLTTGVHILRNGISLLRVGKRNFYIVRWQ

SEQ ID NO: 5506 - DNA, 4186 bp, DROSOPHILA
atgatcgaaagaaagttccattttgattgacgggtgcacaacaacagcgaatgcgaatcaattgaaattgaactcaaattgcagatgctgtggcggaaacggaaattcgcatctaacggttttcgatttgaaagccaaaaatgcaacgctgtttttggatcctctaaccttaaaaatagtattcaaagaaatgggtcacagaaatctagaactgtttgcaactattatttaatcaaaacacagacacaattaagcgaaatatatattgtttttaaagttccctaatgataaggaagagtaagccaaagcagactttgaatctctagctatactgaacgcaacagaatcatttacaatatacatatatgtatacgcactgaactgctcgcaactggattctgacgtcacacttgaactacaatattttgcaaagtccagtttcgcaaacgcatccagactattctcggacagatagatgtactagttccgtcagatcgacaacccagaatcgtgtgcactgggtatggcatttttatacgtaatcatctgatcggagattcgattgaaccgacaaatctcccaattaatggggaaaactgcgcaccaaatgagttcaattgtcgggttagctgattcggaagatgggcgtgtggccattgaagcctgacatttgcattaatcttaattgattaataacgattcaagatcaaagccattaggagaaatatccgtaacaacatgagtgcaacaaatgcaaattggagcgcactacaaaaaaaagagttgaaggttacccaaaaaatattttaaataagttctaaaatacaaagcaaaggtttccatgggtggaaaaacaaaacaatttattctttttttcgagggatattttatagtcaagttacttgactacaagcatcatatcttttactatggaatctctgtgaccaaactgttaatatcaatttaaaactaaactaaatgagtccacactttagaagtttcaatggttggcagttttgttaatcttttccttgtcgtcactatcattctcattgtcatcggtctcttgatccttatccgtgtcggttttgttatcgttattatcctgcgcttgctgcagagccttttgagcagcgcgatcttgttgtgatttttcccaggccagctcaaagggatactccaagggtttcagttcgtcggggcactcctcctgattcggagcagtggcttggctaatggaagcgccacgcgtgtggatctgctccagctgagcggcggtgtggacctctgaattgagacccgtaataaactcgaacaactgctccttggtgtaaatgttgggcaggccgcgtcgttcaaagaagttaacaatgttgccgcaatccctcatcaggaactccagggcactgggatgcttcggttcgacactctgggccacgtcaataaaccagcacttgccctcgaaccagagtatgttatattcgctcatatcggcgtgcaccagcttcgcctcattgtacaacttgtgcatcgcggccacaatctcttcgtaggcgcaactcagctccgcgtcgctcagacgggcatcctttaacttgggcgcagcgttatgattgtcaccgatgaaccgcattaccagcacgtgcttcttcagcacaacaacgtctggaacgtttaggccaatggcttgcatcctcatcagattatgcatctccttctcggcccacatattgataatcactcggtggttttgtttgctaaagcgatccttgaaccgatagtcatccttgatgtatctatcgcgctgcttgaactcgttgagcgtggttttaaagattttaatggcacactcccggggcaaaagctgcggtggaacgagcacaccactctggtgaccatgctcgttgctgcccgtatagttcgcatcggaattggcgtgcaagatgaccgcctccttgcccgtggatataatgccgttgatctgctccagtatttggttattgatcagcttgtacagcagcaaacgtgtacccgcatccaatcccatctccgcggtggccactttctcgtgcttgtcggagcggcctcgtcgagaatgggctcgtagttggttaaacacctgaaaggtacgtttaagtcttattatcgcttaaaactgaccgcttctaaccttattggagagcttcatgtcgaaaccggcagcatcaccggtgggaaactccggcggaaaggacatcacgcgctgggcattacgcacggcgcacagctgcggatcgtgctttgttatcatctcgccctccttgttaactttaaagccgcagcgaggtatggagtcaagctgccgttcattgtcctcgaaccgatcccagtcgtgcttctgttgctccaattcatcctcttcgtagtcatcttccgcggtgtcgtgcaagaactctgcatcgccatcacgtaggaacttattgagggtaacagtgaccttggattgcttgttttgctgccgctcgatacgacgcaattcctcattgtactcgtgatcgaactgggactgcaacagctgggcaataactgcatcgctgtcttccggcagctgaatgtcctccgctacgtttccttcgtcattgaggagcgcagagtaatcctcccaatcctccgcatcactttggatactctgcgcattgggcgctggcggggatgaggcttgcgacccccaaacgggtgctatctgttcgtccggtcttttcagcttctccgtgtggcgctgcagctccttgtcgtgcaacttgtgggcatattgctccgacattatatccgccagattcacctgctgcacaggctcgctggtcttaacccatggcgacgacattctgcacaatcgaaagagagtcaatatagatcacaatttggtgctgtgattccacaaacctattggaacttggcttgagaagatcgagttctatatcggtggtaattgtggcagtttacaaacaagcctctgtccaaatcctgaccaacggcgggttgcaggtggactctgatatgtccgcggtggaggacaagtgacagttttggcactatagatgaccaatataaggggaagccaattgcaacccttgttgcaataatatttctattgtatttctccaaacaatcctttttccaattgttgtgaaattatcagcttatgaaagtatcgagctatcgcagaacgatagacccgataaatttggaaatagaagaactcctaatatcgaaagctttgcttacaatttttataacgttaagttaaagttatattatactttaatttgcatacttagaaaacgttttatttgtcatattttaggaaaaggcagaaaaatatatcgttagcaagggcgttgccacatcgtcagttctagagcgacgttgccatcgtagtttcgatgccagtaatcgatactttttgttgtagttgtacatttttcgccaaaaataataataaaagtgaaaaattttttttgttaatatacgtttatttgttgtacaaaggagaaaatgttattaaactgattggccgccccagcattttcgtgacccccgctccaaatacaacaaaatcgaacggccgccagcaacaacaaggtgcagtaaatattcagtgcgctggtaagaaagatggaaacaaaacgagagaccgaaaaagcaatcaaaatagaattccgaatttagaatatgacagactgaaaaaaattttcaattcgaacgcattgccgctgctgctgcccgctcctcttcttcttcatctcctcctccttcttcctcttcttcgccagccgctgtggggggacattgggggtcaaatgcagaagatcgggactgaagatttcgtgaatttgtgatttccgaattcgttcctgctaatttgcgactgccagactcaaagaacacacacacacatacacaccagcacacacccacacgcttgcacatacattcgcttgtggccgcctgtaattatgatttttattactcctgcagcgcatatcgccttctttaaccgccaattgctcctgctcctgcccactaaccaagtcaaaccaaaagaagcgattactctccaagcgccagcggaagtgaaatgataaagtccaccacgaatccacaggaacagcgtctgccacgccccgaggatcagtcgccagcgccg

SEQ ID NO: 5507 - DNA, 2077 bp, DROSOPHILA
ttcataagctgataatttcacaacaattggaaaaaggattgtttggagaaatacaatagaaatattattgcaacaagggttgcaattggcttccccttatattggtcatctatagtgccaaaactgtcacttgtcctccaccgcggacatatcagagtccacctgcaacccgccgttggtcaggatttggacagaggcttgtttgtaaactgccacaattaccaccgatatagaactcgatcttctcaagccaagttccaatagaatgtcgtcgccatgggttaagaccagcgagcctgtgcagcaggtgaatctggcggatataatgtcggagcaatatgcccacaagttgcacgacaaggagctgcagcgccacacggagaagctgaaaagaccggacgaacagatagcacccgtttgggggtcgcaagcctcatccccgccagcgcccaatgcgcagagtatccaaagtgatgcggaggattgggaggattactctgcgctcctcaatgacgaaggaaacgtagcggaggacattcagctgccggaagacagcgatgcagttattgcccagctgttgcagtcccagttcgatcacgagtacaatgaggaattgcgtcgtatcgagcggcagcaaaacaagcaatccaaggtcactgttaccctcaataagttcctacgtgatggcgatgcagagttcttgcacgacaccgcggaagatgactacgaagaggatgaattggagcaacagaagcacgactgggatcggttcgaggacaatgaacggcagcttgactccatacctcgctgcggctttaaagttaacaaggagggcgagatgataacaaagcacgatccgcagctgtgcgccgtgcgtaatgcccagcgcgtgatgtcctttccgccggagtttcccaccggtgatgctgccggtttcgacatgaagctctccaataaggtgtttaaccaactacgagcccattctcgacgaggccgctccgacaagcacgagaaagtggccaccgcggagatgggattggatgcgggtacacgtttgctgctgtacaagctgatcaataaccaaatactggagcagatcaacggcattatatccacgggcaaggaggcggtcatcttgcacgccaattccgatgcgaactatacgggcagcaacgagcatggtcaccagagtggtgtgctcgttccaccgcagcttttgccccgggagtgtgccattaaaatctttaaaaccacgctcaacgagttcaagcagcgcgatagatacatcaaggatgactatcggttcaaggatcgctttagcaaacaaaaccaccgagtgattatcaatatgtgggccgagaaggagatgcataatctgatgaggatgcaagccattggcctaaacgttccagacgttgttgtgctgaagaagcacgtgctggtaatgcggttcatcggtgacaatcataacgctgcgcccaagttaaaggatgcccgtctgagcgacgcggagctgagttgcgcctacgaagagattgtggccgcgatgcacaagttgtacaatgaggcgaagctggtgcacgccgatatgagcgaatataacatactctggttcgagggcaagtgctggtttattgacgtggcccagagtgtcgaaccgaagcatcccagtgccctggagttcctgatgagggattgcggcaacattgttaacttctttgaacgacgcggcctgcccaacatttacaccaaggagcagttgttcgagtttattacgggtctcaattcagaggtccacaccgccgctcagctggagcagatccacacgcgtggcgcttccattagccaagccactgctccgaatcaggaggagtgccccgacgaactgaaacccttggagtatccctttgagctggcctgggaaaaatcacaacaagatcgcgctgctcaaaaggctctgcagcaagcgcaggataataacgataacaaaaccgacacggataaggatcaagagaccgatgacaatgagaatgatagtgacgacaaggaaaagattaacaaaactgccaaccattga

SEQ ID NO: 5508 - protein, 603 aa, DROSOPHILA
MSSPWVKTSEPVQQVNLADIMSEQYAHKLHDKELQRHTEKLKRPDEQIAPVWGSQASSPPAPNAQSIQSDAEDWEDYSALLNDEGNVAEDIQLPEDSDAVIAQLLQSQFDHEYNEELRRIERQQNKQSKVTVTLNKFLRDGDAEFLHDTAEDDYEEDELEQQKHDWDRFEDNERQLDSIPRCGFKVNKEGEMITKHDPQLCAVRNAQRVMSFPPEFPTGDAAGFDMKLSNKVFNQLRAHSRRGRSDKHEKVATAEMGLDAGTRLLLYKLINNQILEQINGIISTGKEAVILHANSDANYTGSNEHGHQSGVLVPPQLLPRECAIKIFKTTLNEFKQRDRYIKDDYRFKDRFSKQNHRVIINMWAEKEMHNLMRMQAIGLNVPDVVVLKKHVLVMRFIGDNHNAAPKLKDARLSDAELSCAYEEIVAAMHKLYNEAKLVHADMSEYNILWFEGKCWFIDVAQSVEPKHPSALEFLMRDCGNIVNFFERRGLPNIYTKEQLFEFITGLNSEVHTAAQLEQIHTRGASISQATAPNQEECPDELKPLEYPFELAWEKSQQDRAAQKALQQAQDNNDNKTDTDKDQETDDNENDSDDKEKINKTANH

SEQ ID NO: 5509 - DNA, 3456 bp, DROSOPHILA
ccagttgacccaaacaaagagtgtcgcgacgccggcggattggaaacagggcggcaagtgcatggtcttgcccaccgtcaaagccgaagatgttcctaagctctttcctgatggtatcgaaaccattgagctgccctccggaaagagttacctgcggatcactccacagccctaatggatgacaagcgtgcgctctcactttttttttgctttattacaaaaattataattaacaacaaataatgcacaataaagtatacgcttacaaccgtattttcagtagatcggcgctttcaggtggctaaaactcgccttctgctggacaaaattgccaaaacattcgacttacgaactaaatcagatggggaatgtgacaaaaaggtcgcgatttgtgtgtacgaaataaatatacattcaatatacatatatagacgtgtacaaaagggggtagagatattgcaactggataaccatgggggtaagtaaggtataaataaggccaactctgtacaataactgaagcgctttctaggatagaagaaagctaaagaccaagctcgtgcccgtaaccgaagataactgaaaggaaaatgtttacattggattaattttggtggcacaaacagtataaagttatttgtaatagtgaccattcatttaaactaataattggaaacacatgttactgataattagtttaaacagtggatgcttgagcactttcccttgcccaaatactcacaagatatattccacaatctgagttcgcatagagatcgttaccttgaatatgttaatgaaatgcaaatatgtacaaaataatgtatgatgtaaaagctttcgctacgaaacaggttccctatgctcttaaattctcttgactgcgggaatacgtctcaaatataaagtgggaatggtaacatatgcctttgtctagttgcgttgtacttacaatttaactaccacatgttccgccctccgcaagtatagctttcctgcgtcagtgcctgcgctgcggattggactgaagcatccgcgcgaaccgcctcaccaggaaaggccacaggatgaggacggcaaaccagagcggggagatgttcctgaagggccaccaggcgggcagtgatcgtggctgcgccaccgttcctttcgctgccttttggccgctgcgaagttcgttgagcgactgctccaggctgcgaacgcgctgctgcactgcgcccacatcgctgttcatccgtgtgatagcagcctggatttgacgcagcaggtccgtgttctggccaatcgcctgggtcagctcgtggctgagatcgtagggatcgtcgtactcatcgtccgagggatccacgatggccacgctgctgttgctcgtaaagttgtgcgtgtcatgttgtgtgtagcttgctgttggcttaggtccatagccattggtcagtggcggcgaactatggccattctccttaatcgtttcggatgtggccagcggtgcggtgctagtcgcctgaggttccggctccggttcgccattacaactggagccgtgctggggactgttggtgcgcgagtggaacggcgagttgggatgcgactcggccagctccttcatgccgggcgagaccagctccagttcgtccaggctgatgtttcccagactatcgaggctgcccacaaagttctgcacattctccgtgaacgacatggtctcaatgatctcctgcaggctctccacatagcgctgcatcgcctcctccttggtcaagtgacggttatcgttccatgcctgccacttggccttgcctacgatgtcccaaaagccgggcttcttgtccacatctggtctaccctcggtggcctgtttgaacagcccgtagaacttgagcatcatgctggtgctgggctggtaggggccatttttgggcagaccctttatcacattgactgccgcctggaaacgctcctcaatcgccgccatacctgcaagattatcccgcgattagccagggcactcgatcgataagatacacaggtacgaaggctgccatatagaggcggtgccaagttcaccttgtccaggtgaacgtcgcttacaaattacctaattattgtgtgcaatccgcggtgttgcaaaccccactttcggctcccccttttgttgttgtcgttcgctattgattccgattccgaatccgagtccaaatccgctgctgggcattcatgaatttttgggtgcgacgttcgtggatgcgctgctgtggtgccaaagttcgagttctgaagtccaatcttctgagcttcgaatcgaatcgagtcggctggagctttttcttagtttggcccccgttcttatcgacctcgctgaggaattgttgtgtgctgcgccaaccgctgtcgttccaatcgagttgcaatcaaataaaactaaacaaaaacccgaaaactctctctgcaaatcgctgagcgcgtacgtgtgagtgtgtaggtgtgcatgtgtgcgggtggcgcagggctgcaacgaaagtatcgatacaggtgcagagtggagatgatatttttgtgagcgcgaatatcgcgatttaaacaaaaataagaagtttttattgtccataaataaaattataaattagtattttgcggaaaagcataggaccaatcaatgaatttataaagtaagattatttagttttatttatttccagccacatttaattataggtaaatataggtatagtagggtataataggtatagtataggtatagtataattataggtataggctttatcgaaagtcaactatcgcatgagcgcagacttccatcttccattgaatataccgctattcatggtattttccaacgttcgcgcatacggtcactcactttttcatttcgtaaaaatcagcaatcgaattaagtgcttaattatttgcattatttttagagctttccgaaagctgccaacgtaaagtccgcgaagcgccttcactggccgaatcggaaatagcaaaatcgaagcaccagagatcgaaagacagcgcattcgattcgatttcacaataactgcgaaccgagggcggagtgggagtgtctgccagcgcggagaaaagtgaacgcattgcaattaaacatgaaatttgctgcaacgtcgacgggagtacgacatttttgtattatcaacgccaagcagcagagccatcagaatcagcagactatatataagatacggccgcaaaaatcgcgatcggagttgaacaattgcaaacggcaaagacagtcgtgtagaattgccaaaaattggaagcaccaaagtttttgcataggtgcgtcctgatcggcaacgtttcgggttagaaagacaaagattaaaaaattgacagctcggctcaagaacgcaatttaatttcctaacctagagcatcaaaatcaataaatcggaaccaacacgtgcgtttcag

SEQ ID NO: 5510 - DNA, 1335 bp, DROSOPHILA
cgatttgcagagagagttttcgggtttttgtttagttttatttgattgcaactcgattggaacgacagcggttggcgcagcacacaacaattcctcagcgaggtcgataagaacgggggccaaactaagaaaaagctccagccgactcgattcgattcgaagctcagaagattggacttcagaactcgaactttggcaccacagcagcgcatccacgaacgtcgcacccaaaaattcatgaatgcccagcagcggatttggactcggattcggaatcggaatcaatagcgaacgacaacaacaaaagggggagccgaaagtggggtttgcaacaccgcggattgcacacaataattaggtatggcggcgattgaggagcgtttccaggcggcagtcaatgtgataaagggtctgcccaaaaatggcccctaccagcccagcaccagcatgatgctcaagttctacgggctgttcaaacaggccaccgagggtagaccagatgtggacaagaagcccggcttttgggacatcgtaggcaaggccaagtggcaggcatggaacgataaccgtcacttgaccaaggaggaggcgatgcagcgctatgtggagagcctgcaggagatcattgagaccatgtcgttcacggagaatgtgcagaactttgtgggcagcctcgatagtctgggaaacatcagcctggacgaactggagctggtctcgcccggcatgaaggagctggccgagtcgcatcccaactcgccgttccactcgcgcaccaacagtccccagcacggctccagttgtaatggcgaaccggagccggaacctcaggcgactagcaccgcaccgctggccacatccgaaacgattaaggagaatggccatagttcgccgccactgaccaatggctatggacctaagccaacagcaagctacacacaacatgacacgcacaactttacgagcaacagcagcgtggccatcgtggatccctcggacgatgagtacgacgatccctacgatctcagccacgagctgacccaggcgattggccagaacacggacctgctgcgtcaaatccaggctgctatcacacggatgaacagcgatgtgggcgcagtgcagcagcgcgttcgcagcctggagcagtcgctcaacgaacttcgcagcggccaaaaggcagcgaaaggaacggtggcgcagccacgatcactgcccgcctggtggcccttcaggaacatctccccgctctggtttgccgtcctcatcctgtggcctttcctggtgaggcggttcgcgcggatgcttcagtccaatccgcagcgcaggcactga

SEQ ID NO: 5511 - protein, 324 aa, DROSOPHILA
MAAIEERFQAAVNVIKGLPKNGPYQPSTSMMLKFYGLFKQATEGRPDVDKKPGFWDIVGKAKWQAWNDNRHLTKEEAMQRYVESLQEIIETMSFTENVQNFVGSLDSLGNISLDELELVSPGMKELAESHPNSPFHSRTNSPQHGSSCNGEPEPEPQATSTAPLATSETIKENGHSSPPLTNGYGPKPTASYTQHDTHNFTSNSSVAIVDPSDDEYDDPYDLSHELTQAIGQNTDLLRQIQAAITRMNSDVGAVQQRVRSLEQSLNELRSGQKAAKGTVAQPRSLPAWWPFRNISPLWFAVLILWPFLVRRFARMLQSNPQRRH

SEQ ID NO: 5512 - DNA, 4424 bp, DROSOPHILA
ggatagcccatgagtcatgctccaacctacctttgattagggcccgctccgaaagggtcagatagacgtgaccattgaccgtatcgccggccctatagaccccccgtgggttgtccaattggatctcacagcggtggctcattttcagctctctggactctgttgacggctcgactgctaaccgatgtctggcagttgttgacaacatgcccgcccattaagaacaggactggacgcggccttatcggatatactaggtgtgaatggtaccactaccatggctattatcaccagagctatatcttatcttatgccgggtgaggagtgctatcgcgtaccaaacaatttgtaatttaattaaaatacgttacatccgatggcaggtgtagcctacatatgtgcgaaaacttcgtttatatgacggattcaaggactcgcaagaccagtgatgagtacaatttctctgtaaatagccaagaaaaagttatcgacctttcattttaatacattcatcaattttgctacgtaataattttggttcacattcaaacgttttaagccactaactcaataagcaaatatttcgctaaactttcaagaattcgtttaaatatctttccatccccacgcaacacaaaatacaattcacaaactgattgtttgtatactgcaattatttattgtccacttgagaacgcattaattggtacttacaataattagtatatgtatcgagtcgattacatatttaaatcgaaaatgtttgacggatgtataaaagcggttataggtatactagaaaaaggagattatggcactcaataagttcgattcgatcaattttggatggtacgcgagtgtacaaatttgcgcaatgaaagctcactaaaactagacgacgtactaggacccggcctaaaaatcctttataagccttagtcttgaacacttatgttacttgttactggggttggcaatacgtatataagacacttttccattagaacaggtgctcgtcctgtaggacgttctcgacctccgaaaccgttgcccgttgaatcggccgatgcacctgggcagtcacatccaggttctcttctgcctcctgctcctgctcctcgacatgttcggacagtggaccacagagggatccgaaagtgtccagactccgacctgtgtgatccgtgttaagcgatccgtacgacctgtacatgtgcatgtccaggccagagtcctccattccgtgagcaggagctgtcccaatgagtgtggaaaatccaggaaacttgggcaagtggatccgctgcaggaccactgcggcgttactccctaatgtttgctgacttcctgccagggtagcaaaactgaaggagggcggaactgcgaatggaagtgttgataagctatttaagttttataacaatgttagggacttgaaggattttccttgccattgttgcattaaatgaactaccttatattttaccttactatactgtactattactattaccttactataatagtgaaattaaccaagcgattaaccaattaaattttgtaaatttgtattcaaaattcagctaacattacatgcatgaaaaacaaatatgtatactccttagatgattttatggagttttaaaaaaataaatatgcaacatgtgatttgatttggcagttttttccgtctaacattttttaaaacttcaggaactgtaagtgatataattttactatacaatttgtgtcgatatcacaacaaaatgttgaactgtaacgggaatgtgatagtcgagaaaaacgaatagaactgcatctctcaaaaagaaataatttaatcgatgggtattactatttctatacaatgagaaaattaaaatcaatgaatttaaagtctatcctaagcaactgttacagaaacttacaattgaagtttaaagcaacatataaccaaatcctaggtgaaatgaaatgtgtcgtgctataaataatattttataacatgttagatttttttttaaactactctaatgaatacgatcatttgcttaaattgcaagttagaacaaacaaaacttacggcaactgtcgtaagatggtggctcgtcgtcttcgatcaccctgtgcggctcatcggtagccggatctgcctctccggcggaatcctcctccactgttggcggtcggggagttacccgctcgatcaggcgctgtctctctggcgtgggcgtcctccgcacaggctgctgggtgtgaaccgagtccctgaggtgttgcaaagaggtggtgcccacgatgatgggcactgagaggtccgtgtcgtagtggaagtaacccgtcttcagctttacctgcagcgtgtagtgcagaaagacgatgtagttggggttcagggtggatcggggagtgtccatgggcacacagatgctggactcgtactgccgcttggacaggcgcagggtgcggtccgagatcagctccttgaccagtgtcttggagtagaagttccgcttcacgggctttcgcgacaggaagacgaagtgctgcttgatggacacctccacgccgatgatgtcgtagtgtggcgactggttgtccacctccagcctgtagggtacctcctgaaggggcgtgaatccggaggcgggcaaggtcaaggtggagcagatgggtcccgaaatgcagggccaatggcagagatacttcagattctcgtccttgacaggtagctagtttggggtaagtattattaaatgattggactgtgatttaagcatatcttaaattctttatatagttttcctttaaagcatgacattgtatgccaaaattgattgcaaattaataatttattcattaaagcacgacttaaaaagcaaaactcattgcctacaattacaccacagtagaattacttactgaaaactctgcattgtagttgagatccagggtctgcaccacgatgatgggcttccggaacacctcgtcgaagccccagggcttgtcgatggtcagcgagatagtgtaggctatatagccgtacggacccttgcaggtactgggacagtccggcggaatcctgagggtgaggacgtatacgtggactccggcccggaagagggtgttatcgaacacattggtgcgtgagtgtaaatattgctgatggcccgagtagttggccgtctcgctcttgccgctcatcgaccactgaaccttggcctcgccctccagagtcacatatacggctggggatttgggaaattgtagtcttcccagggggataggaacttaggagtactttgaacccaccattgactcgcttcaccttgtccgtacgcagcaaaatgcgaccactgatgtactccccactgttgtaaaccggattcaggcgatccagctgaaagacacaggtggtgggcatggctgctgcacttgcttccggctcgagttaaccgaatcttcactgccagttcatcactactatatccgtggctgggcttctggagacggagcaccgaacaaccgcaacccaacttccacacagccagacgcgcactgagttctgaacggcgagttctttgtcagcatccgacgccatcgggctttcgctttccggggagcggagtttcgggggcgggcgaatcaataagctggcgccttgcgtctgtgtagccgtctactgtctgcttctggtctaatattgcagcgcgaatcgttcggaaatggagcagcttttggccgtgggtcctttcggtttcctttgtttcgctgcggccaacacacacgcacatacacacacacacacactcactcactcgctcactcgctcgcttatgtggcggctgaaatggtggacgaacgccaagggggcggatgctggcgaggtcaggagccaatatccaccatatactggggtacatttttgttattaccatatatcaaccgccgatacaacggccgaaagaatgtcaacaaaaccgaacagtgcgtcacaacaagcaatttgttttcggggtgttggctgtgtaaccccttggccactttgctgccgcataacgtggcacaattaggacctcgaaattatttgggcactcactccattaatctggcatgcataattgcgataatgagagcgagccatttgcctggggaaaagggactgcataaaatggcaaattcacatagaaatatatttgcatatttaaaaatatatttttagctagtactatacgtaacccaagtttattgggaagaataaaaataagaatttcgttttgtgtacgttgatagtcggtaatagtcgataatcgaatccagttatttgcttggcttactttcctttatcgcatttcaagttcaattattgtgaattctacaattctcaatatcttggcactgaaattccagactctgcacgtgtg

SEQ ID NO: 5513 - DNA, 1467 bp, DROSOPHILA
atgcccaccacctgtgtctttcagctggatcgcctgaatccggtttacaacagtggggagtacatcagtggtcgcattttgctgcgtacggacaaggtgaagcgagtcaatgccgtatatgtgactctggagggcgaggccaaggttcagtggtcgatgagcggcaagagcgagacggccaactactcgggccatcagcaatatttacactcacgcaccaatgtgttcgataacaccctcttccgggccggagtccacgtatacgtcctcaccctcaggattccgccggactgtcccagtacctgcaagggtccgtacggctatatagcctacactatctcgctgaccatcgacaagccctggggcttcgacgaggtgttccggaagcccatcatcgtggtgcagaccctggatctcaactacaatgcagagttttcactacctgtcaaggacgagaatctgaagtatctctgccattggccctgcatttcgggacccatctgctccaccttgaccttgcccgcctccggattcacgccccttcaggaggtaccctacaggctggaggtggacaaccagtcgccacactacgacatcatcggcgtggaggtgtccatcaagcagcacttcgtcttcctgtcgcgaaagcccgtgaagcggaacttctactccaagacactggtcaaggagctgatctcggaccgcaccctgcgcctgtccaagcggcagtacgagtccagcatctgtgtgcccatggacactccccgatccaccctgaaccccaactacatcgtctttctgcactacacgctgcaggtaaagctgaagacgggttacttccactacgacacggacctctcagtgcccatcatcgtgggcaccacctctttgcaacacctcagggactcggttcacacccagcagcctgtgcggaggacgcccacgccagagagacagcgcctgatcgagcgggtaactccccgaccgccaacagtggaggaggattccgccggagaggcagatccggctaccgatgagccgcacagggtgatcgaagacgacgagccaccatcttacgacagttgccttccgccctccttcagttttgctaccctggcaggaagtcagcaaacattagggagtaacgccgcagtggtcctgcagcggatccacttgcccaagtttcctggattttccacactcattgggacagctcctgctcacggaatggaggactctggcctggacatgcacatgtacaggtcgtacggatcgcttaacacggatcacacaggtcggagtctggacactttcggatccctctgtggtccactgtccgaacatgtcgaggagcaggagcaggaggcagaagagaacctggatgtgactgcccaggtgcatcggccgattcaacgggcaacggtttcggaggtcgagaacgtcctacaggacgagcacctgttctaa

SEQ ID NO: 5514 - protein, 488 aa, DROSOPHILA
MPTTCVFQLDRLNPVYNSGEYISGRILLRTDKVKRVNAVYVTLEGEAKVQWSMSGKSETANYSGHQQYLHSRTNVFDNTLFRAGVHVYVLTLRIPPDCPSTCKGPYGYIAYTISLTIDKPWGFDEVFRKPIIVVQTLDLNYNAEFSLPVKDENLKYLCHWPCISGPICSTLTLPASGFTPLQEVPYRLEVDNQSPHYDIIGVEVSIKQHFVFLSRKPVKRNFYSKTLVKELISDRTLRLSKRQYESSICVPMDTPRSTLNPNYIVFLHYTLQVKLKTGYFHYDTDLSVPIIVGTTSLQHLRDSVHTQQPVRRTPTPERQRLIERVTPRPPTVEEDSAGEADPATDEPHRVIEDDEPPSYDSCLPPSFSFATLAGSQQTLGSNAAVVLQRIHLPKFPGFSTLIGTAPAHGMEDSGLDMHMYRSYGSLNTDHTGRSLDTFGSLCGPLSEHVEEQEQEAEENLDVTAQVHRPIQRATVSEVENVLQDEHLF

SEQ ID NO: 5515 - DNA, 2840 bp, DROSOPHILA
cctttatttttgtcgttaacatatttctaattcgtctcttcttcaggcaaaacaaagaaaatgatatatataccattatcattaggtacgatttagcgtcttacggtatgaagttgcggtccttgtttttcgcgcttcttttacctttgtagattcgttattttctatctcattatatccactcattgtcaaatgttttgttttatatgtagactccaaaatttcctagtactcttctatgtccagtaaacggtaacttgtttacatctttagcatcgtatgatccttccaggtggatttttttgcggtttgttgttctacagttctatagattaatgtatcatatagaagcattccctattctgacactcaatcggtcccagcattagtatttcatttgacacaactccaagacaattatatgtagtttgtggggttatcggaagagctgtatggcaccacaaggaacaagattgggacgaccctgacgacgactttaatgcttattctgactacagcagtgatatgacgaactctctctaattatcagtttcagtttaaaaaattccatgatgctttctgctcctataaccccaataccagccaccagccactgcgagggtccagaaccctagttaattttcatattgttaaccaaattggatttcgatactcgccaagataagggtcggtgtgaaaacttcgtaaaatgggttgcgactctttaagagtttttcaactcgtacgcactgcacaaacacgaaaatcaccaaaatatacattctgatcccagaataatccaacaattgcacacaatacatggcagtggatattacatcacgccggaaatttctcaaattgaattacaataagaaaaattcaattgtcacagtcccagatatacagttgcggtaacaataatagcaccataagcacatttcgtgtatgtcccagcgtttctctattttctgccactttttcatcattttactcacttaacttaaatactacaatgattttcaatcgaaataaaaaaattagtaacacatctaatcttaaagatcttaaaggtgaagcgaggattaaattcagttcgtggtggacgacgaacataagaccaagagcctttcccaccaaacaacacaattttggtctcatctgaccacaaaatgttgtgccacatctccacaggccagtccttgggaatcttggcatattcgattcgctttgccacatgcttaacagtcaaaagggggactttatttgggctgcacgcattaaggttgttttgtcctaagcgtttgcgaacagtttccacgctttcagctatctgaagctccttctccagttccgtcgccggcttaaaaggctccttcttgccttgccgaaccaagcgctttatctccacgttggacatagagggctttcttcgccgtgtttcgttcttctcgacaaacagcagtgctttgcggatcatgttgcttgaacaaccgacaatgcggccaatttcagcgtattttttaccttcagagatcatgtttttaatcaaatttcttttttcgacggtacaatgctttccgcgacccataactagagaatttttggaaaattttcaattaaaacctttaatacaactccttttttcaaaatttgtcgaaaaaaaaaccaaagcaatcactcctattagttttattcagcaaatacgtggtcagtgctattttggttaacgcctcatttcgcgcacttttgcagcaagtgcccaaaaacaaaaagaaccgttacattgagagactaaaaatgtctttctcatatggtacttattattcatgcaatctgactttaaaaaatataaacatttaataattttatgattatgaaatgaacttttcacctgcagtagtgctattattttaaccgcagctgtatgttggcaaagtacttgaaggtaaatctgcagcttctcttagcagatcccacattctgcacgccggtattaatcgattttttcaactctggtctgtttttacgatttttctataactcccaatacaatttttggttgggtttttatgtttttgctcttcctcatcacgcagattcggtcttttatggagacatcagcaatcccacagagcgacagtttacggacacacacacgcactcagaggaccttgtctacgttttcgagtactcctttaagaatggagcgcctccatttaccgcaggctatcactcgtctggtctcattaaaacggaaattcggtcgatctccggaagtcaagcagcagcagtggatgcttatctgcatcggagccatgtggaatagctcacagtaacgtagattatggaaaacccagatacatttgtattatttgccgcactacgctgtcatgaagctggatagcctgactactaagtgtcgcgaggtctctgattaatcaaaaactgcatacttccaagcttctgaagcaactctggtgaaacggtccgttataactggaccagcatacgattggtagttgcagattgaaatctctatagagataaaatcttcagtgtacagccagccaccatataaaagataatactccaaagtcctcacctatgcatcccacgcaacactacccttaccaaacaccacgcactatttcctggtgaggtccattttttgactcgactaaaaatctacagactctatatatgaaagatatttaaaaagaaagtaaactcctacaacataagagcggaccaaagagcgaacgctaagttgaaaagattgattagagaagccaagaaagcatatttgctacagtttacctcagatataaactattattcaa

SEQ ID NO: 5516 - DNA, 840 bp, DROSOPHILA
aagtcagattgcatgaataataagtaccatatgagaaagacatttttagtctctcaatgtaacggttctttttgtttttgggcacttgctgcaaaagtgcgcgaaatgaggcgttaaccaaaatagcactgaccacgtatttgctgaataaaactaataggagtgattgctttggtttttttttcgacaaattttgaaaaaaggagttgtattaaaggttttaattgaaaattttccaaaaattctctagttatgggtcgcggaaagcattgtaccgtcgaaaaaagaaatttgattaaaaacatgatctctgaaggtaaaaaatacgctgaaattggccgcattgtcggttgttcaagcaacatgatccgcaaagcactgctgtttgtcgagaagaacgaaacacggcgaagaaagccctctatgtccaacgtggagataaagcgcttggttcggcaaggcaagaaggagccttttaagccggcgacggaactggagaaggagcttcagatagctgaaagcgtggaaactgttcgcaaacgcttaggacaaaacaaccttaatgcgtgcagcccaaataaagtcccccttttgactgttaagcatgtggcaaagcgaatcgaatatgccaagattcccaaggactggcctgtggagatgtggcacaacattttgtggtcagatgagaccaaaattgtgttgtttggtgggaaaggctcttggtcttatgttcgtcgtccaccacgaactgaatttaatcctcgcttcacctttaagatctttaagattagatgtgttactaatttttttatttcgattgaaaatcattgtagtatttaa

SEQ ID NO: 5517 - protein, 195 aa, DROSOPHILA
MGRGKHCTVEKRNLIKNMISEGKKYAEIGRIVGCSSNMIRKALLFVEKNETRRRKPSMSNVEIKRLVRQGKKEPFKPATELEKELQIAESVETVRKRLGQNNLNACSPNKVPLLTVKHVAKRIEYAKIPKDWPVEMWHNILWSDETKIVLFGGKGSWSYVRRPPRTEFNPRFTFKIFKIRCVTNFFISIENHCSI

SEQ ID NO: 5518 - DNA, 3954 bp, DROSOPHILA
agtggcatggacctgtcgaacatcatttcccgaacggcggatcgggtcaccataagtcaccacttgaccgatatcgggcaacactcattcttcgagaacgtacagcagaaacccgatgtgcgggagctcgatgagaagggagcctttttcgtggacggatcgtaccaggagttcgacaccgtcttcttttgcacaggttacaagtacgcctttcccttcctgaccgtcgactcgggcatctatgtggaggacaactacgtccaggagctgtacaagcagtgcatcaacatcaggaacccatccatggctctgatcggactgccgttttacgtttgtgccgcccaaatgatggacatccaagcgaggttcatcatgagctactacaacggatccaacgagttgccgtccacggaggatatgctcaaggacacccgcgataggatgggcaaactgtgggcggagggactaagaaaacgccatgcccacatgctgggtcccaagcaagtgcgatgcaagttggctttacttctctatctggttattaattctattctcatttattatcaagatcgactatttcacggacttgtcgcaaactgcaggagttaagaacatcaagcctgtgatgaccaaattgcacaacgaaagcagcaagtgcttcaatgagaatttgctccacttccgggaggacaatttcgcgattctggacgacgagacattcattaaactcaactagatcctgaatcaatcaataggagcattagattccaaaacatcgtttttggacttcccttcgaaataaaataaatttccaattcttgtattccaaaacaacagtttaaaaaatgagcttttattctcgaacaaaaactttttgaacaccggcaaacatttgtttgaacatgtttgttggtatttttccaaacagctgattgcgggcagcgcacattcaccagctctggccacactcgcccgcctcctcgcaatcaccttcttgcataattttcggaacacctcacttcgctttcaaagttcgctgatttaggtcgggtcttcaaaagtggaatagcgcctcgtcatgcagtgtccgttcttgaaccgcttcaccgccagcttcatccgcaactacgcggagacgctgtgccaatcctacgggagccactgtcccgtggttgggaagaccttggtatccggcgagaagaaactttcactcgtcgccgcaagtgttacaaggtctcactcgacgggggcgaacgcccacgccaatgctggtggccccgcaactgccaacgccaccgctcccgtctccgcccccgcctctgccgatcctggcaaggcatccgccaaggagacctttccctacgagcgcttcttcaacgagcagatcatgaagaagaagcgggaccattcctacagggtcttcaagaaggtgaaccgcctggcaggcgacgggcttttcccccacgccctggagtactcggagcggacggaaaagcccattacggtgtggtgctccaatgactacctgggaatgtccgcccaccccggcgtcaagagggccgtccaggacgcgctcaataggcacggatcgggggctggcggcaccaggaacatttcgggtaactctcttcaccacgagcgcctcgagagtaagctggctgagctccaccagaaggaggctgcgctgctgttcacgtcgtgcttcgtggccaacgattccactctctttacgctcgccaagctcttacctgggtgcgagatcttctcggacgcagggaaccacgcttccatgattatgggcatacggaacagcggggttcccaagcacatcttccggcacaacgacgtggaccacttgcatcagctgctgaagcagacggacaaaagcgtgcccaagatcgtcgcattcgagacggtacattccatgacgggggccatctgcccgctcgaggagctgcttgacgtggcccacgagcacggggccatcacgttcatcgacgaggtgcacgccgtgggattgtacggtgaccacggggccggggtcggtgagcgggatggtgtgctgcacaaaatggacatcatatcgggcaccctgggcaaggcgttcggtaatattggtggctacatagctggcacccataacctggtcgacatgattcggtcgtatgcggccggtttcatcttcaccacctcactaccgccgactgtactgtgtggcgccctggaggccgtcaatatcctggcatcggaggagggtcgccagctgcgccacttgcaccaacggaacgtctcctacctgaagagcctgctgaagcgagaaggtaagacgtaattctggcatttatgtaactcgaattgaaggttattctcgcactttcgttttattttaagtgatggctataaatatagaaagagacacttaactttcagtttactgactgcatatataattggccccatttcaggtttccccgtcgaagaaacgcccagccacatcattcccattaagatcggagaccctctgaagagcagtcaaatctcaaacgtgctgatcgaacaattcggacactacctgcagtcgattaactacccaaccgtcgcccggggccaggagaaattgcggctggcccccaccccgttccacacttttgaaatgatgaacgccctggttaccgatctaaagaaagtgtgggaaatggtggacctctctacaaacgtccctctttcgcccaacgcatgcatgttctgcaactcggagagctgctggcaccaggacacctccccggatctggagtgtggcattcccaactgccctcgcctggagatctcgcttgcagcatagttgcctcttggaaacacgactataaatgaagcattcgaatcataaagctatgcctaaattatctgtgcggttttggacaaataaacaatggttttggtgcaatatacataaatgacgaaatttcaattggaatgggctaagctgattgatgacgcttctatatggggtgataagacatggactagagtgtcaccttcgctatgaagttgcgtgtttttcgagccagctccatgcaaatgatattcaaattggggaatcgcgtggaaatattttcattgaaccttgatccacactcgtaagcacttaaagggcttacctagtttgaaatatttatatgaaattagtcgcatatcaatttcagcagtggcaggctgaatcagcacaattattgctgataaccatgaccatcctattacggaccaatgtttttgataataccacaatagataatgatccgattttatacactttgattagagaagattttgtacacatttagtaagatctattgggtcagagactagccgaacagctggagatcgtaaacaatgattctaccaaatagatcggtgctggactcgaagacgaactttagctttgagcaggggttttcccggactgattccgcaatctgaaaaagctgtggggagttgatatcttctgggtagaatggctcttggtgaacttgggctccgtcagcggagtacatgatcagttcggatttttggccagagaatccgccttggaactggaaactaaatccagctactttctgtggctcctccaagctaatggtaatgaattggggggttccctgaaatggccgtttggagttatattctttttttccaaatcttaggatgatacctcatctgaattccaagaagtttcttcccgcgtatcaaacatgaattgctttccgtgctgcttcacatctctgtttaaaaccgagctcaccctgcaaactatacgttaactaaagggagttacaaaataaaacccagagtacctgcagctgtattttacttttgtcaaaatattcataattcaataaaaataagaaataaacaaatcggagaccgcgaggttaaaggcattagagatgggcaaca

SEQ ID NO: 5519 - DNA, 1810 bp, DROSOPHILA
aattttcggaacacctcacttcgctttcaaagttcgctgatttaggtcgggtcttcaaaagtggaatagcgcctcgtcatgcagtgtccgttcttgaaccgcttcaccgccagcttcatccgcaactacgcggagacgctgtgccaatcctacgggagccactgtcccgtggttgggaagaccttggtatccggcgagaagaaactttcactcgtcgccgcaagtgttacaaggtctcactcgacgggggcgaacgcccacgccaatgctggtggccccgcaactgccaacgccaccgctcccgtctccgcccccgcctctgccgatcctggcaaggcatccgccaaggagacctttccctacgagcgcttcttcaacgagcagatcatgaagaagaagcgggaccattcctacagggtcttcaagaaggtgaaccgcctggcaggcgacgggcttttcccccacgccctggagtactcggagcggacggaaaagcccattacggtgtggtgctccaatgactacctgggaatgtccgcccaccccggcgtcaagagggccgtccaggacgcgctcaataggcacggatcgggggctggcggcaccaggaacatttcgggtaactctcttcaccacgagcgcctcgagagtaagctggctgagctccaccagaaggaggctgcgctgctgttcacgtcgtgcttcgtggccaacgattccactctctttacgctcgccaagctcttacctgggtgcgagatcttctcggacgcagggaaccacgcttccatgattatgggcatacggaacagcggggttcccaagcacatcttccggcacaacgacgtggaccacttgcatcagctgctgaagcagacggacaaaagcgtgcccaagatcgtcgcattcgagacggtacattccatgacgggggccatctgcccgctcgaggagctgcttgacgtggcccacgagcacggggccatcacgttcatcgacgaggtgcacgccgtgggattgtacggtgaccacggggccggggtcggtgagcgggatggtgtgctgcacaaaatggacatcatatcgggcaccctgggcaaggcgttcggtaatattggtggctacatagctggcacccataacctggtcgacatgattcggtcgtatgcggccggtttcatcttcaccacctcactaccgccgactgtactgtgtggcgccctggaggccgtcaatatcctggcatcggaggagggtcgccagctgcgccacttgcaccaacggaacgtctcctacctgaagagcctgctgaagcgagaaggtttccccgtcgaagaaacgcccagccacatcattcccattaagatcggagaccctctgaagagcagtcaaatctcaaacgtgctgatcgaacaattcggacactacctgcagtcgattaactacccaaccgtcgcccggggccaggagaaattgcggctggcccccaccccgttccacacttttgaaatgatgaacgccctggttaccgatctaaagaaagtgtgggaaatggtggacctctctacaaacgtccctctttcgcccaacgcatgcatgttctgcaactcggagagctgctggcaccaggacacctccccggatctggagtgtggcattcccaactgccctcgcctggagatctcgcttgcagcatagttgcctcttggaaacacgactataaatgaagcattcgaatcataaagctatgcctaaattatctgtgcggttttggacaaataaacaatggttttggtgcaatatacataaa

SEQ ID NO: 5520 - protein, 539 aa, DROSOPHILA
MQCPFLNRFTASFIRNYAETLCQSYGSHCPVVGKTLVSGEKKLSLVAASVTRSHSTGANAHANAGGPATANATAPVSAPASADPGKASAKETFPYERFFNEQIMKKKRDHSYRVFKKVNRLAGDGLFPHALEYSERTEKPITVWCSNDYLGMSAHPGVKRAVQDALNRHGSGAGGTRNISGNSLHHERLESKLAELHQKEAALLFTSCFVANDSTLFTLAKLLPGCEIFSDAGNHASMIMGIRNSGVPKHIFRHNDVDHLHQLLKQTDKSVPKIVAFETVHSMTGAICPLEELLDVAHEHGAITFIDEVHAVGLYGDHGAGVGERDGVLHKMDIISGTLGKAFGNIGGYIAGTHNLVDMIRSYAAGFIFTTSLPPTVLCGALEAVNILASEEGRQLRHLHQRNVSYLKSLLKREGFPVEETPSHIIPIKIGDPLKSSQISNVLIEQFGHYLQSINYPTVARGQEKLRLAPTPFHTFEMMNALVTDLKKVWEMVDLSTNVPLSPNACMFCNSESCWHQDTSPDLECGIPNCPRLEISLAA

SEQ ID NO: 5521 - DNA, 4165 bp, DROSOPHILA
acccactgtaaacaaacacacggaaggaacccgttaaacgtgactcgcacacacacacaaatgagcaaacaagtgcgcgtctgcttgcatgtatgaatgtgcgacaaggagagaaggcgcaaaagatttgaatggaaataaaatgtaacactttcgaaaattctcaaattttctagaatatgtaatttggcaagctgcgtggcacagattccaaaattaaatgtggaaaatgggagcaaattgcacaacggccacgcagcgaatagacgacataaacaaacggcgcaataaagtagcaacaaaaacagaagcgattaggtccatgcgagtgtgtgtatgtgtgtgtatgtatttatgtttcgttgttgttgcttttcctattgcgcagcaagtcagctggggaaaattggaaaattgggaaatagacacaaggacgatgcaaagtggctgcattaaaacaagatgaaagccaatccgaatacttacaataggaagaaacgacgagaaggttccagagtattccgttttacttttcccaaacagctgattcactttccacaatcacagacaaattttgcagttaattttcactcaattatgctcctccaggaggatttttattctaatctgaactattaagaacgacgactgatatccgaatgtttccgtttcgattgaaaactttggttgttgtgcctactttgttttcctttattacaatcccctttccacacagctgttcgaggtgcctatcgaaagttgatcaaatcgtcgctatcgatagacgatacaatagtatgggaaatatattctacgtttacaaatttaagctgtcaaacttatgtttgtttaatgcttatagtagaaacattcacatgtacaacgattcggttgaattttaaaatacttgattttctctgcaaatttaacgataattgcgcgccagtgttgcgtaatggccgcacgttgtggtgttaacaactgaatcgctttgcaacacatcaagagacacaaaaattttttcggtctaaattcctaactagagttagtctgtgtgcgattttggcggcgggattgggagttcccggtaccgcagtgatctgcaccggaaaaccagccatcggaaatctcaagccatggagagcgagaagattctaatggccgccggagtgacggtagccgccgtagtcggagccttcgttttctggggtccttcgggtgagtagtagatcttccatggcgtagttccctactccagcgaaacatttgcaggttcccgtttgcgtcaacgacgcggccaaattgccggtctccacaactttggactgacctgcttcctaaacaccctgctacaggcgatggccgcctgtccccagttcattgcctggctgcaattgtacaacaacgcctcgccggatcgaaaaagcttaattacgtcgatgttaaacactctggaagtggtcaatggcacccatgccactctgcgcggcgatccctattcaccgggagccgttctccgggctctgaatgccctgggctgggtgattccacaggaggagcacgacgcccacgagctgttccacgtgctattgacctgcctggaggaggaggccatacgaccacagcccctcggctgtctgtcggatgctctgcccacggataacgatgataacagcagcttggcaggcacagcaacgccagtagggggctttcgatcatttagctccatggcagcgggactgggagccagccagaggatcggggatcaaccgaaccggccctccagtgccatgctcactgatttcttaaacatggagtatgatgagagcaccagtttgcagcgattggtgcgttccgaggcccacacaccggattcgcctgcctctgtttgcgaacgcgacggaaacgatcgcctgggatccgtgcttctggatgccgtttcgccagggacaccctttggctttccgctcgtcagcaatccggattccttggctacgcctatgttgggcggcgagcgttcgtcgcgaccgcgacttccacaatcccaacagcagcaggatgagggtctgaatcgccgggtgtccagctcctgtcgatcgctagagcgcctgcatcgcggaccaggtcgggtgtccatctggtccaacatgatgcccagccaagtggcgcatccgtttcagggcgccatgggcgcacagatcgtgtgcaatggctgcggctccaagtcggccgttcggtacgataagttcgacagcataacgctaaatctgccgccgcaacgcagaactggcttgagtttgggccacttgcttagcgagtatatcacatcggaggatctgagcgatgtcaagtgtgactcctgcaacgagaccaccacgcacaccaaatcggttacgttcgctaaactaccggcctgcctgtgcatccatgtggcgcggacggtgtggctgccaactggacaggtgtgcaagcggaaggactatgtacacttccccgagagcctctccatggcgccctacagcttcgtgcagccgcatctcaatagccaggtgagcgtgtgttgcatatgtttgccccagaataacaaacttcccctgtaaaaattatccttatatatgatcatttaaatacatatatctaaaggatatatatgtataggatatatctatagaatataggtctttccttttctaattggtgtacaaagagtagtggcattcaattcaagaactgtttacatttagtaactagcatattgttaaaacaaacacttttgctcatgattacaggctggcactccctggggctcgacaatgtcgctgtattcctccagcctgccgatgaacaatggcgttggtggtggcgagggctttggcacgatgttccccaagaatctttaccggcttctggccgtggtggtgcactccggggaggcaaacagcggtcactttgtaacctacaggcgtggctcgttgcggaacgcacatcggtatggtttccattgcctctgtgtaataattatgctaattctgtgctatccttattaggtggtactacacatcggatacaattgtgcgggaggtgagcatcgacgaggtgttgagcgtccccgcctatcttttattctacgatcgtggccagcagaggcagctaaatctgcgctagtcaggtgtaggtcgtcggtattattctagtccatacttttgatgtgatgaatatgaatatccgaaaccaaatccttttcgtcgaacggtggccatagcaaacacgcgtcacatttatatagatatatatacataactcatataagtacgggaacccacgatgatctgacctatactcggcgggttcatgtaatggtctccgcataatccaaactctgtgtacggcttattgcatataggaactccctatcgtaacagagagctcgactcttcatttgttatctatgcatttaagattttttaagaattccaaattcatgccgtgcttttagctgtctgtatttagcaatgtacacaaatcaactaccaataattgtttgcgcgttaattctgtaggatagatgttcaataaaaatttcgaaatcagttccaattttttaaagtgctttctctgaaggttttggataaataaaatatattataatactgaatgcacagaaaaatccagaagggtaatttcaaaaagggtgcaaagtattgtacatcgataaccaccgattaataatcgattatctggacatgttgtgataaatcagggttgcatttcacgccgtatttcgtttcatttccctaaagagtgaacaaaaatacgcaattggacaaatctagtggctaagaatgtctgaagcggagctggaacagacacccagcgcgggccacgtgcaggagcagccgattgaggaggagcatgagccggaacaggagccaaccgatgcgtacacaattggcggtccgccgaggacgccggttgaagatgcggcggccgaattgagcgccagtctagacgtcagcggctcggatcagtcggcggagcagtcgctcgacctcagcggtgtccaagcggaggccgcggcggagtcagagccaccggcgaagcgccagcatcgcgacatcagtcccatttcggaggacagcacgccggcgagcagcacatcgactag

SEQ ID NO: 5522 - DNA, 1813 bp, DROSOPHILA
atcaagagacacaaaaattttttcggtctaaattcctaactagagttagtctgtgtgcgattttggcggcgggattgggagttcccggtaccgcagtgatctgcaccggaaaaccagccatcggaaatctcaagccatggagagcgagaagattctaatggccgccggagtgacggtagccgccgtagtcggagccttcgttttctggggtccttcgggttcccgtttgcgtcaacgacgcggccaaattgccggtctccacaactttggactgacctgcttcctaaacaccctgctacaggcgatggccgcctgtccccagttcattgcctggctgcaattgtacaacaacgcctcgccggatcgaaaaagcttaattacgtcgatgttaaacactctggaagtggtcaatggcacccatgccactctgcgcggcgatccctattcaccgggagccgttctccgggctctgaatgccctgggctgggtgattccacaggaggagcacgacgcccacgagctgttccacgtgctattgacctgcctggaggaggaggccatacgaccacagcccctcggctgtctgtcggatgctctgcccacggataacgatgataacagcagcttggcaggcacagcaacgccagtagggggctttcgatcatttagctccatggcagcgggactgggagccagccagaggatcggggatcaaccgaaccggccctccagtgccatgctcactgatttcttaaacatggagtatgatgagagcaccagtttgcagcgattggtgcgttccgaggcccacacaccggattcgcctgcctctgtttgcgaacgcgacggaaacgatcgcctgggatccgtgcttctggatgccgtttcgccagggacaccctttggctttccgctcgtcagcaatccggattccttggctacgcctatgttgggcggcgagcgttcgtcgcgaccgcgacttccacaatcccaacagcagcaggatgagggtctgaatcgccgggtgtccagctcctgtcgatcgctagagcgcctgcatcgcggaccaggtcgggtgtccatctggtccaacatgatgcccagccaagtggcgcatccgtttcagggcgccatgggcgcacagatcgtgtgcaatggctgcggctccaagtcggccgttcggtacgataagttcgacagcataacgctaaatctgccgccgcaacgcagaactggcttgagtttgggccacttgcttagcgagtatatcacatcggaggatctgagcgatgtcaagtgtgactcctgcaacgagaccaccacgcacaccaaatcggttacgttcgctaaactaccggcctgcctgtgcatccatgtggcgcggacggtgtggctgccaactggacaggtgtgcaagcggaaggactatgtacacttccccgagagcctctccatggcgccctacagcttcgtgcagccgcatctcaatagccaggctggcactccctggggctcgacaatgtcgctgtattcctccagcctgccgatgaacaatggcgttggtggtggcgagggctttggcacgatgttccccaagaatctttaccggcttctggccgtggtggtgcactccggggaggcaaacagcggtcactttgtaacctacaggcgtggctcgttgcggaacgcacatcggtggtactacacatcggatacaattgtgcgggaggtgagcatcgacgaggtgttgagcgtccccgcctatcttttattctacgatcgtggccagcagaggcagctaaatctgcgctag

SEQ ID NO: 5523 - protein, 558 aa, DROSOPHILA
MESEKILMAAGVTVAAVVGAFVFWGPSGSRLRQRRGQIAGLHNFGLTCFLNTLLQAMAACPQFIAWLQLYNNASPDRKSLITSMLNTLEVVNGTHATLRGDPYSPGAVLRALNALGWVIPQEEHDAHELFHVLLTCLEEEAIRPQPLGCLSDALPTDNDDNSSLAGTATPVGGFRSFSSMAAGLGASQRIGDQPNRPSSAMLTDFLNMEYDESTSLQRLVRSEAHTPDSPASVCERDGNDRLGSVLLDAVSPGTPFGFPLVSNPDSLATPMLGGERSSRPRLPQSQQQQDEGLNRRVSSSCRSLERLHRGPGRVSIWSNMMPSQVAHPFQGAMGAQIVCNGCGSKSAVRYDKFDSITLNLPPQRRTGLSLGHLLSEYITSEDLSDVKCDSCNETTTHTKSVTFAKLPACLCIHVARTVWLPTGQVCKRKDYVHFPESLSMAPYSFVQPHLNSQAGTPWGSTMSLYSSSLPMNNGVGGGEGFGTMFPKNLYRLLAVVVHSGEANSGHFVTYRRGSLRNAHRWYYTSDTIVREVSIDEVLSVPAYLLFYDRGQQRQLNLR

SEQ ID NO: 5524 - DNA, 11538 bp, DROSOPHILA
aaaactactgccgatagaataatcagctggagaggaaagccgaaaggactcatcctcttcgagattttcatccttgattgactgctccagtgacgagagaagagcttttcgcgaacattgttgccagcgattcgcgattcgcggcgttcgtcttattgtccttatcccagtaacagtcttctatcgtcctgtcccacctaagtgtccttgtgtccagctgttttgccaggactcacctccggatccctcttgtatcctgcgaaacggtcgccgccggcaagggctagtcgcaaaaaacaggactcaggggaactcacaggatgctttcgattcgccaagagagaggataagagaggacatgcgcagtatgatccgaaagagaggatacgaaaggagaaatcagctggtgctgccaggacttttaagtgtcaatcaaaaaaatgcacaaatagggtattttatagcaatgcaatcatttagggagaaatagataagtatttgtgatctgaaaggatacatttcaggataaaataaataaaaaataaataagaattaaaaggtgatatgcatatggtgattatgatccaatgtttttggacaagaacaaattaggcaatcgaacataactcggttttaaaaaccggccctttcgcggaattagcactttcaatttcactcgaaaacttgatgccacatcattatggccaattaatcaatcacttatcacccgtcatagccagaacatttaaaatgccatcaatcgtcgtgcgatttttccaagagaggaccatgtgctcttcaccttttctcttgcggataaatgaagaatgttcgaattcatctgaaccaaatgctgaaaactcggccaagagcacgaggaacaattcatccgacgacgcattccgtgtgcgttctcggcagtcgcctctgggttctcgattcccagttctcgggctctcattttccggcgcagtttctccgcttcagttcgctgtagacattttcccggtgcggacgtgcgtttggcggtggaaattgtcgagcacgccggaaaagaaaatcccacaatagttgcgctcgttgtaacgttcggttttgtgcggtttttcggtttatttttcggcttcttctgcactctaatttcattagccggaaaaaggaaagcggggcaatggctgtgtgcaagtaatccggatccgctgaagaagtgcgtaaattatgacatcgtgatggctcgaagataaaagagagagagcgattgtctcttcggctggcttcctgactccctggctgcctggctccccgtaacccagaagcccaagtgtgcgtcctgatggcagaaagtaaaattagggcaaaatgccaggcttaagggggtgcggtggggtggctgccactcccaccacttgaccgcccccgcttaaagtgctcctcgttgtcgcagcctaattaattcaatggccccactctgctgcacctaaatttttggggccatcgaaagggacgccactttttgagttcccattccgcttggtggatatttttactccgggcgaaagctgaaacgagagccccaaaaaaggactttggagcccagcaaagttttgatcgaaacccgaataagtttagttctcgaactgctaattgcccaaaaattacttgatatttttaaaccggcccacaacacattatacgagtattcctgcattcacataccgttctttgggcaaacaacttttcgctgggttaattatttttaaattgcaaaaacatttcatacgcaaagcgccgcagagcaaacgcaaaaatatataaataaatttccgcttttcatggccacacaaaaatgagcgacaaaaaatcggcaacgccgattgtagggcaaaacccccgccagcaaatcataaaaaaaaaagaaaaccaacgagcgcccagagagaaaagtgaattctcggaatggaatggaaaagtgttcaaaactgagtgacaagtgcgattcgagggaatctcgtttcagtgacagcctgaaatgtgcgagaatttatgatgcatttaattaaaacgaattcggatggttcgaaacaggacatttgcacccaaatttgatggtcaacaaagaggacaaaatggggtcccacaatgcgggcgacactgtgctacaaagtttaagttattgctacgatttgatggttaatatggatctgatatgatacctaacctaaccagatgctaaaaaagtataataactcattaaggtgtctaagagtctgctatactatttattctatagccgcacacttttaggtatccttatagataactttaactttctaaagcgagctccaagttgtgtcacataactcctatatatcaagcttcttgcaatcgttctatttaaccattctgaaccaaataaaaatcgatttatttattgtaacttggcatgactaactcaactcgattcgcgttgcgactttattaaaaactccttaccgccgacgatgtttcccgtggctctccggtttccttgccgcgtgcccaatgttatttggccatgtgttgacacgaccacctagctgagcaccaacagctccccatccaatagaaggagctctggccaaatgcgtgagtcacatgtcagcgtagtgccagtgctttcgagtattccgctccatctcgaccacttcacgtcatgttttggccgccaacaaacatgacattttacggttcttttatgcttgccacatgtcacgacacagttaactgccgcataacacaaaaacaccccgcacaacataacgcaactcaacccaactgaactgaactgaacttaactgagctgaaccgaagcgaaccgagaacccaaaccgcagtagacagatgaggctgtgggagacacaggggttaaggccctactcctagccagatctatgacatggctgctctggaacacatacatatacatatatatatgccaaatatatttatgtgcacactgaaatactccgatattgcccggccgactatgcaattatgcaaaaagggggcggacttcgggctgtcaatcatggggaaattgaaattgctgtcgacaatcgtgagcttttggggttaaaattgggaaaacactaaagggacatcaattgatgaaatgccaggtgatgtgatggctgatggcttgggaattgaaccaatatatagataagactagataacatctcttgctttaacagtatttttttaccatttctatatgcattatgattaatcattcctatatgcccaatgtcctgcgattaccaggtagcatataaaaaggataaccctcaggtactcgagggctgttggaaaggacaagcgacttgccggggttgactcttttattgccgtcacttgagccaatatttgcacatttcaacaatgttgccatttttccacgtgggcgttaccctttccgagtacccttgccaccaccgaaaactcactccgaatccttctattcagccatgcatgcttaaatgtaatgaaatatcctgttccgtctccaggatccccatccatcgccagccgggtcgcataaaaaggctcaattcaatttttccacgccccaacccgtggaggatccgcatccggatgtcatgcttcttctcctgctcctgctccgattcggtctgctgccaattcaagtttgcattttcattagggagtccagagcccgcaggtcctttaggtgctccgctcgctctacacaatgctcaactcgttgagctttgttggagctaaccaagtgggaagggtccttcataaatgggagccagcggatgtggacgtggatgtggctgctcggtgcatataattaagtcatccggtgggcggggctgacgccatgcatcatgtatgctcggaaatgctgcagaaagttgagcaaattatgttgtagcccgccggttgcagaggtgccttcgtggcttgataaataaattaattcatttaattattccaggctagagaaattctatgctattgcttataaatattatgcgctaaattggaaatttctagcttccctttatttcccagatctattaattttaatgagtaataagtattattattattccatatctaactgactcttttctttaagaattagatctattaaacctaatatcgtgttttaaaacttgaagtgcatcgaacttacctttagtaggtagtagtagccatctttaagttaggcatctttcttggatcctctgcattttctggatctttttcatttgcttttccattttccacttccattccatttcgcaaagctcttctgagcctctgtgcaatctttcattggttcgtgcttttttcacttcaattccatttgatgcgccacaagattttccccgccagacgtttcaatcgctttccacccattttccgctgcaacgtggccacgtgtaatgtgagactgtgcgactgtgagatgttgaccactccttgccaccagcacttgccttgctttttactcgccccaggcaatgtttcccaggcttttcctaactttcatcggcttgaggtcttgttcctttgttattgttggctgcgcacttgagttgttcggctcgccctttattgtgcccccgccaacttggcccaaacccatttgggcctcgacacgtgaacgtgtgcaagtggcccgcccgatcgcccctggctttttcctcggcacgcgatgcacttggccaagataccacgccacccctgcccttttgtagccgccgtcagctgcaactgttggcaatttcttatgccttccctgtgcatacaaaggtatatcagttctaatgttttaagtatacgcgaattcctcagcagttgagtatgattatcagcagtggttaagtatgtttatattcagcatcattagatgccaacatcattccatgatagatgcgaaaaaccttacaaattgttagttatacagggtaactactagtccgtacgccatttaccctcactcattgtgcacaatagacgggaaaagagtttggaggccagggtaaataattttcatgctcatggacggcgacgaagtcggcactcgggggcattttttacgagattcctgggcagatggggcggaccgagctggcgaccaggctgcttaactttccgagttgatgaataatttaatggaaaaacacatgtttcggcgatgtggaggcaaacgaatcggtcgtcgaaattgtctgatatggaattgcctatttccggctcagtctggcggcaaaagaagttgtcatgggatcgggatgaaggtggccaaaaagttgccggacgaccaaattaaggggctgctgtgtttcggggcaagcaggataacaatcacaaaaaatgttcgtttcggagtttcaaattacatgcgataaacatggtgctgctgcccagaagttaaataaacacaatttgcttggtttcgaagttttgaaggttggcgctggcaagtaggcaacataaatcgttaatgaacgaaactgagccgctcgaaagaagctattcattttttaaggacctctggtcgtgctgggcaacccaatcgttttgatccgagcagcttaaagctgcacaaaatattttaattaatttttcaaaatcataatgttgggcctgaagaagaggaaattaattgaattttcggccttgaacgctgccgaaaataaaaagggaaagaaccaaaacgaaacaaaacggaagaggaaatgttaccatcctgtggcattaaattgaaatatgaacatgaaagcttctgttttccattcatcaacaggccacgacgaccttagacattaacacattcacacgccacgatttttatgtgtgtgcgttgcctatatatgtacactttggcatagtatttaacaaaacaagtggagcgccgcagggaacgggggacgtaagacgtaaaaaagcaggacgtgtcggggtcaccaacttatcttcatctggaaggggagggaaggagaccaccaaccctcgtttgtctgccattgacggcccttagttctcggttctccccatttttcctgccatttggactctggccagacgaagatgattcaggacacacgtaacgccagccgaagttggcccaaagtgggcttgctctgtgagatgcgaccatcggccatcggccatctcctttctcatttccgaagtcgcgcggaagtcctttcttcgtcctggtcgggacattagggataatcattacgatgataagcacgaacgatttgatttctcccgtttatgtggccgttgtcatcgacggcttagcctcggctgcactgacagaaattaggaagtgataatgaagcgattgtgatacaattcctaccctcaccgcgtactcatccggagcataatttactatgattacccttaatcactacccattttttttatcagtgtgcgacttgaggttggactatcggaaatgctgcgcttatgtttgggtatttgagcctttgtttgctcgcccgccttttgtttcgataagtgactcaagtggcttttgtagctttatttttatggcgtactcttggtggtttttataccgaaattaaatagttcacagctcattttgtttatgtctatagttgtgcaaatttccgcaccgtctttgattcggaaacttttccattcggttcttcatgcagttctatgacagttttcagttttcaattataaacttgataaatgcatttcgtccttgtggccttcgaagttggcctaaaaatgcacattatagtttggctttgccattgttaatccactgaaatcccattttccgtttgccactccttctactgcgcaaatgtgttttcgttgagcttttaaaagtttccgcttcgcgttttgtaccaaaccaaaaatttcgcagtctttgtggacgcattgtggcactttattcacaattcgttttttgcgtgaactttagcgttgacccagtttccttttgcattttttgttaaactcgctcagacagcgcggcgtatacgtaatgttcgaaacgcttgcatgtttgcgtgggcaaaaaactagcaaacaaatttgcttttaatttccaagagccgaagcctcgtagagcatttcaaattcatgaacacaaatatttgtcaagcgaaaagggaattgggcggggcgctcacttaatgacaaagtaagtcaaaatgtagcgacaacatttgcccattcatcatgggataaaacggggatgatggggctgggccccaaggattccagcgacggagttttaaggactttgccaacaaatggcatcatcactttcactcgccgatctgcagcaggcggacagtgcggtcggaaactataagtctgcgtcttatctgataacttaagctcgggaaactgaaagacgaactggaaggataataacaaggactgccttttaaaatataaaactgactagctacggcattatatttttcccatttagacctgtaagatgaaatactttccaatggatatgtaaattactaccaatttatcaagttggcaagacttaccaaaatgccgtgtttcgtagtgtaattcgccacccacaccgcccacctcttggctcacttaggttaacccacattgacaatgaggcgaacaacagacagccggcgcagggatatgattccaaggggggtgggagcagacatgttctccttaccaggccagccttaaaagtccacacggagcacagaactctttcatcagcaaaagcagagcaaaagcagaagcagctctccttgctgtgcttccattgtgtcaacaagcgaggtcacccgaaagtgggcggaaaagcggcggggtggcattaactgcagcacgttaatgttattgtaggcgcggttgtcgctggcgactgactgactgactgactgactgactttcccactttccctctcgtttcccgccgcgagggagtggaaggaaaggagcttttgttgtttgggcgattaaaagttgtcgtcgttgttgctgtcttcctttcgcttttggccccattcgactgacatcgtggcggggcttccctccttctggcccactgcgttgttgttgttgtttttgtggctgacccgctaacctcagagcacacaagcacacgtaggcacacacacacacacacccagctacacaaagggaaaaaccataagaatggctgtcctcccacgttcatctcttggctaacaaaacgcctttgtaccatcgaactaatgccgtttaatactgcagacgactttaaattgaaagttaattcgagcttttatgaaaaatgccctgaaagtcttttatctggctaaaaatttaatttactttaaagaatgccatgtaaaatgtaataccatcctatttttgttctctgtacccaacacccgcgctacaaaagcaataaagcgctgggcaagcgtcgcccacttggcacagtttccgcgcacaattacggggcaatcaattggccaagctgtcaatagttgccaataaatgtatcgagagcacggcaatcgaacttggcaacttggatgcattttccgcttttccgtgggcgctggcagttggagccaaaaatcatataccataaataaaagtaaaaacttatctctctttccttccagcgacgaggagccaatgaacttgctgacaacttgagacgaccacaaggaggggaatcccctttgggcggtcaaggaatcggggcaccatgggtgacctacaggccaccattgaattcgtcgtggagctgcacaagttcttcaatgtggatttgtttcagcgcgggtgagtctgtcctcagttcgagtttaaaagcactcaaactcggtgatgtattaatccaaaatgccagaaaagtttccaaagaacgccgtgaaaattgatggattagctggaaaacgcgttagtcaaacttagagaagctccaacttttccatttaaagtttatcccaatctacatttgtcaccgtcgaataaaagttacatttgccataagatcattaaacccttccgaattggcttcctgcaattagtgccttggtgtgtgtgtgcagattgccaacgatgatttgcacttcgtgattactagttcgcaaacagttaagaaatgcgggccaatagtggcatttcacaaacgccacccactgttggcacaaaatatttcaaataaaattgttaatttttctccaatttgccgagcacgtaacacggacctttgaagtgtcggacaaacaaaatgaaatgcagtgcaataagcaaacaaagagtgccccaccaaccaaccaatcaagaggcagtaaaaaaaaggggcatagtgggctgcgcagacatgtgtacatacacatagtgaccgtagcactcactaattgtcagccaagtgtttatgggatttcaatttgttgctgctgctcttgaagaaacaaacgaatgaaaaaaaaagtatagaacacgaaatgaaaagaaaaacaaagcattttgtttgggccgatttctgtgtctgttttcctcggatttccctttgttcgcttgtcactgcaaatgaagctgctgacgaccagagtgtcagtggcccccaaatctgctgggaatcgaggactcctgatcttgaaatttttcgacagcaagtgcattgagggagaaattcgatatcttgggggggaatatatacctttaaacaagagtaatataaattacaactgttccctattgataaagcgaatttaattaatccgcccaccttaccccttccgtcatccacagactctaccaggtgcgctgtggcctgcgtgtttcaccccgcctacttgtgcaggtggagacgagcattccggaagccagtggacccggaaaacagaacggacatgccaacggggccaacgccaccgaccacggcagcagcgatagcgagaggggggagctgtcgccgggggaagtgccacgcctccacgaatcaccgccggggggcagctgctcatccgcctccgttatcaacggcagcggcgcctcgcgcatcttccagatactctaccgcaacgaggaggttccgctgcgcgacatcatccacttcaggagccatctgctaggtgagtgcactcggaaaaatcatgtgtgataaatcaatgttttggtaaaaggttcttaacccctgttttttaagagtgtggccatgggccaagtaggctgccgcataaattgcactttcgagtgcctcttgccaagaatgcgaaaaggcatcgcgttcttccgcaatgttggcattgctaagtttgttgcaagagtgactaattctactctattaattatatgctctcaaaaaaagagaagaatataatttacagaatctattgaattgctttaaacattccaaattaaattaagttagtgtcacgaacatttgccaaacggactgggctagaaatgtgcactttggcgagtggcaagaatgccgggaattcccggttgccgcattggtggccttttgatgggaatccggggaaaagccccagcgcgggtaaccagacaccaaatcactcgaccagccagcggacagcgaaactttcggagtcgaaatgagtttattgttcgattggaaatataaatcaaattgtcagagagcggtccaaagttgcgaaagtttggagccctggggatcggcaatggagctgctgaccacacgggacagatgccaaagacgtattggcaggacacggaaaaacttcggttcggaaacttcctttccacctaattgcatttattgctgactgcagctaaaaggatttttgctgccctggctgcaatgcaattacggcaagttgggaaactcctttttggcaaattctcggccagcaaaggaaaaacttggcccacaccatgacccagtttacattattaaaagaaaaacaagacgccgaacgaaagacagacggccaagtttaagaaatctaaagtaaacaatttagttatgcattacaagaagtggatgatggactagagagtgacctataaaaacgaattaggtttcaggcacaaaaggcatggtatacatatgtgtatattatatacattatgttcacattgtgtgtgcacttaagtgtgcgtttataaaataatccaattttaataatattttgtgtacatggtaaccgcaccataaaacccaataaaagcggcataaaaacttaacggcgcaaaaacataagagaaaaatgggcaaattgaaagtaaatttccacatgatgcggagagtgcgatgctgggaaggcggaaaatgcggaaaagaccatggaaatatgtacacacgcgtcggcggcaaatggaaatgttggataaatatataaagagatatttttattcgcatatttatgggtattgtgtgaggaaataaaagagcgccaaagatttcaaggtgttgaagtgccagaatggcgatgagcacttgacggacgcctaagcccaggaaccttatccgcatccttgtagctg

SEQ ID NO: 5525 - DNA, 797 bp, DROSOPHILA
ttttcccggtgcggacgtgcgtttggcggtggaaattgtcgagcacgccggaaaagaaaatcccacaatagttgcgctcgttgtaacgttcggttttgtgcggtttttcggtttatttttcggcttcttctgcactctaatttcattagccggaaaaaggaaagcggggcaatggctgtgtgcaagtaatccggatccgctgaagaacgacgaggagccaatgaacttgctgacaacttgagacgaccacaaggaggggaatcccctttgggcggtcaaggaatcggggcaccatgggtgacctacaggccaccattgaattcgtcgtggagctgcacaagttcttcaatgtggatttgtttcagcgcggactctaccaggtgcgctgtggcctgcgtgtttcaccccgcctacttgtgcaggtggagacgagcattccggaagccagtggacccggaaaacagaacggacatgccaacggggccaacgccaccgaccacggcagcagcgatagcgagaggggggagctgtcgccgggggaagtgccacgcctccacgaatcaccgccggggggcagctgctcatccgcctccgttatcaacggcagcggcgcctcgcgcatcttccagatactctaccgcaacgaggaggttccgctgcgcgacatcatccacttcaggagccatctgctagttagtgtcacgaacatttgccaaacggactgggctagaaatgtgcactttggcgagtggcaagaatgccgggaattcccggttgccgcattggtggccttttga

SEQ ID NO: 5526 - protein, 167 aa, DROSOPHILA
MGDLQATIEFVVELHKFFNVDLFQRGLYQVRCGLRVSPRLLVQVETSIPEASGPGKQNGHANGANATDHGSSDSERGELSPGEVPRLHESPPGGSCSSASVINGSGASRIFQILYRNEEVPLRDIIHFRSHLLVSVTNICQTDWARNVHFGEWQECREFPVAALVAF

SEQ ID NO: 5527 - DNA, 6838 bp, DROSOPHILA
caacatcctgcacaccctcgtccagtcggagtcaaagggtggagcaaatacgctgacagatggcttcaacgtggcctcgcagttgcaaaaactgcatccggaggacttcgaggtgctcaagtcggtgcccgttaactggtttgacatcggacacgacggcgatgactccaagcccttccacagtctctggagagcgccagtaatttgtttggatgtggatggccggttcgcgaggatcaaccagaacaccactaagcgggacagccggttctccgtttccctggcgcaggccgtgtcctggtacaaagcctacgataagttccttgagatcgcccagtccgaggcggtggagttcaagacccaagccggcgatgtgttcgtcttcaacaacctgcgaatgttgcacggaagaacggcttacgaggatgcgccgggcaacaagcgtcatttggtgggcgcctacgtcgactgggacattatttactccaagctgcgaaccctgaagttcccaaatgccaaggattgactgagggaatgttgtgagatttagttgaaatgtaactgtgaattaaatggtttttttttacacatggcacagcgaataaattttgggaggtgtataaatattgtgtctcaacttgcaaatgaatttcacttgaaacgtgtttgaatcctacgatgaacggcgccgatactatcgatacaagcccagtggtcgagcacttctcgatactgccgtggttgagtaactccgctctggcatcgcgataacatcgatataactgccacctctagcataatatatgtactacatttatacaaatataaatataatggaaatatgagaatttaaccaaacaccgcccgaaatatgagatcctccgagcacagatcctagcaatcgatctcctcataaagtgagtgagtcgcaagagacgaagggagcgagagagagaaaggagcacttaaattgcacattcgctgctgtttgtccgccgcgatgctgccctacaatgtgcgaaacgccggtggcggaagcgttggcggaatcctgcggcgcacgggccaaggttcgggcaccggaagcacgattcttggcaatggaaacagtccgggagcactaggagccggaaaagtgtcctccagcctggaaaaccacagacaaccgccgttggaactcctcgtgtttggctacgcctgcaagattttccgcgatgacgagaaggcgcgggaaatggaccacggcaagcagttgattccctggatgggcgatgtaaatctcaagattgacaggttaataattgggactaacccgagcaataattatacgattaatcagtacgcacaccactgccacaaacacacacacacagccacatacccaccaatgtcgtgtcccgttaggaccacactcccacacacagcagcggtcaaattgttagcagagtcagatacatacatatatgtaggtattgtgatcgatggtattgtgattatggcgttagaagaccgagcttgtcgctatttatagccctattttgcataatctaaacagaactgaattaatttctatttgataaaatcgagaagaggattttctgaaaagggtcaaactgatcgtctgagtagatattctaacatttgttgtaataattcaagactgcgaactgcagacacacacccatctattcatccgcccacacaaccaaaacacacacgcacacacaccattgtaataacagctcttttcagtgcttctcaaactgtaatctctatccatatacaatttgaaaactgtaattctttgcccactttaaatgtaatccgattaactttttagccaccggagcggtatgtatacgaacgatctctagccttaaaacctaatcttatctgaaactgcattatatatactatataccgtatgactatcaatattgtgtaaatgcgcgagagtgtgcgaagcaaatgggacgattttcaaggagcggccctgcctcccgtttgtttcgcccgtcccgtttcgcgtcgccccccaaaattgccacacccactgacaatgcttctccctcctctctgtttatatttctctgcttgctttctttcggctccgcaaacaccattgccattgcgattaccgtgaccacagatacgatgtgcgtggagccctctgcgaactggcaccgcacgaggcgccaccaggcggatacggtaaccggctggagtacttgagtgccgaggagcagcgcgccgagcagctgtgcgaggaggagcggtacctgtttctgtacaataacgaggaggagctgcgactgcgacaaggtgagcaccacggtggtctggtagtacctccagatccaaagaaccgggcaggggtgtcgatatactttacttggtttcgaaactccagcaatctcttcttcgaatgtaaagacgaagagaagagatttttggagcatagggaaaatgtcggttttaatactctaggctaaaagctttaaaaactagttaatgtcaaattaagttgggctaggacctactcacatcagatttctaacgcatgtaaacgtatcgacactcccaatcccgaattcctcaaattgtaaattgtattacaagtactgcaagtgtcatgaaacgcaaaacgcaatcaaacccaaatcgcaaatcgaaaataacttgaacaaatcagtaccaatcacatcaaatccaaccatcgaaaaagataccaccgacatcccctcgatatttccagcgagtccgttcttggagcaggtaaatacgtaatcctcactacctgacagaataaatcgtttctttcaggttgtattagctggagcgccttcttgggcgtgtgttgtcagggatccaaatgcatgatcagcttgccggggaaggctcaggatcaagcgatttttgatatccagcaccttcctctatctctttctctctgtatctctctcttgttcgcatcaactcgaatacgtttctctcgctctgattcgaattagttattgctgccacccctctcctcccgtactaaaatcgcacatcttcgtgtgttctctgctcttattttggcccaattcgctgatcctgcagaggaggacctcaagcgactgcagcaggaaacctcgggcggctgcttcagccaggtgggctttcagtacgatggccagtcggcagcctccacttccatcggtggctcctcaacggcgacctcccagctctcgccgaactccgaggagagcgagctgcctttcgtccttccctacaccctgatgatggcaccacccttggacatgcagctggtgagtcaaagactaaatcatttcacaccaaaaagttatgatagtcatgctttcttaaatgctttccagcccgaaacgatgaagcagcacgctatcatagagaagactgctcgctttatcgcaacccagggcgcccaaatggaaattcttatcaaggcaaagcaggcgaacaacacgcagttcgatttcctgacccaaggtggacatctgcagccttactaccgtcaccttttggctgctatcaaggcggccaagttcccgcccgcaccacaaactccgttggatcagcagaatacagacaaggaagcaccctcagcggacgaccacagcgaggaagtcgcgggtggaaggaggaaccccaaccaagtggtcatcacggtgcccaccatcaagtacaagccctcggccaactgcgcctacacccagctaattagcaagatcaagggcgtgcccctccaagcggtcttgcaggaggacgagtcaagcaatccgggcaactcgcagcactcgggcggcacggcctcgcccgcacttagctgtcgatccgaaggtcacaacagccagggaggtgagttcacacccgtattgctgcagtacaacgggagcaccttcacacacgaggaggaatcgtcgaaccgggagcagcaggatgataacgatgtcaacggtggcgagccgccccaggtggagctgcttaagaacacgagtgcgctggcgttggcccaaaactatagttcagaaagtgaggaggaggaagatcaagttcagccagaaaaggaagaggaaaaggtgggcactctcacaatataaagttcatgtgtataatctgtcatttctttattttagaaaccagagcccgtgcttaccttccccgttccgaaggacagtctaaggcacataatcgacaagacggccacgtacgtaatcaagaacggacgccaattcgaggagacccttcgcacgaagagcgtggatcggtttagtttcttgctgccggccaatgagtactatccatactacttgtacaaagtgaccggcgatgtggatgcggcttccaaggaggagaaaactaggaaagcagcagccgtagctgccgccctgatgtcaaagaagggtcttagttttggaggagcagcagctgcagtgagtggaagcaatctggataagggtgagttaaggacaaagggatttcccgggttcggtatttaatttgtatttgtttttgtagctcctgtaagtttctccattcgggctcgcgatgaccaatgtccattgcaacacactttaccgcaggaggccagcgacgaggagactagttcgaatgctgctggggtggagcatgtgcgaccaggtatgccagatagtgtgcaacgggccatcaaacaggttgagacgcagttgttggccaggaccgccgggcagaagggaaacatcacggcttccccatcctgttcctcaccacaaaaagagcagcggcaaggtacgatatagttatatatatatattaagtccactctgatattaataatagcacaattttgtcgtgaagctgaggagcgtgttaaggataagctggcgcagattgcccgcgagaagctgaacggaatgatttcacgcgaaaaacaattgcagttggaacgaaagcgaaaggccttggcctttctaaatcagataaaaggtgagcttaccgtaaatcgaacgctattgtgtataatctcgtcgatttctaccaggtgagggtgccattgtgggctctgctgtgcctgttgttggtccgaatcctccagagtcagcggccggagctgcgaccgccgacagtggtgacgagtctggtgattctgtacgttccataccaattacctactttggccccgacgacgatgacgaagtcggtgaacagaggcctgagatgaggctcatagggagcacgcagaaggacgaggaggacgacgatgaagaggatggcggcgatctggagaagtacaacttgctcaacgacgatagcacgaacaccttcaccagcaaacccgtgcttcctcccaccgctgctccacctcctgctgctgttctgctttctgacgacgacgacgtccagcttgtggccactacctcaacgcggtcctccagctcgcgccatctcaaaacccaccgccggagcagaagtcgcagtaagaatgtccgaagcagtgacagcagcccttctagtcgagagtcctcgcgccgacgccgccagaagagcagcaggctttccagggagccatcatcgaacccgccacgtaagtcccagcattcgtcaacgcagcgaaaaaagacccccaaaaagaggaggcgcagcaaaagtagaagtcgctctaaaagcatccggcggagtaggagcataagcatattgagaaacaaccggcggagcagatcgcgtagccccagctgtcgaaatgcagaacagcgacgccagcaggaccgacggcgcactcccactaaaaagtcccacaagcggcacaagcgacgcaggcgcagcagctccccctgagaatcttcctagagctccgcaaccacctccacatttcaaagtttttttgtaggttacaagttgtatcaaataaacccccaacatatttttgtaagcaagcgatgtggttcccacaaaggagatgggactacgtggaaatgaatcccccattagtggttcatcttctgcgaagtcgagttggggatgccctacgcgctgtttttatattacgttatgtatttatgtatgcatgtatgtacatatgtataagttcaacaaattgtatgtaaaatcgaaaatctacatcttggaccaacacttcgagcgagggaagtccaaaatgtaggagttcgatgctctattggtgtttataattttatgtattttgtgtaaaagtaacctatgtataaatccgtgtaagtagctttacgatctggaaattccgtattacgccagtgttcagattcttcctgcccactgcgcacagtgggtataaaagcgcggtggcagtgagctcatcgattcagtttaatttggatgctccgcacgactcgacgatgcttcactcaaactatctttttctgatcggcggttgctgcctggttttcgctgtctcagcgcagattcccatcagtaagtgcatccattccttgaagaaacccgatccctagcctcacgcccctctaacaagcttctgacaatccctagcgccgcgacgttgcccggcgaacgagactttcctggcctgtggtcccgattgtcaaacggagtgcgccacgctaggaaagccctgtctggtcaggcacatccgatgtccagatggatgctactgcaacaagggcttcgcgaggaacgccgcgggcacgtgcatcccccttcggcggtgcaacgaaggcggctacggaaactgaattaactgagcatactgtcaaattagaagcagctgaaacactgaaaatggcaagacaataaagttcactggcattgtgtatggcgcctacaatgcaatgataatgaggcc

SEQ ID NO: 5528 - DNA, 3126 bp, DROSOPHILA
atgctgccctacaatgtgcgaaacgccggtggcggaagcgttggcggaatcctgcggcgcacgggccaaggttcgggcaccggaagcacgattcttggcaatggaaacagtccgggagcactaggagccggaaaagtgtcctccagcctggaaaaccacagacaaccgccgttggaactcctcgtgtttggctacgcctgcaagattttccgcgatgacgagaaggcgcgggaaatggaccacggcaagcagttgattccctggatgggcgatgtaaatctcaagattgacaggttaataattgggactaacccgagcaataattatacgattaatcagtacgcacaccactgccacaaacacacacacacagccacatacccaccaatgtcgtgtcccgttaggaccacactcccacacacagcagcggtcaaattgttagcagagtcagatacatacatatatgtaggtattgtgatcgatggtattgtgattatggcgttagaagaccgagcttgtcgctatttatacgatgtgcgtggagccctctgcgaactggcaccgcacgaggcgccaccaggcggatacggtaaccggctggagtacttgagtgccgaggagcagcgcgccgagcagctgtgcgaggaggagcggtacctgtttctgtacaataacgaggaggagctgcgactgcgacaagaggaggacctcaagcgactgcagcaggaaacctcgggcggctgcttcagccaggtgggctttcagtacgatggccagtcggcagcctccacttccatcggtggctcctcaacggcgacctcccagctctcgccgaactccgaggagagcgagctgcctttcgtccttccctacaccctgatgatggcaccacccttggacatgcagctgcccgaaacgatgaagcagcacgctatcatagagaagactgctcgctttatcgcaacccagggcgcccaaatggaaattcttatcaaggcaaagcaggcgaacaacacgcagttcgatttcctgacccaaggtggacatctgcagccttactaccgtcaccttttggctgctatcaaggcggccaagttcccgcccgcaccacaaactccgttggatcagcagaatacagacaaggaagcaccctcagcggacgaccacagcgaggaagtcgcgggtggaaggaggaaccccaaccaagtggtcatcacggtgcccaccatcaagtacaagccctcggccaactgcgcctacacccagctaattagcaagatcaagggcgtgcccctccaagcggtcttgcaggaggacgagtcaagcaatccgggcaactcgcagcactcgggcggcacggcctcgcccgcacttagctgtcgatccgaaggtcacaacagccagggaggtgagttcacacccgtattgctgcagtacaacgggagcaccttcacacacgaggaggaatcgtcgaaccgggagcagcaggatgataacgatgtcaacggtggcgagccgccccaggtggagctgcttaagaacacgagtgcgctggcgttggcccaaaactatagttcagaaagtgaggaggaggaagatcaagttcagccagaaaaggaagaggaaaagaaaccagagcccgtgcttaccttccccgttccgaaggacagtctaaggcacataatcgacaagacggccacgtacgtaatcaagaacggacgccaattcgaggagacccttcgcacgaagagcgtggatcggtttagtttcttgctgccggccaatgagtactatccatactacttgtacaaagtgaccggcgatgtggatgcggcttccaaggaggagaaaactaggaaagcagcagccgtagctgccgccctgatgtcaaagaagggtcttagttttggaggagcagcagctgcagtgagtggaagcaatctggataaggctcctgtaagtttctccattcgggctcgcgatgaccaatgtccattgcaacacactttaccgcaggaggccagcgacgaggagactagttcgaatgctgctggggtggagcatgtgcgaccaggtatgccagatagtgtgcaacgggccatcaaacaggttgagacgcagttgttggccaggaccgccgggcagaagggaaacatcacggcttccccatcctgttcctcaccacaaaaagagcagcggcaagctgaggagcgtgttaaggataagctggcgcagattgcccgcgagaagctgaacggaatgatttcacgcgaaaaacaattgcagttggaacgaaagcgaaaggccttggcctttctaaatcagataaaaggtgagggtgccattgtgggctctgctgtgcctgttgttggtccgaatcctccagagtcagcggccggagctgcgaccgccgacagtggtgacgagtctggtgattctgtacgttccataccaattacctactttggccccgacgacgatgacgaagtcggtgaacagaggcctgagatgaggctcatagggagcacgcagaaggacgaggaggacgacgatgaagaggatggcggcgatctggagaagtacaacttgctcaacgacgatagcacgaacaccttcaccagcaaacccgtgcttcctcccaccgctgctccacctcctgctgctgttctgctttctgacgacgacgacgtccagcttgtggccactacctcaacgcggtcctccagctcgcgccatctcaaaacccaccgccggagcagaagtcgcagtaagaatgtccgaagcagtgacagcagcccttctagtcgagagtcctcgcgccgacgccgccagaagagcagcaggctttccagggagccatcatcgaacccgccacgtaagtcccagcattcgtcaacgcagcgaaaaaagacccccaaaaagaggaggcgcagcaaaagtagaagtcgctctaaaagcatccggcggagtaggagcataagcatattgagaaacaaccggcggagcagatcgcgtagccccagctgtcgaaatgcagaacagcgacgccagcaggaccgacggcgcactcccactaaaaagtcccacaagcggcacaagcgacgcaggcgcagcagctccccctga

SEQ ID NO: 5529 - protein, 1041 aa, DROSOPHILA
MLPYNVRNAGGGSVGGILRRTGQGSGTGSTILGNGNSPGALGAGKVSSSLENHRQPPLELLVFGYACKIFRDDEKAREMDHGKQLIPWMGDVNLKIDRLIIGTNPSNNYTINQYAHHCHKHTHTATYPPMSCPVRTTLPHTAAVKLLAESDTYIYVGIVIDGIVIMALEDRACRYLYDVRGALCELAPHEAPPGGYGNRLEYLSAEEQRAEQLCEEERYLFLYNNEEELRLRQEEDLKRLQQETSGGCFSQVGFQYDGQSAASTSIGGSSTATSQLSPNSEESELPFVLPYTLMMAPPLDMQLPETMKQHAIIEKTARFIATQGAQMEILIKAKQANNTQFDFLTQGGHLQPYYRHLLAAIKAAKFPPAPQTPLDQQNTDKEAPSADDHSEEVAGGRRNPNQVVITVPTIKYKPSANCAYTQLISKIKGVPLQAVLQEDESSNPGNSQHSGGTASPALSCRSEGHNSQGGEFTPVLLQYNGSTFTHEEESSNREQQDDNDVNGGEPPQVELLKNTSALALAQNYSSESEEEEDQVQPEKEEEKKPEPVLTFPVPKDSLRHIIDKTATYVIKNGRQFEETLRTKSVDRFSFLLPANEYYPYYLYKVTGDVDAASKEEKTRKAAAVAAALMSKKGLSFGGAAAAVSGSNLDKAPVSFSIRARDDQCPLQHTLPQEASDEETSSNAAGVEHVRPGMPDSVQRAIKQVETQLLARTAGQKGNITASPSCSSPQKEQRQAEERVKDKLAQIAREKLNGMISREKQLQLERKRKALAFLNQIKGEGAIVGSAVPVVGPNPPESAAGAATADSGDESGDSVRSIPITYFGPDDDDEVGEQRPEMRLIGSTQKDEEDDDEEDGGDLEKYNLLNDDSTNTFTSKPVLPPTAAPPPAAVLLSDDDDVQLVATTSTRSSSSRHLKTHRRSRSRSKNVRSSDSSPSSRESSRRRRQKSSRLSREPSSNPPRKSQHSSTQRKKTPKKRRRSKSRSRSKSIRRSRSISILRNNRRSRSRSPSCRNAEQRRQQDRRRTPTKKSHKRHKRRRRSSSP

SEQ ID NO: 5530 - DNA, 13327 bp, DROSOPHILA
tgaagcagctgcagttgctctacaaaatggccaccagttcgagcaccacaaccaccacaacagtgcctcctgtctttacaggaggatcccttaatttgggtggtccaagtggctttaagctgccacctcctgctcttagccaggataccaatacgctgagcaatcctgatcctctcaagagcaaatctgagatcaccaaggagcttatggatgtcagtctggagacggacacttaggttgtgcgcttatctagttactaattaacctctatatacaaatacttgtgtatttgggtgcttagcaaatctgtgtgtagtatggcttagctatcttttgtaaataatattataaataaaacttaatttagtgaatcgctttattgaacagcctgaatgtaggcaatagaaattttatgtcaaatcgaggtcatgtaaaactcatgtagaattgtataaatgtaaactaaaatttacattggttaaatatattaaaaactggttataaattaaacatttaaagtttctgacgtcattcgtatttttttatttacaaatataaacaactttattctttctttctgagttacgctttattatgaacttagaaatgtttaaattaattacataaatagtcaagtatattacaaagttacatgctgtatcaacgtagctacattatcggcatatcttcatgtatttccctacttgcataagtattttgttcatctaagctagacagtagttatgggctatattataaattaaacgaaacatatgggacacagcagctgatcgtggatcgaaaataggatgaggtccttccaccaagccaactgtgcgctctgtggacatacagaatactataaatcatttaggctacatacatatcgcctacagttacatatgtaggcgtactaaagtaaatattacttataaatatagtcaatttccatttagcagacgagtgcatcggtgtacagtggtttttgggttttttttttatgggtatgagatgtttgtgtgtgttgtgtttgtgcgaaaaaaaaccatgcagtgtctataaaaataatgtctttcatatcatgtttttctctgtgtactgagtgtccggtgcctttcggtctggagttctctgattaagggattgccaaatgaaagccccgtaatctcaatgtgggagtaacaactactttaacttgtgcggatgatgatacccggtgggttgatatcttcctcttggctctcatttccttccgctcatcacgaacagcagtggcaccgaatgagtctcactggcgatgtgcaatcacttctcgttcttgaggggcacaccctcctcctgggtgacgtcgctgattctgacacgttctggaggattgttccacggctgcagttcaccgctgccaaggatggcgaacaccacagctgccgagatataggtggcggccaggatccagaacacaatttgccacgaatggaaggattgctattggttttaaaataaaatatataagtaatatagtctctctgatattttcagctagatttactcacatccttgtaggtgagggctcccaccatcgacgtggaaaggaagccaccaaaggaagacagcgtgttggccaatccgaaaatggttcctccaaagttcggtgcaatatccaagccattgccgagataaccagcggtgactgcaccatgggcaaacagggccagcgagaagatcgtgacagaccaggtggcatcgtagcccagaaacacttgcactatcatcaaaagaccgggaatcacaagagctgaaaataagagaagattgtttatgttattcctgcaataccttgaaatgatatttttgaatttacttaccaaaagtagtgaatagtttcctggtggccgtcgtgctcaaagtacccttcttgcgcaggtaatcagccaggtaggatgaagccacagccataacgtatttacccagataaggcagcgacgagaacaaaccattctgtagaagaacaaatctattagtaaatataagatacccagataagccgtgtccaacaaacccacctgtttgatatcgaagtgcagaatcttggacatgaaagtgggcaactgattgaccacagtgaagaatccaaagacggccagtccgtgacagatgatgattgcccacacagctggagagcagagcagctgaccccagggcacatggctcggacgcttcttagaggtagtggtgccaatggcctcctcaatctcccgccgctcctcggctgaaatcctgggatgagtggcgggtgtctcatagacaaaagtgaaccaggccaaggaccacagcagacccacggctcccgtcaaatagaaaacactggcccagccagcgacggagatcaggtagccgcagatgggcatggtgattgcagcaccaagcgaagaagctttcgggtcaagaaaaaatatacgttagggataggacatttttataatacaggtatgcagcctctattaggctttgttcctacggacaaagaactgcttgacttacccatcatgttggacataaacttggagcgctccatgggcggaatccagacagcggccaccgggtgaatggctggccaggatgcgcccagcatgaagccaagaacaactcgcaccacgatgagcaccacgtagttgatatgcgccgccagcggcgtgatcagggtgagcagactggcccacagcatggaatgtccaaagacgcggcgtccaccgatcagctcggcaagacgaccgcccggcagttcggtgaggatgtagccccagaagaagcagcccagcacgaagttggtctggtagctgtcccagggaaagcgctcctcgtacacatccactccatcaggcgatgcggtgctattggccgccgtactattccccactagagtggcattcaccgctgatgtgacattgggtcggaccatgtccacgatggcaatggtgaggttcactcgcagggcgtagttcagcatgaagccgagcatggtcagcaggttcagaacttggcggcatgacagaaagtctggaagggaagggaagagcggtgtccaattaataatagaatccaaggcattggattggattggattcattgatactgtagtacatggcgaataagtcggtgcttcgtcgtctgggtcgtcgaaaggttaggcacttaaaattcagctctggaatattcccaagctgccgaaaatcaggcgaccagcggccaaagcaaaaacccacccaagaagcgccccaatttgtgataagaaaactatactacatttaaattgaacagaataaccttttaatcgaaatttaaaaaaaaaaatccacctggattatgatcgcctgtaattgcattcaaagctaatacacgttttgtttacaatcattttaactgatttgttatcaactcactacatccactacgcccacactacacacttattaactgatgtaatctgttgttttcattacacgatgcagcccagataaaagcattaattacccatattaatgagccaataaaatcgcaatcgcacaaaacttaacagtcgttgtcaggtgacctcaatagcatatcgaatgggccatgaatttgatttgaggatcgccggtttgtgggtgcagctggatttcaaaaggagaagaaaaccaatcaaacggaatcagcttcattcgaagccaaagacatgaaggcgaagatcattaagtggtgtccacaatcaacacaaactgggcctgtcactttgtttttttttttttttttttgggacgcttattaagtggcaaagtgcattgtacggattgggttgcatttttcgcaaatcacattaataaatttcaagtggcattgaaccgcagttataacccgctcttcaatttcagggaaatgctcacaagtgtcggtgtaaatttataagccaccaacccgattgtaataaataataaactggcttccagcgactttcccatgcaaaaaaaaacaaaaaaaaaaacaacgctatcagctgggcgaagcgactatcggggccagtctatcgcctgtctggccgggacacgcccacttcgctgattattgccccaatatcatgttaatgtcatgcaaaaaaaatacgaaaataacgccactcggccgcttgtctagacatcggtgagcatcatcaaacgagcgcgaagcaacaataaaacgagacactcaacttgtattcaaattagcactcgaaaataaccaaaattcgaaacatcaaaaaagcgttaaaaaaaaaatatacaaaatctctagtcatgtttgctataaattcttgattccatataaaaccgataaccagaaaaacgtgcccaaaatacacaaaattataagtaattccacagaatatcggcaaggtttcgacttagaccagtttcttcgctcaaatcgcatagaattggatcgaagcagaactatatccaaatttttgggcgatctattgtgaactcaggaggtgtttggaaagtttggatcattaacaaagtagcgctctgttaatttgtgggccatgtctggacacctgacacctcatcatcagctcaaatcaatgctaaataagcgtgtgccgcaaattaccgccactccatatcgataaggattgatttatacgacttccacttgcacgggggaaataaattataataataaactaatgtcataaaccggcaaggactatgaacttaaagtggtaaattctcttatctcaaatagtagctaaaaataattctcaatgtgtgtgggaatttctaactataaatcaggttcgaaaacttgcacttagattggtaaacaagttttaagggcctctattttctataatgaatcaatccagttattcaacttataaaattctatatccattaagcacatatttcggatgataattaaattgaatagaattcgagacagagctctaatttgtcggaatgaactcatcaagggttttctctaaccgatcttactcatcaaacgaattctgaagtctgtgactccttccgagaatcttaatgattgaaactcaactcagacttcttgattaattgtcgcctcgaacggttcatttgtttaaagctttgtttacggacaaactattgcttcgcattttcttttgttgttatctttttggcaataaattaagtgaaggccagacttgatgtttacaaccgagaggcagaaaaaaccggctaaaatcgttcgaaattatttggaccgactggatttggacaaacttttctcaaaattctcagaatttcgcctgtctcgtgcataaacttatttgatttggctgcgtttcatctcgtttccttattttatttaattttatttcgctttttggcagcaatctttagcctttattggctttcgttgatgctctacttgagtttaaacaagttcgccgcagtctgcgccaacataaaaatcccatcagagaaaggcaaaaactttataaatagccggcaagtaaataaaacgaaatgaatacgggcaaaacgtgatacttaaattaccgctttttacgatcgagcaacaagtgaatctgagttcgttactgggttcattgatttctcggaaaattcttaaaatttattcgccaaaactgcgaatcaattaagtggcacttgaagttcagatcagcacgaaatcgattatttgctttgccttcaaataatcatttttaatattttcgaaaagacgcatatccggcactttttggggggttgacgcaaaagtattttcgaaaatgtcttgtacgattctaagtacattccgtctgttattctttttaatctatttcactggtttatgtatattttgttttcctttacactttcgaatctatttatacagacgctctatcgttcgaatgcgggcactgggtacacacccaccgatgattatcttctatgtccgtccactctcgattctctctggccattcctgaccttcaaaatcggaatgggctacatagactatacattgtgttggtgaaagttagccaccgatatcgtcatcagcttcgatcaactgatatatattttctcctcgaatggatggaacgcatgtgatcggctttcggattttctggtggaatgtcctcagcatttgcgtgggcactattggtctggcccgaaaattttccattcattcgacatacgaaagaaaggcccgcaaccgacgtcacacaaatgcgcacttttccgtcaaggtgccaagtcattttcctgtcacgggatcgaagcggcgggcgcaacgtggcgtatgagttatggcgaaggcgcgccagccacgagcccacttttcagattcgatttgcagcgattacaacaactcccacacagcccaagattttcaatcgtatgtagtcacaaacgatttgtgcccatgccgggggaaatgcaaaacactgttttgcattttgagatcaatcgattgtttccgaacttttccatgtgatcatttctacagtagattgtcctcggcattgtgtatttgtgggaattaatcaatcagaacttcataagcataactttacactttcaaatcactgaaataaatcatttgcatatctgtcggtaatatgtttcattgctttcaaacgccaaaaacgcactgtatcgaatattgtatctgtatctgtcggatggcatgacattgccgcgtcgccttctagcggcaattattggctttgttgtgctggccaactgcatttccgtttgtaactgatttacggaactggcctcgttgaaagcgagtgaattgtaatgccacgacgccgacgacgacattgtttgttttcgagtttctgtttctgtggaactggttctacttcaacacaataagcaataagctaattaattgctgaattattgtgccaatttgctgtttgttgaggggcacacacagcagcctcacttatcacttttgttggacaatcgaccattgtgattaactggccatctctcgaggaactctcccatcgccattgtcctagattcgtgcctttgattcgcactgggaaatcttccatggaaatttacaattggaaccctgcacttgtggcgtttgccgttcaaagtgcaatcggtcttaagaaggagcaacttgtatacatcgatttacagcaccagcccccagactgataagtttattgtacggaatgtctgatgtctgaagctcaggaaagtcaaaacttttattgacttggctgcatttggccataaagtggcccacgaagtggccagttcgcgaatcactttaatccagcataagatatgaccggtatgagctgttctacacatgaatgtatcttcaagttgtcatttccttcgaccgtatctcatagatgcacgtgccggctaatgaagagctacaggttgtaaacaacttgtcaggggtctcaggccccgtgctatgtaaacatttatagctggcaataaacaatacacatatacgtatatatgtataaaaagggggctcgtcgccaagtgtcaattattttctggacccatcaaaattatcagcaactattttgcaaatagtcgaaaactaccgacgaactttggcacttgatagcgcgacacgcgttgccttgactatggagagtcttataaatatatatgtagattggaatggaaatacatacatgctaatttataaatatgatttcagaaccatcaatggaggcttgcctcagcacatttgaatgattaaagggtcttgcgggtcaaagccagcattcttttttttttttgtactgtctgggacttgtagatttgattagcgttgaaacttttaattgtagaaatacttgaaatttctggttataaattcaataataattaagtgtgccatgtgcaacggaagtacaacgcaagacatgagattataatcaaatacggcgtaaaccactttgaaaattccaagaaatggtttcagctcaattgaaagcaatctcgttattacacaaaaaccagaaaactagacttgacttaatgcatattaagccgacggctagaacaattgaaccgtgttgcggagcttcaacaatggagtgccaattatgagaatcattaataaaagaactaaaggatcgagtaaacacaaatcgatgtaaagtgacaaaagtttaataacaatttatcgtaagcgaaatgagccgaacacatgctcattattcattacttggctgtttgattaattccagacgacgacccacagtcagtctgccaagggtgaatacccgacggattcaaatgtggattcaaatgagaatcgaaagcggttgctctggggaatttacaaacgcaaatgaatgtgattggccaagctaaataccaattaaattgaaagctttttttagaagtagtttataataaattatgggttttatgtcaaattacaattgaagtgtaatttctctctgaaagtaacactcatttataagccaatttaatatttaatatttgactatatacgcgttcatcaatttgtaaattcccactttttgtgatacctttaaatagcttaagcaccttgaattttgtttatacaaagcacaatgtcaaaaaacaataaaaacctttaaaaaccagacatgaatcacaccttcctgtattatttgcaattgactgagtgactgagtgggtgtgaattacacgagcttgtaatgaataaccatactataagctgtctaatcgatatgaatttcagtttgttttagtgttaattgaatttgtaattgtctcgtgcgacaacgtatctaattagcacactcaaagtgagttttaataccaactccccctaattagaggctataaacgagtgcatttcggaatcttggaatcttgagacgtatttcttacaattttttaatattttcctgctaattgaacaatttgctctttggttagagctcgccgcttcactatcattcatgattgctcacgggatcgacgaaatgtgcactcaaacatgcgatcaacccacccgccaccacttcatcctcacctcacctgtctgattccacgattgtctggctctaaagtgctaaacattttcaaaagtacgaattaaatagtaaacagtcgaatgaccgtcgttggtgggctattaaaaattcacaacacaacaaccacacacaaaaagtggttcaattaattgcgaaattttactcgaaatttagtccatgaactaagctttccatacgcaaaaacggaacttgaattgttcaaagacttcagggggggggggatgtgtggtagactagaccaactaacgtgcttagttagcgtgactgtgctaatttgtttgcatagtctaatgcgtggtactacgtggaaatgtcataaccatggcgtcatgaggtcgcccaactgcgcactccagctgtcccacggcgtgggcgtgtccttgtccgtatcgatgacatcgcgaggattcgaggagtgcctgtcctatggtataagttccaccaggtgtcaatgatcgagaagttgtcaaggtgtcgcgaggttgatacaattaaatatttatcacattttcattgaaacaactgggtcaggttgtcatagcgaaaaaataaaacccattagatactttcgattatgttatctgttatcaatatctacatattaggatttctctaacaaaattggtatatggccattgagaataatctgtaaatcgaacagctgacgaaccaaatgaatattataagctgatatataaactgaaacagtttttgataatcttgctgagctttaagcatcttatatcatatatcttatatattttttactgcacacaaaaatctcgaatattcgaattgaaaattgacattagaacgatgaacatttgcaattgaccgatggaggaaccggaaagtcaatcagcattcaattgaatcacagtgcccaattgatttgtaacctcaatacaagttgtctcgttgacaccaatcaaagtggaggcaggaggagtcaaatcgatttgtttacgttaaccgagttgcaattcaattggccatcaaacatgggcaattctgctcgactttcgagcccactgaccctggcgctccctcattttccagtggcgtcatgcggtttctggccgccttatcgaggaaaaagaggggctcggctgttaaaaaaaaaaggcgctgcggttcactgggggaggcacattgttctggcattttcgactggccaaacagcaggtgcaaactggaaactcaatacagtaaccatagatgatctctagctatttcgtataaatattaaatttcaactcgaaagttctcaaatcattatttactaatattcaaataatcagtgtgctggctatgatataagcaggatgttgggtgggcacctatcatatcacatatgatatcatatcacgttatctacttacttcgcactctttgcagacctcctttctccgtgttggacatgacgcctctaagtgccggctctgcaagtggaaatataccagaggttagacgaattttataaattggaaacgaaatatggcaggcgatgtgatagacatctagaaaatgcgatataaatagtctgcagagttaatgaaactttttacgaagtaaccaaaatcatggttataccttctttttttttttttggctatcttatcttatcgccgccggtgtctcgtgtttgtacctgaacggttaaaccgatatgcatatatatcattttcagacgttctttgataaccacaattgcactggcctgtcattatctttcttttgttcagttgtgctggcgccgctataaattattgaaacactgttgcagcaatggtggtgcaaagggaaattcgttgactatatatgcgatttgttgcatgctaattgccgctagacacgtgcatgtgcggcacagacaggatcttggccctggcaacatgtgtaacttggcgcaatcaattaactgcgagtgcttagatggcgtttggtcaatttggactgcaaatatttgctggcggcgtcctggcaacaacaaaaatggcaacaaaactatgcccgcatgtgtgaggaaaggatatatgtataaatatacatatatacagacgaaattattgtccttgcctgtgtggcatgttgccttgttattaggcccgatgaaaaagcggcatctgccagccagtcgtgtgggcattgactatatacgacttctatatggtcacatgtcgtcatacgtcatcttcctacaagtccgtatatgcgggaaaaataactcaattcgccacttttatcgcgggaaagcaattatgtttacagcattagtcatcaataagcccaaatatataaagtacttaaatatacttaagtggcttgcattgatttcatataaaatgctcaaaatgttttgctcatgaatgaaacttttaattacagtaattataaatggcaaaattggtcagatatcagtttacaattttagccgcagaattaatttgtatatcacgtttatcttaactaacaaagcacgattaaatcacaatttaatttatgtcaacatggctatagttagccctcgtttaattagtagtttaaacgttttgcgccttgaaaaaccaattaatcacattaatagctgtaggaaactaagcaattatgacaccactagcaggtaaacgatctattttaattagttacttactgacctaaaaaaacggaaataacacctttaataaatatgcatcttaaaactaaactttaagtaattgtaatagaatcagattgtaagcaacatttgcattgcacgaactggaaacccaccttgcactcgacaataactaacaaatgttagttgtttatggcaaattatataatttgtttggcaccaaccgatttgcaaacggttttcgtatgattaactttagctccgatttccataaaacaaaacacagtgaacgaacgaacgaaaaccgccaagaaaccgcacgtgttttgtgtttatttttatctgttcttctcgttctgtgtaatatctcagatattgaagtattgagatattgaaagatcggtagattggggggtgaaacacactcgcactcccgaacaagaaacggtttcaacaatgccggatgggacagctgttgattatttttgaaaacgtcaagcgacgagttttctagcgcaagcgcaggcaattctagaactgtttcgaaatcgaaactcaaaacgctgttgctgccgtggacagttgctgctgttgttgctctgctgttgctgcgtgctcgttggaagagcgttgaaactgaactgaaaatgcggccgctcgtctgcggctttttctatactccgccgcagtcgcagtcgccgtcaccgtcgatgttgctgttgctgttgtcgcagcgactgctgttgttgctgctgttattaatgttgttgctgctgccgtcgttctcgttgctgctgctgcttctgttatgctgatataagtgttgttgctgttattagcgttgttgtcgctgctgctgcttctgttattgctgctgtgctcgtgttgttgctgtcgctgctgctgctgttatttctgttgttatttcttttgctgcttctgctgacgtctgttttgctcagcagcattaccatctttgatgagaatagtgttagttcaaaattgagttaaattcgaataacaatcttactccattcgccgaccttcattcagattcagatgacaggagcttatttcggtgatgaagattcgcgtgcagcgcggattggataaacccaacccaaaggacacaggattcctgaagatgatgcgatctgtattcaagtgctggtcatctaaagatcgtcactccgtggatttgcccgcttccatttccagctgggatcgcgtcgaatcgcagcggatagttgatacccatttgccatgcgtagccaaaagtgcttatcagcacacgattcggcacaaaaaactgctgccgatacagcaaaacggtaccaagtgctcaatttacgcggcaattttgaaacatcagtggttttttgttttgacagatttttttttttattaatagcttatttggacgagaagctaagatgccaagagcagatcagtctgcaagcatgatgaaattccacaaattttcgcattcagaacttgtctttgtgatataaactgtgatctttacatagcttaaatatagaataccatatctatgaaataaaaagtaccgcatcaaatggagaatcgcgtccagcgctccacgagactgggtcgcggcgaggccctgt

SEQ ID NO: 5531 - DNA, 2280 bp, DROSOPHILA
ctcttccaacgagcacgcagcaacagcagagcaacaacagcagcaactgtccacggcagcaacagcgttttgagtttcgatttcgaaacagttctagaattgcctgcgcttgcgctagaaaactcgtcgcttgacgttttcaaaaataatcaacagctgtcccatccggcattgttgaaaccgtttcttgttcgggagtgcgagtgtgtttcaccccccaatctaccgatctttcaatatctcaatacttcaatatctgagatattacacagaacgagaagaacagataaaaataaacacaaaacacgtgcggtttcttggcggttttcgttcgttcgttcactgtgttttgttttatggaaatcggagctaaagttaatcatacgaaaaccgtttgcaaatcggttggtgccaaacaaattatataatttgccataaacaactaacatttgttagttattgtcgagtgcaagagccggcacttagaggcgtcatgtccaacacggagaaaggaggtctgcaaagagtgcgaaactttctgtcatgccgccaagttctgaacctgctgaccatgctcggcttcatgctgaactacgccctgcgagtgaacctcaccattgccatcgtggacatggtccgacccaatgtcacatcagcggtgaatgccactctagtggggaatagtacggcggccaatagcaccgcatcgcctgatggagtggatgtgtacgaggagcgctttccctgggacagctaccagaccaacttcgtgctgggctgcttcttctggggctacatcctcaccgaactgccgggcggtcgtcttgccgagctgatcggtggacgccgcgtctttggacattccatgctgtgggccagtctgctcaccctgatcacgccgctggcggcgcatatcaactacgtggtgctcatcgtggtgcgagttgttcttggcttcatgctgggcgcatcctggccagccattcacccggtggccgctgtctggattccgcccatggagcgctccaagtttatgtccaacatgatggcttcttcgcttggtgctgcaatcaccatgcccatctgcggctacctgatctccgtcgctggctgggccagtgttttctatttgacgggagccgtgggtctgctgtggtccttggcctggttcacttttgtctatgagacacccgccactcatcccaggatttcagccgaggagcggcgggagattgaggaggccattggcaccactacctctaagaagcgtccgagccatgtgccctggggtcagctgctctgctctccagctgtgtgggcaatcatcatctgtcacggactggccgtctttggattcttcactgtggtcaatcagttgcccactttcatgtccaagattctgcacttcgatatcaaacagaatggtttgttctcgtcgctgccttatctgggtaaatacgttatggctgtggcttcatcctacctggctgattacctgcgcaagaagggtactttgagcacgacggccaccaggaaactattcactacttttgctcttgtgattcccggtcttttgatgatagtgcaagtgtttctgggctacgatgccacctggtctgtcacgatcttctcgctggccctgtttgcccatggtgcagtcaccgctggttatctcggcaatggcttggatattgcaccgaactttggaggaaccattttcggattggccaacacgctgtcttcctttggtggcttcctttccacgtcgatggtgggagccctcacctacaaggatcaatccttccattcgtggcaaattgtgttctggatcctggccgccacctatatctcggcagctgtggtgttcgccatccttggcagcggtgaactgcagccgtggaacaatcctccagaacgtgtcagaatcagcgacgtcacccaggaggagggtgtgcccctcaagaacgagaagtgattgcacatcgccagtgagactcattcggtgccactgctgttcgtgatgagcggaaggaaatgagagccaagaggaagatatcaacccaccgggtatcatcatccgcacaagttaaagtagttgttactcccacattgagattacggggctttcatttggcaatcccttaatcagagaactccagaccgaaaggcaccggacactcagtacacagagaaaaacatgatatgaaagacattatttttatagacactgcatggttttttttcgcacaaacacaacacacacaaacatctcatacccat

SEQ ID NO: 5532 - protein, 493 aa, DROSOPHILA
MSNTEKGGLQRVRNFLSCRQVLNLLTMLGFMLNYALRVNLTIAIVDMVRPNVTSAVNATLVGNSTAANSTASPDGVDVYEERFPWDSYQTNFVLGCFFWGYILTELPGGRLAELIGGRRVFGHSMLWASLLTLITPLAAHINYVVLIVVRVVLGFMLGASWPAIHPVAAVWIPPMERSKFMSNMMASSLGAAITMPICGYLISVAGWASVFYLTGAVGLLWSLAWFTFVYETPATHPRISAEERREIEEAIGTTTSKKRPSHVPWGQLLCSPAVWAIIICHGLAVFGFFTVVNQLPTFMSKILHFDIKQNGLFSSLPYLGKYVMAVASSYLADYLRKKGTLSTTATRKLFTTFALVIPGLLMIVQVFLGYDATWSVTIFSLALFAHGAVTAGYLGNGLDIAPNFGGTIFGLANTLSSFGGFLSTSMVGALTYKDQSFHSWQIVFWILAATYISAAVVFAILGSGELQPWNNPPERVRISDVTQEEGVPLKNEK

SEQ ID NO: 5533 - DNA, 3384 bp, DROSOPHILA
atgcgaaaatgtgttaaaatttttgtttttgattataataaaaatagtgacactgatagttagctatgtttattggcagtacaaaacagtcttcatttaagcggtttttggcgatttttattttgtttatttttgctaaaaaagaatctgtattttcatttcattttagcggtgatatcttttttgaccaagttatggatggaaccccttatgttaatatccggtttttggcaatattcgtattatttttttttgtggaatgccatacctcgttgaaattgtaaaaaaaaatatcccatcgacctacattaaaaagtggaaattaaatttttttggcatttttcaacaagatttgctacgcagaaaaaaattattccgaaatttaaagaaaatgtcttagcctttagaactaagtgtctaccggaatatataatttcatttctgaatcttttatcaaaactactataaattttcagctgttatgtaaattgatttgctattttattagggtccaggatagaagacattccgcgttttgtcgattatattttgtggaattcatttcttttcgactaatattctccttaaaaaaatcaaaacataaatctttttgtcttgttctgtttttaatcttattattattatttatttcgtaaaaatgcagtgtaaaacaaaaaacacattagaacagttttatttttaaaattgatgattaaaaaaaaaacaatgaaagtatgttttcatgtcctattatttttcatttaattttccgactgttactatggcaaccgaaattatatataattaaaaaactggtgtatagtaattcatgtaaagtcgatttctggcaaacatttattggaatgcatatatatatatatgcaaggatgagtatcatatcccttttccaatatttggctcttccttcatcacccccttttaaaaagtccttacatgatagttgctaaaggatgaaaagccatttgtccttgaaccgatgtcacctgagtcgcaacgcttttatttcaggaaaaccatgtttagggggtcgagatttggccgccgctaaacaggtctctttgagcgacttaccaaccggccgtttgacgcattcatcaaagtagcacttctcaacgttatgcagaaattccaccagtagtcggtcgtcaccgccattgggtcccacggagtactcgcactcatagttgtgcttcttgagatctcgcacacagcagtcgatgaactctgcattggcagaaaaccagtcgttgtgacgctcaaggggaatacccaaacgagtccttactactccagtcaaccaggtgtcatcgatccaaaaaaatgacatcctctccgcctccgccacaatcctctcggctgttggcacgttggtcacgtaaagccagcccgacaaataggcgggatataaagcctgaggatactcctttttgctaacgtaccacttattggctcgaaggcgaatggggggcttggcatccagtacgtagccagataacaaagtacttgatgtggccagtccaggttcgcgcacctcgagggtctctaaatacctgcgcagatgaaacacatcgtaaatgatgtcatcatccagtttaatgataaacttggcctgctttttgcactcctcagagacccactttaatcccattacgtgtttgtagctcagattgcgatagtcctcgatgaaattcccctggagaaggtccccgaaacgattctgttcgctggccagttgatcctggcttataaaatgctctcttgaaggcagggctgccaagagaaaaactcttcgcaggcccatttcttccagtttgctttggggaattgcctgtcggtgagctgatcgcaaggcatcgtgtccggcatacgaagtaactattaaaacggctaatcgggaattacaaaaatgattaaggattccttacaatggttgattaaagcaaagaacttacctaagagttctctttttgcctttcgacacacattactggccagcaagtagtggaagtccgtgagattcagaagattacttaacggagtattagggttagatggattcctcttcgtttcgagtggtaagtgcagcaagaaaccgtttttgcgggactggcttgaatccctcaagtgattcgaaaagtaacagagactcagtaggacgatcaaaagaagcgacaaaataatcggaagcaatcttcgtccgcgcatgcgcatttttcttacattctacgtgggattcccctcgcactatgccgtctgtaagtatatgtggcttggtctatcttgctaaactttaataaacacaatgcctaaaacgattatatattaagaaaaaaataaattgagatgcgttaataacaattgttttcacgcctttgccagtgctgccctatcaaattagcgatagctaaattgggaaccgtgtcaccctattttcttttagcgattacacattccaagcagcgttgccatgtccgataaacatcgatttttgtgccatgccagctctagttgttgtgttgttgctgttctttacggataacagttttcagcgcgaagtgcgtgcgtgtgcgtgcgtcaaaaacgcagttctgtatgtgtgttcgtgtgcttttcttatatttttctaaagtaatgttattgaactggttgcctatgtaaagagaaagccacgaaaactacaagcatttgtaaattcgttgaaaaatttgcagcttaccaattccaaaatctcaaaacagtgactgcaacaccaacaaaaacgcagtagcagcgacgtcggcagagaaacaacaagaacaacaatcttggcgttgaagcgatgtgagagagtgtaatatttgacagcatgtgagctaatcagcaaagcagcgatttctgcaaacattttgagcttcttaagggcaattaatgaacgaaaaagtggaaaactatagtaaatatatagtaagaaatatagtgagaaattttgtatttttacgttttgttctctagaaattaaaaaaaagagaggatacaaaaaatttagctgtgaccaccaagaaacgcagtcgacttcgctgccggcagaacgaagaaaaagaaagagcataatataaagcagaaaaaccagattttaatgtctaaattttaaagattaaatgttttattttgccttatgtttgcccatttatactcaaaaatatcggtgtcaaaatagttgcaaattcagaacagcaaagcaacaacaaaggctgctgcttgtacgaccgatgcacaaatcttgtcgggaaaaatagggttctgaaagcgaaattatgtttttattggcttaaagatggaaaattgactcctgaaatcgaaaatcaaagaaactaatacgcaaag

SEQ ID NO: 5534 - DNA, 1307 bp, DROSOPHILA
aacaattgttattaacgcatctcaatttatttttttcttaatatataatcgttttaggcattgtgtttattaaagtttagcaagatagaccaagccacatatacttacagacggcatagtgcgaggggaatcccacgtagaatgtaagaaaaatgcgcatgcgcggacgaagattgcttccgattattttgtcgcttcttttgatcgtcctactgagtctctgttacttttcgaatcacttgagggattcaagccagtcccgcaaaaacggtttcttgctgcacttaccactcgaaacgaagaggaatccatctaaccctaatactccgttaagtaatcttctgaatctcacggacttccactacttgctggccagtaatgtgtgtcgaaaggcaaaaagagaactcttagttacttcgtatgccggacacgatgccttgcgatcagctcaccgacaggcaattccccaaagcaaactggaagaaatgggcctgcgaagagtttttctcttggcagccctgccttcaagagagcattttataagccaggatcaactggccagcgaacagaatcgtttcggggaccttctccaggggaatttcatcgaggactatcgcaatctgagctacaaacacgtaatgggattaaagtgggtctctgaggagtgcaaaaagcaggccaagtttatcattaaactggatgatgacatcatttacgatgtgtttcatctgcgcaggtatttagagaccctcgaggtgcgcgaacctggactggccacatcaagtactttgttatctggctacgtactggatgccaagccccccattcgccttcgagccaataagtggtacgttagcaaaaaggagtatcctcaggctttatatcccgcctatttgtcgggctggctttacgtgaccaacgtgccaacagccgagaggattgtggcggaggcggagaggatgtcatttttttggatcgatgacacctggttgactggagtagtaaggactcgtttgggtattccccttgagcgtcacaacgactggttttctgccaatgcagagttcatcgactgctgtgtgcgagatctcaagaagcacaactatgagtgcgagtactccgtgggacccaatggcggtgacgaccgactactggtggaatttctgcataacgttgagaagtgctactttgatgaatgcgtcaaacggccggttggtaagtcgctcaaagagacctgtttagcggcggccaaatctcgaccccctaaacatggttttcctgaaataaaagcgttgcgactcaggtga

SEQ ID NO: 5535 - protein, 384 aa, DROSOPHILA
MRMRGRRLLPIILSLLLIVLLSLCYFSNHLRDSSQSRKNGFLLHLPLETKRNPSNPNTPLSNLLNLTDFHYLLASNVCRKAKRELLVTSYAGHDALRSAHRQAIPQSKLEEMGLRRVFLLAALPSREHFISQDQLASEQNRFGDLLQGNFIEDYRNLSYKHVMGLKWVSEECKKQAKFIIKLDDDIIYDVFHLRRYLETLEVREPGLATSSTLLSGYVLDAKPPIRLRANKWYVSKKEYPQALYPAYLSGWLYVTNVPTAERIVAEAERMSFFWIDDTWLTGVVRTRLGIPLERHNDWFSANAEFIDCCVRDLKKHNYECEYSVGPNGGDDRLLVEFLHNVEKCYFDECVKRPVGKSLKETCLAAAKSRPPKHGFPEIKALRLR

SEQ ID NO: 5536 - DNA, 3409 bp, DROSOPHILA
gccgtaatcagggcaaactgtacggcttcctaaaccgcgtcatcgagttcaaggagcaatttccactgttaagtttccgccacttgtgaccttttattttttagtttcccatcaatttttttaataaaatttatggaaaaatgaagtagcactacgtttttctaacgaagctttctttaggaattatggacatggcgaatttaaagtaacttgttttagcatttcacatagtttatttcaaaaattctctgtggtgtaaatgatcttggatctggtagctgcaccatcggctgcttcttatcctggtggccactgcatctggcggccgccgaggaagtgcaaatgcaagtggtaaactgactgggcgccgtgcttgccattgttgatgaccacgcggtagccatccgcgaggccgagctccttggccaccttgcggcccaccagcatgagatgtcccagcagatcggcatctccatcctcggctagcgagagttgggcaattggcttgcgaggaatcacgaggaagtgggttggtgcctggggcgccacatcgtggaaggcaacgcactgtgaaagattcgataggtaacatctttttctagcaaccaaatggactgcgatctcactttatcatcctcgtggataaatttgcatgggatctccttgcgcaaaatcttgccgaaaatggtgtcttcactggcggctgccgtttgcgatttttccacttcgcttgccattctagcactgcagcttgctatttggcgagagctgcagcgtaaatacagtatataatcgcggcactttagataattaagccaatttcgcacgaactcacctgaaaacacgaaagaaattccggccggttgacaagaacatcgaaatagcgctgccaacttggttttcagacaattcacacagagcggcaaatttagggtattcgaatgctctcacacctgcgtcgctataatgttatttattatttaaaaaaaacatcaacaaattattacagggaaatgcaaaagtatttagtgccatagatcgctttaattaattagggctgtagggctagtgaaaattcaattcaaaggaggtgcacataggtggactttgaaccctgctgcaacatatggaaatcatagagatcttcaaaccagaaaaactactcttttgatcgcaagatcaagttgctccgtggcaatatttttgtgatatcagtgcagtccagtatctttatctggagaatcactgcatctgtgggaacatcaacagcttgtgacgtaatgttgccgcgctccttatcgctatagaatgctcaagattagttcgaaactatcggctaggtgcaaattccaataatccacttgacttgccagaaaacagcaacactagttccgaaatcgagcagctgccggccgttaaggtgaaggtgaaggaggagcagagcaatagcaacctgtagccatgaccaccacggagaacgtgtccacggagcgcaaagcgaatccagtgaagtccttcctgaccggcggattcggtgggatctgcaatgtgctctctggccatccgctggacaccatcaaggtgcgcctgcagaccatgccgcgtccggcgccgggtgagcagcccctgtaccgcggcaccttcgactgtgcggccaagacgatcaaaaatgagggcgtccgcggtctgtacaagggcatgtccgcaccgttgacgggcgttgctccgatctttgcgatgtgcttcgccggctatgcgctgggcaagcggctgcagcagcgcggcgaggacgccaagctgacctacccgcaaatcttcgtggccggctccttctccggcctgttctccaccctgataatggcacccggcgagcgcatcaaggtgctcctgcagacgcagcagggtcagggtggcgagcgcaagtacaacggcatgatcgactgcgccggcaagctatacaaggagggtggacttcgcagcgttttcaagggcagctgcgccacaatgctcagggatttgcccgccaacgggctgtacttcctggtctacgaggcgctgcaggatgtggccaagtcgaagtcagagacgggacaaatcagtactgcctcaacgattttcgcaggtggagtggcgggcatggcctactggattctgggcatgccagccgacgtgttaaagagccgcctacaatcggctcccgaaggcacctacaagcacggcatacgcagtgtcttcaaggatctgattgtcaaggatggacctctggccttgtaccgcggcgtgacgcccatcatgctccgagccttcccagccaacgctgcctgcttcttcggcattgagttggctaacaaattctttaacatcgtagctccaaatttctagtttgtctaataaagaaagtgcctcgctaaaatgtttttacaacttgaagaaaactagctatatttgtgtgcccaattcaaaactttagagcttaactaaatctaaacgaaatactgcggcttgcgcatggtgatgccgtggtccgcgagtgccggcaccaggtcctccatggccagcgtgtacttcctgtccttggggtttttcttgtccttgctggaactgtgtccgctggaatgctggatgttcgtggtgcgcgtcttgcagtgctgcagtgcgtcgttggcaatatccgagatgaacttctgcgcggacaccgagacgaggcgcactatcttggggtccactgtgcagaagccagcctgcagatttaatccaatattagaaatgctacaaagaatagtttccggtatatagctaccgttttcaagatgtgcatggtgagggcgtctggtatggtgggcgagtagtcctccagctgctttatcagctcatccatctccgattcctccgtcgtcagaggaacctcctccacgtccggttgctcctcgtcggaatgcagttcggactgcattagtggcgagtctatatcctcctcctcggtgtccgtggccgatgttacggattctgcgggtgtaacactgatgtcctcgccatcggaagccattgttttccactttttaattgtttatttccagaaatttgttatctcagctggcgtgtatatgtgtgtatgtttatattgtaatcgatgacgaaccgtaagaagaatcgatagcactggcagcaacaatacggaataattcgataactagcatctcccatcactacgtctgcactgtgtttaatttgtattgtacacttttttcgatggtgggctccaatttcggaattatttaccacaacagcgccggtggcgcaagcagtcatggacaatcctcgggaggaggtggcggtggagatcgggataggaccacaccatcttcgcatctcagcgacttcatgtcgcagctggaagattatactccat

SEQ ID NO: 5537 - DNA, 1409 bp, DROSOPHILA
ttattacagggaaatgcaaaagtatttagtgccatagatcgctttaattaattagggctgtagggctagtgaaaattcaattcaaaggaggtgcacataggtggactttgaaccctgctgcaacatatggaaatcatagagatcttcaaaccagaaaaactactcttttgatcgcaagatcaagttgctccgtggcaatatttttgtgatatcagtgcagtccagtatctttatctggagaatcactgcatctgtgggaacatcaacagcttgtgacgtaatgttgccgcgctccttatcgctatagaatgctcaagattagttcgaaactatcggctaggtgcaaattccaataatccacttgacttgccagaaaacagcaacactagttccgaaatcgagcagctgccggccgttaaggtgaaggtgaaggaggagcagagcaatagcaacctgtagccatgaccaccacggagaacgtgtccacggagcgcaaagcgaatccagtgaagtccttcctgaccggcggattcggtgggatctgcaatgtgctctctggccatccgctggacaccatcaaggtgcgcctgcagaccatgccgcgtccggcgccgggtgagcagcccctgtaccgcggcaccttcgactgtgcggccaagacgatcaaaaatgagggcgtccgcggtctgtacaagggcatgtccgcaccgttgacgggcgttgctccgatctttgcgatgtgcttcgccggctatgcgctgggcaagcggctgcagcagcgcggcgaggacgccaagctgacctacccgcaaatcttcgtggccggctccttctccggcctgttctccaccctgataatggcacccggcgagcgcatcaaggtgctcctgcagacgcagcagggtcagggtggcgagcgcaagtacaacggcatgatcgactgcgccggcaagctatacaaggagggtggacttcgcagcgttttcaagggcagctgcgccacaatgctcagggatttgcccgccaacgggctgtacttcctggtctacgaggcgctgcaggatgtggccaagtcgaagtcagagacgggacaaatcagtactgcctcaacgattttcgcaggtggagtggcgggcatggcctactggattctgggcatgccagccgacgtgttaaagagccgcctacaatcggctcccgaaggcacctacaagcacggcatacgcagtgtcttcaaggatctgattgtcaaggatggacctctggccttgtaccgcggcgtgacgcccatcatgctccgagccttcccagccaacgctgcctgcttcttcggcattgagttggctaacaaattctttaacatcgtagctccaaatttctagtttgtctaataaagaaagtgcctcgct

SEQ ID NO: 5538 - protein, 306 aa, DROSOPHILA
MTTTENVSTERKANPVKSFLTGGFGGICNVLSGHPLDTIKVRLQTMPRPAPGEQPLYRGTFDCAAKTIKNEGVRGLYKGMSAPLTGVAPIFAMCFAGYALGKRLQQRGEDAKLTYPQIFVAGSFSGLFSTLIMAPGERIKVLLQTQQGQGGERKYNGMIDCAGKLYKEGGLRSVFKGSCATMLRDLPANGLYFLVYEALQDVAKSKSETGQISTASTIFAGGVAGMAYWILGMPADVLKSRLQSAPEGTYKHGIRSVFKDLIVKDGPLALYRGVTPIMLRAFPANAACFFGIELANKFFNIVAPNF

SEQ ID NO: 5539 - DNA, 4520 bp, DROSOPHILA
ctcgacaatgtcgctgtattcctccagcctgccgatgaacaatggcgttggtggtggcgagggctttggcacgatgttccccaagaatctttaccggcttctggccgtggtggtgcactccggggaggcaaacagcggtcactttgtaacctacaggcgtggctcgttgcggaacgcacatcggtatggtttccattgcctctgtgtaataattatgctaattctgtgctatccttattaggtggtactacacatcggatacaattgtgcgggaggtgagcatcgacgaggtgttgagcgtccccgcctatcttttattctacgatcgtggccagcagaggcagctaaatctgcgctagtcaggtgtaggtcgtcggtattattctagtccatacttttgatgtgatgaatatgaatatccgaaaccaaatccttttcgtcgaacggtggccatagcaaacacgcgtcacatttatatagatatatatacataactcatataagtacgggaacccacgatgatctgacctatactcggcgggttcatgtaatggtctccgcataatccaaactctgtgtacggcttattgcatataggaactccctatcgtaacagagagctcgactcttcatttgttatctatgcatttaagattttttaagaattccaaattcatgccgtgcttttagctgtctgtatttagcaatgtacacaaatcaactaccaataattgtttgcgcgttaattctgtaggatagatgttcaataaaaatttcgaaatcagttccaattttttaaagtgctttctctgaaggttttggataaataaaatatattataatactgaatgcacagaaaaatccagaagggtaatttcaaaaagggtgcaaagtattgtacatcgataaccaccgattaataatcgattatctggacatgttgtgataaatcagggttgcatttcacgccgtatttcgtttcatttccctaaagagtgaacaaaaatacgcaattggacaaatctagtggctaagaatgtctgaagcggagctggaacagacacccagcgcgggccacgtgcaggagcagccgattgaggaggagcatgagccggaacaggagccaaccgatgcgtacacaattggcggtccgccgaggacgccggttgaagatgcggcggccgaattgagcgccagtctagacgtcagcggctcggatcagtcggcggagcagtcgctcgacctcagcggtgtccaagcggaggccgcggcggagtcagagccaccggcgaagcgccagcatcgcgacatcagtcccatttcggaggacagcacgccggcgagcagcacatcgactagttccaccaggtcgtccagctcctcccgctacgacgatgttagcgaggcggaggaggcaccaccggagcccgagccggagcaaccacagcagcagcagcaggaggaaaagaaggaggacggtcaggatcaggtgaagtcaccaggtccagttgaattggaggcacaggagcccgcgcagccgcagaagcagaaagaggtggtggaccaggaaattgaaaccgaggatgagccctcctccgatacggtaatctgcgtggccgacatcaacccctacggcagtggttccaacattgacgacttcgttatggatcccgatgctcctcccaatgcaataatcaccgaggtggttaccattccagctcctcttcatctcaaagggacacaacaactggggctgccattggctgccccaccgccaccaccacctcctccagcagcggaacaagtccccgagactcccgcctcgcccacagatgacggcgaggaaccaccagcagtatatttatccccctacatacgctctcgctacatgcaggaatcgacacctggcctgcccacccgcctggcgccgcgtgatcctcgccagcgcaacatgccgccgccagccgtagttctgcccattcaaaccgtacttagcgccaacgttgaggccatttctgacgacagcagcgaaactagcagcagcgatgacgatgaagaggaagaggaggacgaagatgatgccttgaccatggagcacgacaacacttccagggagacggtcatcacaacaggtgaccctctgatgcaaaagatcgatataagcgaaaatcccgacaagatctattttattcggcgcgaggatggcaccgtgcaccgtggccaggtgcttcagtctcgcaccactgagaatgcggccgctcccgatgagtactacgtccactatgttggtctcaatcgccgcctggacggatgggtgggcaggcataggatctcggacaatgcggatgacttgggcggtattaccgtgctgccagcgccaccattagcccccgatcagccaagtactagcagggaaatgctcgcccaacaggccgccgcggcggcagctgcctcatccgaacggcagaagcgtgcggccaacaaggattactatctgtcctattgcgagaacagtcgctatgactacagcgaccgcaagatgacacgctaccagaagcggcgctacgatgagatcaaccacgtgcagaagagccacgctgagctgaccgccacgcaggcggcgctggagaaggagcacgagtccattacgaagatcaagtacattgataagctgcagtttggcaactacgagatcgacacctggtactttagtcccttccccgaagaatatggcaaggcacgtacgttatatgtttgcgagtactgcctaaagtacatgcgcttcaggtcgagctatgcctatcatctgcacgaatgcgaccgcaggcgtccgcccggaagagagatctaccgcaagggcaatatatccatttacgaggtgaacggcaaggaggagtcactatactgccaacttttgtgtctgatggccaagctctttttggaccacaaggttctatacttcgacatggacccgtttctcttttacatcctttgcgagacggacaaggagggcagtcacattgtgggctatttctccaaggaaaagaagtcgctggaaaactacaacgtggcctgcattctggtattgccgccgcatcagcgtaagggatttggaaagctactaatagcctttagctatgagctgtcgcgcaaggagggcgtaatcggtagtccggagaaaccgctctcggatctgggtaggctgagctatcgcagctattgggcatacacgctgctggagctgatgaaaacccgctgcgctccagagcagatcacaatcaaggagctgagcgaaatgagtggcatcacccacgacgacattatctacacgctgcagtccatgaagatgatcaagtattggaagggccagaatgtcatttgcgttacgtccaagaccattcaagaccacctccagctgccgcagttcaagcagcccaagctgaccatcgacaccgattacctcgtctggagtccgcaaactgcagcggcagtggtcagagctccgggaaattccggctagcatacggaacctggagaccccgttctgctatcatcgcatataattgttattgacgatgacgattaggttttttttttttatttttttttaaagaaagcgtaggaataagctattctattgcacccctccaaacgaaaaatgtatagtcatatatctaaatggaaccatcagaaggttcaatgtaatacttaacatttggtttacaattttttttttttatagttaaggagttttacggataggctgttgtaactcttaatgatagaaccaaatgtctaattcgtttggctaatgtttttggagagggaatttggaacaaccatttaaaaattttaaaaacttctgtgttcttgaaatatatatctttaactactttatctcgaaaaactctggacttgttaaaaaccaaataaacttccacagcagccgatatgccgacgcctgaagagaatacatctctatgaactccttacacgtaagatagcataatctctccacggtacatttttatacactataattaaggaagagaatccataatatcttttaggctacacattaggttaagttcagaaagaactgaacgattcctactgactaatgaacaataataaatgatttaaactgtaaaaaagaaaaactccaatctgagaacatgatgtactttctcaaataaatgcgtcgttacattaacgtcaaaaagaggaaaaattaaataaatatttacaacgacaggttattcttttcattatttttgcaacacatttcttgtaggttagcttaatatgtatattttgatataataaaaaatatatatagaaatatcgaaaacattggaaaaacaagtttaaaatttcgagcattaaaatccattgctaaccctctcctccctagcgtcataagcaatcggttatcgaggttatcgataacgcccgcatcgatacaattccgccggcttgtccgattcgtgttgttgtgattcgggatatatacaggatat

SEQ ID NO: 5540 - DNA, 2520 bp, DROSOPHILA
caaaaatacgcaattggacaaatctagtggctaagaatgtctgaagcggagctggaacagacacccagcgcgggccacgtgcaggagcagccgattgaggaggagcatgagccggaacaggagccaaccgatgcgtacacaattggcggtccgccgaggacgccggttgaagatgcggcggccgaattgagcgccagtctagacgtcagcggctcggatcagtcggcggagcagtcgctcgacctcagcggtgtccaagcggaggccgcggcggagtcagagccaccggcgaagcgccagcatcgcgacatcagtcccatttcggaggacagcacgccggcgagcagcacatcgactagttccaccaggtcgtccagctcctcccgctacgacgatgttagcgaggcggaggaggcaccaccggagcccgagccggagcaaccacagcagcagcagcaggaggaaaagaaggaggacggtcaggatcaggtgaagtcaccaggtccagttgaattggaggcacaggagcccgcgcagccgcagaagcagaaagaggtggtggaccaggaaattgaaaccgaggatgagccctcctccgatacggtaatctgcgtggccgacatcaacccctacggcagtggttccaacattgacgacttcgttatggatcccgatgctcctcccaatgcaataatcaccgaggtggttaccattccagctcctcttcatctcaaagggacacaacaactggggctgccattggctgccccaccgccaccaccacctcctccagcagcggaacaagtccccgagactcccgcctcgcccacagatgacggcgaggaaccaccagcagtatatttatccccctacatacgctctcgctacatgcaggaatcgacacctggcctgcccacccgcctggcgccgcgtgatcctcgccagcgcaacatgccgccgccagccgtagttctgcccattcaaaccgtacttagcgccaacgttgaggccatttctgacgacagcagcgaaactagcagcagcgatgacgatgaagaggaagaggaggacgaagatgatgccttgaccatggagcacgacaacacttccagggagacggtcatcacaacaggtgaccctctgatgcaaaagatcgatataagcgaaaatcccgacaagatctattttattcggcgcgaggatggcaccgtgcaccgtggccaggtgcttcagtctcgcaccactgagaatgcggccgctcccgatgagtactacgtccactatgttggtctcaatcgccgcctggacggatgggtgggcaggcataggatctcggacaatgcggatgacttgggcggtattaccgtgctgccagcgccaccattagcccccgatcagccaagtactagcagggaaatgctcgcccaacaggccgccgcggcggcagctgcctcatccgaacggcagaagcgtgcggccaacaaggattactatctgtcctattgcgagaacagtcgctatgactacagcgaccgcaagatgacacgctaccagaagcggcgctacgatgagatcaaccacgtgcagaagagccacgctgagctgaccgccacgcaggcggcgctggagaaggagcacgagtccattacgaagatcaagtacattgataagctgcagtttggcaactacgagatcgacacctggtactttagtcccttccccgaagaatatggcaaggcacgtacgttatatgtttgcgagtactgcctaaagtacatgcgcttcaggtcgagctatgcctatcatctgcacgaatgcgaccgcaggcgtccgcccggaagagagatctaccgcaagggcaatatatccatttacgaggtgaacggcaaggaggagtcactatactgccaacttttgtgtctgatggccaagctctttttggaccacaaggttctatacttcgacatggacccgtttctcttttacatcctttgcgagacggacaaggagggcagtcacattgtgggctatttctccaaggaaaagaagtcgctggaaaactacaacgtggcctgcattctggtattgccgccgcatcagcgtaagggatttggaaagctactaatagcctttagctatgagctgtcgcgcaaggagggcgtaatcggtagtccggagaaaccgctctcggatctgggtaggctgagctatcgcagctattgggcatacacgctgctggagctgatgaaaacccgctgcgctccagagcagatcacaatcaaggagctgagcgaaatgagtggcatcacccacgacgacattatctacacgctgcagtccatgaagatgatcaagtattggaagggccagaatgtcatttgcgttacgtccaagaccattcaagaccacctccagctgccgcagttcaagcagcccaagctgaccatcgacaccgattacctcgtctggagtccgcaaactgcagcggcagtggtcagagctccgggaaattccggctag

SEQ ID NO: 5541 - protein, 827 aa, DROSOPHILA
MSEAELEQTPSAGHVQEQPIEEEHEPEQEPTDAYTIGGPPRTPVEDAAAELSASLDVSGSDQSAEQSLDLSGVQAEAAAESEPPAKRQHRDISPISEDSTPASSTSTSSTRSSSSSRYDDVSEAEEAPPEPEPEQPQQQQQEEKKEDGQDQVKSPGPVELEAQEPAQPQKQKEVVDQEIETEDEPSSDTVICVADINPYGSGSNIDDFVMDPDAPPNAIITEVVTIPAPLHLKGTQQLGLPLAAPPPPPPPPAAEQVPETPASPTDDGEEPPAVYLSPYIRSRYMQESTPGLPTRLAPRDPRQRNMPPPAVVLPIQTVLSANVEAISDDSSETSSSDDDEEEEEDEDDALTMEHDNTSRETVITTGDPLMQKIDISENPDKIYFIRREDGTVHRGQVLQSRTTENAAAPDEYYVHYVGLNRRLDGWVGRHRISDNADDLGGITVLPAPPLAPDQPSTSREMLAQQAAAAAAASSERQKRAANKDYYLSYCENSRYDYSDRKMTRYQKRRYDEINHVQKSHAELTATQAALEKEHESITKIKYIDKLQFGNYEIDTWYFSPFPEEYGKARTLYVCEYCLKYMRFRSSYAYHLHECDRRRPPGREIYRKGNISIYEVNGKEESLYCQLLCLMAKLFLDHKVLYFDMDPFLFYILCETDKEGSHIVGYFSKEKKSLENYNVACILVLPPHQRKGFGKLLIAFSYELSRKEGVIGSPEKPLSDLGRLSYRSYWAYTLLELMKTRCAPEQITIKELSEMSGITHDDIIYTLQSMKMIKYWKGQNVICVTSKTIQDHLQLPQFKQPKLTIDTDYLVWSPQTAAAVVRAPGNSG

SEQ ID NO: 5542 - DNA, 4009 bp, DROSOPHILA
gaatgtttgttatggaaggataaataacagatgagggagaaaagaaagcgtgacacacacacgcaccttaaaaaaaaatggagttcttgttgtttcacaacttatacactttacttcacaactgttagcgacttattattattaagtgggtttgtaggtgtactgcgacccagtcggctctattgtactactaccccttcatgactcaacgatccccctgaagtccaatgcactgtataaatgccagaattttattgtggttcaggggattctgtttctcttgatggccaagcgccatccatgcagcagaagcgacagagttcacttctgcaatgccaatttgtacaaatggctgtgaagccggcaatgccccgtaagaatgccgagtcaaaatgcgcacggtgtctagtcccgtgtgcgactagaatgcgagcataattctcaaaaactgcatcatgcccatttgcggaaaaaaacagaaaaaaagagacggatagataacggatgagggggaaaacgtgcactcagaagtgactcctcccacatacacaacacacacagtgttcactcgaaaaaatggagtttcggtcgtaaaaatggagtttcgctcctttcccatttctacagtttggtgagaaaatattacggttaaattactgacctaccttaactcgaaaaaatggaattcctgttgtttcccagttcgaatgtttgtcgaggaaagataacggataaaattacgcacgcaccgttactcgaaaaaaatggcgtttttgctgtttcccctttcgacacgcgcaaatccacaatgcgcggagctttgcttcatggcccgactgaatgaactgaactgacagcgcattaaacgccggtattattagtgtgaccaccgatgcgatagtttataataccatggtatacccaaaataaataccaaaaactaacggaaagcacatcaactgtttctgccgcataaacaaaaactgctgttcgtctaacgtgaaacacataactttgaaattattgctttgccaacaccgcccaatgattcgcaacgtagtggtgggcgtgtcgggcggcgtggacagcgccgtttccgcccacctgctggcggagcaaggattcaaggtgctgggtgtgtttatgcgcaactgggatgaggcggacgaagtgggtcgctgcagtggggaggcggatctgaaggacgccgagtgggcgtgccggcagctcggcgtggagctgcgtcaggtgaactatgtgcgcgagtactggacggcggtgttcagccagtttctggacgattaccaaatgggcttgacaccaaatccggacatcctgtgcaatcgccacattaagtttgacctctttcacaagcacgccttggaaaatctcggctacgatgccgtggccacgggtcactacgcccggaatagtctgggcaactacctggaggggattgcctccaacaacgacgcccgcttgctaatacccgccgatacgttcaaggaccagacattctttttggcaggtatttcccgaaaggctctgcaacgcacgatgttccctttgggagacttccagaagagccaggtcaaggacttggccaagaagattggcttccagcgactggccaaaaagaaggaaagcactggcatttgtttcgttggcaaacgcaacttcaaggacttcatacaggaggtaaagcacttgccgcgattgaaaaagcacatggctcaatttccttgatttcaccacggactcaaatctggtttccctccactttcagtacatcacttccaaacgtggtcccttcctagacatcgacagtggagccgttgtcggccaccacgagggcatccatcaatggactgtgggccagcggtgccgtctgagctcattccttcagccctattttgtggccaggaaagaggccgcaagcaataccatctatgtggcatctggccacaaccatcccgcccttctcagcacccacatagccgtcgatccgcccaactggctgtgttccaagtcccaacagattctttcggacactggcagcttgaggtgtcgctttcgattccagcacaccaaaccattggtggactgtcagctgagcatctctcccagtaacacttttcttgtcgagttggacgctcctttaagagctattacaccaggacaatatgccgtattctatgacgacacagcttgtttgggttcggcccgcatcctcagcgctaatcccctaaagaaaaaaaacgcacagacgcagcaagctcaagccgcaaatctggttagctaatgatgtttcctctgagccagaaaataaaccaaatgtaagaaggcagtccaactgccaacacggcatgtatagatagcatggtaaatacgttttcataaatttaagcgccgagtaaattttagacgtgaatcgacacttttaattccatggtaaacactttaatttaaatttattattctaggtcaaatttacaattagtttttgaaaaaggacattttgcattttgtggtcctgggagcaatgataaagttattaacacacaatcgtacataaatagggtttggtaaaatcttaaactaagtgtacacgtgaggtctcgcgatataaaactagcttagcacataatatgattgagcagggatgtgtcggtagcaggtagaatagaaagcggcgtggattaggctaacagcaccgtgagggagtccagaaagcgtgtgaggtcgctctgccgcagctgcaccaccgctggctcgaaaaagtcctgcaatagagcgactccactcttttgcgccgcctgctcgaaggccttgccaaagaagtttcgcggagagtcttcccttaccgggacaatgcctaccagcaagcacatgccctccgaagcgttcaggggacaacttgcgatcaacggcaagtccgaagcctgcctggctctactcgtggccacatgtccgcgcaaaagaaagcgagccaacagtccaagggcataggggtatgagaagaacgcgtgttcctcctgcagaacgtagtagaaaaaggagcccgctgaatgaacttggcgtgcctccaagctgctctgcacctgccgaaagacagcagcatgcaaaagcttcgcctggtcgatgcctgcagacagcagctgcttgtgctgacgactcaaagcatccgaggcctccagaaagcaatcctccggagtcttgtgcttcttcacggactccatgatggcgagcagggcataaacgtagtccgccgcagcatatctgctgcggtagccgtagctcagcgtaaaggtgccgtaaactatgtccgctatgtcgtacttctccgccaggcgctccaccatcgagaagaactccttgcgcaacaccaaatccatggctccgtacgtttggcgggcgtgcaccaagggaagtcccatctcgagcagcagctcgtgtaatctcttctctccgcgcagtgtccacagcttcagctggcatgaggagtagcgggaatacctacgattatactacatgattaaatggcatagaatacactgtcaatgctcacctcatggattccgtgacgggccagtggcggtacaagaccagatgcaaatcattctcgaaggttatcttggaggcactcatcgtgttctgatcattcgttttgttcgtcagtcgggacacatgcgactggatttgctccagctccaaagtatacgctccactctcgatcttgcccagcagcagctgctccgtgatgcccacaatggcccaccagagcaggtccatgttgtcttttgagagcttccaggccaactcaaaaaccatcaaagcggcggacctgccgtagtagctgaactgcgtgtactcgaacataatcctgtcgcgctcagactcccactgtcggcgggctcgctgcttcaggatgcgttgctcgtgccgctccaggcgactgagcttacggctccttggcgcctgatcctcctggtccgattccccggcacca

SEQ ID NO: 5543 - DNA, 1193 bp, DROSOPHILA
tgaaacacataactttgaaattattgctttgccaacaccgcccaatgattcgcaacgtagtggtgggcgtgtcgggcggcgtggacagcgccgtttccgcccacctgctggcggagcaaggattcaaggtgctgggtgtgtttatgcgcaactgggatgaggcggacgaagtgggtcgctgcagtggggaggcggatctgaaggacgccgagtgggcgtgccggcagctcggcgtggagctgcgtcaggtgaactatgtgcgcgagtactggacggcggtgttcagccagtttctggacgattaccaaatgggcttgacaccaaatccggacatcctgtgcaatcgccacattaagtttgacctctttcacaagcacgccttggaaaatctcggctacgatgccgtggccacgggtcactacgcccggaatagtctgggcaactacctggaggggattgcctccaacaacgacgcccgcttgctaatacccgccgatacgttcaaggaccagacattctttttggcaggtatttcccgaaaggctctgcaacgcacgatgttccctttgggagacttccagaagagccaggtcaaggacttggccaagaagattggcttccagcgactggccaaaaagaaggaaagcactggcatttgtttcgttggcaaacgcaacttcaaggacttcatacaggagtacatcacttccaaacgtggtcccttcctagacatcgacagtggagccgttgtcggccaccacgagggcatccatcaatggactgtgggccagcggtgccgtctgagctcattccttcagccctattttgtggccaggaaagaggccgcaagcaataccatctatgtggcatctggccacaaccatcccgcccttctcagcacccacatagccgtcgatccgcccaactggctgtgttccaagtcccaacagattctttcggacactggcagcttgaggtgtcgctttcgattccagcacaccaaaccattggccttgccaaagaagtttcgcggagagtcttcccttaccgggacaatgcctaccagcaagcacatgccctccgaagcgttcaggggacaacttgcgatcaacggcaagtccgaagcctgcctggctctactcgtggccacatgtccgcgcaaaagaaagcgagccaacagtccaagggcatag

SEQ ID NO: 5544 - protein, 382 aa, DROSOPHILA
MIRNVVVGVSGGVDSAVSAHLLAEQGFKVLGVFMRNWDEADEVGRCSGEADLKDAEWACRQLGVELRQVNYVREYWTAVFSQFLDDYQMGLTPNPDILCNRHIKFDLFHKHALENLGYDAVATGHYARNSLGNYLEGIASNNDARLLIPADTFKDQTFFLAGISRKALQRTMFPLGDFQKSQVKDLAKKIGFQRLAKKKESTGICFVGKRNFKDFIQEYITSKRGPFLDIDSGAVVGHHEGIHQWTVGQRCRLSSFLQPYFVARKEAASNTIYVASGHNHPALLSTHIAVDPPNWLCSKSQQILSDTGSLRCRFRFQHTKPLALPKKFRGESSLTGTMPTSKHMPSEAFRGQLAINGKSEACLALLVATCPRKRKRANSPRA

SEQ ID NO: 5545 - DNA, 3121 bp, DROSOPHILA
attgaccaggtcggccagaaagcgcagcgagtagcgggcggcatcccagcggcacatcttgagggactccttgaaggtcttcaccatgtgatccacgaactcgccgccaaacttgtagttcttggcattgagcaggcccaccaacgtggtgtaaacggtacacttctctggcattcgcacggcgcagtcggacaggatgcgcaggatcttcaggcgaaacgtgcccagatcggcctccagaacggagacgagtccctctaggttcgattccacggaggaggtgctacgctcgcccacccgcagtatcagcgactccagacgatcctcgatctcctggttttcggacacacgtctacgcttgttgcgccgatgatctgcaattaaatgcccccataaatgctttgcgttcatgattacatcgatgcccacttaccatagccctcatcctccgtgtcgtgagccctcctgcgactcatcttcccgtgaattttctgtgaattttgcggaaaacaccgattaccgattggtccttggccaccggcagacagaaaagcacgctgatgggtacacctcttggacctggactttttcggggatcctggacaggatacgcttgacggatgggccttgttggtgcgtctagtatttcactgcgagcgtcaattagcttgccaactttcaaaacagctttgtcacaattttcacaaaaaacgcgatgcgatgctattttttttttttgccaaagaactaaagatgtgccgccatcgatggcagggtttatcgataacagcggcggcgtaagcggcggactgaaaatggggcctgaataaacgttttctttggcgccatatgcgcagaattgcggcatactcaattaaccaaaacataccactgactgacttacaataaaaatctgttgaatgccactgctacacaactatcgatagaaacggttgccggcaagtgctgcaatctagtcttatgctgcctatcgcttttgcccatctatacattccaccgcggaattttccttgcattttatgatgagctttccacgcatgttatcactgtgccttagcgtgcttgtaatactgccgcttcccctccagtcggtggatcccctgaccattggtgccgttggcgccgtggcccttggggcgtacttcaaagaacatacatattgccggtttgccgaatgctgcgatgaccgaaacattccggcgagaatagatggtgagtgagtagttttgtatgcaacaaaatgactaaccagtacagtgggtaattacagaattagaaagatccctggaacgcaccctcattggccagcacatcgtgaggcagcatatcgtccccgcactgaaggcgcacatcgcttcgggcaataagtcacggaaaccgctggtcatcagctttcacggccagcccggtacgggcaagaattttgtggctgagcaaattgcagatgctatgtatttgaagggctccaggtcgaactatgtaaccaagtatctcggacaagctgactttcccaaggaaagtgaggtgtctaactatagggtgaaaatcaataatgcggtgcgcgataccttgcgtagctgcccgagatctttgttcatcttcgacgaggtggataaaatgcccagcggagtattcgaccagctcacctcgctggtggactacaacgcctttgtcgatggcacggataacacaaaggcaatcttcatctttctctcgaacacggcgggcagtcatatagccagtcatctgggtagtgtgatgaagaatggtaggctgcgcgaggacacacgactgagtgactttgagccccttttgcggaaggccgcctataacatggatggcggtatgaaaaagaccaccatgattgagtctcatgttatcgatcatttcattccgttcctgccgatggagaaggcgcatgtgatcaagtgcctggaggcggagcttttaaggtggcggcgcgatcctaagcaagcgaacaaccaaaaaatcattgaggacataataaactcctccattagttacgatcgcacgcacagcttgttcgccatttcgggctgcaagacgctggagaagaaggtggccatggccatttactgagaaaggaccgaccgactccacattttaatgcttagtttgggtttcggtttgtatttaaaaaactattttttcggaataaagaaaacaaattttaactaccagggatttagccacttgaggcgggcatctttgcgcagcagatcggtatccagtcgcttgggctgctcgtcgtaatcctggcgagccgccaggcgggtatcgatgggtcccaggtccttggttaccaggcactcgccgttctccttgagtatcgtatgccggacatcctgggcagtgggctctccgtaggggaacgtgaccggcgtaaccttaattagatgcttgatcttccacaggcgggcattgttctccggtatgttcttgacgacagtaaaatcgctctgctttccgtctagtcccagatctttgaggattcgattctcccagtagggattgccctttagcggcttgatgcgctgcacccggaaaagtttcgccggctccacgggtggatcctggtgatcgggagtcctgagcgggatagatttagcattaacaaatgctggatttcgtgtgttttccttttatacactgcacacgtgaatacgaacctgggatagtaggtgataccctcaaatttctggccatttttgtagaggaacttcttgttgtgctttccgtagctgcgcaccgaacatgcggtgctcctcagtggattcagcagccttcccaggttcatcttaattgttttcccccctttgtaataaaattaaatgcaaaacgcttatgaaataattgatgtttccccgacgataacgattacacagacatctggttaactagttgcctatcgatgggcagcatggatactgccgttatgtaaaccaatgttaaccgcttgctgttaagcgatacaattcaaatgcaaaggcggcaaagttaaaagtgataatttatcatgtacaaactgaagataatttatcatttacaaactgaagatagcgaaaacattatcaataag

SEQ ID NO: 5546 - DNA, 1063 bp, DROSOPHILA
cccatctatacattccaccgcggaattttccttgcattttatgatgagctttccacgcatgttatcactgtgccttagcgtgcttgtaatactgccgcttcccctccagtcggtggatcccctgaccattggtgccgttggcgccgtggcccttggggcgtacttcaaagaacatacatattgccggtttgccgaatgctgcgatgaccgaaacattccggcgagaatagatgaattagaaagatccctggaacgcaccctcattggccagcacatcgtgaggcagcatatcgtccccgcactgaaggcgcacatcgcttcgggcaataagtcacggaaaccgctggtcatcagctttcacggccagcccggtacgggcaagaattttgtggctgagcaaattgcagatgctatgtatttgaagggctccaggtcgaactatgtaaccaagtatctcggacaagctgactttcccaaggaaagtgaggtgtctaactatagggtgaaaatcaataatgcggtgcgcgataccttgcgtagctgcccgagatctttgttcatcttcgacgaggtggataaaatgcccagcggagtattcgaccagctcacctcgctggtggactacaacgcctttgtcgatggcacggataacacaaaggcaatcttcatctttctctcgaacacggcgggcagtcatatagccagtcatctgggtagtgtgatgaagaatggtaggctgcgcgaggacacacgactgagtgactttgagccccttttgcggaaggccgcctataacatggatggcggtatgaaaaagaccaccatgattgagtctcatgttatcgatcatttcattccgttcctgccgatggagaaggcgcatgtgatcaagtgcctggaggcggagcttttaaggtggcggcgcgatcctaagcaagcgaacaaccaaaaaatcattgaggacataataaactcctccattagttacgatcgcacgcacagcttgttcgccatttcgggctgcaagacgctggagaagaaggtggccatggccatttactga

SEQ ID NO: 5547 - protein, 339 aa, DROSOPHILA
MSFPRMLSLCLSVLVILPLPLQSVDPLTIGAVGAVALGAYFKEHTYCRFAECCDDRNIPARIDELERSLERTLIGQHIVRQHIVPALKAHIASGNKSRKPLVISFHGQPGTGKNFVAEQIADAMYLKGSRSNYVTKYLGQADFPKESEVSNYRVKINNAVRDTLRSCPRSLFIFDEVDKMPSGVFDQLTSLVDYNAFVDGTDNTKAIFIFLSNTAGSHIASHLGSVMKNGRLREDTRLSDFEPLLRKAAYNMDGGMKKTTMIESHVIDHFIPFLPMEKAHVIKCLEAELLRWRRDPKQANNQKIIEDIINSSISYDRTHSLFAISGCKTLEKKVAMAIY

SEQ ID NO: 5548 - DNA, 6364 bp, DROSOPHILA
tttcgggcgaagttgcgattactcaccaacttgggcgggttggcaatgtccaggtagatgttggccatgctggccacctgtcccgcctgcgacagggacaccagcttaagggctacaaaaaagcccggcttgtccagaaagcccttgccgctcggatcagacaggtcccagatcctgcttagcacaacgtcgctaaggcccgacttcttgagaaacttggccgcagtcatggcctcgattgcccctgtgcctttggggtcaatctgcaaaaatcgatagagggtgggtgtggatacggatgctcaacattggccgccatcctggtaacagtgcggcttggaggcgtggtgcgcttaccagtttgtagtaggcctcgtagacgcctatgtgcttcccgcacaccctcgcaaagtccacattcatggtgtggagtctactggcaattggttccgactagcagtgcaaaaacgcgtaagcgtaagcccgttatcacaaaatcgattttttcttcccaaggggcggataagctgctcttagtcagccgtcggcggagtcctgctgcctagcacctgtgcacctgcgacgagacacttgctggagccacttacaggtgagcttggcgcattgcggcccctaatttagctactctcgaattttaaaaagcctaaatttgcttttttgctcggtggatagtgtgaccgttcggataacgattaaaaataccgtacggctgatgattaagtataccactaggtaaaatgcgttaaaataccacataaattaataccgttaaattaacgaacattattatttttttaaagtataattttttaaaattcatttgtctatatttattcctttaacactaaacgtgaagaaaattgtgtactttgaaacggacggtgcagaacagcagtagcttataaaaatgcaatgtttccgttaccctaacggaacagataatgtttaaagtttaaatttttaattctaattcttctttaatgagtatatttcctgtatggatctctaacttaagctagaacttagagcagacgaaggcggcaattgggggccccgcactggcagtacaacaccttgccgggcaccacgcccacctcgtaattgtagttccaagtcagctcggtgccggagcggatgtgcgcggccgagaagaaggcaacccaggggaaacgcaggtcgtgagtatccacgaacacgttctgcacgaagagattggggctgcacgagtgctgcgggagaagaagagaatcagccacacggcaaaataacaaaaaacttccaactcacgttgaaatagcgtccaaggttgcccgttgtcttggcgtccatgatgtagggcgcctcgtccttgccgaaaagcctccgcaccgagttctcccgcaccgtctcgtccagatcagcatttgggttaaagttgatcaccgcacgctcctgcgagtccaactcgctgctctgagtggagctgttctgcgtggagccgcttctggaagagcgcttgattttgcgctggtagtgatagtttggccggaagtcgtcatcgtcctcggcatcgggtcccccgttgtcctcctcggcgtccgggtccgagtggtccacctccgactcgtatccctcttttaactgttcagcgacctctatgtaatctaagtccgcgaaatactcgtcgccggcgtcctgtccgccttcgttggccatcgtctccgtgagcagatggccggcgtaaatacagatgaaagcacccttggggatgtcgttaacgcagcgcaagccccatccacgatttgaggtcttgaacacctgcagtttcatctctagggagaactgcaccacccggttcaggcaattcttcttgcacttgcagcgcgagttgcactcgtagatgccggtgggcacgtgctcgtggagccgcttgtactggtagcctatctcctcgatgggtttcttcgggttacagtaccgcacgcccgccaccgttagctgccaacaggcgcactttgacttgtcctgatagggatacacaaaatagtgggcggctgggtataatttgaggtaatcagatctgtaagacgtcttaccgagcagtcgtcctcgcagtcgcagcacaagaggaactcctcgtccagattcagatgaacaccctcggtagggatgcgctgcttcgcgtaggtgcatgggggcggcagggtgttgtcgtagtagtttaccagcggaatcgccatcttctcctgcccctttgaaatgtccgtgtccttcacgatcgagggatcaatggagtactcggccagacacttgaggtcgggcgtaaagtcaaaattgtctacgttcaacacattttcagtagctcgaaggtacctgtgaacttcggccaggctgcgcaagcttttgccacaaggtcccttgtataccacagacttcttggtcttctgccgcatgacaagacgttcccagccagaaagcagaggcttcgctaacggactgtagctgtccagacggtgaacgatcttaaagaggcagttcgggctgcactcgtggcacttgtacattttgggaggcagattccgcttggctgtaaagtagactacatggcccttgggcctgttctcgtcgtccacgtagattgtcgagttgtttaggtgtcgcacagcacttgcgctattactggtgctgacacctcctgcattggtgcgtcctccggctggggttgctgccgaagatgcagccgctaatgcgttattttgggcggaggcgctgctcttgcgggcaaaggcacgcatctgctggttcaccttgctgctggactccatctccttggtgtaccgaataaagggctccgtgcgctgaaaaagaaagacattttgtagttaggaccgcaggatgaatcgacacgatgcttactcttgggacacgcagctgctgtgcgcttgaactgttcatattgttctgggtttccctgaagacaggacccaagcgcaatgaacccctgtatatccactccgtatggtttttgtcgccctcaaactgcatcaacaccaagctgcagtcgatgtcaatgacgcgcgcgtacagccaggtcccgttcgattcagtggtcatactttgtccccgggtgcattgcaccattggacgatccacggagtacttctccacgtacttctgtatgaaatcgcgcgatgcggcgtgtacgtcctcccacactttctcggaagcctggcaaactagacggacatcgcggtgcggaacgtactgagtgtacccatcgtcgtagaatattaggtagcggtagcgattggcctgcttcaacggctcagcgatgatgcctggataaaaggcgctctgcaccacgcccttatccttgccccgcgacaaagtggtgccatcgaagtacgcaatcacgcgggtacctagtgcacaatgagtgggttagtttatagattgataaataaccggtctattgggaactaaccaatggtcagtcgcactggcggtggttcgaagtaggcaatgtgcttggccgtcactgtcttgatcatctggtacggagtgttgaggtacctaatcttgtagctcttcatcgtgtttccgttgatggcggtgctctctgtaaactcgattacctttatggacacccagctggcaatagccttgttcttaacagcgtagtatgtctctcccaactgtattggaggacgcacgatttcgccaggaggtggaacttcatgctgagtaaatggttgtattaaatcagatccaaacggcatcacttcttacttaccacatagtcactgggttcaatgtccagggtgggcagatgtttgtgtgccaccggacacgagttatacaaagcgcagtgcattttgtcagcggtggtctgaactttttcgagttccacatctgccagtgcgaattgtcgctccaagtggtctgctttcgcctggagaatagtttttgaccaggacagctgagccgtaaaatccaccttgttaagtacatttttgatggcatcatcgagttcatcttcgatgagctgcagcttgtttttcgaaaagtccgatttttctgtgcggataaaatatatttagtacgtttttttttttgctattgtttatttatcatgatagcagtctcacctggctgcttctcctcttcctcctcatcgctgctgtccagagccacaaagtcggcgtgatcctgatggaaatcctttagcagcagcggctgcttggccattagttgtccagcatactcctaaataaagaaatacgttctaagtttccctcttaagttaataaatatgctagttgacctcatacaagtccattgctgtgtcatggcatcccatgcagaggaactgctgcttggaagactttcggagcacctggtaaaagtttaaagtggccatgttagccaacacgtactgtttatgaagctttgtgcaattgcagttgacacattccttgtcgtagaagacatctccatctgataacaaagcgttcagcttctcgtcttctgcagctttcggagcagtgcccttttcaagctccacctctaggacatcgtcttttttatcaacaattttgtgttcttcgatttccgttaagctaatacgcttgtgaccttttaatgtattctcaattttgtattcttctgctggtcgacttattgactcctcgacgtcctgatctacctccatgccaggaggttcttgctcattttccttattggtcttttcatctttttcaggaaaactttcggatgtgggactgctgatgctgctatcagtcatttcctcggcctctttagccgcagcttcattgacagcatctggttttggcggatctttctcactttcgttggcggaggagaatttgacaggactctctattagctcaacactgctgtccgaatccacagctaccaaaaccgggctgcttgcaatggctttcgtgttctctcccttgcggtcctccgattcgtcggccaactttccaggttcatcaggggccttacctccatatgggcactgcttcctggttgaaccggtggcggcgattgcttcactgtgtgtcagttcctcaatttccacatcctttgcggcttgttctgcaggagactccaagctattttctcctttgcgcaccggcaacccgtaacttttttccctcgacgccggtgtttcttggacatcctccactgtgcttccactgctctctaagcagtccacggctgttggctgcccagacatagttttaatgagtttacttaactttacacattaatgcaaatttgcgagacaagcgataacattgtataaaatttcgctcgtaatttgccagccctagattttagtggcagaaagaagaagagtgtctattcacacaaaagaaaaagaacggaaattcaaaatgttcgctgctgcaatggatttaattttttatttcggtcttcgggagtgggtcctgttcattaggcctcgacgacctttgggtggtagccggtttcatcggcggtgtagaccactttgacggtcttgccgttgggggccacgtactcgtactccccggaaaccacccagttgtcgtgctccttcaaggctccagtttgcacggcgcgaatatggttggatagctcataagcgtagttaaagtccagcaagttaacctcggagtcgctctttacaacatcagcctcctcgttggcgaagaccacggccaaaaggcaggcaagaacgatctaaaagacaaatcgttgttcagaggtccccaaaatctaatttcgatgccacttaccacaaacttcatggttggaaaggggatgtgtgtgctgatagatagcgataaaattttgactgctggttgccgaaaattgcgcttttatatgtagctctccactgacattttaccggccggaatcaccaactgcataaattttcttcataactggctcccagcggtcgtttgtcttaattaaacaaaagacatagatgcagtcattctgcaggcattaattatcgccccactcggcatatcatattcggggggttatctttggagatctgtgcggaagattcccaaaacaaccacgttcatcaattgtcagcaccgcacgattaatttttagctgataagagctaaccggttccttcgatgctaacgccgattagcattattttcgcataactccattagcagtctgattttgctcccgcagttgcaaccggtttctaacaagctgcgattgcaatatggcctgggatttgaatttcttggcgcgcaattagccagtgctggaaaatgtctgggaccgcacagatttgccattcagagggaatcccacgtggtggtgt

SEQ ID NO: 5549 - DNA, 3933 bp, DROSOPHILA
aaatctagggctggcaaattacgagcgaaattttatacaatgttatcgcttgtctcgcaaatttgcattaatgtgtaaagttaagtaaactcattaaaactatgtctgggcagccaacagccgtggactgcttagagagcagtggaagcacagtggaggatgtccaagaaacaccggcgtcgagggaaaaaagttacgggttgccggtgcgcaaaggagaaaatagcttggagtctcctgcagaacaagccgcaaaggatgtggaaattgaggaactgacacacagtgaagcaatcgccgccaccggttcaaccaggaagcagtgcccatatggaggtaaggcccctgatgaacctggaaagttggccgacgaatcggaggaccgcaagggagagaacacgaaagccattgcaagcagcccggttttggtagctgtggattcggacagcagtgttgagctaatagagagtcctgtcaaattctcctccgccaacgaaagtgagaaagatccgccaaaaccagatgctgtcaatgaagctgcggctaaagaggccgaggaaatgactgatagcagcatcagcagtcccacatccgaaagttttcctgaaaaagatgaaaagaccaataaggaaaatgagcaagaacctcctggcatggaggtagatcaggacgtcgaggagtcaataagtcgaccagcagaagaatacaaaattgagaatacattaaaaggtcacaagcgtattagcttaacggaaatcgaagaacacaaaattgttgataaaaaagacgatgtcctagaggtggagcttgaaaagggcactgctccgaaagctgcagaagacgagaagctgaacgctttgttatcagatggagatgtcttctacgacaaggaatgtgtcaactgcaattgcacaaagcttcataaacagtacgtgttggctaacatggccactttaaacttttaccaggtgctccgaaagtcttccaagcagcagttcctctgcatgggatgccatgacacagcaatggacttgtatgaggagtatgctggacaactaatggccaagcagccgctgctgctaaaggatttccatcaggatcacgccgactttgtggctctggacagcagcgatgaggaggaagaggagaagcagccagaaaaatcggacttttcgaaaaacaagctgcagctcatcgaagatgaactcgatgatgccatcaaaaatgtacttaacaaggtggattttacggctcagctgtcctggtcaaaaactattctccaggcgaaagcagaccacttggagcgacaattcgcactggcagatgtggaactcgaaaaagttcagaccaccgctgacaaaatgcactgcgctttgtataactcgtgtccggtggcacacaaacatctgcccaccctggacattgaacccagtgactatgtgcatgaagttccacctcctggcgaaatcgtgcgtcctccaatacagttgggagagacatactacgctgttaagaacaaggctattgccagctgggtgtccataaaggtaatcgagtttacagagagcaccgccatcaacggaaacacgatgaagagctacaagattaggtacctcaacactccgtaccagatgatcaagacagtgacggccaagcacattgcctacttcgaaccaccgccagtgcgactgaccattggtacccgcgtgattgcgtacttcgatggcaccactttgtcgcggggcaaggataagggcgtggtgcagagcgccttttatccaggcatcatcgctgagccgttgaagcaggccaatcgctaccgctacctaatattctacgacgatgggtacactcagtacgttccgcaccgcgatgtccgtctagtttgccaggcttccgagaaagtgtgggaggacgtacacgccgcatcgcgcgatttcatacagaagtacgtggagaagtactccgtggatcgtccaatggtgcaatgcacccggggacaaagtatgaccactgaatcgaacgggacctggctgtacgcgcgcgtcattgacatcgactgcagcttggtgttgatgcagtttgagggcgacaaaaaccatacggagtggatatacaggggttcattgcgcttgggtcctgtcttcagggaaacccagaacaatatgaacagttcaagcgcacagcagctgcgtgtcccaagacgcacggagccctttattcggtacaccaaggagatggagtccagcagcaaggtgaaccagcagatgcgtgcctttgcccgcaagagcagcgcctccgcccaaaataacgcattagcggctgcatcttcggcagcaaccccagccggaggacgcaccaatgcaggaggtgtcagcaccagtaatagcgcaagtgctgtgcgacacctaaacaactcgacaatctacgtggacgacgagaacaggcccaagggccatgtagtctactttacagccaagcggaatctgcctcccaaaatgtacaagtgccacgagtgcagcccgaactgcctctttaagatcgttcaccgtctggacagctacagtccgttagcgaagcctctgctttctggctgggaacgtcttgtcatgcggcagaagaccaagaagtctgtggtatacaagggaccttgtggcaaaagcttgcgcagcctggccgaagttcacaggtaccttcgagctactgaaaatgtgttgaacgtagacaattttgactttacgcccgacctcaagtgtctggccgagtactccattgatccctcgatcgtgaaggacacggacatttcaaaggggcaggagaagatggcgattccgctggtaaactactacgacaacaccctgccgcccccatgcacctacgcgaagcagcgcatccctaccgagggtgttcatctgaatctggacgaggagttcctcttgtgctgcgactgcgaggacgactgctcggacaagtcaaagtgcgcctgttggcagctaacggtggcgggcgtgcggtactgtaacccgaagaaacccatcgaggagataggctaccagtacaagcggctccacgagcacgtgcccaccggcatctacgagtgcaactcgcgctgcaagtgcaagaagaattgcctgaaccgggtggtgcagttctccctagagatgaaactgcaggtgttcaagacctcaaatcgtggatggggcttgcgctgcgttaacgacatccccaagggtgctttcatctgtatttacgccggccatctgctcacggagacgatggccaacgaaggcggacaggacgccggcgacgagtatttcgcggacttagattacatagaggtcgctgaacagttaaaagagggatacgagtcggaggtggaccactcggacccggacgccgaggaggacaacgggggacccgatgccgaggacgatgacgacttccggccaaactatcactaccagcgcaaaatcaagcgctcttccagaagcggctccacgcagaacagctccactcagagcagcgagttggactcgcaggagcgtgcggtgatcaactttaacccaaatgctgatctggacgagacggtgcgggagaactcggtgcggaggcttttcggcaaggacgaggcgccctacatcatggacgccaagacaacgggcaaccttggacgctatttcaaccactcgtgcagccccaatctcttcgtgcagaacgtgttcgtggatactcacgacctgcgtttcccctgggttgccttcttctcggccgcgcacatccgctccggcaccgagctgacttggaactacaattacgaggtgggcgtggtgcccggcaaggtgttgtactgccagtgcggggcccccaattgccgccttcgtctgctctaagttctagcttaagttagagatccatacaggaaatatactcatt

SEQ ID NO: 5550 - protein, 1262 aa, DROSOPHILA
MSGQPTAVDCLESSGSTVEDVQETPASREKSYGLPVRKGENSLESPAEQAAKDVEIEELTHSEAIAATGSTRKQCPYGGKAPDEPGKLADESEDRKGENTKAIASSPVLVAVDSDSSVELIESPVKFSSANESEKDPPKPDAVNEAAAKEAEEMTDSSISSPTSESFPEKDEKTNKENEQEPPGMEVDQDVEESISRPAEEYKIENTLKGHKRISLTEIEEHKIVDKKDDVLEVELEKGTAPKAAEDEKLNALLSDGDVFYDKECVNCNCTKLHKQYVLANMATLNFYQVLRKSSKQQFLCMGCHDTAMDLYEEYAGQLMAKQPLLLKDFHQDHADFVALDSSDEEEEEKQPEKSDFSKNKLQLIEDELDDAIKNVLNKVDFTAQLSWSKTILQAKADHLERQFALADVELEKVQTTADKMHCALYNSCPVAHKHLPTLDIEPSDYVHEVPPPGEIVRPPIQLGETYYAVKNKAIASWVSIKVIEFTESTAINGNTMKSYKIRYLNTPYQMIKTVTAKHIAYFEPPPVRLTIGTRVIAYFDGTTLSRGKDKGVVQSAFYPGIIAEPLKQANRYRYLIFYDDGYTQYVPHRDVRLVCQASEKVWEDVHAASRDFIQKYVEKYSVDRPMVQCTRGQSMTTESNGTWLYARVIDIDCSLVLMQFEGDKNHTEWIYRGSLRLGPVFRETQNNMNSSSAQQLRVPRRTEPFIRYTKEMESSSKVNQQMRAFARKSSASAQNNALAAASSAATPAGGRTNAGGVSTSNSASAVRHLNNSTIYVDDENRPKGHVVYFTAKRNLPPKMYKCHECSPNCLFKIVHRLDSYSPLAKPLLSGWERLVMRQKTKKSVVYKGPCGKSLRSLAEVHRYLRATENVLNVDNFDFTPDLKCLAEYSIDPSIVKDTDISKGQEKMAIPLVNYYDNTLPPPCTYAKQRIPTEGVHLNLDEEFLLCCDCEDDCSDKSKCACWQLTVAGVRYCNPKKPIEEIGYQYKRLHEHVPTGIYECNSRCKCKKNCLNRVVQFSLEMKLQVFKTSNRGWGLRCVNDIPKGAFICIYAGHLLTETMANEGGQDAGDEYFADLDYIEVAEQLKEGYESEVDHSDPDAEEDNGGPDAEDDDDFRPNYHYQRKIKRSSRSGSTQNSSTQSSELDSQERAVINFNPNADLDETVRENSVRRLFGKDEAPYIMDAKTTGNLGRYFNHSCSPNLFVQNVFVDTHDLRFPWVAFFSAAHIRSGTELTWNYNYEVGVVPGKVLYCQCGAPNCRLRLL

SEQ ID NO: 5551 - DNA, 4034 bp, DROSOPHILA
aggcaaattctagtaccccagtacttttgtgccctctgctgtagataaatattcaaaactcgcacatttgtctctttgtatcttttgacttggatgttgcccgaaattcaatttgcatacttccttccattccctccgccaggctggtgcataaaagtttataatttccatttctgttgcatggctcgacaagcaattttcgctttataactccattgccgcacaaggtcaggtcgaaggcagagaaaccaatttagaataatctaaccaattactgccaacgctccacaaggtcagtcgagtcattttggcaacgcacaaacgattattactgcattaggagtcggcaaggcaacgcacatgtgagtcgcatgcagataagcaaacgtaatagaaacagattatatcccatccccaccggcacccacacttgaacccatatcccgtctccggttccccttcccggttcccattcatccgtaacataatcgtaaaagtcaaagcttagctcaatgctagattgcagcgttttgtacggagggaaatttttaaagcagccatcggggaacgagatataatagagatgctctccaggctcgaggatgtgactcttgacaagggatttgactcgaagttctgccagatttaatgtgtgcatttcaaggacttttaaatttaatccggaaataatgagatctgttctcaaaataagaacgaagtatacttgacgtatttacttagcgaatttttagctcactgtcagtgccaatcaagtaaatgtataatatgaaatgaagatcattgaagaaagtggcccgacttgattgtacaaaaaaacttaattagattattaatgacacatttataaatacaataagcgtaaattgccttatatgtgttaaaatgagcttatctttatttaaagtccaaatcaaaatgcaattttcttcaaaatcaattccgctaatcaacaaagtcaatcgtaaaatactcttttctcttatgtttccttgatgatctgcggcttgaagccatgttcggatgcctttttgaaggactccgcatacagcggaactctctgcgtcatgcggaagccccagaagtccttcacctggcgacacaggttcagatcgagttcaacgacaagcaagccgtctttgtcccgcgataagctctgtaaataaacgatattgtcgttaccgtccttatagcccctgattgggttatttcttaccggtgtccttgagccgtcaggagctgcgacataagaagatccgtagaagggaccaaactccttatgcgccttgttgccatcaccagatgtgtattcgttcgggaactgctcggttcccacgcgattaatcggaaccgtaaagtagctattggcgatggcagcgttacgtgcctcaatgctccacaatggctccgataggcggccgatcgtagccgagggattaaagacaatctcggctccattcagaccgaacatcatccagttctgtgggtgatggcgcccgtagcatatgttcacagccagcttgccgaactccgtctcgaaaaccggatgaccggtgttcccctccatgtagtaggtggactcattgaagtcacccacccggggaatgtggttcttgcggtgcttgcccaggtagcgaccactgttcgagatgaccactgccgtattccaaatggtctcgccatgctccatatctcgctccagaatcgagtggatgataaccatgttgtaagccttggccagctctgcgagcatcttggttgtgggaccgttttcggcttcttcggcaaactcacaccaaggaaacttctcgcgagtgcagaaggcaaagggcatggctatcggaaataaataatatggttaattatattcgatagtcttgctttttttgtcacgcttcatatttaaacttactccacgcttcttgggtgcaaacaatgttgcatccggcttccgctgccgccttgatcatagtcttcactttgttccagatggcctctcgttgtttttcaatgggcgccgtagtagggattacgatagagttttggatggcgccaactctgactatccggcgcttgcgagtttgctcctctcgcgccgtgaagcgatagcccttgatgtcgaatccattctgttcggcaatatctttcgcacttgtgggcagctcaagcgtttgactgccaagtaaaattatattataccgcgatttaatacaatactttgtgtataaagcttaaataattatttttaatttattatctttatggacagatgttcctaattatggctatatatttattgaccattttgaccccaataaaatttttgtgatccttactgtgtggtcagaagcttatctgtatttctgatagtcggaaaatatggagtgattagactgacaacacaaagtaaaggaaaaatggaataactaattatgttctataattttgttcacatcacaatggttttatagttttctaacacagataaaaccaatatactgataaaaatatatccaattttttatttttattttgcttgcttcggcttcgtgatcgtttcactttcatcaccagatgttctcaagggtatatatgttaatgtgtagatgcaaacgtagctctgtcaaagcaagttctttattgcaatgtaatacaatgtaacccactcgtagtaaataagcattacgggcaacttaaggtagcaatgaaatgcttttgtatgctccccttctgtttgcgaaaagattaagattaaaacatttttagaataatctggaggttttataggcacccacccccacatgatgttcttacttgattttaatggtcttttaactgtactcactcttcttctacgccgtacaaaattctcttaacctcctttagttcatcgggtggtaaatgcttttccaagcaatcatttaaatttttcagttcaaatgctgacatttttccaattttacagcaacaaaatatctcatcaattatcggactcaattgatagaacaaccttctccgaccaccgcagtatatgaaatgagtctgctgacgatcggattctcatcttatctacacttctctattttcgtctctctctctcttgggtttctctcggcatctctcccaagtgttataaaaatagtgaaaaacacatacatatttaagcacactcgctggcatttgaatagcatacgaaatgaaatctcaccgacaaagcatatactgaaaattacgtgtgtagtgttgggattattcttaattgtgtatataaatagaaataaagaaataattttatatcattttcttttttaatttatgatcattttaaaattactttcaaaataacagttatctgatagtcgagggtgtcgactatagcaaggtctctcgttacatgttcaatttatttatttattttcttgcaatatatacagataaacaacaacagtaataacattgaaaccggcattttataatccagcaatctacaaatatcacaaaaataaaccttctgagaccatacttgacgatttgaatttcaaagatctgtcgtcaatttaaacttgagaaaagttttctgtaagtaataaaaacttatcatttctggtgagaaaagaaattttataaattgtttctgctggcaaatttagtttgataggtcacatttcggtcgatattattcaaatttcatgctaggctctaaatcaaaaatatcttaagacctctccttaaaatgcagataagtcccgcgtgagctgattttgtcaaacttaagtaaatattgagcgggttcggcgcatatccttatctcctcggccggagcatctccgatgtcagccacttttcttaaaagctgacagcgtttgggccattttgtattagaaaagattaacttcgagccgaatgtgggtcgttgacgcttcgaggcaatgcaaattacccgaaatcttcctccggcgaaaacagtttgtttgtctagttctggtgcttcttggtctgcgttttgttttcttttt

SEQ ID NO: 5552 - DNA, 1288 bp, DROSOPHILA
gagaaggttgttctatcaattgagtccgataattgatgagatattttgttgctgtaaaattggaaaaatgtcagcatttgaactgaaaaatttaaatgattgcttggaaaagcatttaccacccgatgaactaaaggaggttaagagaattttgtacggcgtagaagaagatcaaacgcttgagctgcccacaagtgcgaaagatattgccgaacagaatggattcgacatcaagggctatcgcttcacggcgcgagaggagcaaactcgcaagcgccggatagtcagagttggcgccatccaaaactctatcgtaatccctactacggcgcccattgaaaaacaacgagaggccatctggaacaaagtgaagactatgatcaaggcggcagcggaagccggatgcaacattgtttgcacccaagaagcgtggaccatgccctttgccttctgcactcgcgagaagtttccttggtgtgagtttgccgaagaagccgaaaacggtcccacaaccaagatgctcgcagagctggccaaggcttacaacatggttatcatccactcgattctggagcgagatatggagcatggcgagaccatttggaatacggcagtggtcatctcgaacagtggtcgctacctgggcaagcaccgcaagaaccacattccccgggtgggtgacttcaatgagtccacctactacatggaggggaacaccggtcatccggttttcgagacggagttcggcaagctggctgtgaacatatgctacgggcgccatcacccacagaactggatgatgttcggtctgaatggagccgagattgtctttaatccctcggctacgatcggccgcctatcggagccattgtggagcattgaggcacgtaacgctgccatcgccaatagctactttacggttccgattaatcgcgtgggaaccgagcagttcccgaacgaatacacatctggtgatggcaacaaggcgcataaggagtttggtcccttctacggatcttcttatgtcgcagctcctgacggctcaaggacaccggtaagaaataacccaatcaggggctataaggacggtaacgacaatatcgtttatttacagagcttatcgcgggacaaagacggcttgcttgtcgttgaactcgatctgaacctgtgtcgccaggtgaaggacttctggggcttccgcatgacgcagagagttccgctgtatgcggagtccttcaaaaaggcatccgaacatggcttcaagccgcagatcatcaaggaaacataa

SEQ ID NO: 5553 - protein, 406 aa, DROSOPHILA
MSAFELKNLNDCLEKHLPPDELKEVKRILYGVEEDQTLELPTSAKDIAEQNGFDIKGYRFTAREEQTRKRRIVRVGAIQNSIVIPTTAPIEKQREAIWNKVKTMIKAAAEAGCNIVCTQEAWTMPFAFCTREKFPWCEFAEEAENGPTTKMLAELAKAYNMVIIHSILERDMEHGETIWNTAVVISNSGRYLGKHRKNHIPRVGDFNESTYYMEGNTGHPVFETEFGKLAVNICYGRHHPQNWMMFGLNGAEIVFNPSATIGRLSEPLWSIEARNAAIANSYFTVPINRVGTEQFPNEYTSGDGNKAHKEFGPFYGSSYVAAPDGSRTPVRNNPIRGYKDGNDNIVYLQSLSRDKDGLLVVELDLNLCRQVKDFWGFRMTQRVPLYAESFKKASEHGFKPQIIKET

SEQ ID NO: 5554 - DNA, 2758 bp, DROSOPHILA
ctgaatcagcacaattattgctgataaccatgaccatcctattacggaccaatgtttttgataataccacaatagataatgatccgattttatacactttgattagagaagattttgtacacatttagtaagatctattgggtcagagactagccgaacagctggagatcgtaaacaatgattctaccaaatagatcggtgctggactcgaagacgaactttagctttgagcaggggttttcccggactgattccgcaatctgaaaaagctgtggggagttgatatcttctgggtagaatggctcttggtgaacttgggctccgtcagcggagtacatgatcagttcggatttttggccagagaatccgccttggaactggaaactaaatccagctactttctgtggctcctccaagctaatggtaatgaattggggggttccctgaaatggccgtttggagttatattctttttttccaaatcttaggatgatacctcatctgaattccaagaagtttcttcccgcgtatcaaacatgaattgctttccgtgctgcttcacatctctgtttaaaaccgagctcaccctgcaaactatacgttaactaaagggagttacaaaataaaacccagagtacctgcagctgtattttacttttgtcaaaatattcataattcaataaaaataagaaataaacaaatcggagaccgcgaggttaaaggcattagagatgggcaacaatcagaaatccatagaatttttttttgtacggatttttaacacccgatttaagaaattgctttaaaaaatatattttccctaactttctaaaatatgcatgattcttattagatttttgaaataaatacgtcagataaagatatatcgatattatagatgctataccaagtattgattttgcagccctcgtcgaaaaagcaaaacagctggcagtttaaacattttcattttttttgttgacttatcttagaagttgagatgataaaagccattctcgtttttaacaatcacgggaagccgcggctatcgaagttctatcagtatttcgtaagtactgcgacatataatccatataatctagttcataataaattgtcactatcatttgtaggatgaaagcctgcagcaacaaataatcaaagagactttccaattggtgtccaagcgggacgataatgtttgcaactttctggagggcggaaggtgagcaatattgttcccgcaaattcctggaatatcttaaagcacctctttcctccaacagtttgattggcggatcggattacaaactcatctacagacactatgccacgctgtacttcgttttctgcgtggactcctcggagagcgaactgggaatcctggacctgattcaggtgttcgtggaaaccctcgacaagtgcttcgaaaacgtgtgtgagctggacctgatattccacgccgatgccgtccaccacatcctctcaggttgggaaagctactttggcaatccattcagattcagctatcatgaattcgtttcagaactggtaatgggcggaatggtcctgcagacaaatatgaacgacataatggccaggatcgaggagcagaacaagatcgtcaagcaggaagcgggcatctcggctgcacctgcccgagctgtgagcgccgtgaagagtatgaacattccgcaacagattaaagacatcaagctacctgatctgccgcaggccattaaggactttaagttctgacaaatgtgcgtctgatataactctctcgtctaattgtaatctgttgaatctagtgctttttcgcagtccttcatgaatttccaacagctgtcgactgttccgtaatattaggtcccacgtactctatataactcccctaccataataaaaatgcaaatgaattaccagtagcgagaacgagccttacgattttgatagcttaacaatgcgaagttcaaccacttccgttctatatcgaatggggtttaaaatgtacatacaaagtgtcttgcgatgacgtattcgcatgatctgtgtgctgcatatattaaagatttatacctaaaacggtgtccgctgtattaaacatgttcataattctacaatcaactgtttgtaagatcatcttcttcgccgacttccagcataacttgcattattttccgcttcagcctcttgcgcgaaacttcagagttcaggttacggaattcactggcgattagttcgccaaatgcgtcccattgatcacgaccacttaatggtaagtggaagggagagggagcagctggagcttcgacagttcgatttggatcaacgaatttggaagacggcgcaggttcaggaggcatcggaggaatgggttcgctgaccttcggaggctgacagatttctgcatcgttctctatgatcatggattccagactttctatcgaggattggctctgcttttccacatcctgatccgggtagcacatgtccagcttcgataccaatttctaccaaaaaccaggatagattggttaacttatgggctaaagatttcgatttaaggagcccaccttgcccggagcaccttgttgatagcctggtcgtggttctataacagatcgtaggaacatcaacgtcttgaagtgctcccatcgacaagccttctccgaatctcgatctcctccagactcctcgagcctcctctccaacttcttgagctctgcattgaattgattgcgcaggttgtgcacct

SEQ ID NO: 5555 - DNA, 633 bp, DROSOPHILA
atgataaaagccattctcgtttttaacaatcacgggaagccgcggctatcgaagttctatcagtatttcgatgaaagcctgcagcaacaaataatcaaagagactttccaattggtgtccaagcgggacgataatgtttgcaactttctggagggcggaagtttgattggcggatcggattacaaactcatctacagacactatgccacgctgtacttcgttttctgcgtggactcctcggagagcgaactgggaatcctggacctgattcaggtgttcgtggaaaccctcgacaagtgcttcgaaaacgtgtgtgagctggacctgatattccacgccgatgccgtccaccacatcctctcaggttgggaaagctactttggcaatccattcagattcagctatcatgaattcgtttcagaactggtaatgggcggaatggtcctgcagacaaatatgaacgacataatggccaggatcgaggagcagaacaagatcgtcaagcaggaagcgggcatctcggctgcacctgcccgagctgtgagcgccgtgaagagtatgaacattccgcaacagattaaagacatcaagctacctgatctgccgcaggccattaaggactttaagttctga

SEQ ID NO: 5556 - protein, 210 aa, DROSOPHILA
MIKAILVFNNHGKPRLSKFYQYFDESLQQQIIKETFQLVSKRDDNVCNFLEGGSLIGGSDYKLIYRHYATLYFVFCVDSSESELGILDLIQVFVETLDKCFENVCELDLIFHADAVHHILSGWESYFGNPFRFSYHEFVSELVMGGMVLQTNMNDIMARIEEQNKIVKQEAGISAAPARAVSAVKSMNIPQQIKDIKLPDLPQAIKDFKF

SEQ ID NO: 5557 - DNA, 3936 bp, DROSOPHILA
cgcctaatccctatgttaacgcctcatcctcaccagcttcggcatccacatcagcgggtgccggctcctccctggcaccgccagccgctgccctaatgcatcacaggccatcgcttccggtggccaagctaacaatacgcgacgaggaaatggcggaggtcatccgtgcgtcgatgagcgagggtgagattcagtaatctaataatcagctaaataacttactagagtaaatcaagtaatttaccgtgtcaaatactaaacacttattacaaattataggtagtggacgttgcaccccgaagactataaccttctttaagggacctggactgaaatcgttgggcttcagcatagtgggaggtcgagattcgccaaagggcaacatgggaatttttgtaaagaccgtgtttccctcaggccaggcagccgatgatggcacactgcaagcgggtaagttttttttttaaaggcttttcgatatctatagccacaactaaaatacactccaaacaggcgacgagattgtagagatcaatggaaactctgtgcagggcatgagtcatgccgaaaccataggactctttaagaacgtaagagagggcaccattgtgctaaaaatcttaagaagaaagtaagtacatttgaggaaactattatttttatttgaaaactaatgttccacttttttttgcagattacagaaagctaaatcgatgggttgctagtgctagttaatgcccgtatttgacttattcccatggtaatacataattatggacaacctgcatcgtttaaccaagttaaatggtagcttctctaattaagtgaagccttttttgtaatcgtacaaagccccttgcaagaactatacttatacacagactctatttagaaactagaatcccaaatagtatgtaaagaattgtatggagttacaattttaaattatttacccattctagactaggctaaggttcgaaacgttgtacaagttctatttacatacaaccttaatatatttacctgaaaagcaatatacgttttgtttcaatgacattatattaaaataaatcactctgtttccgtttcattcttcacaatcagtcgttgcttttttacaaaatgctctatccggttctccaaactctctggaaaaaatgattgattttagtaaacaaaaaataagtgtgcattcaatacataccacatcgtttgcgttctaaaagaggctgatattgacgcggattgacggaatcttgcaacaggattacctgagccagtaccttctcttttggcttaaaattctcttcaaataagttttccaattgttgcagcacattgcgtatcatggtgctcttaacgctaaattgcgtccactcacactgggtgttttcaataagcttttgtagattttcctcattgtaaatccacgctgtaagatcacgctccaagtgctccggagcatttaagtcatttgattcgtcggcggctgtatccatggcttcttcgtctgcatcaccgctgcttggatggtttacacttcttgttgtgtggtctcgaaagtcgcaacgaaacagatttaagggcaatccaattgcgggggtgtactgaggcttgcagggattagactccacatcaagcaggtcacttattacgcccgggttttcctttttttggccaacaagtaaaagcaccgccattatgcaacggatttggtgccaaaggaaggcatttgcttgaatctccaggtagtacatgtcgtagcctgtggaatatggcgctttataatcttttagaactaaagcttttgctcaggaacaaacctgaatttgtatgatttgtctgatcacaagcttccaccctggcagattgcaagtttctcatgtagttggttactccgttgtgcacgtccattttgcagaaattacggaagtcggcgtgacgcactaggagatcacaggctttacgcatggcagcaatgtccaggtcacccttaggaaagtagtaacgataggtgcgggaaacgcaatcaaatcgagcgctataaaccggactgcgcagtggcatccaagccacgcactgaatgttcttgggcagcactcgattcaggagtccacagtagtcaatctcggaggaaagcgctgtgggatccagctgggattcgggcggatgcttgctgcgcagatctatggagataacctggcagaaggcgctcacctccttgtctgtgcgtccacagcggtgataattggaagtggcgcgagattcgatgaggcaggtacgagctagagcgcggaacaagttggattctgtggcaaagcaaaagatttagcaaaaatctataagatttgtgttcagaacctaccgatagtatcattggaatcctcctggcaggcaaatccttgataatcccaaccaaagtaggtaatcttaagcaagacatgacgcttgtgtgcactgaaaaaattgaatcatggagcttgatccaatctggaaatggttccacaacatacctgctccaatcgaacttacgtatcttctgcactttgctggatgtcttggccacctggctaactttgccctccgcttcgtttccaattaatccagagtattccttatcatgtttatctttctcgcttaactttttctgcagcagattccgcaactgaaagttataggcctccagttggataaccttgtcgatcagctcggtttgagtcagtttttcaagtgcctctcggcttaagccttttaatcgtttatttatcacaacttttttgtcatttgttgcactcattttggcggttaatgagaaataaacaatttaaaagcaacacgtgaaattactttggcttttgccattcgctacgaaacgcgcacaacagagatgagcaagctttgctaatagcgcaaatccactggatgttgcatgttgtttgttgtatgaaaaagctgtttggcaatttgaacaataaagtaggcgaatttacttgatttcacgtattttgaaaaataaaacctttattaataatctgtcattccaaagttgatcagaaataaatatatgatatgaagcctgtaattttggtatttttattgtgaccatttgtatgtttctgacttcagcacggtcacactgttcgcagctactgtttatgttataatttatttttgttgtataaaaacccgaaaatcatctggagttcaagccagcatataagttcagcgacttaaaatcattcgctgcctattgctgcttctgtggtgcagcatccgagggtgaagcacaccacgaaagccacgaagaaagggggcagcaaggacatcacaaaggatggacgcgagcagatacaaggtcgacggcgagaacgacaattgcggggcgaccttggccgctgtaaatctgaatgtccttcccgatgagatactggagttcatattcacctacctgccaccctacggcgacttggagcactgcagcctggtgtgcaagcgatggcacgccattgtgaagagtgggcatctggaaagtgcgaatataatacaacttaactaacttcttatcctttgcagaccttgtgcgtcgttccagacacaatctcgagaagggcctcatcgactttcgactgcgctgggaggtgttttcccagcagacagtcaatggcggggcaggagcactattatcctttattgccggaagatttgctcattcggctgtgcggcaagacaactccatgtacgtattcggcggtggatcctcgtcggacaccaccttcaacgatctgtggcgctttgatttgacgcacatgcggtgggcgcggccagtggccacaggaacctatccctcgcccaagggcagtgcatcaatggtggcgtggcggaaccagctgatactctttggcggatggcgatacccctcgctacatccgccctacc

SEQ ID NO: 5558 - DNA, 1710 bp, DROSOPHILA
acaacatgcaacatccagtggatttgcgctattagcaaagcttgctcatctctgttgtgcgcgtttcgtagcgaatggcaaaagccaaagtaatttcacgtgttgcttttaaattgtttatttctcattaaccgccaaaatgagtgcaacaaatgacaaaaaagttgtgataaataaacgattaaaaggcttaagccgagaggcacttgaaaaactgactcaaaccgagctgatcgacaaggttatccaactggaggcctataactttcagttgcggaatctgctgcagaaaaagttaagcgagaaagataaacatgataaggaatactctggattaattggaaacgaagcggagggcaaagttagccaggtggccaagacatccagcaaagtgcagaagatacgtaagttcgattggagcagtgcacacaagcgtcatgtcttgcttaagattacctactttggttgggattatcaaggatttgcctgccaggaggattccaatgatactatcgaatccaacttgttccgcgctctagctcgtacctgcctcatcgaatctcgcgccacttccaattatcaccgctgtggacgcacagacaaggaggtgagcgccttctgccaggttatctccatagatctgcgcagcaagcatccgcccgaatcccagctggatcccacagcgctttcctccgagattgactactgtggactcctgaatcgagtgctgcccaagaacattcagtgcgtggcttggatgccactgcgcagtccggtttatagcgctcgatttgattgcgtttcccgcacctatcgttactactttcctaagggtgacctggacattgctgccatgcgtaaagcctgtgatctcctagtgcgtcacgccgacttccgtaatttctgcaaaatggacgtgcacaacggagtaaccaactacatgagaaacttgcaatctgccagggtggaagcttgtgatcagacaaatcatacaaattcaggctacgacatgtactacctggagattcaagcaaatgccttcctttggcaccaaatccgttgcataatggcggtgcttttacttgttggccaaaaaaaggaaaacccgggcgtaataagtgacctgcttgatgtggagtctaatccctgcaagcctcagtacacccccgcaattggattgcccttaaatctgtttcgttgcgactttcgagaccacacaacaagaagtgtaaaccatccaagcagcggtgatgcagacgaagaagccatggatacagccgccgacgaatcaaatgacttaaatgctccggagcacttggagcgtgatcttacagcgtggatttacaatgaggaaaatctacaaaagcttattgaaaacacccagtgtgagtggacgcaatttagcgttaagagcaccatgatacgcaatgtgctgcaacaattggaaaacttatttgaagagaattttaagccaaaagagaaggtactggctcaggtaatcctgttgcaagattccgtcaatccgcgtcaatatcagcctcttttagaacgcaaacgatgtgagagtttggagaaccggatagagcattttgtaaaaaagcaacgactgattgtgaagaatgaaacggaaacagagtgatttattttaatataatgtcattgaaacaaaacgtatattgcttttcaggtaaatatattaaggttgtatgt

SEQ ID NO: 5559 - protein, 499 aa, DROSOPHILA
MSATNDKKVVINKRLKGLSREALEKLTQTELIDKVIQLEAYNFQLRNLLQKKLSEKDKHDKEYSGLIGNEAEGKVSQVAKTSSKVQKIRKFDWSSAHKRHVLLKITYFGWDYQGFACQEDSNDTIESNLFRALARTCLIESRATSNYHRCGRTDKEVSAFCQVISIDLRSKHPPESQLDPTALSSEIDYCGLLNRVLPKNIQCVAWMPLRSPVYSARFDCVSRTYRYYFPKGDLDIAAMRKACDLLVRHADFRNFCKMDVHNGVTNYMRNLQSARVEACDQTNHTNSGYDMYYLEIQANAFLWHQIRCIMAVLLLVGQKKENPGVISDLLDVESNPCKPQYTPAIGLPLNLFRCDFRDHTTRSVNHPSSGDADEEAMDTAADESNDLNAPEHLERDLTAWIYNEENLQKLIENTQCEWTQFSVKSTMIRNVLQQLENLFEENFKPKEKVLAQVILLQDSVNPRQYQPLLERKRCESLENRIEHFVKKQRLIVKNETETE

SEQ ID NO: 5560 - DNA, 3418 bp, DROSOPHILA
catcacaaatccgcagtcctttaggtcgatctgtttgaagcggaaaagaagttttctatacatctggatatctgggttgccgggaaagtcgttaccttgttcagcgccacaaggaagggcaaacgggtcttgtacaggatggagcaggcgtacagcatgttggacatgaaggtggtagggcaagcactgcgctccacatccattacatagaccacaatggtgggaaacatggtggccagtccctcggttatgatgctcccggaagccgaccagttaaacacctcgatctgtccgggcgtgtcgatcacacaccacttgtgtccgcgctcgccagcgcgacgcactagctccgcaaactgtgccattttggtggtgaacatattgagcgcggtcacaatgccaccgttgggacccagttggtactgcttcatcacctcccggtagttgaccgtgtcccgtatgtccacgtgcgccgcgtacggtacttccctgcacgccggatccaggttgaccacgtacggattgaacttctcctgggcgtgctggatgagcttctgtgtgaacgtggtcttcccgctgccggccattcccagcaccagtatgcacacgggcgactcccggattccctcgctcagcgacagcgcctccagcttgatgctctccactccctctgccatttctctcacggcttcactaagaatcaaaacaaaaacaggaggcgcaaaaacaagcgtgcagaggcagtgtgaccgtcctatggaaagtgtgctctttgcgccgcctgaattcgcttcagataccaacaaacatcagctgttgttgctgctttttatcctgcgtggaaacatgtcggccattacatagttaacacactcccttaatcgcagcagccttcgtggaatcacacatcttcagttttgccagttcagtttttgcttgcccgccaaaaaaacaaatcaaaaaaaaataccgaagagtttagaacataccgtatatatcgaaagccataataagctttaaactagttgtacagtaataaaaatgccaccaccagaagccggcaattgaagcgcgtttatttgccgtgcattagttttattatttggcattgttttacataataaaagttgtgaagcaatggagacccgactggaagtgctcttgcgggagccgaatccattgttcacccgttggctggagcgctggctgcgcgaagcggagcgccgagaacagaagtcccagtttagcctgcgccaggcgttggagtccctaaaaagctaccctctgccattggccagcggacgagactgttccattctgcgcggctttgggggcaccctctgccagctaatcgacgaggaacttcgccatcacagaggcctccaattgctgccacaggaggccgtggttcaggagcgctacgagcagcaggtccaggcggtagtacgcaaggttcaggagaagcagctggaacaccagaaacgccagaataaatgcgacaggcccaggaagctaaccaaaaaagatctggcggagctggcagcccttgaagagcgggagcgcgtcgtgcgaatgaaaccaggtcaattccagttactccttttggtggatactcaggaaaccagtggcaaaaacaagagagttctggaccagacgaggagctacttggagtccttgggagcccgtcatgaagtgcgtcgcctgacaatcggcgatttcctttgggtggcccaggatcaagagggcaatgaactggttttaccctacattgtggagcgcaagaggatggacgacctggcatcgagtattcgggatggtcgcttccacgaacagaagcacaggctgcagcactgcggcctgcagcacatcatctacctggtcgaggactatggcgataacgagcagctgggccttccactggactccttgcagcaggctctgactaatgccaaagttcaaactggtgtccgagtggtgcgcacggcgaatcattaccgatccatgagctatttggccggaatgagtcgcacccttggccagatattcgccggcaagaagttgcacagcgtggatcgcggcgccatcgaccaatccacctgcctgctcacgcattccgacctggggttgctcaagtttcgggccctatatgaggattccgcaaagaatgcccagctcacagtgcgcgaggttttcgtgcaacagttgctacagctgcattccctttccctcgaacgcgccatggctattgtggaaagataccccactccacgctggctgctggacgcatacgcggagtgtgcagaccaaaagcaggccaggctactcctcgccagcatcccgtgtggacccctggaacgtccactgggcgacaagatcagccagtgcctacacgaattctacagcacgcactttcgttaggattagcaattgattttatgggacatatctaaggttatatacacgagtttatacataagtgagagagagaatacgttggacattgaatagtgtgatctagtctaagccaaaaaatgtacaagtcagccgcccttagatgttgcggaagtgccggatggccaggtccaccggcaggtcgaagtcaaatcgagaaagagcatcgatggagcgcagtgagtcgcggaatccggtgcgggccacgtagctgtctgctgagtagtacgtgtccaccagttcatggcagctgaggatcaggttcagccactccaccagcaaatgggaactgtttgaaggaagagaaaagcatttcgaatgaaagaagtgtgataaaagccaaggtaaaggtctatccccgcgtccctgttagccttatgcttaaattaattcggcagactgcaaagtcaaaagctacctgcacctagctaaatatattaatatttacatatttatatttacatgttaaagcaaaaaatcgattaagcaattcattgataaaaaagtttaagacagtagagaattgacattaccgcagaattgctgataattgcagtaagaatattttgattttggacacttgtaattataaaaagtttgtgtgtctcttgctctttaagattcctctttgccaggaaaataactataaaatgaagatttgaagatgtaaaaggctagtgcttcaaactatgcacctgtaaataatatggtattgcaaagttatgcggcttgtaaattcatcttaactaacattccttcgatttcccagcgtttagcccatgtaaataactcacttgagtccggcgcagacgaaggctttaaagtgcgcgttgttactccgtttgtatggacgatgcattgccagaatcatgcccacggcgctgagcaaactttgcttggcggtcacagcctgcgcgtccacgatgtccagctggaagctctgcgacaactttctggcaggcgtgtt

SEQ ID NO: 5561 - DNA, 1418 bp, DROSOPHILA
aaagccataataagctttaaactagttgtacagtaataaaaatgccaccaccagaagccggcaattgaagcgcgtttatttgccgtgcattagttttattatttggcattgttttacataataaaagttgtgaagcaatggagacccgactggaagtgctcttgcgggagccgaatccattgttcacccgttggctggagcgctggctgcgcgaagcggagcgccgagaacagaagtcccagtttagcctgcgccaggcgttggagtccctaaaaagctaccctctgccattggccagcggacgagactgttccattctgcgcggctttgggggcaccctctgccagctaatcgacgaggaacttcgccatcacagaggcctccaattgctgccacaggaggccgtggttcaggagcgctacgagcagcaggtccaggcggtagtacgcaaggttcaggagaagcagctggaacaccagaaacgccagaataaatgcgacaggcccaggaagctaaccaaaaaagatctggcggagctggcagcccttgaagagcgggagcgcgtcgtgcgaatgaaaccaggtcaattccagttactccttttggtggatactcaggaaaccagtggcaaaaacaagagagttctggaccagacgaggagctacttggagtccttgggagcccgtcatgaagtgcgtcgcctgacaatcggcgatttcctttgggtggcccaggatcaagagggcaatgaactggttttaccctacattgtggagcgcaagaggatggacgacctggcatcgagtattcgggatggtcgcttccacgaacagaagcacaggctgcagcactgcggcctgcagcacatcatctacctggtcgaggactatggcgataacgagcagctgggccttccactggactccttgcagcaggctctgactaatgccaaagttcaaactggtgtccgagtggtgcgcacggcgaatcattaccgatccatgagctatttggccggaatgagtcgcacccttggccagatattcgccggcaagaagttgcacagcgtggatcgcggcgccatcgaccaatccacctgcctgctcacgcattccgacctggggttgctcaagtttcgggccctatatgaggattccgcaaagaatgcccagctcacagtgcgcgaggttttcgtgcaacagttgctacagctgcattccctttccctcgaacgcgccatggctattgtggaaagataccccactccacgctggctgctggacgcatacgcggagtgtgcagaccaaaagcaggccaggctactcctcgccagcatcccgtgtggacccctggaacgtccactgggcgacaagatcagccagtgcctacacgaattctacagcacgcactttcgttag

SEQ ID NO: 5562 - protein, 426 aa, DROSOPHILA
METRLEVLLREPNPLFTRWLERWLREAERREQKSQFSLRQALESLKSYPLPLASGRDCSILRGFGGTLCQLIDEELRHHRGLQLLPQEAVVQERYEQQVQAVVRKVQEKQLEHQKRQNKCDRPRKLTKKDLAELAALEERERVVRMKPGQFQLLLLVDTQETSGKNKRVLDQTRSYLESLGARHEVRRLTIGDFLWVAQDQEGNELVLPYIVERKRMDDLASSIRDGRFHEQKHRLQHCGLQHIIYLVEDYGDNEQLGLPLDSLQQALTNAKVQTGVRVVRTANHYRSMSYLAGMSRTLGQIFAGKKLHSVDRGAIDQSTCLLTHSDLGLLKFRALYEDSAKNAQLTVREVFVQQLLQLHSLSLERAMAIVERYPTPRWLLDAYAECADQKQARLLLASIPCGPLERPLGDKISQCLHEFYSTHFR

SEQ ID NO: 5563 - DNA, 4516 bp, DROSOPHILA
gcccaagctgaccatcgacaccgattacctcgtctggagtccgcaaactgcagcggcagtggtcagagctccgggaaattccggctagcatacggaacctggagaccccgttctgctatcatcgcatataattgttattgacgatgacgattaggttttttttttttatttttttttaaagaaagcgtaggaataagctattctattgcacccctccaaacgaaaaatgtatagtcatatatctaaatggaaccatcagaaggttcaatgtaatacttaacatttggtttacaattttttttttttatagttaaggagttttacggataggctgttgtaactcttaatgatagaaccaaatgtctaattcgtttggctaatgtttttggagagggaatttggaacaaccatttaaaaattttaaaaacttctgtgttcttgaaatatatatctttaactactttatctcgaaaaactctggacttgttaaaaaccaaataaacttccacagcagccgatatgccgacgcctgaagagaatacatctctatgaactccttacacgtaagatagcataatctctccacggtacatttttatacactataattaaggaagagaatccataatatcttttaggctacacattaggttaagttcagaaagaactgaacgattcctactgactaatgaacaataataaatgatttaaactgtaaaaaagaaaaactccaatctgagaacatgatgtactttctcaaataaatgcgtcgttacattaacgtcaaaaagaggaaaaattaaataaatatttacaacgacaggttattcttttcattatttttgcaacacatttcttgtaggttagcttaatatgtatattttgatataataaaaaatatatatagaaatatcgaaaacattggaaaaacaagtttaaaatttcgagcattaaaatccattgctaaccctctcctccctagcgtcataagcaatcggttatcgaggttatcgataacgcccgcatcgatacaattccgccggcttgtccgattcgtgttgttgtgattcgggatatatacaggatatagggcagccaaaatgggcctgctgtccgatccgtcgatatcgacgcaaagcaagctggtggacggactggcgcgtcatgttcgcaaggtgtgctacgccctttatgtggcgggtgtggcctggttcttctgtttggcgctgccggagttcaaccacgggacatatctctccgagaatgctctttcgccaggtgagttacgtgcagcgtcaccaaaagagagccgctaacaattggtgtgatctattgtaggcttggtctatccggagatccgcatcgatgcgaatcgtctggccatccagttgctggaggagctgcagcgggagcgaaaggatcatctgtccaccacgccgcacgcctggattgcggccaagatgaacgagttcggcctggagacgcacacgcacaactacacgttgcgctacccatttggcggcggtaaagagtatcacggcaagaatatctacggcatattgagggccccaagaattgcctccacggagggcatcgtttttgcggctccatatcgcgctgccagttccgtgcacacggacatttccgccagcgtgccgcttctgctggccttcgccgattttgcccggcgcaagaactactgggcgaaggatctgatcttcctgatcaccgaacaggagcagctgggcatgcaggcctggctggaggcttatcacgatggcgaccgggaactggacttgagcaaggcgtacctgcgtcctggcaatttgcccgctcgcgctggttcgctgcaagcggctctgaatattgaagttcaggatctggagattgaccatgtggatgtgcgaatagagggcttgaacggcaagctgcccaatctggatatgttcaatctggtgcagagaattatggcccgcgagggcatcgcctctggctataaacaagcgccacgcaagaagcgtcgtcacagccagtcgcacttcgagcagaacttccgccagatgctgaccatgctggccagccagtcgtcgggcgtacccactggcaatcatgggctgttccaccgttatcggatcgatgctttgaccatagctgccaatcgaagggccacccatgccacactgaagggcagcccaggatcggcagcggtgcctttgctgaaggccatcgagggaatagccaggagtctgaacaaccttctggagcgcttccatcaaagctttttcttctatgtgatcgtaagcaacgatcgctacatctccattggggattatatgcccgctttggtggctctggtagcttgtgccttccttaaggcctatctaacgtggtccacgctcccggcgaccaacgctgagctggaaaaggccgctggctggcttagggagcacgaacaggaggcggaactggaggagaacctagagccggataagttcgagctgccgtatggttcggtattgatttaccttactgccaccctgttgattggtttcctgtgcaacgtgctgcccctgcagcaatatttcctagagattcctatgggcgccgcaccactgaccacctcagtactgagttttctttctctgatcggtttcgttctgccctttgtggtggttttgccgcccggaggattggagctgctgcatgtggcctttctgctaatctatggctgcgctttaatagtcatcgggctcctcaactttgccctgggcttatttgcggccgtgctgactgtaccgctggtcatcgcgctggagaccaaggaggagaactcgcgcagcacgctgaggaacacgatccgcttggccacgctggtcatgaatcccatgatggtcgtttatgtgatcgtgctggccatgacattctaccagttcccggagctgccggtgcagaagatcatgctgagggcggccaccgcggccatggatgcctcggcttatggacttatcgattccgtggtaagttaagatttcagttgccactactaacatacatagataataaactaaaatactttcctattgcagatttatggcaactggctgtactttgtcatctgcacgattttcctgccgctgtggatcatctgctggaccttgtcgctgtccaagcgacgcgactacgcagattacctggacttcgatgagtcgccatcaacgtcgccgcagccgcagtcaaaggtgaaaacgaattgaggagacgaacagcacggattgccattcactggctacatatatcaactggaaatgatcctaagatgaagtgtgataaacccaacaaaactgtgtgtgatggcggtaagagattgcacatgcagagaaaattccatttaaatgttatgcatttgattaaatgtctaaataaaagaagcctatttattagttggaataactaagtgtaaatgtaatccaaaaaatattaaatataccacggcattttcgatgttgattcccagttaacttatcattttaaattacttaagtggttaactttatcagtagcttcttgtgatttatggattttccattatatttgcaactttgtttgcacgtaaagcagtaatgcatatatttcccatccgttggttattatttcttttgtcaatcctccgtcttcgctggcgttattggccagtggaggacaggagtttctccgtggagtagtgctcagtggagcacgtgcctctttgaataagtggaaaacttttcgactatgacacgcaacttaatttaaactttgcaccgctgccagcgccatcgtcgtcgctgctggcaattagttatgagccaggatttggctcaatcagaggcatggatgcatggtgtcctcgaagctgggagccctgcacttgccgcaccgtgtttaccggcgccattcaatctgcaacttaacaagaaaactttcctcacacaaccattcaaaggcagacacaaagttgcggcggcacagtggtactttcactcgaaatgtagaaatgagaaattttcgaatatctttttattaaatggatagatagattgtaagatgagttcggtcaaatcactgagctgtatcactgtataaatcagttaacaaatatatatactttttcaagtagtagttaattaatcctcgcagttctagtctaatcgcagcttttcaatatttctatgggccatcgttaaaacagcagagcacacaagtgattttagagttgtgtatctttattcaaatactattcaaggctggcctgcgctagatggccatctcctgcacctgatcctcttggcttaaagaacccatcgcccttcgcaaccattggcaaatcgaattggacgagataggtagcatctcgtcctgagagtcagccatatcggtttgggtgcccttgccggtgcccttgcctggattccgatccagatacagaccctctttggactccagctccgtctgtcgctccgcgtggcgttccaaagag

SEQ ID NO: 5564 - DNA, 2387 bp, DROSOPHILA
atcgaggttatcgataacgcccgcatcgatacaattccgccggcttgtccgattcgtgttgttgtgattcgggatatatacaggatatagggcagccaaaatgggcctgctgtccgatccgtcgatatcgacgcaaagcaagctggtggacggactggcgcgtcatgttcgcaaggtgtgctacgccctttatgtggcgggtgtggcctggttcttctgtttggcgctgccggagttcaaccacgggacatatctctccgagaatgctctttcgccaggcttggtctatccggagatccgcatcgatgcgaatcgtctggccatccagttgctggaggagctgcagcgggagcgaaaggatcatctgtccaccacgccgcacgcctggattgcggccaagatgaacgagttcggcctggagacgcacacgcacaactacacgttgcgctacccatttggcggcggtaaagagtatcacggcaagaatatctacggcatattgagggccccaagaattgcctccacggagggcatcgtttttgcggctccatatcgcgctgccagttccgtgcacacggacatttccgccagcgtgccgcttctgctggccttcgccgattttgcccggcgcaagaactactgggcgaaggatctgatcttcctgatcaccgaacaggagcagctgggcatgcaggcctggctggaggcttatcacgatggcgaccgggaactggacttgagcaaggcgtacctgcgtcctggcaatttgcccgctcgcgctggttcgctgcaagcggctctgaatattgaagttcaggatctggagattgaccatgtggatgtgcgaatagagggcttgaacggcaagctgcccaatctggatatgttcaatctggtgcagagaattatggcccgcgagggcatcgcctctggctataaacaagcgccacgcaagaagcgtcgtcacagccagtcgcacttcgagcagaacttccgccagatgctgaccatgctggccagccagtcgtcgggcgtacccactggcaatcatgggctgttccaccgttatcggatcgatgctttgaccatagctgccaatcgaagggccacccatgccacactgaagggcagcccaggatcggcagcggtgcctttgctgaaggccatcgagggaatagccaggagtctgaacaaccttctggagcgcttccatcaaagctttttcttctatgtgatcgtaagcaacgatcgctacatctccattggggattatatgcccgctttggtggctctggtagcttgtgccttccttaaggcctatctaacgtggtccacgctcccggcgaccaacgctgagctggaaaaggccgctggctggcttagggagcacgaacaggaggcggaactggaggagaacctagagccggataagttcgagctgccgtatggttcggtattgatttaccttactgccaccctgttgattggtttcctgtgcaacgtgctgcccctgcagcaatatttcctagagattcctatgggcgccgcaccactgaccacctcagtactgagttttctttctctgatcggtttcgttctgccctttgtggtggttttgccgcccggaggattggagctgctgcatgtggcctttctgctaatctatggctgcgctttaatagtcatcgggctcctcaactttgccctgggcttatttgcggccgtgctgactgtaccgctggtcatcgcgctggagaccaaggaggagaactcgcgcagcacgctgaggaacacgatccgcttggccacgctggtcatgaatcccatgatggtcgtttatgtgatcgtgctggccatgacattctaccagttcccggagctgccggtgcagaagatcatgctgagggcggccaccgcggccatggatgcctcggcttatggacttatcgattccgtgatttatggcaactggctgtactttgtcatctgcacgattttcctgccgctgtggatcatctgctggaccttgtcgctgtccaagcgacgcgactacgcagattacctggacttcgatgagtcgccatcaacgtcgccgcagccgcagtcaaaggtgaaaacgaattgaggagacgaacagcacggattgccattcactggctacatatatcaactggaaatgatcctaagatgaagtgtgataaacccaacaaaactgtgtgtgatggcggtaagagattgcacatgcagagaaaattccatttaaatgttatgcatttgattaaatgtctaaataaaagaagcctatttattagttggaataactaagtgtaaatgtaatccaaaaaatattaaatataccacggcattttcgatgttgattcccagtt

SEQ ID NO: 5565 - protein, 674 aa, DROSOPHILA
MGLLSDPSISTQSKLVDGLARHVRKVCYALYVAGVAWFFCLALPEFNHGTYLSENALSPGLVYPEIRIDANRLAIQLLEELQRERKDHLSTTPHAWIAAKMNEFGLETHTHNYTLRYPFGGGKEYHGKNIYGILRAPRIASTEGIVFAAPYRAASSVHTDISASVPLLLAFADFARRKNYWAKDLIFLITEQEQLGMQAWLEAYHDGDRELDLSKAYLRPGNLPARAGSLQAALNIEVQDLEIDHVDVRIEGLNGKLPNLDMFNLVQRIMAREGIASGYKQAPRKKRRHSQSHFEQNFRQMLTMLASQSSGVPTGNHGLFHRYRIDALTIAANRRATHATLKGSPGSAAVPLLKAIEGIARSLNNLLERFHQSFFFYVIVSNDRYISIGDYMPALVALVACAFLKAYLTWSTLPATNAELEKAAGWLREHEQEAELEENLEPDKFELPYGSVLIYLTATLLIGFLCNVLPLQQYFLEIPMGAAPLTTSVLSFLSLIGFVLPFVVVLPPGGLELLHVAFLLIYGCALIVIGLLNFALGLFAAVLTVPLVIALETKEENSRSTLRNTIRLATLVMNPMMVVYVIVLAMTFYQFPELPVQKIMLRAATAAMDASAYGLIDSVIYGNWLYFVICTIFLPLWIICWTLSLSKRRDYADYLDFDESPSTSPQPQSKVKTN

SEQ ID NO: 5566 - DNA, 3566 bp, DROSOPHILA
agcatgattcacctgcttgttcttcatctccatctcggcgtatttcagccagagggtcacgttccggtgctcattgtccaacgcccgctcccagatagagcgcgcccgctggatctcctgctgctgctcctcccactgagcatatttgatccaatggctgactaccatgcggttcttgcggagattgtcctcgaaggtctttcgcttccgctgctgatagtctgccaactcggcgggatcggagatcttctgctttggcggcggcggcagaatctccagatctcgctccttggcctcacggagcaactgctccgccgtaatttgcacctccgccggcgctttgtttttgacctggtgaaattttggattggataagttggtttggtggattgccgacgatggcacataccttggccaccttgggcatcttctgtggccgctccatgctgtgcgattcggggtccctcacttagcaatgttatgttggaaaaacgctaaatcgcaacaaaataaataatgccactaacaacgtcgtgcgataacgataggcatatttcgatagttcgctatcgataatcgctttttgtctccactggccttttgcgcattctacttttgaatgtgtgtttcaattaaatccctttttttgttgtatttccataaatatatactagtataataattgtacattgttgggttaaaaataaaacggataacgcattttttacttatttatttttgagcaatttcaacacaaatttaaaaaaaaaatggatatttaagagatgaaaagccacaggaactgtttatcccaatacacttgaaacacttttaaccgtcttcagttgaaggagactccttgctaccgtggaagatgttctaggtaatcatttgaaaaatctccacgaactctcgttccgcttctccggcttcaccaccacccagtgatcggggtccatcagatagtcgctacaaaaggcaacgaggcgttactgaataactataacatgcagatcgaaacccaccgatgctcaaccaaggccttttgggtatgggtccgcagtgcttctaaggacccggctcctccgccgtactcctccggcagcatctcccgcggcacgaactcgtacagcgtatttatgctttgcgtgtggaaacggatctaaagtgtagaaagtaatggtgagatgaagctattagagacataatggcttctcaagaaacccaccagcttgaagacctcgtcgctgatgaacggcttcaccacgctgacgatccgatccaggtaagttggacagttaatcatgtgaatggcgcgcaggcgcaccggaaatgccagctggaggaacttgatgtaggcgcgcagcgtgctgatcgtcagccgcgaaatgtgccgcattgtggtgcccttcatgtcgaatatctgcacctctccttcggacaggacatccggtttggcgagatcgtccggcgtcacgaaccggcagtcgctgaccataaagaaggcgcgcgtgtcctccgtgtggtgcatctggggatagcaatcggcggtatggagcgcaagttcctacagcaaagagaagctattactcaccttggaggcctcgaactcccgaaagcagtacagcgacaccttgcatttgtccggcgttaggccaggcagcggtagaatgtctctgaaattcgagtgttggggtatacgggtatgtatgtttttggaacatggccctgcctcaaaggaaagggaatcttttctcccaataaggacacacttacgcgtagtcaaaggtgcgcttgctgtccgcgtctagaggatccctcttgataaacaggtgagggtgccggttgcgcagggcgtagttcacctcgatgagcttccgagtctcctccacgtctccaaacatgcactggtagaagcgccggagcagcagcggatctgttaatacacatatggtacgatacaatgaagtttttgctaaggagttaagcccatggaactttgcacattacgggaatattaattaattcaaacatcgtgttggacatattgaattgggaagtgcggttcgatttagggagacttgcctgtacattcactgtttgtatacaattgactacagtgacgtaaggcggcgagcggagcggcctactaacgacctaattaatggacggtgggtggtgggaggtggaatgggactgatgggcagtgaacggatgttggattcccgcacggttttcgggctcatcgcttaccaatctccttgggcagcttgtcattttgccggaaccactcgaggagctccttgagatcccgttcctgcttccgcaccgcctgttccgatgtgtcgctatcctgttcccgctgcagctgctcggacgtaccgctcgccccagtctctctcacacctatgcggctcattggtgctgtggcctgggtatcgattgctccgtcgctgttccctccgccaggttggtctgctatcggctatcggacgcagcaatcgctttcgaatcactttcaaaaacgctttcgaatcacttttaaacctttgggcttgacgcctggcagccgactgactgacagttgcgcatcgatttcgctcatcgatttagtttttgaatattcaatgctactgcgttggcaattaaagccacgtaattttttaatggcttttcggccatcgtttggacgacgcttaatagtgcctaaatatgttccgttccagcttctggatctgcctaatcacctggtcgtgtgccgcatcccaatgccatcgcaagtagtgacacaattttcactttaattgataattcgcgggatgggcaatttttctaagaagcgtttgttttttgtaatcatagaagaacattgaaagccacctggcttttgggtgtaataaaacctcataaaatgtaattaatataatttattgttttgtcaagtatattgttcccattgctgtcaatcaatcgacaatagccccttatttgataatagagaaattggtaagaaaataataaaatatgaaaataagaattcttaatggagggccagcttcactgagctctagaacctgtaagtgtttctgggactttcccaactaatcgatatcttcgcttggcaagacgcgatgcttgatcacatttatgtttatatcacgttcgatgatcaggatatcagaaccaggaccaccgactcttgctctgagcggccaccttccagtaccgctcgtcgctgagataagccctatgaagtacagaatgggtggctaagatggacatccccatctaaaggtaatactcacgcgttgtccctgatggactgaatgcctttcgccttgagttccgctacagtgcccgccttgccgccgtactcgttcggcaacatgtccctgggcacttctttgtaaaggctatccataccctctgtgtggtaccggatctgcaagacgatttggttagctagtgcttagaatgaagtacttttcaggttctaccatgttgcggacttcctcccttaggaagggcgacatcatggatatgagcttgtccaggtaagtggggca

SEQ ID NO: 5567 - DNA, 1020 bp, DROSOPHILA
ccaggcgtcaagcccaaaggtttaaaagtgattcgaaagcgtttttgaaagtgattcgaaagcgattgctgcgtccgatagccgatagcagaccaacctggcggagggaacagcgacggagcaatcgatacccaggccacagcaccaatgagccgcataggtgtgagagagactggggcgagcggtacgtccgagcagctgcagcgggaacaggatagcgacacatcggaacaggcggtgcggaagcaggaacgggatctcaaggagctcctcgagtggttccggcaaaatgacaagctgcccaaggagattgatccgctgctgctccggcgcttctaccagtgcatgtttggagacgtggaggagactcggaagctcatcgaggtgaactacgccctgcgcaaccggcaccctcacctgtttatcaagagggatcctctagacgcggacagcaagcgcacctttgactacgcagacattctaccgctgcctggcctaacgccggacaaatgcaaggtgtcgctgtactgctttcgggagttcgaggcctccaagatgcaccacacggaggacacgcgcgccttctttatggtcagcgactgccggttcgtgacgccggacgatctcgccaaaccggatgtcctgtccgaaggagaggtgcagatattcgacatgaagggcaccacaatgcggcacatttcgcggctgacgatcagcacgctgcgcgcctacatcaagttcctccagctggcatttccggtgcgcctgcgcgccattcacatgattaactgtccaacttacctggatcggatcgtcagcgtggtgaagccgttcatcagcgacgaggtcttcaagctgatccgtttccacacgcaaagcataaatacgctgtacgagttcgtgccgcgggagatgctgccggaggagtacggcggaggagccgggtccttagaagcactgcggacccatacccaaaaggccttggttgagcatcggtgggtttcgatctgcatgttatag

SEQ ID NO: 5568 - protein, 290 aa, DROSOPHILA
MSRIGVRETGASGTSEQLQREQDSDTSEQAVRKQERDLKELLEWFRQNDKLPKEIDPLLLRRFYQCMFGDVEETRKLIEVNYALRNRHPHLFIKRDPLDADSKRTFDYADILPLPGLTPDKCKVSLYCFREFEASKMHHTEDTRAFFMVSDCRFVTPDDLAKPDVLSEGEVQIFDMKGTTMRHISRLTISTLRAYIKFLQLAFPVRLRAIHMINCPTYLDRIVSVVKPFISDEVFKLIRFHTQSINTLYEFVPREMLPEEYGGGAGSLEALRTHTQKALVEHRWVSICML

SEQ ID NO: 5569 - DNA, 2687 bp, DROSOPHILA
ggcaggagtgctgccaccgctgatgttggctaatcctctgtccctgtcgcgatcccgctcaaatccacctccgccactagctccggtcacaaatccgcacaccgcactcaatccactggaaatcgaactggagcccagcccacagctagcgcgcccgcttccgctggtactcctgctcccagaggcgcttcctcctgctccacctcctccgcagcctcctccgccaccacctcgttccgtggatgccacgccaacgcctccgctgatcgactttagcattaattcatcacacgccggaaggatcctccgtcgtcctcgttgtgggtaatcgtgctccggttttcacaaattccagattttatatgcaattgtatacattcgcagcttaactcgtagctgttatcggctatcgataacgcaacagtatagccatggtatttggtatatttcacactgttcgctatagttcacacacatacactctcgcacggaagatttaactgaaccgaaccattataacggtagaaactgttaactttacttttccaataaagaacttggaatttaacttaaaactaaatgttccttagcattgccgcgtggcgcccacttgaaatgggttcaatgtggggcaggcgtgtctctttgcccattctttttaaatttttaaaattgtgtgcagactcaccacgttctggtggcattagcggccgacgagaatttcgtcgctgacttcgtagttcattttgttggcttgcatttaaagacgccatcgaacgtaggatatttaagcacaaacacaattattacgattttaaccaaccgcttaaccagaaaactgaactttttgtgacgctttgcagttggcgggcggcatgtctttggtatataatgtgtgtcaaatgaatttgcgtcaagttggcgtcggtgagttaggacggtatttatggtcggaaaatacgtggtcacactgtacatataaaaaacgacgagaagcgggtttgtctaaaataaattgttgaactaagttaaggtagaattaggacaatggccagcggatccaggacaaccattttgccccagtcgaaggaggcgcttctgaagtcctataatgcgcgcctcaaggacgacgttcgcagcatgctggagaattttgaaggtaagtgcggctcagttgctccgagcaatagattgtaataccgtgttctcctccagaaatactcaagctggcgcgccgtgagagccacagccagatttcgaagaccacgcagtgcgaacaggatgccctggaaatgcaggtccgcgcggccaacatgggtgagtaaatccactccctgggaaccagattcgagccatttccttcatgcattccgctttatagtccgtgccggcgagtctctgatgaagctggtggccgacctaaaacagtacctaatcctcaacgactttcactcggtcaacgaggccatcacaaacaattcgcagctgttcaggaacacacagagcgagtgcgacaagaagctgatgaaacttagggacgaaatggccatggacttgtacgacctggaggaggagtactacaccagcatttttaagtagcgctaggaggggaaggggttcaccttatttgtgatgaactggctttggccgaactgtagaatttaataagaaatcattaccacattcacttgtaaattttgtttagcaaacagctagtcgcgtcgcactcacaagacctgctcctgttccgcctccgaggacaaggagcgactgtccggagaggccgcgctcaggctgtcaactaggtcgcccgtgtaaaagagcaccgccttcgggacgatttgggtgcgtagcaggaagcccacttcgaaatcgttgccaaggatcagcttggtcttttcatccgcgagcgacaggtccaaggcctgcggcggagcaaagaagcgaaagaaggactcccgaggcatgaccttggtgactcggtgtgctctgttccttcgcctgctttccaccgtttggagagtgagattggagccatcgcgccagtggatgtggcagccttcgcaacgaactatttcgggcccttcgaacagaaagggatactccgggtccgccgagtgctgcagaaagtagcgcttcgtgagcagcagcgaggaatcgtgcaggaagctattgggccgaaactgaaagatgaccatgtagctgtcctggtcgtaagccaggcgcacatccattaggctctccagaagcggctcgtcgtgatcctggaccaactccgagagcaggggcacgttctggaaaactgtcagccaaaagcgtggaacacccagcgtagtcggcgaaaccggagccagtttttgcctcagctgtcgcagctcctcgttgttcccgaagtccaggtacagagcatcctgcgggtcctcgggccaggtcttctccgtttggatcggtggctccaccgaaccctccaaaatatcccgcctcgcatcgaagagcgcgcagctctggccgtagaaacgtcgctccagctcgtagacttcccggaagaactgctccgaaatgcgtacctgttgcagctgattgtgccgcagtgcccgtatgcggttctgcacgggctccgccagctggccgatcatgtgccgcagaaaggccttccggctgcgggcgggaaggtccgccggactcaa

SEQ ID NO: 5570 - DNA, 567 bp, DROSOPHILA
tttgtctaaaataaattgttgaactaagttaaggtagaattaggacaatggccagcggatccaggacaaccattttgccccagtcgaaggaggcgcttctgaagtcctataatgcgcgcctcaaggacgacgttcgcagcatgctggagaattttgaagaaatactcaagctggcgcgccgtgagagccacagccagatttcgaagaccacgcagtgcgaacaggatgccctggaaatgcaggtccgcgcggccaacatggtccgtgccggcgagtctctgatgaagctggtggccgacctaaaacagtacctaatcctcaacgactttcactcggtcaacgaggccatcacaaacaattcgcagctgttcaggaacacacagagcgagtgcgacaagaagctgatgaaacttagggacgaaatggccatggacttgtacgacctggaggaggagtactacaccagcatttttaagtagcgctaggaggggaaggggttcaccttatttgtgatgaactggctttggccgaactgtagaatttaataagaaatcattaccacattca

SEQ ID NO: 5571 - protein, 143 aa, DROSOPHILA
MASGSRTTILPQSKEALLKSYNARLKDDVRSMLENFEEILKLARRESHSQISKTTQCEQDALEMQVRAANMVRAGESLMKLVADLKQYLILNDFHSVNEAITNNSQLFRNTQSECDKKLMKLRDEMAMDLYDLEEEYYTSIFK

SEQ ID NO: 5572 - DNA, 4159 bp, DROSOPHILA
gaacggcgcgttaaaggaaacgcagcaaaatggcgctaacagaacttttagcacgcgatgaaatacaaagtgaaaatctatttacgctggacgagaactttctatgttttcgttttgaaaaaggtggaatcctttagaatttaagtgcgcgattcacaactcacaaacatgcgatacgttcactaaacgcgtttaaattcgaagctcgctgggcacgcgcttcagtgcattgaacgaacgtgggaagaaagagaacaggacgatatcgatatcggttggttttcgatttacagcgcactgatggaagtaaacttgatcgttaattaaaaaaggaaaaataaggcttacgaagtttttaaactttaattaaaacgacacaacatatgctaaatattctacatattccagttacaatcaatttcgccaagccattttcatggaagttgaatactctttgaacctgtttgaatatatctgaaaacgcaaatctactttgtgttattattttgccaatataggcaatattatttgaaaattaaccgcaagtccattgacgaccgcaattcagaataagaacgtagcgtaattttcccatcttcaaatattgtttttcctaaacttaccgattttaacactttttagttttaaaaacgtttgtggttaatccgcaaggaatttgtgacagtgaaaaaataaccgctttgtacgcgcacgtgttgccaacaaacacttcagcttttgtcagtgactggattctaatttaaatttatcgataacgtatgcaattcttattcgaacaatatagttatttctaaaaactgtgtcacggaatttctttttgtaattattacctatataaatatatatttatacaaatatttataacatttgtgttttaattgtcatgcccctttagttttttttacgctagaaacttagctacttcctaggtcgagagctggccacactcttggcatgtcttagttatcgataattcccgccacttctgagcattgagtatattttgcgaactatttgtttaccaattgaatattttgataatcagggcccccagtgaagtggcaagcgtcatgagtgccagcaacaaaggcggttacaagacgccgcggaaggagaacctcatgtccattgagaacctcaccaattcggaggaggaatccgaggacttgaacacggcaatggttgggaatgcagtggaatctcagcccaaggtcaccagtcggcgttccacccgacgtccaagtcccaccaagaaataccaggcgtaccagaaggaaagcaatggaaaaggccaggaagagcgaattgttgtgaactatgtggaaatgtccgatgaacggagcagcgatgcggaggatcaggaagaagaagaaagcatcgaggagtcggaaaatgctgcccgtcccgctgccaaggatctgcatctcatccaatccgagtacaatgtggccggcaccagcatgtttggcttcaatacgcccaagaaacgcgatgccatggcactggccgccctaaatgccacgccctgcacgcccaagaccccaaaaacgccgcgtttgggtgtcaagacgccggatacgaagcgcaagaagtccatggatcagccaaagactcccgcccatgtgcgcacccgcgtcaagaagcgtgggtagcctttttctgcgtccttttaccattttttccattatttataaattcattatcactttcagagattgccaaaatagtggccgactcagatgaggatttttctggagatgaaagcgatttccggcccagtgacgaggaatcctcctccagcagcagtagcagcgatgctggcaactcctctgacaacgacgccgccgatgatgagcccaaaacgcccagtagagcccgccgtgccattgtagtccccgttctgccgaaaactccatcggcagcccgcctgcgacaatcggcgagggcgaaaaaatcgaatgagtttgtgcccgagagcgatggttactttcactcgcatgccagcagcaagatcctcacttcggatcacaccttggatcgcctaaagaatcctcgcctggccgccgatcgtgttttcagtttgctgtcggaaatcaagacatcggcggagcatgagggttctattaatgccattatggaggagtatcgatcgtactttcccaagtggatgtgtattctgaacgaaggcttcaatatacttctatatggattgggctccaagcaccagctgctgcagtcattccatcgggaagttttgcataagcaaacggtattggtggtgaatggcttctttcccagtctgaccatcaaggatatgctggatagcatcacaagcgacatattagatgcgggcattagtccggctaatccacatgaagcagtggatatgatcgaggaggagttcgcactgataccggaaacacatttgttcttaatcgtccataatctggatggagccatgcttcgcaatgtgaaggcacaggcgattctttcgcgcctggcgcgcataccgaacattcatctactggcctccattgatcacataaataccccactgtgtgagtgcaccgatgctttgagatctttatagtgcgacagcaaaactaattattgtttacgaatttgcagtgtgggaccagggaaagctgtgcagcttcaacttctcgtggtgggactgcacaacaatgctgccatatacgaacgaaactgcgttcgagaactcgctgctggtgcagaattccggcgaattggccctctcctcgatgcgcagtgtcttctcatcgctaacgaccaattcgcgtggcatttacatgctgattgttaagtatcaattgaagaacaagggcaatgccacataccagggcatgccgttcagggatctctattcgagttgtcgcgaagcatttttggtcagctcagatctggcactgcgtgcccagctcaccgagttcctcgaccacaagctggtcaaatcgaaacggagcgttgatggctccgaacagctaaccattcccattgatggcgcactgctgcagcagtttctcgaggagcaggagaagaaataggccatcggcgtaattttagaacatattaatttattatctaatattgttaaatacaattacaatttcgctttttaaaaatgttgtgttgctgtcacttgtattgcccatgatgagtgcgcagtgtttgttttcgctcttttttatttttttgtcaatttctacacattaagattggcatgcataaaatttgtcgctttgctcgaagatacacattctaggatggctagtttttttcctcagctccagttgcgagcatatagcaacacaaaacttcacaaagcactgcaagtgctcgacgactgcggggatgagagcgcatttggatacgattttaaggatcagaagaggcgaactaaacatagctaagcatgccaaaaatgataagactcactaccgcctgaccattccgtgctcctcatccattccaaaggctaatatcggttacctattcactatacagacacgcacatacacagattaaagcgttggacttgtaactagttaattgtgcactcgaaacgaaatgtaattgctgcgactaaggctagtttatttacactttcttgatagcaaatcacatgcgaagtcaatcggaagtacacatacaatggggaatcgttcatggctggctcctattaatattattttgagtttattgcaaaattctaccccttcctgaatacctgaattgtacacaccgagtttgcgatcagcatttttgcatataaaaatgtcttatctcctgcgccgcacatttactttttctttaatagttagataattgttatcacgtttactttgctcgtccttttttttaagcttcgtttgtgggaatgaatggcagaatgtggttctgaatcaatcagaagagaaaccacccaagagaatctccccttttacaaaatgaatcgatgcaagagtgttgttggtttttcacttttatcggcttattatacacaaattgctactgcttgcgtttatttcgacaatgctttgtttgtttgtttttatagttttgtacaacaaattaattacattttgcgcttaacaaagagaaacaggcgtctgatatt

SEQ ID NO: 5573 - DNA, 1947 bp, DROSOPHILA
ccacttctgagcattgaatgagtgccagcaacaaaggcggttacaagacgccgcggaaggagaacctcatgtccattgagaacctcaccaattcggaggaggaatccgaggacttgaacacggcaatggttgggaatgcagtggaatctcagcccaaggtcaccagtcggcgttccacccgacgtccaagtcccaccaagaaataccaggcgtaccagaaggaaagcaatggaaaaggccaggaagagcgaattgttgtgaactatgtggaaatgtccgatgaacggagcagcgatgcggaggatcaggaagaagaagaaagcatcgaggagtcggaaaatgctgcccgtcccgctgccaaggatctgcatctcatccaatccgagtacaatgtggccggcaccagcatgtttggcttcaatacgcccaagaaacgcgatgccatggcactggccgccctaaatgccacgccctgcacgcccaagaccccaaaaacgccgcgtttgggtgtcaagacgccggatacgaagcgcaagaagtccatggatcagccaaagactcccgcccatgtgcgcacccgcgtcaagaagcagattgccaaaatagtggccgactcagatgaggatttttctggagatgaaagcgatttccggcccagtgacgaggaatcctcctccagcagcagtagcagcgatgctggcaactcctctgacaacgacgccgccgatgatgagcccaaaacgcccagtagagcccgccgtgccattgtagtccccgttctgccgaaaactccatcggcagcccgcctgcgacaatcggcgagggcgaaaaaatcgaatgagtttgtgcccgagagcgatggttactttcactcgcatgccagcagcaagatcctcacttcggatcacaccttggatcgcctaaagaatcctcgcctggccgccgatcgtgttttcagtttgctgtcggaaatcaagacatcggcggagcatgagggttctattaatgccattatggaggagtatcgatcgtactttcccaagtggatgtgtattctgaacgaaggcttcaatatacttctatatggattgggctccaagcaccagctgctgcagtcattccatcgggaagttttgcataagcaaacggtattggtggtgaatggcttctttcccagtctgaccatcaaggatatgctggatagcatcacaagcgacatattagatgcgggcattagtccggctaatccacatgaagcagtggatatgatcgaggaggagttcgcactgataccggaaacacatttgttcttaatcgtccataatctggatggagccatgcttcgcaatgtgaaggcacaggcgattctttcgcgcctggcgcgcataccgaacattcatctactggcctccattgatcacataaataccccactgttgtgggaccagggaaagctgtgcagcttcaacttctcgtggtgggactgcacaacaatgctgccatatacgaacgaaactgcgttcgagaactcgctgctggtgcagaattccggcgaattggccctctcctcgatgcgcagtgtcttctcatcgctaacgaccaattcgcgtggcatttacatgctgattgttaagtatcaattgaagaacaagggcaatgccacataccagggcatgccgttcagggatctctattcgagttgtcgcgaagcatttttggtcagctcagatctggcactgcgtgcccagctcaccgagttcctcgaccacaagctggtcaaatcgaaacggagcgttgatggctccgaacagctaaccattcccattgatggcgcactgctgcagcagtttctcgaggagcaggagaagaaataggccatcggcgtaattttagaacatattaatttattatctaatattgttaaatacaattacaatttcgcttttt

SEQ ID NO: 5574 - protein, 618 aa, DROSOPHILA
MSASNKGGYKTPRKENLMSIENLTNSEEESEDLNTAMVGNAVESQPKVTSRRSTRRPSPTKKYQAYQKESNGKGQEERIVVNYVEMSDERSSDAEDQEEEESIEESENAARPAAKDLHLIQSEYNVAGTSMFGFNTPKKRDAMALAALNATPCTPKTPKTPRLGVKTPDTKRKKSMDQPKTPAHVRTRVKKQIAKIVADSDEDFSGDESDFRPSDEESSSSSSSSDAGNSSDNDAADDEPKTPSRARRAIVVPVLPKTPSAARLRQSARAKKSNEFVPESDGYFHSHASSKILTSDHTLDRLKNPRLAADRVFSLLSEIKTSAEHEGSINAIMEEYRSYFPKWMCILNEGFNILLYGLGSKHQLLQSFHREVLHKQTVLVVNGFFPSLTIKDMLDSITSDILDAGISPANPHEAVDMIEEEFALIPETHLFLIVHNLDGAMLRNVKAQAILSRLARIPNIHLLASIDHINTPLLWDQGKLCSFNFSWWDCTTMLPYTNETAFENSLLVQNSGELALSSMRSVFSSLTTNSRGIYMLIVKYQLKNKGNATYQGMPFRDLYSSCREAFLVSSDLALRAQLTEFLDHKLVKSKRSVDGSEQLTIPIDGALLQQFLEEQEKK

SEQ ID NO: 5575 - DNA, 35058 bp, DROSOPHILA
taaaacaagaaacagtttaatcttttcaaaaattatgcattatgtattatttttgctttgaattagttgttttttagtttagttctgagtttagatagcataattaatcgtaagtgttggttttccctatttgaagttaaatttaatacattttgtttagttgtaaattattgtaatgtaaattttaggactaattaaagttcatatctaggtatatatgtatatttataggtagtgttataattgttgtaaatacaatcgaataattaactaatacacaataattacagaacaaattgattggaaatagatttctttgctctgatcaaacgtctgaatatctttgattcttcacataagcaattctcagataatcatttgtggcatgtctagatgcatataattataatgtgagtagaggcatacatagtatatgggtataaattgaaattttggaatattcaaatttgacacacatttctcgtacttttgtcttttctttttcatttggagtgattcgcaaacagaacgttaacaaaaagagagaataaatcatacagaaagaaggcatagactaagcgcactttgtaacaattcgctcgactcctccggtccggtcattccgtatcattccgccttaaactcaaataacacttaacacgtacataaatctattaagcttattaaacttaacatttacagaatttaattcaagctaaacgcaatcggttgacatataaattattgttaaaagaaatgcacacgcgcacaaaaacgaaacagaaaacttagcggctacgcaaattgaactaattgctaagaaaataaatttacatcaactgtgaatgtttattaattacaaattagtgattggttgtttaatttgcttgccgttcgcctgtgtgtgtgtgggttcagttaaataaataggtgttggttagtccttcccgcagatccgctgccctcgtttagtcatttagtctatcctaagctctacacactaggagttattctcacagtcatcgggtttgtgcttcgtgcgtaaattgctcaaaagatcggcacagttgttgaccatcatcagatagtctccgttgtcagcgttcagctgatcgtggttcaatcccccacttccacccactcctaatcccccacctccgttgttcgtcttatccgcttgtctggaaaaaagataccatctcgattagtactctgaatgggatgcacttcgatctaagcattgcatgagtatacagttctttttgtgaatgctgtagattcatactaaactatcaatcctaccgattggtgatgctgcttagcatattcctggacatgatcagggcgttctccagttccttcagcagtagcgtattctttagattcgcatgcagctgcatagctgcctgtgtggttgtataaagtttattgatcacattgtgtacttgggcttcagctgcaaggaaataaatagttaataaagatgagatgtatatttttaaatattttcttacgatctgtgccctcaaaatcctctgtggaagtcactccgctccgctgtttggcatttccgccggggctgccactattgttgatcatcagtttgctcttgtgatcaaatgccaggttcctaggccttggtggcacaatgggtttgttgttgacagtgctattgggcgtctcctcggagctggagtcgtcctgcatgggcgtggctaatggaggagtacacctaattatttccgatcgaaagaggacgaagcaaaagaggacgaacacttaccactgctaaagtttggcgtctttcgccgattgttgttgacattgttaatcttgttgctgtactggcgattcgcagctgcaggttatggattgagctagtttgattatttctcattttaaatattaagtttactcaccaatgggtccgttgctgcgtccctgtccgttgctggcactgcgcaagcggttgctatcctcgggttccgagtcgctctacataaaaatatagagggataatttagttttggaatggaaaatggattggttactcaatacttacgccctgattgagaacattcattgagttgctggaggcacccaacccagttttgccctgcaaactgttccttttgctggccgatcgcgagacgtttccatttcggtgctggacctgcggcttctgtggagtgccattctgcgattttccagctgcaaagtcggtccagaaattagtaattagaactcttaagatttaaaccagggtgcttataatcgagggtgcttacgcttgccaaagttgcccatgtgcaggtcgctcagcgagcaagcgcggcgtatggaggactcctcgatgggcatgggattgagcgttttgggattgcctgaaatgtgggtcagagattagtttcggctcgggtcatgcggttatggtattttctgtgctaggatatcgagaaatggagggtggtgttcaaaaaggggaaataaaaactagtaaataactgtgcgcaaatgaaggtggcggaaaactcaagaggcacaacaaccaaggcggaaatggggctcaaacctggctccatcctcaaaacaacagtctgtccgatgccatcgtgatcagcgctatctgcagtgatcccggggttcaccggatctccgctctcatcgtcggcaatcacttccttggccaactccacaccctggctgttgtagatgccagtgaaatcggtgctctccaagacatctggtaagctgcagtttctacggatattcctcgcataggcgcacaaatctgaggcatctttggatgccagatcctcatcttctgtgggatcttcacctctggcgagcatgtcaaagttcatggtcaaacttttcacatagcccttctccttggcattgcagttgaagggcctcaatcgcgattcggtggccagacgtatttgctccattttgttctcctccatggcgattaacttctcgatgatgtcgatctttttggctatattctggcactgatggctggtggagctgcctgctccttttccctttccacttcctccctttccgctgatcttgccagcgttgtcaaggttttttcgatacttttcccgctcctgctgtatctcatccaccactgcttgtagttggggtttggtgtacagtttaagggtctgcatgttctccagattctccggagcatttccgttttccgcaaaatacatttcgaaactgcgctctccataatcgctaggcaggctgcccacctccatttccggtggctcctcttctctggcctgcctctcccttttggcactgggcgtatacttaatctgcgagactgtattgaagcgcacagagatctttggcctatttttttgcctcacactggtggcccttcgactgctttcgctggtatcaaagcgcgagactttctttagacaactctgggttgttgatcctccagccagagctccagaacttacggagctccgcatcgccggcctcctttgctgttcccgctccctttgcttttccttttcgaatttttgtaagttatgctcaaattgctggacaacactggcggttctggactgggatttctgtttttgctgcttctccatgtggctcaaggtgctgactagattgtgaggttttgccggcaccggcggcttgggtttcagtggttttctcacaaagagattgtcacctgattgcatgggattcgaatttctttgctgtcgctgttgggcgaagtccgtactcaaggacttgttaacacctgaggtatattgcttattcttggatcgcagagtgggtatattttcagatgcctgaacctgagctatcctgggatatgtcttagaactgggcagtggtttcaatggctccagattgtagcctgtgacatcgaagctatccgttgttgtggagtgctgttgtcgcatatagtagtcgaagctgccgtaggcattggggctgttcccgtaggacttggacaccggaccgtggataataaagttccggatgccggcatggcgctgttgaagaacagccacctgagtttgaggatactccagaggagcactctggcaatcactttcgtccgacagtacgctctccaagctgttgcaatagcttccaggaccatcgccatcggaaagcaaagagagtgactcctgactctgctggccggtgaggaaaaaactggcgctggaatggcgttgggtctccagaaatctggcctcgtccaatcttctctgactggccgcaaattgctcgggctgcagaatatcggagagggagaccttcctctcgcattggtaaaattccctgtaaacgtaatactgagtagttctaccagtgggcgtggaatcaccagtggaacccagtcctcccaagtttctcagattcgctggcatggaatacgaggctggaataccgggctcatccagatctccgtattttcgggtgatctcatcaatcatcttttccgtatcagcatgaatcatgtccagaattgttctagcatcatcagcataaacagagtgccttttgggctcgccgagcagagcacctctctcgtttccctcggcagaccattccacctcttcgtggactggagaaactggacaggatttgtagtgctttaggatgctaggcgtacgcctgttgttcccagctggattcctctttgccctttgttgctgctgctgctgctgctgttggcgattttgcggctgggaatgcgaacgcattgcagatgtggaccccgctgcagatcctccgaacggaacaccgggtggcggatggatctgatgcacgcccacatgatgtggatagggcggatagtgctgctgcacctgtcgcatcgtctgaaagttttgttgcagcttcgatttcggggcagcacagttgaaaaattgttgcgaggcaggaggcgcatattgctgatgttgctgctgggcttgctgatgtggctcctttggaatttgatattgttgctgcactggtggctggatttgctgctgggtattcgttggtgcagccgttgctgttgtgttttgagggctagtatactgcgaagtgtcatgggagtcaactaatggggttagtcaaagtatcaaagtaaggggcatattgatcacaaatggtaccaaatcgttatacattagttttaccgcagatgtcacaaataggagagcaatattcaaagagagatagacaacagagagagcaaacaacgggagaaagagtttttggttatattagcctactatccaacttggaggggatattcatttggttttaaagctgtctgggttcaatatttctcccatcccttacctggcttctggtaacgtcctggtcctccgcccgcattccttgatccatccaagttggctgccagactgaggtccgatatgctatggcttccccggaggggtctatggcctacctgtgggtcaaagaatataaaatgaataagggaacataaccataaacttaagttagtaaaacacccacacacgcatagtatgtaaatatgttaaaggaaatcaaaacaaaagcataagtaaagttagtaaacgcaaaaacattatgagtaaagttatgggattgagtcagtaaattgtgagtggttttcttgttgagtggtgtgatatggagtgaaaggctgagggagatcgctgatctgcagctcactcgaatcgtgtgaccaagcaagtttttcataatcgctagtttaggctatttttagaaacagcttagtgtggtgggaatttgattttcattgactcacgaagcatcggtggttcagtggtagaatgctcgcctgccacgcgggcggcccgggttcgattcccggccgatgcataaattaatttttttgtttttagttatttaagcaatttttaaagagttatttttgtttttatagagtaagtattataacaatgtgttgttttattttgtgatttttaaagcattgtgtttaacagcattgtcgttaggaaagcaaaacatctttagattccaacataaatcggctcacctcagctatagcattcaaccgtgtgttgccattttttcgcgtaccctaaacacacagagtcggtcagggttttattatttttttgtttttttttttttttttgggtgcatgtgtttttggggtgggaggttggagattggaggacggaccagacaccataaacaaataagggacacatataaaaacacagaagaacaacaaaagaaaaacacaaattaaatgggcaaataaaagtgctcagataatggaaaaccgacgaagcagtaaagtccgcacagtgggcacagttaaacggaagtaaggtcactcttgacccccagcacttacattctccagctgctgcttgaccttgttgatgacctgcaacagctcctcctttttggtacttgtatacgacttggtgatggtgggcggcgcggccacgcttttcccattctccgtattgtgcttggcgctgatgctgcggcgacctggaagatgaaaggatatgcaattaaatccataaagagatttccccaagataaaataatatcttactgctgccacccctttccattggcgttgttagtcccggtccctctggcaaagcggcgtgcaggaagctgttggtgctgctctggggcagattctccgagctgccacccaacgtcgaggccagcgaccgttcggcattttcggcactgggcgtggagccttcgtcttcggtatcggaggtcccagttccggtgctcgcagtatgcgaacttccgtttccgctgagggccgaaggggtaagctgaaggccggacttttcaaacttctgacggcgcaccgatttgcgcagctcatcctcgttcatggccgtcaccttgaaatctctgcaagagaaaaagcattcgtttacattatttgctactattattcatttgagtatactaacgttggcgtgctgggcgcgaggttgttgtaaaacattccgtgatcggagctagttctctctccatcggagatgtcctccacatccccatcgtgatcatgggtatgggtatcgaatcgcagacccggctttaaccgtttatccggcaactggagacgctgttgggcagctccagaacccgttgacatggcaccgttggaggcagaaacagcaatcgaggaaacggaggacacagtgaccaccgttccattgttgctgctgccaataaacttgagttcgccccttcgcgtctccattcccgaatcgatggaggagtcctcactcaagtaggtttgattgtacgtaatgtccttggaagaggcactattgtaatcagaagtctggacattcacaccgctgtgaccacctacagacgaaacggttcccagaggactttcggagttggaacgcaggtcatcggccgtttccaactgagtgctcctttgggcccatcttcccctggcccgtggtgccagtcctgtcatctgttgactgggcgatgagcttagatttcccatcgatgaagcagcatgcatgccaggcacagtcgcagatccaccactgggcgtgggtatggataaggccccactatccgaatcggcagctgcttttcgcatcgcccactgaggcagttgacccacatcggaaaacctttcggccactccaaacttgggctgcaattgcggctgctctatttcactggttggcgattccaggacaataccatccggtggcgaaataggagccaagggtcgcggcaatggagcatgcccagatctgagacgctgttgcgacatcctggcctgcatggtcactatcatatcgtgtggcacttgccatatgaaaatgcaaccgtcgccacttgcggaaattaaatgtctgcaatcgttggtgaacttaagtcccgtgaccaactcgctgtgaccgtacatccttgccatgcactcgttcgagtagtaatcataaacagcaagcgttttatccgtgcaggaagtggccacatagatgccactgggatcgagactgagtttgatcagacttccttcgtctgaatgagagcccttgaaggtctttgtttgcttggcattctgggttccgtaaacccgcacgttgcgatcctggcaggctgtcaaaatgtgcttggcattcgagtccacctccatgtcgtacaacgtcgtctttcctgaggtgttggtgcccctcatgaaaatatttccctgttaaagaaaaaggtgagatcatccaggccatataaagcaacacaagactcacctgaaaactcctaaacataatggacttgtcggcgccacaactgatcatctggaagttaagtcctgcacctacaaacttgatggaggtgatggaggagctgtgatcgtccagcgtttgtagcagtagataattctgcgccacgtcgaacacatggatcagccgatccctactggcactggccaacaactttcgctcgatcttctcgttggaatactccaaacaaagcacctcagactcatgggcttcgatggtggtgagcaggcgcagattgaccagactgtacacgcgtatgttgccgcaccgatctccacttgccaagtgctgcagttccggactgatcttgatgcaccgcactccattccttccatcgtaggaggagtttccagctttgtcgaacagagacgagccctgatccttgataaactgcagttcatcgtcgctgtagacgatcttcagcagctccttggagtagatgttccttcggtagatatcgttgttggtgcatccgtccaaaccccagacacggatcgtgtcgtccgacgagcaggtgacgaagcattcctctggaagggtttgcgatggctcccgctccacgttatatggcactgtctccacgccccagatgcaagtggagtgataaaggaacgagtgcgacttgcccactcgtgagatgtcgcgcagatcccagatgtaaagagagtgatcgttgtaaacgcaactcacctgaaaaaaaaacaattaataattagtattcaattattgccaaactatttaaaataccctaccttcgaacgctgttcgtcgaacaccatggcaatgcagtcggggaacttggcctgctgtggcaccgacatgatgtggttgatctggatgccctgggccacatccacgcccaagtaatgagttctaggcagagtggtcacgtattccagcgtggccgaattgaagatgcgaatgatggactccgcacaccccacgagaatgaacctctcattcacgcagatacagttggcattggtggtgcggcactgcacccacttgtcgagcaggcggcgggagctgaactccaccaagtgtccttgccgcgtgatggcgtacgtgctctccgcacagatccccttgccgcacgccaccgcacaaaagtcgttgtcccgcaaatcgcccagaatggcgctgcgacccatcaggggaataggatccttgtactgcaaaggacgtaaatcattagcttttgaccttcagaatagagtgtgtcattaaatattcaaagcagcaaataatttccactgtattgtataacatttaaacagttttcgatgttcaaggacatgcctgcactttagagtcctgcttacctttctgccaccctctagataccagtatttcacgtggcgattacccacggtcacaaaatagctgccatcctcggaaaagcacacggcagccaccttggagctgattttattcgaggccatcttgaggttggcccgccagtcgaacacattcacaatcatgtcgtgctgggagcccaccgaaaccaggtacttgccagtgggcgaaaaggcctgcggattaagaagagagcgttattaccttcatttaattaaataaatgcaataaaggcgaggactcaccacacaagtgacggcgtatttgtggtccacaaactctgcaacaacactgccgccgctgcagtgctccagacttccgttcggagtctccagctcccagaccttgatggccggattgatgccacactccccggtggccacgtagcgaccacaccgggagaacgccacggatgtgaatgctttgcgggaggtgttgaccaggtaggcctgtgtctggcgttttgcgttgaagagcaccacggtgcagctgcaaaaagggagatattgaatttttagtacatatacatatacttaatacatgacgcagtcacttgaatgctgccacaacagaaatcacaaaaaattaggattaaagtagtaagcaaaatataggagtatgattaattactactatcgctatagacagcttttttccgagagtatttcgttaaactgctgattaaatgccaaatgaattagaatgctggaaatgatatcgcatttctgaagacttttacagaaagtgtgtatataacttacgatgactgtgcaaaacagtttgtaattaatattacattttgattagacaacaaggggggaaatgaatattcacagcgtaccttgcagtcagcctttttatttaaatatttattataaacaagttgcctagtccctcttcacccaatgctatcatctactggccccgatcacttaaagacgtccttgaccacgccagacggctaagttggctatacatttaaaatgcccaaggatgcaggctctgctctgcttggtcctttccttccaccttgccaccttcaaccacttcctgcctccgcttaaccctctaatgccagaagctaactgctgcccgcctggctcattattaagctctttggctgccttggttttgttttccgttgatgctactgttgcttggttaatgagcacatctcgcccacatctttcacttagggctatacacttccagctgggatatgctcaactaggacatacatatgtgtttatgtactttaaaataaacatatccataaacaaatattaaatataaaaacgaatagttaaccaactgcctgtttcacatttatttatgacacgtaattaaaaaaggaattagagtgcatttcactttcgcgttagcctgcaagagcattttccctcagcattttctatttattcgtactatgcatacatgtgagccaagaaaaaacttttgcatcgcaatggaagcgtaaatatgccctttttgttaatgcgcataattagtagacttccccggcttaatttactataattgaaatgttgtcgggaccaagaagcggcaagttaaatgggcaaaaaggttcggatttaaggggatcaagtgggcggcataaattgactttctaccaaataattggcgtggattttctttaaaccaaatatcaaacgtcatcgcacttcatttcctgccgcattccattatcactaagctttcgcttaaccaatctgtcattggtgattacacttattcagtttattacgtatacgccgtgttgaaacgtattgtgagctaggcaaacattcagtggcatatgcaaatcctctgcgggaaaacagcaatctcgttgacattatgtcacttctgcccctcctgtttcccccccccccccagccggactgtcacagattttcctcgacgagatgggaaaagtgcagccatgtgcgacagttgagcagagataaaatcaaccattttcattgcatttttttttttttttgggaaaacttaaagcgaaaattcaacggaattgcatccacatttttctgacgcaaataggaaatgagtgggcggttctgatggtttcgttttcgaatccacaggatatgtcacgtccttgaggtacatacatatatgaaacttacccagctggataggccagcaggccgctgactggggacacatccagagccgcattgctgcacacggtgaggcccaggacctttttgagttttatctgcaaatggaaagagaacagcacaacattagacattacatcacatcactcggggacccgagattatttgactagtttttgtactcttttcgcttcggcaaggtcgcgataatatttgcttaaataaaaaccaaacgaagataacttgctgtgtgaattgttaacgcacacaattcgcacatttatcatgttgttgccgtttgtttacatatgagcccagccttatacgatttacataaacataagcaaatgaaattgcctcagcatgttaacatgattttccaatgtttttgtaccgttcatcgttcatcaataatttaatatcaagttttctgaactgatatatttccccacaaggagcgaaagcgggtatcatatttctttattaatatataaacaactgtgtattaaaaaaaaaaagagtgtgattgtgtaaccaaaatgatatacgaaaattgatttttacttgtagtatctaaatttgaactccactcgtctcacaagtgaggaaatggggggtgtagcttactaaaacaacacttgttacccaagaaccctaatgatttcattcattaaaaccacacaaatatggctctttgtatttccatttggcttttgtattcaaaagccgccttgttacgcctcaccagagtttcaccttgatcttgcccaagctaccagctaataagttattaaaaaaagccacataaacaagtaaaacaattaggggcgtacggggctcagagcagaacaggttgattttttcagccatggcaataagtagcatggtgaaaaggaagtgcaagtcgacagagtgctcagacacactaccgcattcgaaacgaatattgaaactaatagatacaaaaggcggacagacgtaaatcagaaccgaacagtgggcgatccgtaagacgactctgtcaactttggcatgcggagagcatccaaaagatgcttgattgtgtttctgcgtcgcaaatgcgaaacgcaagctcgaatttcgaatccgattgctccgatacaaagtaagcgaatacattccgactgagatcatctcgaactggcgtcgaaaacaaaacaaaacaaagtggctccagcgtttgtttactacgagaattattttattggcttgtttcagttaagcgcgaatatcaagccacaccaacgcagctctaaaatctatattttaatgcataaggtcgatctaggaaaccggttttcgagtatctcactcgttgctctcccgcatatttgcatttttaatgacactgatacgccgtgaaattgtaaacagattttctgggcatgactaaaatgaagccacaatgaaaatatgctaaccatgactgtaaattataatcaaagcttcccccgaaatcatgaccaactggcatcgatttcgtttgagtgaaaaaccagagagacatcgcaattacggggcgtatgcgcaacgaaatccgtgagttgggcttaattcgttttcaaatgataattaggcagagcagccagcagccggaggggaaacaattattgttttttttttttttttaatttcaacacattcatttgtttggcttaaaagattctaaatagtcaaaaaatgtatgatactatactcctgttacgtactttaaaacatatttcttctaccacaaaggcactttaaattccatttgtttacacatttacttatttttgtccaaacggaagtcaacacacgccattcatcaaagcttaatttgggagctgccaaatacaactgagccacaaaaaaaaaactaagccaaaagaagcgaaattcttttgttacatatttggtgtagtagcgaaatttatgagcgccaaaaaggaacacaaatttccattttgtgcgacagatgcggcagttaaatggtaattaattatgacttaacgagtgacgagagactggccctgaccagccgttaaaattggccaataggcccgcggcaaatcacttttcggtcaagtggcttttggcccaatgcccgcagttcgggcataatgaagtgcctgcttttgctcggcctgctgctcattgttttggccaagttcaatgcacgcagctgttggctgcaattgctggccaaattctaggctccatacccaaacccacatggcctgaagcgactgaagcatttcggatttctgcccacaatccgagcgaaaaaggccacaaataagctgaagcatttccagcggacaggtgtcaaccaagaatcacgcaatgaaaatgtttaccttaaggccacgaaagcaaagagctgaaaaatatgcaaattgaaagccttctccggtgagaaccaaaattgacggtggattattttggggctacacggtatgcgcatccacttctgcgttactttattaatatttatatattaattgaacatgttcataaattattatatttaattcaatcaagtcactctgtggaaaacatggcatgccgcaaattattagtttggttacagtccagcagccaaaacccaactggcgcctaaaacaaatgccgggcttaattgcctattggcttaatcaataaacgaataatcaagcaggaaaagattttcaagctgaatttcttgcataattaaggcttgacttattgaaagcctgataagtcactttttggagtgtggtattatcaattgattattaattctgaacataactatatgctaaatctgttctctttggcacacagaatttgtgaattgtgtgtattggttattttgtttgtcctaccacgtttcatgcattgccaattggctttcatcggcttactggccaaacgaacatggcccccaaaacaaagcaaagaaataaaaacaagtacacagaacaaaatctttctaagcgcttgaggaattacgaattctttgttttagacttaagtaaatattttttaaggtgtagacagagaaatactgctgcacagtatagattcagatacatttgtaccgacaaggcgcttacgtgagcaaaatgcttatgactataaaaacaagccaaaagattttcgatagaaccaaatcgaaatgcgctggatttttgaaatacaactggtattttctattgagattcctcctttgagtttcacaatccgccgccactagctaattgcccataattaccctggggcagctcgggctcaaaatactagaatacttttgccgggcaaaaaccacagaaatccattacaagtgcggagacaaaagttttgtagcgaaatgaatcatgcggtggatagtctacccgcgagtgggcagaaatctcagtcatggatatgagcgagtagagtctaggccatgtccacacaaaacggatgttgttctggcccatatgcaaaggggaaaggccgtttgctttcttcgccagtcgaacgaaagttgaagtggaaccgagatatcgagggcgaatccgttccggctataaaataatctggacgacctttacctcgtaggctgccacatcctccttgccgtaaatggcaactggcgacgagtttcggggggcgaacatggctcaatctcttcgaaggtcctcgaggacacccgaaaccgcattcctcggtgcggagttcacttattcagttaattgcgagtcgggactctttgttatctacacttttatggcacatttgagacagacgcccaccaaaaatacaaaaatgtgcttaaggctataaattcgtaattgtttttgttcagttcaactctttttgggggcgttgtggattcgttcgtttttcgtacaattaataatacactttaaataatactttttagagtttttttcgttgcttttcggctatttttgatgactagtctttatagcattggtttttgcttctcttctttttttttttgcgactttgtcaaggtcgagttgtgtgttctctttgtatccggcgttcggttcgttgtatctttcagtttcagtgctgcggtatctgtttagtttatcttttgctttgccaccaccgaaactaaactataattattttgtatttttctaagactttttcactgcgtttcttcaactttagtcgagggtttcataaaatattcgttgcacgtttttcgctggcttgcttgctaatttctttttacaacaatcaaagcgtcgccctataattattcaaaaaattgctgctcgtttgtagttgcttttaactattttattttttttttgctagctgttgttgcattaaattatcgttatttttttctgtcagccgttgtcgcgtatcgttttttagcgcggctcaaatgaaactggcgagatttcagcgatttcagccacgactttgccgatatcgagttgagcaaacggagagcttgagatatggcaagagctatatgctataagctatatggagaaaaattgtagagagaggaaaacgctcgtttgagacctgtccgattgagtttttgagcggcacgcacacgtatctgccagatacttagatactcagtcttcgttctctgaaatttgcatatttcaccatggaaacacgtttctggccccaagtccaaaatagcaatcgctgttctaacacgcgaaatgagcaaactactttagatcgactgcaactttggtgcgggagggcggtggagaaatggtggggacttcaacttaaaacacgctaaaacaattaatcaattgccgctagtttgggcacccacgattgctttaattattttataatctgcatacacactgtggaaagttatggtatctaaagtctgtctgcactgcccaccgactgcaataaattctcgaagttacggaatcggtgggcgtacacgttccctccaaaagccgtaaaacgaaattaggcaaatcaacagtggctaaaagttacaatgagaatattgggtcagccaagtggaacgcatttaccactgccatgcagatagttagttacggctacagatggctacagatacagatacagataaagggacggattgtttgtttgggctggcggtatggtcaagattcagtctctgcgtcaattgctaaataaagccatagaattgagcactggctatttgcagaaaatatggtaattgccgtttatgacttatggactcaactggcagcatttgaatgtgtagttgcacattagggcattgggattttcgcccctttgttgttcccacacatgcatcaacacacttctgtcgacacacataaactagactctttggaaattttgattcaagtgcaatcataagctctgccgttgcacaaaggccaatcaaaaaggtagctacctttccataaacaactcagcaaaacacacacaagagacgacagaaaagaaaatcaatttgcataacacaaatcaagtgaaataatcaggcatcagtggagagaaaagagacagaggctgacaaaccaaaccgatggccaaacaaaatccgagcgcgcaacgcactgcaccaccgacagattgacacgcaaacaaagcagcacactggaaaaaaaatgcacagttgacagacacctttggattgcccgaccctccccatcaccatctgcatctccatcaccatcgccatatacatatacattcccctggatcccaaattgtgcagccaatttctttatcttgtgccatggcaaagtcgcagttcggcgctagtttatgggggaaagttacaagcgacttgctctgacagatgctaggcagatagatacagtcggggacatggttggcatggtggattcccgggggatggggggctccggtatctggtatctgggtagctgtgggtccgcctgcatgcgccgcatattcaaatgaatgcagactgctcattgttgctgctgttgctgtttggtagccgtttattgtagcacagtacgaaaaaatattatttactattcgaatttaatagtttatataattactgaatatatatttaagtagctaatagtttacacgaaatcttacatcaactatgacttcatgacatgaccagtttagtttctcacagtgtaactcgctgctgtgccacttggctgcctttttcctttgatttgcgccgtgaaaaatcgctggactgcactggaattacaaactatccatccacagtctgtctgcggagatctatttatcgcctttgcaatcccaccttctgcaatttgtaattaaaatgccattttgcctcattgtcattttcggattgtacaatacaattttcaaatgctttttgtaatgcaaattgccaatcgaattacttttgttcgaagctggccaatgctggaaatgagcctttgtccgcatcgatttgtgtgggcaactataatcaataattatgatgatttatttgcattgttctcagcgtcgcagattagatctccgctctttgtgggctaagaacatggcagttagccaagtggggagtctttctggagggttgaaaatgagttaggatcgagattgagttcagaataattgcataattggtccgatggttaagattggagagtcagtgggaatagtttaagcatgtgatttctcactcagaaagatagactatccatcgatcactgatcgattgaaaggcactcaacatttcaatcgcagctgttgagccgttcaatcagcgctcccataaacccactcaatcgattctggtgtggcgcatgcgcagtttgtccatctgtcaatatctcggcagctcgaattaaaaatgctcgcgatgaggtaagctgcaaaatctgagcaaatctcaaatctcgactatctgcgccaatcatttgcagtcccattgaagcgctgccgacaattttgattaattgcaatgatttgcagctagctgcaattcaaagtgttacaactgcaggttggccatcaatcgctgtgccacaattaattcgaaatcaataaacccataatccagcaatctcatacgggatagttggaaaaatggaaaaatatgtttaaatatgaaacataattcaataacaaagcgtggcaatttactcggcgcaccattcgaactacgtgacaagcgtgaatggctctcggcgtttagttggaaaagtctgggaaaatctggccataaatttggcaaggcgggaaagcggccacagggaaaaccagtgcatggaaagcaggaagaaaatatttaaggggccagccagcgcttactctcgggtgtcaaagttgatgaaagatgctgccagctccacggcctctcagttttaaaggcggagtgttgtctgggatggggagtttcaatctcgagactgcatcctcggcggctttggtcgatttgaaagtttaatcaagcattagtgttagttaagcggctttttcggtgattttattgtcttttgcgcccaagagttggtggtggcacgtagtgcacttcgtaatggccgcgcaatttgtctaatgattgctatttgagcaagtaatttgtaagtgcagatcaaagagagaggctcgtatacgggtatacagagttgaaagtctttttattccggtcgattataagtgttaattatatggcttaaaacgctttcggtgtaagctttctttaattgacacacagatctgtgactcgaatggctaagtgaacgctgctgacgtaaattgaagatgatggaatggtaatgtgtgggctttagcgggtaactactgtgggaagttgggaatagagctctaataatcaggaaaggtattcaaaatacttacttcccgtttaacgaaagatactttttggtcgaatattcagcattattttggtctatgatagtaataagagttgacttctttgatcacatttgacttttctaatcccgctgatattttccagccaagcccgtgttgctcaaattgctttcaaagtatcaatctccatcacatcttaaccctcattatctcacttcatttgtggtcgttccagtgccttttgcatatcaatttccccgccaaagacttaacccattacaaactgatggccacattcaagatattgattacataatgcccgagtcgcaaccgaaaaaaaatatcaatttcgtgcggtcacaaaacgcatttaagatttaattatatagagagtgaagcatttttaaattccactttgttcgtgctgtgcttcgtttttatgtactgctaaatgctgcagaggagttgtggtcgctgttgtgaaaaccactcgaaaaaaatgcgtttcaaattgaaacgactgcatacgcccacgggcgaaccagatacagatacatgcgattccatatgttgcacaaaagtctcgggagctgcggcagttgcaacgcacttaaccaaattgctacaatttgacaaacgctgaaaaagaaaaaatgaaaaaactgagcacgcccaagccacaagtgttggctctaataacaagtgtcagtctgtcagctgccagcccccaaaagctgcccacagttcgagttctctgtttttttttttttttttgtattgagatgcagtttctgcataattttgtttggggtgataaattttaagtacttaattttgtggtattaaattggttttatgacattacttataatttgattaaaagtcggcacggccattgaggggattgatgtatcatttccggcatttcataaattttaaaatcagttagatgccaaactctacccacaatattttttttgcgctttttgttggccattttttgcttgaccaaggcaaaaatatgcaaatcgctgttaacaactccagacattaatacgcctcaactaagttcagttgcttctttgaatctgttaccaaaagccataaaatatatgttttctagtatattaaataataacacaaggcggcagtctaaattgtagtgcaacaaaaaaataactaataaattatggccaagtgtaatttgacgtttttttgtgtgtcgcgatttcttgcgtgcttttcgagattgtgtgtctcatttcctgagctcattaaacaaatgtatagttcacgcccagacaaacctaaagaaaacctgtctcagtttgctaaatataattattaacttgcataaaattggcaaatttatgaatataaataaaaattgcacaggaagtcattaaagataatacacattacatcaactggagtgaagttaaataagataagttttttttttaaaatatacaaggacagcaaatagctacttggaaataaactctatttgtagactattaagattaacaatgttaggatacgataacgatatctgatgatgttgcccataaaatatcacttatacgacgcgttgaacttcaaaaaaaaaaaagacttacttgccagatgaaagtctttagatagcaataagttttatgttgcaattcacatattattgaattaatttcaaaatgttgcataatcatttcgtaacagatcccaaaagtatacactaataagtaaacagagagaggtaaacattactacgtcaaccgcaaaggtgaatagttttaccaaactcttaagttgctatttatttctctgaccgcaagtctattcaaatataaactatcctcgctacgaagtgcgaatcaataaaccaagaactatcaggctatgcaaatttcgaaagacaaagaaaccaaaattataggcgttatctaaagccaagccgtgccacataaatcggttactcatctgggtcaacagagatggcgaagaaagagccgagattaagttaccaattcttcaatgagccgtaaacaacaagattcagcaacctcaatttgcaatttacatgtgccgctgcaactctctttttagctcgattttgtaactgcatttgagtgggcgttccgtcaaataaagccagcaaattgttatggttgttagtgattatttttacagcttgttaagcagtattgagcattattttgtttcggacatgactaccatcatgtaaatgcaattgggcagctcagcaaggtgggaaaactttggtgtctttggatgaaatcaattaactccaccgaattttcaccgctaataaaaacgtcatgtgcaggcctaaggttaactccaagtataaaatacaaaaaataataatgatttatgatcgcactcagcccgctggacattcaacaaaacggttaatagaaagctcagattcaactcgaaaaatgatttatttatgacttctacggcacgcaattgaaccgaaagccaaagagaaataaaagtaatttctgatgagtagaactgacatcatctgctgagacagcaaaatgctttttgcgtctcggaaccgagcaaatctcattagaaatgcatttgctaagccgaaaacaaaaccggaatctcaaagcagagctgaattcccgactcgagtttggctctaattaataaatcaacctgttgaatcaacgggtaaataggaaaccaaataaattaaagccagttaaagggaacagactttcccagtttccaagtgtgggcgatcaaaggctaatggctcgataaagagataaacagtctattatcaccggcagaatgcaaataagtcaaatatctcatctccactcaaccttttgccgcctgagaaagtcaatctgtcaaaagaaagaagaaaaaacgaaagaaactcaaagtgggcgccacaagttgtttttctcataaatatcgttgagctcagactgtctgtctggagattcggtagcttcgtaagatacaatatctgtatctgagaacaaaacatttaggagtgcccatgcatcaatcaatttgccaatcatgtgggttgtaaaaaaaaaaagaaaaagtacaaaatgtatgtagagtacaatgaaggtgttgaaaatggagttaagcttacacttactaagtagaagcagattaaatattataacttctttgagtttaattgcaccaaagtcctattttatagttaaaacgtgagtggccttttgtttacacacttatcgcaccatatttatgcgacgtatttaagcacatttgcacacaagtttaagcaaatttgacaacttttttgccactcgccggccagacaacattctcgcatttggaacttcaaaagttttcgccgattgagtgccacaaatcaagtttaagtacggcaacaaggcaaaaaaaaaaacgaagcaaaactatgtagaatagtaaaaagagccacaacaaatgctgccagtgggctgaaacaaatgtaattgcgcgtgtcgaaatgtggaacaaaaaacagaaaaaaccgacatgtatacagatactctgtcagccagtcaaccagccagccaacccacaacttttagattctgaactcttgataaatttatttgtacgggcgacaaaacaattgaattgaatatttcgccggccggcttcaacagcatttaaaatgcacagcacaacggaaaaacacgaattaaagcgagaataaatgctggctgcattttaaaaagagggcaactgccaagtgttaactgcgttttcatggcgcggttaacgttcaacgatcgcgactagaggaaaatgccaagacgtgccaaaaaccagaccctactcagaccctttctccatcttccccgattgcataaaacttttccggggaacgctggagagagagagagagaagtcgagtgaagttttcaatctgtctgtgattgggcaagaagtgcggttacaaaatattccagccatcaatttggcggctttaacaaagtgtgtggagcgttttcaacttgacgcttgtaaaactgtcagcctgacaagtggccatcaaatgggaggagtcgagtggagacggcaaaaagattgtagggaaagattgattatagaaagacgggttaacttatcactcctcagctgggatattcgaatgattaatacttaatacgaattaaatgacattacatcttacaaaataaaaagtaagagtatttagtagagaccctaacttcctaacttctctcaaataatctttcacctcataaacccgcattaagtataccacccgtgatccccttttatgaattgttcaagccatttaaaaataactgcttaagtcatcttttgcgaggcaaagttctggccgcatatctaagctccatggcttatcgtaaataatacaaaatctcgatttcattccgacctgcactcgggtccattcgtgttatttaaattcagctgtgggccaaaaataaacaaatgacgataagcacaagaaatcacgcttcggtctgatatagttagttagttagtggtatatactataaagaataactctgtttggctgggcaaaaaactagtcacgtttttccggtgctcaatgccaaagtgcaaattatgcaaatccaagatcgcaaactggggggtggagatagcgggccatgcttataaaggggcatgcccaagaaaaatatataaataatcgatggagtgatggatggttggttgagcaataggtgaaaaagtaaagtaactcagaattttaaacatttttacaagacttgcttgtatttttgcttagttttcctgttcctcctgacttttccctccgacatgcttgacatctatttcatttagttgggttcgaaaagagttggctacgctttgttgccccaaatcacacccaactgactgtgccacccgtttgtataactaattaccacggatagttcttgttttcggctcagttcaatgacacttccctgaaactagttataatttcaggggctccacactagatagatcccccatatcaaaccggctgtctgtcatttgcggactctaactgttttgcattgttttatggtcagccagacttcttttttttttttttttgttcacacatgggaaacaaagccatcaaataaaacggccagcgaacaaacaaaaaagcagctaaacacgatgtgctgcaacagtttccatttaatgaaaggtgtggaaccacagtggaattacggtggctacagtgggtacaatgaatacagtgcatacagtgggtcacccatgtggcatagaagttacaccacagagctgcctgaatggccaactaccgttggctggtttaatgtcacagttccacgatcttttctcgttgattgggtaatgcagcaaagaaatgtgcgtcccattttcccactaaacaaaaaccaagaagtgcctacggaaatttatgtgtgctccacatattgcccttgtaattagcccctcggcgatttgtcagcccaaccacttttgtcacgttccctgggctttcggttgttcaagatggtgatgatgatgttgttaaagtcgctgtctttcgggaccccgagcatgaaattgccgggcgtgaaactaccgtgagttctctgacagctataaagatatatggtaagtgggtgtcaattggcagctaagttgtctcgaaaggtctgcataaaatatgtgagctccctatcaatatcacgcacaagttgcaaaagcagttgtcaattcaagatgtggagatactcaattaagtaattcctgtacaggaatggcagctggtggggattatgcggaaaatgctgttattacagtttgccgaaaactataaaatgtgataggaatatgtgcgtattacttataggtatgcataatgcatgcactaatcccatcccattcaccatcatccaatctcactttcagctccacaggtccattcccaacttatggcaccttcatgccgagtacttcagcggaaacttcagccttgaaacgctccacccgcagcggccattgagtaagtgcactggtaattgggcttaatagtcgggctaataactaaaggaaggcacgccctacggccccttgaaaaacagcattcagtggagcaaaacccaaccgaactgaactgaactgaactgagcccaacccaaggaaactgaaattgaaacgaacgctgcgagctggccgaaaaacattaatcatgcaaatggcccaaacactttttctctcgcttttggaaattacaatccagaaaatgcgccactatgggtgactgcacccacaaaaaggtggatatatgtatgtataactgcgacattgaaggggtatcgcgacggaaaagcgagaaaaaagggaaaactgtttggccaagcagccgaccgttttccacatggccgcacagaaaattagcaaacgagatcagtccaagaaaagctatcggcttgcagattttcaattcgagaagcccgaatgcaaactgcaacgaggaaaagccgctccagagcgctgcagccggcgaccggggaaaagtcgaaagtaaaaggaaagaggaacggcgactttcccaaagcagcagcataaggctactctagacgggtctgtgctccgctccgctttttcctccagcgatttcccgactcgactcagcgtgggtgtgtcgtcgtcttgttcgtcggcggatccaaaagcactctgggattagcatatattagcgcccctgggaagtgcaagccggggcaccaagccactcagaaagagagaagccccaatgagatcagaccagaaaggaaaatggaaaaaggttttccacgaaacgaatcagtgttactcttcgttgattaaccacttgaatgaattctccttattgaaatcccgtatttatgactcgccaactttttaatggcctacaacttctttaaatgagtttattagcctgcttcctattgttgtcattaaataaactaaaacatttaaaaatcaatttgaaacatattcgttttgaacactcccaaaagtccaaagcattggagagcagccccaaagaaggctaatgcattgccactttttggggtccaagttggaggtggtttgtttgccaactgcggtgggtgggttgtgggttgtgggtgatgctttaagcctggtggttttcggcccgtgtctgggtaactgagtggtttgctttgctgcctctgaagctgatttcattgttcggttagcaacggcttatggacttaagtcgggcgaagccaagccaggagcataatttaagactcggatattgtttcaatagttgactctgtctaatctccaagtctgcaatctgcagatcaaaaggcggttttcacggggcaaaagaggcggtagcaatcccatcgactttcaatattcttcgtgttttgtcgcatgcccaaaagcctttcaattaaacgagtcgcacgttttttctcttcaaaaaaaaaaaaaaaatgcattttagcgccaaagttcgacggcggcgaatccaaatgagccgcaactgctataaaccactgaaaaagctgagcatatgtataaattgaagttacagtggagcttaggtttgcagtaggaaaactgtttaaaaagataaattactcaaatatgggttttatcgaagcttctaaactagaaatattgaaaatattgttaccaaatgccatccagcgctcaactgccagtcttcactgtatgtggtaagcattttttgttacattttgaggccaacatgggttggggcactgacaaccaaacaccaaccgctccaaactggctgctgttttgtttttctgggcctgactcatgatgcatatgccgcatattgatacagttttctgttacttttctgcgccacaaaaaaatcgagcaaagaaatgatacatacgccggataaatgatgtataaagttgggtagggctgcgactggaagtggaaaatgctgttgtccattacacaaagacctctattcatagccattgagctggacacagattttcctcagaatttcccgctgcagagccaagtgaaaagcggaaaagacgcgagagattaaaatggcagtgatttaaatgagcaaatcagtttcaattaatcattccatggcatttaattccttcttgccaacgaaagtggaaagtggacgcgaaaggaaaagatacagattcaagacttcctttcacaatgtgtccgaaaatcaagaaaaataaatgcaagccgtctgggtaaatggaaaacccaaactgcactattggccaaaacctgtcacgcagcttgagttaattaagttgcaactcctacactctcttttgtacaaaattataccacattcactcactgtacgttcgaattagccactagaaaacacacattgactgtagatcccccgtgttatcaatggcacacttgcgtcgtgataagttccacccacaattggaagcactaagcgatcatttgccaaaataattacatgatgtcagcctcaaatcgcaaggcgcacttaaaggccttttgaagataagtatgtatatatctggcattatggaaacttaattgaatgtttacatagttgcgggaacccaagatacaaccaactggttaggcttggaattttaccaattaagagtgtttacattaaagtgtcttcatccaaccaagatttcccaccaccctgacgcatctatcaatcgtaaaaaagtaagccccgctaattgtgatccgcttagccggttttagccaggaaaacaccggccaacaatgtgagccatttttaagcatacacttaatctttcttcatccaaagtgacaaatcaattcccccagcgaattaaaaaagaatgattaaacactgtctcgagtgcagttttcactttgtgttcgagtgccttaaaaagagaatcgtttaggccatatttagaaaagaagaaaagtcgtctccgactaagaaagtccgccgatgtatttgcaacatacttggcttgatacatgcttacaaatcaccaaacgacactttactgagcagttagaaagtcgacgtggcgactagcagcgaaatatgataaacgacaaggctgacttgatgaacactttcccagcgaactgggaggctggtcattagaagaaaacgccgtcgacaagactggttgcattggttttgttttgcagccgagggaaaagtagaacaaaaaagaggaaaatcgagacgagctgagaccggcaaacgggacgaggaaaagtggctgctgcattttgctttcaatttgccaagtagccagcgcagataacgcgtcggatgagcaatgtgcgagagcggggcgggatggaggatcatatgggccaaaacaattacggccgcaaatgaagttgcttgcttttgtggtctgcgggtggtgggcgtggctcggggggcaattatgtccagcagtcgtgtagaaagaggggaaaagcatccatctgcatacacggaaaatgcaggaaaactcggctcctcttcgcgagcaaatgttttctgctccaaaaagctcaaagcggctgtgaaaatgatttttcccattttcatcttgtcttgaagatagcaaaataaatagtgatttaaactgcaacactgttgccagtaatgaaaccgaaaggcacacagataagcagaggaaaatgcaaattgcgtgcaaaaatgctgtttgattatccgctgctgtgaccttgaactttgccacctgtaaaggggagaacaaaacaaaaaaaaaaacaacagacatcaaacttgctaaatcgcattgccccctgagctgtgcagctgattaattattgcgcattacgcaagtcgaacgttgaaaagttccagcctgctctgtagtatttccccgccgagggaaaaacaaattagaaaattgtttgccgcaaattgcgctgcgctgacatttgcacaagttttgctgcgttattgccaaacaagaaaagttgccttgcatgatacaaataaaaaaaaaaaggaaccaaattggataataattaaaggtcacgagaaaagggctttaaagggctttaaagggctttaaaaagaaattgataaatgttttgatatattgtttcttggcttccaaataaagtatattaacaccgaagaactgctcttaacattgagaatcgcagagaaaagcgctgttattctaataatttgagccgttagacagtccgaaaatattccttgtctggattttgacatattggccctccaaaactgcactcaaagtccaaagtaaaacttaaattgaaatgtcaagtggcggagctccgcttcactccacaaacagtgaactttattgccccacaaaggggacatttgcatcgaaaataaatgaacgcgtggaaaatgcacgacagtgagtacaaaaacagggggttaaaagctgagaagcataattaatggaaaacaagcggctgctgcactcgtggatccattcatgaacaatatggagtaatttatgatggggtcgtcagtttctatatgcacatctttttttttttgcctctcgtttggtaggtatgccattttttttatgattttttatttgccattttttttttttagttgtctgactttagtttgtgaactcactttttcgctgcgctcgtaattcgctgggaacttgggcgagccgaagaccgatgacggcgatggggttaacggcgacgccagcggcgactgcgactgcgattggagcgccatgcgctggtggtgcagcgtggagagcgtcggcgtcgacgccgacagcgacgccggggtcatgattaaatgccgcattatttcgcccgattttccactggtttttctcacttcgccgcccgcctttcactggcaattgttttttgtttactgcgttgcttttggttatttgttgcactcggcggctatttacatttcaacaattacattgtttttccgtttgttttggtcagcgattcgttacgatccgctgttttatttgctttctgttttactttatttcgcatccaccgtctcactttatttcactgtaaatgtcaattgcctttgtggggcaaaacattttgctagaaacaacacaaatttaataatccaaattcaacagctgccgcggatgttgacagaaccaaacagtcatcattgccaaatgggttacgttctgaataccagaaataaaagtgctctttcactgcctctaatttttgacgccctctaattttcagcatttatataatacactttttgagtaaagctaaagcactctttaaaaaatttgttttgattaaagcaactagtaatatcgatatacaattcatgctcagaaatcgatttctacgataactacagtaaatttaattttcagtttctctataattgaaaaatatggcgtcaagtttactttcccatccccaatttgtttactataacttttcgctagctcgttttcttcttttacccttatctgagcactttaattgcctttacttttatcaccttgcttcctgatacatttgcgtttccctcttgcttatcgcttatcaacccttccccccttatatttcaattttacgcttgttattcttgtgtgtattgctgctttggcttgccttgggattttataagaattataaatttcttcttttctggacaatcaataagttttaaataagtctgaaacagtggtgtttttttacagctttttatcttttatttgctgtttttcagccgtcgagcatatcagtattttgataagcattttgcggagtatcatgaaaaagcagataaattgcgtatacgccacggagacggcaaatataatttatagcaatggtaatgttgttggcttttatttttaaaaattatattccaacaatttcaatacaagtacaacccactgtcgcttaaatgttccactgttcaatgcattttttttaatttgcatgtggcagtgatctaatcgcctaatttaattaaccgcaagaatctgagtaccgtaaattgacttgggttcttttttcgccgcttttctttgctcttttacagattatataacgtcatcttgatcattaaaagttgatgacggtgggttaattttgttttgtgtgcttatttgctgttgttgctgtttgcagtcgaccgaattacacgcaccgaaaatgaacaaaagcaacaactaacaacattcgaaggtcattccgcagtttttgggcaaattagaaacatgagaggcacactaaaaaactaagtttaacacgatttaagcgggtcaaatgcgatttgttcgcctgccgaaatataacttttatttgcggtatttctcgttacgttgtttcttctcccgctgattggcttttcataattttccgaattgcacaaacaaattgcatgcgaacgcgttgcaaataccaatacagatgcagccaggcgaaacgcgaagacaacgaaagccaaagctgaagcggaaaagcgcgaggaaaatcactgagcacgcaggaaaatcgcggcgctccaactggaatacgaattgtaactgaaaggcggcgacaaagcaaacgaagctaaagcagcgcaaagcaaagtcagcggcgcaggcagcgcaaagctccaaagccccaacagctgacaaacaaaccgaacaataacaaaaacctttggcagagatccccactctctcgaaaagctaaccaatcagctgttacgtttattccagaccaactagatagaaaatttaaactttaatttaagaccatagctgaatattacagtcaattgatatcattgaattaatctatattacttgtagatcaatggttcacgcttgttttcagtgcatatcattttcaccacgcgaaagcttttgaagagcgcgaaaggctttctcttctttctcttcgcatctaacgtgttgtatatttacactctttgtcgtcgccgcttcttaaatccataattgccttcgtttcgatttggtttattatttaataggattttgtgtggggtgtgggtggtgtttggtggtcgtgtggtttgttcgtctgtctgctgcgtgcattgaacttgacattaaacaatgcaattgttttgttttactaattgcgtgaaactcgagcgcaccttaattgtgggttacctttgtggaacctgagttgagatgtgtgtggtggtgtgggtggttaatgaacttctacactcggtgggtggtgggttggggtggaatgtgggtcgatggagtgacaatcgccgtagatgattgatgcgaattttttgcatgtggctgctaattagctgggtgtaagtgaatgagttaagtgaatgatatgtgcaattacttgtttttagtcagcagtcgtttaatgacttcagcatattgtacttaaaattaaaccatagctagcgactgtttgtgaatatttaatatggggcttgaatattttaagcacgccccttttattatggaaatgaaactgagttcattataataaattaatcttcattcatcaatggaattccgccatgtgatgtattttttccaactttctcaatcaactactttcaattaaaaccccccattgaaaaatatacctgacaaaaagcaacgccaactcatgaccattcagcatttcaaaaggaaaatgctttttgtggaatggcagcaaattaatcaaatcgcagtcagataaacaaaaaatgtattaaaatgatcgggaaaaagatatacaaataaatgacacaacccaatcgctttgcatttgtgggcgaagttcgattgaatgcagcgaaactttccattttcctcgtcggcccaagaagataaagaaaaccgtctgggaaactggatcacatgcactgcaggcggtcgctcgctttaagcggattcgatagtgacaaacctctcaactaaaccaaattcgaggcttctcacgaattagatcgcttttgatgaaagccaacagagaatggatatatggatatattcccaatttaaactaatatttatatttgtgcatatcgcaggtgtcgggataccaaaattggtgacggaaccgacgacagatcctgagttgttaaggtgtttattttaagcatatacccttgtggattataatagtattgcaatgggactcaccctatccattaactgttcatcgttccgtttgcgcctcgccggcgcccttataatgcgtcccacatctggagcgtccatggttgctgtggattgcaaacgcaataataaaagaaaattaaataaaagataacgtttgctactttgttttctcttttactttttagaaattgcgtcgctcaccgctctccagcggggtttcgaaccagcgcgtatcacttatacgcgagcgacggtcggtggatgactccgctgagtgtagctttgagcatttagttgagctcagaaaatgagccttgagttgcactcgaagcttacaaaatccactgcatactttagggctgactgcatttggcttcaaaatttggcagtttcttgtagatttacttgaatactttataattttatggcaagtattgaatttttattagtttaacgacggaagcataggtggcaattggctcttgcctaagtggacagcattctgaaaaagataaacaaggtaatttaataatattttaataaatcataatccctaccatgggattttaataaaagtttagccaacccatttaaattacttcaactactacaaatgtaataaaaactttgcctcatttaagccgttttatgccaaattgaaaaatgcattaaaaggacttttcaccttttctcgtttgccttaagcacacttttcctgctgtttcctgctcggccagtttcaccgcctgccaccccttaaaaacaaagtttcccccacgattttacttttccagtcttgcgctgaataaaatatgattgaggttcaaggcgactgaaagctttcaactgcaacaatgtcaatttgctgcagctgtttgcttcgaggctagctcttccagtgttggtaaattgattttgaaggcttataaaatagtcaagagtttagaggaaaagtggaaggaaactcggagccacctaatcaattcggttgcgagattgcacacttagtttaagtttatctttctaccaggtgcagtcttaatttgtaactttaagataagttacaaattgaattcgatttcacgcctaattgacttcttgaacaattcagtagctaactcacacaaatcagcgaagcaattagatactgcaaatcaattgaatcaacattcgaacagttcgtcacttcccacttgacaattgacagtacatttaagatgcagttggctgaagggaagttgtggcatccaaaaacggttgaca

SEQ ID NO: 5576 - DNA, 7146 bp, DROSOPHILA
atccaccgaccgtcgctcgcgtataagtgatacgcgctggttcgaaaccccgctggagagcggtgagcgacgcaatttctaaaaacaaccatggacgctccagatgtgggacgcattataagggcgccggcgaggcgcaaacggaacgatgaacagttaatggataggataaaactcaaaaaggtcctgggcctcaccgtgtgcagcaatgcggctctggatgtgtccccagtcagcggcctgctggcctatccagctggctgcaccgtggtgctcttcaacgcaaaacgccagacacaggcctacctggtcaacacctcccgcaaagcattcacatccgtggcgttctcccggtgtggtcgctacgtggccaccggggagtgtggcatcaatccggccatcaaggtctgggagctggagactccgaacggaagtctggagcactgcagcggcggcagtgttgttgcagagtttgtggaccacaaatacgccgtcacttgtgtggccttttcgcccactggcaagtacctggtttcggtgggctcccagcacgacatgattgtgaatgtgttcgactggcgggccaacctcaagatggcctcgaataaaatcagctccaaggtggctgccgtgtgcttttccgaggatggcagctattttgtgaccgtgggtaatcgccacgtgaaatactggtatctagagggtggcagaaagtacaaggatcctattcccctgatgggtcgcagcgccattctgggcgatttgcgggacaacgacttttgtgcggtggcgtgcggcaaggggatctgtgcggagagcacgtacgccatcacgcggcaaggacacttggtggagttcagctcccgccgcctgctcgacaagtgggtgcagtgccgcaccaccaatgccaactgtatctgcgtgaatgagaggttcattctcgtggggtgtgcggagtccatcattcgcatcttcaattcggccacgctggaatacgtgaccactctgcctagaactcattacttgggcgtggatgtggcccagggcatccagatcaaccacatcatgtcggtgccacagcaggccaagttccccgactgcattgccatggtgttcgacgaacagcgttcgaaggtgagttgcgtttacaacgatcactctctttacatctgggatctgcgcgacatctcacgagtgggcaagtcgcactcgttcctttatcactccacttgcatctggggcgtggagacagtgccatataacgtggagcgggagccatcgcaaacccttccagaggaatgcttcgtcacctgctcgtcggacgacacgatccgtgtctggggtttggacggatgcaccaacaacgatatctaccgaaggaacatctactccaaggagctgctgaagatcgtctacagcgacgatgaactgcagtttatcaaggatcagggctcgtctctgttcgacaaagctggaaactcctcctacgatggaaggaatggagtgcggtgcatcaagatcagtccggaactgcagcacttggcaagtggagatcggtgcggcaacatacgcgtgtacagtctggtcaatctgcgcctgctcaccaccatcgaagcccatgagtctgaggtgctttgtttggagtattccaacgagaagatcgagcgaaagttgttggccagtgccagtagggatcggctgatccatgtgttcgacgtggcgcagaattatctactgctacaaacgctggacgatcacagctcctccatcacctccatcaagtttgtaggtgcaggacttaacttccagatgatcagttgtggcgccgacaagtccattatgtttaggagttttcagggaaatattttcatgaggggcaccaacacctcaggaaagacgacgttgtacgacatggaggtggactcgaatgccaagcacattttgacagcctgccaggatcgcaacgtgcgggtttacggaacccagaatgccaagcaaacaaagaccttcaagggctctcattcagacgaaggaagtctgatcaaactcagtctcgatcccagtggcatctatgtggccacttcctgcacggataaaacgcttgctgtttatgattactactcgaacgagtgcatggcaaggatgtacggtcacagcgagttggtcacgggacttaagttcaccaacgattgcagacatttaatttccgcaagtggcgacggttgcattttcatatggcaagtgccacacgatatgatagtgaccatgcaggccaggatgtcgcaacagcgtctcagatctgggcatgctccattgccgcgacccttggctcctatttcgccaccggatggtattgtcctggaatcgccaaccagtgaaatagagcagccgcaattgcagcccaagtttggagtggccgaaaggttttccgatgtgggtcaactgcctcagtgggcgatgcgaaaagcagctgccgattcggatagtggggccttatccatacccacgcccagtggtggatctgcgactgtgcctggcatgcatgctgcttcatcgatgggaaatctaagctcatcgcccagtcaacagatgacaggactggcaccacgggccaggggaagatgggcccaaaggagcactcagttggaaacggccgatgacctgcgttccaactccgaaagtcctctgggaaccgtttcgtctgtaggtggtcacagcggtgtgaatgtccagacttctgattacaatagtgcctcttccaaggacattacgtacaatcaaacctacttgagtgaggactcctccatcgattcgggaatggagacgcgaaggggcgaactcaagtttattggcagcagcaacaatggaacggtggtcactgtgtcctccgtttcctcgattgctgtttctgcctccaacggtgccatgtcaacgggttctggagctgcccaacagcgtctccagttgccggataaacggttaaagccgggtctgcgattcgatacccatacccatgatcacgatggggatgtggaggacatctccgatggagagagaactagctccgatcacggaatgttttacaacaacctcgcgcccagcacgccaacagatttcaaggtgacggccatgaacgaggatgagctgcgcaaatcggtgcgccgtcagaagtttgaaaagtccggccttcagcttaccccttcggccctcagcggaaacggaagttcgcatactgcgagcaccggaactgggacctccgataccgaagacgaaggctccacgcccagtgccgaaaatgccgaacggtcgctggcctcgacgttgggtggcagctcggagaatctgccccagagcagcaccaacagcttcctgcacgccgctttgccagagggaccgggactaacaacgccaatggaaaggggtggcagcagtcgccgcagcatcagcgccaagcacaatacggagaatgggaaaagcgtggccgcgccgcccaccatcaccaagtcgtatacaagtaccaaaaaggaggagctgttgcaggtcatcaacaaggtcaagcagcagctggagaatgtaggccatagacccctccggggaagccatagcatatcggacctcagtctggcagccaacttggatggatcaaggaatgcgggcggaggaccaggacgttaccagaagccagttgactcccatgacacttcgcagtatactagccctcaaaacacaacagcaacggctgcaccaacgaatacccagcagcaaatccagccaccagtgcagcaacaatatcaaattccaaaggagccacatcagcaagcccagcagcaacatcagcaatatgcgcctcctgcctcgcaacaatttttcaactgtgctgccccgaaatcgaagctgcaacaaaactttcagacgatgcgacaggtgcagcagcactatccgccctatccacatcatgtgggcgtgcatcagatccatccgccacccggtgttccgttcggaggatctgcagcggggtccacatctgcaatgcgttcgcattcccagccgcaaaatcgccaacagcagcagcagcagcagcaacaaagggcaaagaggaatccagctgggaacaacaggcgtacgcctagcatcctaaagcactacaaatcctgtccagtttctccagtccacgaagaggtggaatggtctgccgagggaaacgagagaggtgctctgctcggcgagcccaaaaggcactctgtttatgctgatgatgctagaacaattctggacatgattcatgctgatacggaaaagatgattgatgagatcacccgaaaatacggagatctggatgagcccggtattccagcctcgtattccatgccagcgaatctgagaaacttgggaggactgggttccactggtgattccacgcccactggtagaactactcagtattacgtttacagggaattttaccaatgcgagaggaaggtctccctctccgatattctgcagcccgagcaatttgcggccagtcagagaagattggacgaggccagatttctggagacccaacgccattccagcgccagttttttcctcaccggccagcagagtcaggagtcactctctttgctttccgatggcgatggtcctggaagctattgcaacagcttggagagcgtactgtcggacgaaagtgattgccagagtgctcctctggagtatcctcaaactcaggtggctgttcttcaacagcgccatgccggcatccggaactttattatccacggtccggtgtccaagtcctacgggaacagccccaatgcctacggcagcttcgactactatatgcgacaacagcactccacaacaacggatagcttcgatgtcacaggctacaatctggagccattgaaaccactgcccagttctaagacatatcccaggatagctcaggttcaggcatctgaaaatatacccactctgcgatccaagaataagcaatatacctcaggtgttaacaagtccttgagtacggacttcgcccaacagcgacagcaaagaaattcgaatcccatgcaatcaggtgacaatctctttgtgagaaaaccactgaaacccaagccgccggtgccggcaaaacctcacaatctagtcagcaccttgagccacatggagaagcagcaaaaacagaaatcccagtccagaaccgccagtgttgtccagcaatttgagcataacttacaaaaattcgaaaaggaaaagcaaagggagcgggaacagcaaaggaggccggcgatgcggagctccgtaagttctggagctctggctggaggatcaacaacccagagttgtctaaagaaagtctcgcgctttgataccagcgaaagcagtcgaagggccaccagtgtgaggcaaaaaaataggccaaagatctctgtgcgcttcaatacagtctcgcagattaagtatacgcccagtgccaaaagggagaggcaggccagagaagaggagccaccggaaatggaggtgggcagcctgcctagcgattatggagagcgcagtttcgaaatgtattttgcggaaaacggaaatgctccggagaatctggagaacatgcagacccttaaactgtacaccaaaccccaactacaagcagtggtggatgagatacagcaggagcgggaaaagtatcgaaaaaaccttgacaacgctggcaagatcagcggaaagggaggaagtggaaagggaaaaggagcaggcagctccaccagccatcagtgccagaatatagccaaaaagatcgacatcatcgagaagttaatcgccatggaggagaacaaaatggagcaaatacgtctggccaccgaatcgcgattgaggcccttcaactgcaatgccaaggagaagggctatgtgaaaagtttgaccatgaactttgacatgctcgccagaggtgaagatcccacagaagatgaggatctggcatccaaagatgcctcagatttgtgcgcctatgcgaggaatatccgtagaaactgcagcttaccagatgtcttggagagcaccgatttcactggcatctacaacagccagggtgtggagttggccaaggaagtgattgccgacgatgagagcggagatccggtgaaccccgggatcactgcagatagcgctgatcacgatggcatcggacagactgttgttttgaggatggagccaggcaatcccaaaacgctcaatcccatgcccatcgaggagtcctccatacgccgcgcttgctcgctgagcgacctgcacatgggcaactttggcaagcctggaaaatcgcagaatggcactccacagaagccgcaggtccagcaccgaaatggaaacgtctcgcgatcggccagcaaaaggaacagtttgcagggcaaaactgggttgggtgcctccagcaactcaatgaatgttctcaatcagggcagcgactcggaacccgaggatagcaaccgcttgcgcagtgccagcaacggacagggacgcagcaacggacccattgctgcgaatcgccagtacagcaacaagattaacaatgtcaacaacaatcggcgaaagacgccaaactttagcagtgccacgcccatgcaggacgactccagctccgaggagacgcccaatagcactgtcaacaacaaacccattgtgccaccaaggcctaggaacctggcatttgatcacaagagcaaactgatgatcaacaatagtggcagccccggcggaaatgccaaacagcggagcggagtgacttccacagaggattttgagggcacagatcctgaagcccaagtacacaatgtgatcaataaactttatacaaccacacaggcagctatgcagctgcatgcgaatctaaagaatacgctactgctgaaggaactggagaacgccctgatcatgtccaggaatatgctaagcagcatcaccaatcgacaagcggataagacgaacaacggaggtgggggattaggagtgggtggaagtgggggattgaaccacgatcagctgaacgctgacaacggagactatctgatgatggtcaacaactgtgccgatcttttgagcaatttacgcacgaagcacaaacccgatgactgtgagaataactcctag

SEQ ID NO: 5577 - protein, 2351 aa, DROSOPHILA
MDAPDVGRIIRAPARRKRNDEQLMDRIKLKKVLGLTVCSNAALDVSPVSGLLAYPAGCTVVLFNAKRQTQAYLVNTSRKAFTSVAFSRCGRYVATGECGINPAIKVWELETPNGSLEHCSGGSVVAEFVDHKYAVTCVAFSPTGKYLVSVGSQHDMIVNVFDWRANLKMASNKISSKVAAVCFSEDGSYFVTVGNRHVKYWYLEGGRKYKDPIPLMGRSAILGDLRDNDFCAVACGKGICAESTYAITRQGHLVEFSSRRLLDKWVQCRTTNANCICVNERFILVGCAESIIRIFNSATLEYVTTLPRTHYLGVDVAQGIQINHIMSVPQQAKFPDCIAMVFDEQRSKVSCVYNDHSLYIWDLRDISRVGKSHSFLYHSTCIWGVETVPYNVEREPSQTLPEECFVTCSSDDTIRVWGLDGCTNNDIYRRNIYSKELLKIVYSDDELQFIKDQGSSLFDKAGNSSYDGRNGVRCIKISPELQHLASGDRCGNIRVYSLVNLRLLTTIEAHESEVLCLEYSNEKIERKLLASASRDRLIHVFDVAQNYLLLQTLDDHSSSITSIKFVGAGLNFQMISCGADKSIMFRSFQGNIFMRGTNTSGKTTLYDMEVDSNAKHILTACQDRNVRVYGTQNAKQTKTFKGSHSDEGSLIKLSLDPSGIYVATSCTDKTLAVYDYYSNECMARMYGHSELVTGLKFTNDCRHLISASGDGCIFIWQVPHDMIVTMQARMSQQRLRSGHAPLPRPLAPISPPDGIVLESPTSEIEQPQLQPKFGVAERFSDVGQLPQWAMRKAAADSDSGALSIPTPSGGSATVPGMHAASSMGNLSSSPSQQMTGLAPRARGRWAQRSTQLETADDLRSNSESPLGTVSSVGGHSGVNVQTSDYNSASSKDITYNQTYLSEDSSIDSGMETRRGELKFIGSSNNGTVVTVSSVSSIAVSASNGAMSTGSGAAQQRLQLPDKRLKPGLRFDTHTHDHDGDVEDISDGERTSSDHGMFYNNLAPSTPTDFKVTAMNEDELRKSVRRQKFEKSGLQLTPSALSGNGSSHTASTGTGTSDTEDEGSTPSAENAERSLASTLGGSSENLPQSSTNSFLHAALPEGPGLTTPMERGGSSRRSISAKHNTENGKSVAAPPTITKSYTSTKKEELLQVINKVKQQLENVGHRPLRGSHSISDLSLAANLDGSRNAGGGPGRYQKPVDSHDTSQYTSPQNTTATAAPTNTQQQIQPPVQQQYQIPKEPHQQAQQQHQQYAPPASQQFFNCAAPKSKLQQNFQTMRQVQQHYPPYPHHVGVHQIHPPPGVPFGGSAAGSTSAMRSHSQPQNRQQQQQQQQQRAKRNPAGNNRRTPSILKHYKSCPVSPVHEEVEWSAEGNERGALLGEPKRHSVYADDARTILDMIHADTEKMIDEITRKYGDLDEPGIPASYSMPANLRNLGGLGSTGDSTPTGRTTQYYVYREFYQCERKVSLSDILQPEQFAASQRRLDEARFLETQRHSSASFFLTGQQSQESLSLLSDGDGPGSYCNSLESVLSDESDCQSAPLEYPQTQVAVLQQRHAGIRNFIIHGPVSKSYGNSPNAYGSFDYYMRQQHSTTTDSFDVTGYNLEPLKPLPSSKTYPRIAQVQASENIPTLRSKNKQYTSGVNKSLSTDFAQQRQQRNSNPMQSGDNLFVRKPLKPKPPVPAKPHNLVSTLSHMEKQQKQKSQSRTASVVQQFEHNLQKFEKEKQREREQQRRPAMRSSVSSGALAGGSTTQSCLKKVSRFDTSESSRRATSVRQKNRPKISVRFNTVSQIKYTPSAKRERQAREEEPPEMEVGSLPSDYGERSFEMYFAENGNAPENLENMQTLKLYTKPQLQAVVDEIQQEREKYRKNLDNAGKISGKGGSGKGKGAGSSTSHQCQNIAKKIDIIEKLIAMEENKMEQIRLATESRLRPFNCNAKEKGYVKSLTMNFDMLARGEDPTEDEDLASKDASDLCAYARNIRRNCSLPDVLESTDFTGIYNSQGVELAKEVIADDESGDPVNPGITADSADHDGIGQTVVLRMEPGNPKTLNPMPIEESSIRRACSLSDLHMGNFGKPGKSQNGTPQKPQVQHRNGNVSRSASKRNSLQGKTGLGASSNSMNVLNQGSDSEPEDSNRLRSASNGQGRSNGPIAANRQYSNKINNVNNNRRKTPNFSSATPMQDDSSSEETPNSTVNNKPIVPPRPRNLAFDHKSKLMINNSGSPGGNAKQRSGVTSTEDFEGTDPEAQVHNVINKLYTTTQAAMQLHANLKNTLLLKELENALIMSRNMLSSITNRQADKTNNGGGGLGVGGSGGLNHDQLNADNGDYLMMVNNCADLLSNLRTKHKPDDCENNS

SEQ ID NO: 5578 - DNA, 8142 bp, DROSOPHILA
agaaacttaacaagttgtgaggagtcttaaaactttccacaaatctggatgcagggatgcagcctagcaacagcgaagacgggattcaagaagagtcaagggctgtcaggtcgaacggtaattaatagaccttgcggagagagcgtgaactaacggtatcgcgctggaccttggactcgagccgggcaaggacccggaggtcgaacggtaacggtgaggtctttggacgtgcagaaaaaggacgcaccgagaacttacggtaaattaattggatcttgtacccagcgggccgagctcaaaaggggaaataacgagatcattgcggtatataaagaggcggcgcaagtgcagcttgaggcagtcagtcacaacaagcgaggagaataccggcgtcaggacgcggctgcgcagtcggacagtcggaacggagtctgaaggcgaaggctagaacgtccgaaggagtcagtaaagatcgaaggacgagctcagaaggacgagcagtgcaagtggagattgatccttgtggtggaagccgagcgttgccttaactcgtggacgatacaccttgcccctaacatcctaagccaagtccaaggccgagcgttgcattaacccgtgcacgatacacaatgcccccataacatcgttatcccatttgaacctgcacttcgtccgttgtcaggcacacacagtacaaagaacccaaggcgtcacgggagcaacgccgcgcagcagacggcgatcactggaggagccagctgtaatatactataatcgaacgactttaatctaaaactctgatttttccttggtcgggcaataaaacaaatcaaaggtttgttgggacacgcaaactccctgagctggccactgcaactcgtagcgagtagaaccaagaaaaacagttcgttacaaagtaacaaactattacaacaacataaacacgtaaacaaacatcagcactcaaacaaacatgtaaaaatattcgtattaacacaatatagcatagcaatgatttatttgtaagatctttttttttgtaatcttcctctgacttgcttagtggtagccgtctacaagaatgaagagccgatagtcccgcttcggcaatatctgtattatcaatggagtcttcaagctggctcacgtggttgaccttggaaaaatgcgacaacttatggacgaaatcgcttaagatgccgcttccttgtaggaaaggaggattgagatcttttttgagtactcatctcaaaggcgcaacggagtgtgttaaccggatagccagtgcccccgtgaggaaaccttgctcgataaactggctgggatctgcatggaaatggatagctgggaatcccgacgcagctgactggaacacaattctggcaacacagaaggtgcccttaaagaatagtgaccaacaactgaggattaactccagactctttgacgccacccacgagtcaattacgaataaacgaggccatcgcaatagtaattgtcattgatggggacatctatgtgacgactgctatcctaaactatgctattatccttaccaaccaagtctcggaagtcacaagagcttggcagctagataagacgcttgcgaggccttaacagttggtggccgaaatttcacgagctactcaaactgccacttgatgtcattgccggccgtcctaacacaagtatcagccaacgccaatctctggagtagatgcgtgacgtgagtttaaagatcttggaaaagatttccgaggtgaccggggagttgttggcttcatttcttacgcaggcagcattgactctgctcatcgtttctctcttgtatttcctgtgaagaaaattgacctctacctatggactacagaaattaggcaatattaccttgttcccggatccgcctgttacctccggacaaaccaaggctacttaatctgggggacgcagatcttgaagggggaggagtcagaacgcagcacttgcttccccctcccaaccccgttcgaagccactattgcagctgcggggtagttcctaccccacctccatcgcaacgtcagcaccggacgacaggtcaacgaccctagagctctgtagcgtaccgctgacgacgctgcgcgtgtgactgcagcggaatgcgatgacaccgtgggatttggctaagcggccggcaaaacactggcctggcagtcgaatttcggtaatggagcgtagctaacttttgaatccaactgtgtatttaatcaaattaattaagtctgactgagtatctaaataaatcgaagatgttactttgataaaatccaatttcaaagaatgcagggaaatattccaaggtagtattattacccttagcttaaataatatttattggttccaacttcctacatttggacttcggtgacagcgatgagagtgtaattgagaatttgactgactgaaatggtgaaaaggttaccgtttactagtcatgggaagtattaggaaaccccgagagtctatatatgaaacgatacatgtgacacttagcgcatataaatcaacgttttttcaaaggtatatgattaaaaaacaagggatctcttttatattaaatttcctgattaatcccataagtcctttggacatatatgaaagaaataaaccaataaaataaattgaattttataaatttattacatttacaactagttaattatttattatccatttgtgactagtttcaagctccaaatttgcattgactggacccaaaatgcattttccataatgcatggactcttttccaaaataattttctatagcgcattgcagatcatcaatagttacagagagcattcgggagcgatagctctcaaaatcctcttgtgacacttcataaaggaaataatcgatgccaatatttccaggtgctattggagtgtctaattgctgcaacacaccaagcttcgactcaaaaagagactgttggtcaattacattttgatttgcacgtaaccatttataagtttcatcaaaagcgttaagcgttttagttgaatttggatctcgataactataaaaactgaaaatcccgtctgagctgattttcgcaccagctccgtaagcgccattcttctcgcgaataacaggcaatagatatttggctgatagcaattttgccaaaactcgcagtgttggatggtcttggtggagatatgggactgtgaacaaagctttagcacagtaattaactggtatgttcatcacgtattgttgacagctagggtccaaataatggatatttcgacttgtttgtgttttcccaaatgttggcaggctctccaaaaatttttcgtaattacttatagccgatggctcataagattgtgttgtgttaatggcgccacgcatattatccttgttaaaaacttttgatgcaattgtcgacaatttatcacatatatctaccgtgcttgtagaatgtacaaaatttttcataaagtctatatgatctaccccatatagtagcgatttgagtttaccagcatcacacacttgtgatgttgctcccaacatagcatataaatgaccagaactagccactcccacagatatatatgatatataattttctataagcattttaagtcgctccgagtcatcaaacctaacatttttaatcaactcttggcacaaggcaaacatctctggaacattgttattaagtgcatgtgtgtttatcattacgcttagactgtaactttttgaatccctaacatcttcaattaagtgtaacttaaaatcaaatccaccggtttttaaaaggatgtgcttatcgaactcccgataattatagtttgtggtgcccattgcactaataacattgcaaaaaagcggcataagctgagtttcttcatgacttagtcctgttatattaaacatgcacttaaaataagtaatttcattggtcggaaccttgcaaatctgggtccgaacattttgaacattttgtatgaatagcttaggccattttggtggatctcttacatcattcattgtcagacaaggtaaaagatcagtatttgactcagccttctgatatgaatccaatattaatcctctctcatatattttttcaatcttaacttcatccaaaagttttactttttgttctaccaactccaactcggcctgtttgaatttatcctcatatgcctcatcaggtgacatagttaatgttagtctatgattgttattggcgaaatatttctctattttctcttggaaatattttttattctggcttatgctttcccgaagccctgatatcatatctgatacgcggagattactgactacatcgccatcatgattccataatgctgtggaattaaaaagcaaagtatttccgaagttcggattctggtgctttaaagacaactcaagattgtgcagaacactttcaacatgctgggaatcaaacccgtcattcatagaattaataatggttttgtcaaaaatttcaatgcattttttgaagtcttcaactcgaaggtcttgtaatccaacgacgaaggttgtgtccttagtatccgatgaatatccagtggtttgattgtatccaccggaaaaatttggttctataaggtttttgtaaaaaggggagttaggcccacgaataagtacctcagatagcacgtgtaattcaaaactttcttgtatattggttgcatcacacatcagcagtgcaatagcaatttggttctgtcgatcaattgttgtacccatgttatctagtctactggatatatgtacaagacgaggctgagtccaacgctcttgctgacgtattaaactgtaagagttgtcaacccagctttgatctgataaatactcctcgtcgagaagtgcgagggttttacttgcatcaaataatccgtaggaatatatgcgagcattacttggatgatagtattttttgtggaattcaactaaatcgttgtatgctaacttgggtatttccaatggatttccgccagacacatgtcgatatgtgtgatcaggaaaaatattattgagtaaattctgactaaatacctgcgcgttttcagaaaacgcacctttcatttcgttataaacaactcctttgattacaagcttcgattgtttatcgaatatatctttgttttctagcctccagccctcttgaagaaaatcgaaatacgccaggtttggtctagaaaggaagatattattacgagatatcgtcaattatttacatcttacctgaatacggcatctaaataaatatgttgcaaattcctaaaatctatctcattcatcgtcgaaaaaggataaatagtataatctggaccagtcattgcattcataaatgtcgctaccgagcggttaagcattttgaagaaagggtccctgacaggatatttttgtgaaccgcacaacgataaatgctctaaaatatgaggtagaccagtagaatcaaagggcgtggttcgaaaattaatggaaaatacgttgtttgaatcatttcggtcgatatgccataattctgtacccgtgcgctcatatcgaaaagtataggacgtaagttcaaattcagaaatgtgttccacacgttcgcattggaagccatggtatgtctttccctcttcatacttgtattttcttttcttagttacatgtggcatgcaaccaaattgtcgtggagatttgggctgcttggtattgacgccagaaatgttcttatatgtggacaccgacttgaaatttataaggtgatttctcaagattttgtattgtggagaccacatcttccaccgcgataacattccaccttttaacatgaactcagcaccatccgtgctgaatcgctaaatacaaaagaatatataaagaagtataaatttgtatatcaaagaatcatacatgtgtttgtatttacaatttaattattagtaactgccgaagaaagccacatccgaccctttttataaggggtttttttttcaatggggttcagttgggctacctttgatgttagctgatgaatagctataatagctgagcagcgataccaaatcgttgaattttatttcgaaaatcagtggtcatttgtacaccgtttgcttcgctagtttaatggtgctcattatcggccttcaattcagactagacttcgcagggtgcgcactgtagaaaatacatatgggggccgttgaggccagtgtaacagaagaacggaactcatctattcgtcaccgcgcgcaggagttacacctttgcccaacaaaattgtgaaggatcttcgctaagatttgggtctcaaagcgcacaaaattcagatggtttaggatctgaagccaaccggccatcgttttcgctgagaattcttcaacacaatcagcaattttaccggccgcatataggccgacaccaatccacaagcataccatgagcaatcgatgcacctagagaaatgcacaatttggtgcggtttatggggtggtggtatcatagagccgtcaatgggaaatgctaacgagctatgctcgacgaatttttgtttttaaaagtgcgtgagaatagtctagaaaacatttggtttcaacaagactgcgcaacttgcaacattgccaatcaaaccatcgacttgttcggcaacagcaaagttttttagcactatagaaatttacaacactaatgaaataacgagagaatatcaaaacaattttcaaaagtgtggaagtggcagtttcgtttggtttgtgagcgttagaatgttattggcgacatgggtcaataaacttgggctgaatttggataaagcttaaaaacggccttgatgaaaaatcattccatagatctaatcggcaaaaactttaaaaataactgaactgtgacaatcatcttgaccctgaatgccacaatttagtgtttctcatgcaattgcatgtatgtacgtatgtaagcgtgtatattactgcttaataatatacatacatgataaatatgcacgtatacgtagtgtttcgggcataacaatgccttattggcattaatttttgattcaaacagaaatggacctaaataattttactcaccggcgtatagaaaaaaaagacaattaaaatctaaattattacattttattcgacttataattgagtcaagctatcgtcgatgacttagctgcgatgggggaacggtggaaaatggtacactaggacgttttcatacaaattatgaaatgctttgaatgaaaaatataatgctaacaatttcatttaaaagcgcggtctgcgctaaatgagtattcaatattattaatatccagaaattaactaactcacacaatcattatctcttaagcaatcccaacatcttaagtcaaggcaaatcaactaactcacacaatcattatctcttaagctatccctacatcttaagtcaaggcatcactcttatcttgaaagctttaggctcttgcatttctctcggcagattgtatactgggtgatagtcttaacttacatatgtatattttatcgttatatttaggtaaattcaaaaaatgttaagaaaagaaagatctatctatatacaatctatgtaaaatctaactacatatctgttacatcttgtgaatgcatggcgcatagcttgcctatgcgaactccatattctccagcgtcctgcatcgctgcttcagaaacgatgccatcgattcacacactggaactgaatttttgaagtctagtccactctgtattgcccttagccacagaatattggtaatgtttgccaatgtttgtaatgttttgtaatattgccaattctttagcgtaaatgtcatccgatattgcgaatggtttccagtgcagtgtctctcagaaatgatactaaaagttgtagatttttaatgttttaatgttttgtcaaattgtggctattattactattaatttttagatattttcaagaaatgaatacacgttttatagtagagatttcgaacggttataattcatttctttaggttaagcttggcatcgaatcgcgcatacataggttacgaaagcgaatgttaatgagcgacttaattacagagcaaacagcagaacggtaaggtgcgagagc

SEQ ID NO: 5579 - DNA, 3577 bp, DROSOPHILA
atttagattttaattgtcttttttttctatacgccgcgattcagcacggatggtgctgagttcatgttaaaaggtggaatgttatcgcggtggaagatgtggtctccacaatacaaaatcttgagaaatcaccttataaatttcaagtcggtgtccacatataagaacatttctggcgtcaataccaagcagcccaaatctccacgacaatttggttgcatgccacatgtaactaagaaaagaaaatacaagtatgaagagggaaagacataccatggcttccaatgcgaacgtgtggaacacatttctgaatttgaacttacgtcctatacttttcgatatgagcgcacgggtacagaattatggcatatcgaccgaaatgattcaaacaacgtattttccattaattttcgaaccacgccctttgattctactggtctacctcatattttagagcatttatcgttgtgcggttcacaaaaatatcctgtcagggaccctttcttcaaaatgcttaaccgctcggtagcgacatttatgaatgcaatgactggtccagattatactatttatcctttttcgacgatgaatgagatagattttaggaatttgcaacatatttatttagatgccgtattcagaccaaacctggcgtatttcgattttcttcaagagggctggaggctagaaaacaaagatatattcgataaacaatcgaagcttgtaatcaaaggagttgtttataacgaaatgaaaggtgcgttttctgaaaacgcgcaggtatttagtcagaatttactcaataatatttttcctgatcacacatatcgacatgtgtctggcggaaatccattggaaatacccaagttagcatacaacgatttagttgaattccacaaaaaatactatcatccaagtaatgctcgcatatattcctacggattatttgatgcaagtaaaaccctcgcacttctcgacgaggagtatttatcagatcaaagctgggttgacaactcttacagtttaatacgtcagcaagagcgttggactcagcctcgtcttgtacatatatccagtagactagataacatgggtacaacaattgatcgacagaaccaaattgctattgcactgctgatgtgtgatgcaaccaatatacaagaaagttttgaattacacgtgctatctgaggtacttattcgtgggcctaactcccctttttacaaaaaccttatagaaccaaatttttccggtggatacaatcaaaccactggatattcatcggatactaaggacacaaccttcgtcgttggattacaagaccttcgagttgaagacttcaaaaaatgcattgaaatttttgacaaaaccattattaattctatgaatgacgggtttgattcccagcatgttgaaagtgttctgcacaatcttgagttgtctttaaagcaccagaatccgaacttcggaaatactttgctttttaattccacagcattatggaatcatgatggcgatgtagtcagtaatctccgcgtatcagatatgatatcagggcttcgggaaagcataagccagaataaaaaatatttccaagagaaaatagagaaatatttcgccaataacaatcatagactaacattaactatgtcacctgatgaggcatatgaggataaattcaaacaggccgagttggagttggtagaacaaaaagtaaaacttttggatgaagttaagattgaaaaaatatatgagagaggattaatattggattcatatcagaaggctgagtcaaatactgatcttttaccttgtctgacaatgaatgatgtaagagatccaccaaaatggcctaagctattcatacaaaatgttcaaaatgttcggacccagatttgcaaggttccgaccaatgaaattacttattttaagtgcatgtttaatataacaggactaagtcatgaagaaactcagcttatgccgcttttttgcaatgttattagtgcaatgggcaccacaaactataattatcgggagttcgataagcacatccttttaaaaaccggtggatttgattttaagttacacttaattgaagatgttagggattcaaaaagttacagtctaagcgtaatgataaacacacatgcacttaataacaatgttccagagatgtttgccttgtgccaagagttgattaaaaatgttaggtttgatgactcggagcgacttaaaatgcttatagaaaattatatatcatatatatctgtgggagtggctagttctggtcatttatatgctatgttgggagcaacatcacaagtgtgtgatgctggtaaactcaaatcgctactatatggggtagatcatatagactttatgaaaaattttgtacattctacaagcacggtagatatatgtgataaattgtcgacaattgcatcaaaagtttttaacaaggataatatgcgtggcgccattaacacaacacaatcttatgagccatcggctataagtaattacgaaaaatttttggagagcctgccaacatttgggaaaacacaaacaagtcgaaatatccattatttggaccctagctgtcaacaatacgtgatgaacataccagttaattactgtgctaaagctttgttcacagtcccatatctccaccaagaccatccaacactgcgagttttggcaaaattgctatcagccaaatatctattgcctgttattcgcgagaagaatggcgcttacggagctggtgcgaaaatcagctcagacgggattttcagtttttatagttatcgagatccaaattcaactaaaacgcttaacgcttttgatgaaacttataaatggttacgtgcaaatcaaaatgtaattgaccaacagtctctttttgagtcgaagcttggtgtgttgcagcaattagacactccaatagcacctggaaatattggcatcgattatttcctttatgaagtgtcacaagaggattttgagagctatcgctcccgaatgctctctgtaactattgatgatctgcaatgcgctatagaaaattattttggaaaagagtccatgcattatggaaaatgcattttgggtccagtcaatgcaaatttggagcttgaaactaccaaatcccacggtgtcatcgcattccgctgcagtcacacgcgcagcgtcgtcagcggtacgctacagagctctagggtcgttgacctgtcgtccggtgctgacgttgcgatggagccagtttatcgagcaaggtttcctcacgggggcactggctatccggttaacacactccgttgcgcctttgagatgagtactcaaaaaagatctcaatcctcctttcctacaaggaagcggcatcttaagcgatttcgtccataagttgtcgcatttttccaaggtcaaccacgtgagccagcttgaagactccattgataatacagatattgccgaagcgggactatcggctcttcattcttgtagacggctaccactaagcaagtcagaggaagattacaaaaaaaaagatcttacaaataaatcattgctatgctat

SEQ ID NO: 5580 - protein, 1112 aa, DROSOPHILA
MLKGGMLSRWKMWSPQYKILRNHLINFKSVSTYKNISGVNTKQPKSPRQFGCMPHVTKKRKYKYEEGKTYHGFQCERVEHISEFELTSYTFRYERTGTELWHIDRNDSNNVFSINFRTTPFDSTGLPHILEHLSLCGSQKYPVRDPFFKMLNRSVATFMNAMTGPDYTIYPFSTMNEIDFRNLQHIYLDAVFRPNLAYFDFLQEGWRLENKDIFDKQSKLVIKGVVYNEMKGAFSENAQVFSQNLLNNIFPDHTYRHVSGGNPLEIPKLAYNDLVEFHKKYYHPSNARIYSYGLFDASKTLALLDEEYLSDQSWVDNSYSLIRQQERWTQPRLVHISSRLDNMGTTIDRQNQIAIALLMCDATNIQESFELHVLSEVLIRGPNSPFYKNLIEPNFSGGYNQTTGYSSDTKDTTFVVGLQDLRVEDFKKCIEIFDKTIINSMNDGFDSQHVESVLHNLELSLKHQNPNFGNTLLFNSTALWNHDGDVVSNLRVSDMISGLRESISQNKKYFQEKIEKYFANNNHRLTLTMSPDEAYEDKFKQAELELVEQKVKLLDEVKIEKIYERGLILDSYQKAESNTDLLPCLTMNDVRDPPKWPKLFIQNVQNVRTQICKVPTNEITYFKCMFNITGLSHEETQLMPLFCNVISAMGTTNYNYREFDKHILLKTGGFDFKLHLIEDVRDSKSYSLSVMINTHALNNNVPEMFALCQELIKNVRFDDSERLKMLIENYISYISVGVASSGHLYAMLGATSQVCDAGKLKSLLYGVDHIDFMKNFVHSTSTVDICDKLSTIASKVFNKDNMRGAINTTQSYEPSAISNYEKFLESLPTFGKTQTSRNIHYLDPSCQQYVMNIPVNYCAKALFTVPYLHQDHPTLRVLAKLLSAKYLLPVIREKNGAYGAGAKISSDGIFSFYSYRDPNSTKTLNAFDETYKWLRANQNVIDQQSLFESKLGVLQQLDTPIAPGNIGIDYFLYEVSQEDFESYRSRMLSVTIDDLQCAIENYFGKESMHYGKCILGPVNANLELETTKSHGVIAFRCSHTRSVVSGTLQSSRVVDLSSGADVAMEPVYRARFPHGGTGYPVNTLRCAFEMSTQKRSQSSFPTRKRHLKRFRP

SEQ ID NO: 5581 - DNA, 9185 bp, DROSOPHILA
atcgctgatacaagttggcacgcaatgtacccatatcagtgttattttccgtctccatttatctctgcttatgtattatgtaaattgggcctataatgagacctatcatttgaggaagccagattgcggtggccaatttgtttttgaaagcaattctcacacaggtagaatatttctatctgcccctatcccttttccccaaaaacagtgcacctgcaacacgctctaattaaaatgacaaatagaaacatacaaaagtgtttcatctcggtaccttggcatcgggcaacgaggcgtatgcgtaattttctcagcttcgctgctttctcgcacccttcgggttgcaattttccactttaggctgtatctgagatccacgcaagttgagcaataacagaatcgtttacttgatcatttgaaataccagcaagagtattaatgagtgtgcttgacttgacaacatatttaacatacaatgaaaaattataatagaacgggtatttaatcattccacctacttttaagcaaatgtatcatatccggctttctttaaggtgcttgttatttgacttaatatttaatgggtatcttttagtcgtctatttgttagttttggcattcgtgtctgtttaaggtaattttcctaaagatttaaagtgtgtcaaagtgcattaaacaattgtcgtttattttcgggtgttgggaacgtttgtttttgttgagggggggggggggaggtggtgcggtgatataaacatagtgtataggcatatgcacagacagaacagagacagatgaggtctctttgacgcgttttgctggcgtcacaagcggctttctcgctctctcgctgtcgcattaggtgaccagagaattagagaaataacgtagagaacccttgcagcaaagtgaaaacaaaatgtggcgaaaacaaagccaaagaaatgtgcctggcggtgggctcttctggtcgcaactgcttaaattaaatacattgctcactttctgttcaattggcgagcccagcggacatcggaggagccgcttcagatcgcgttcagttcagagtggattccgttcaagattccgttccgttagagcgctcagcgtccgtcgatcgccaggcagttaagaccgcgacctcgcggcattccggctgcagtctccggttccgtgtcgcgtcgatcgtttcgtcttgaggtacccggagatccttcccgatccctgcacgtccaaaaacctattcccttccgtgtaggaagctaaggagcaatgtttccagcttgggaatacatttagttagcaaggttcagtaggtcatcattactcggcaataatgtgttattaattggttcttagcgaaacaaattgtgttgccaaataacatacaaggacggtgtaattaaagcccaacgatatttgtttttacatggaagcagggtgtcaactaattgtcgccatttcccagttatgagcggtgtatataacccgcataagggtcatacaaaagtcggtcgaagaacaatttaagcctttcctgcatacaacttgcactgtgaatcacctaacaaaaagctggggcgtaatttaattttggtactctcaccattcgttcctcgttccaatcaacacccccacccacttagtctttcctagtaaacaaaccttgaagtcaagccccctcgaatccagaccaaagcagagaaaagcaaacattgtcccctaacaccaaagcccccttggggttgcctaccattttgtggtatccgcaggtagaagacaatcctctacaacggctacagcagtgcaacgcattttgaaactgttgatgcaacggcagcagaaattgctgcggaaaatattccaactgactgcattggcaaaacgttaagtattcgcagtggtgtgcgcgcaaaaaaaccaaaaggcggtgataaagtgccaagcaaaataccaacgagtgagtggaaagtgagacatacagcacagaacaataattatcgcggggagtgccatcaaccagctccatcctgggtaatctgtggttaatcgtccgaggtgagctcatccaaaaacaacacggaaaattacagagcggtggcgacaagtgaaacctgaaatatagttattaagttgccattaacagtttggtgttttagcagaactcagagaaccgatcaaacattttcactgccaaccatttttttgaagttcacaatttttactatatatgctagtcgtataaaaaatcttcgtaaagggtatcacctattcggcgtatttctgttgcaagtttcagtccagaagagagtgaactttggggacgcagggtgaccttcgatcgctttgaaagtttttcgctttcgtgcctgtctataatttgcgtcagctaagcgaaaccgaaatgaatgggccaagtgacaggttgaatcgattaggtgctcaagagcctaacacactaaccatttataatggaagccaaggaattcttcctctgtagatatcgttctttctcctaagcattcgaagaaacccctgccaaatgtcaagttcaagttcgaccatctcggcaatatctatatatctcagatctacatatgctgaaagttttgcgaagaggaagtgccaataaattttctgtcttgcagcagggcaaaaatcaaaacgacaggcgaaactcgtcgctgcaattatcttaattatctgccagagattgggggatatggcgaggatgtttcgccactgggacttggggaatgcaatgcgaattgcaatatgacaaccgaattcagccggatcccggcggacgcggaacgatttgtttgttgtggccaggccaagaagctaaatatagcactgccctattgatttggcccactgcccaagagatggccaataggtttttggtcttcgggggcaaaggtccggggctctcacatgatttatgaatgacagctaacaaggcgcactttcttacagatcgataaacgtcttttagcgacgaaccctctcgcggtgctctcttttatccccgaggacatacgatggcaattgccaagtcacttaaatcgattagcaccgctattaaatcaaattacctggaatggtttggaaagtggttttgcacttagagcacaaaagtagtctttccgcggaaaagaaaattatattacatgctgacttatgttagtatcatattcaagctttaattaaagaatttaatttactaataacaatgctgcatagaaggatttgttgttgttctcataagtgcttacactactttaaacacgatttaattttacatatgattattgtgctaatttctctgcgtggctaataatcaatttttgcgttaccgccaagcggaattttccgctttatgataattatggagcgtcaatcagcttttcgacggtgcgtgatgtctgcatcgcgtctccatttctccattttaatttccatttcgttttcatttccctgccggcatttgccataaatgcgccgcgagaaagagagagattcggtcgtatttatggcacacaggacactcgactcctgagtggcttttttggataaaaagctgacccagcgagagagtggcacattcgcaggagcaagcttgaagtgagcggttcgcattccgaggagctgtgaatcaggagcagaaaaaggataaccagacacggctgaaaatagtgaaaacgaaagcggaagaaggctgaacctaaggccacgctgtggggcttggaaaaagtaaccaggagcatataatcacctcctatttgaaaacgaatttaaggtcgaacaggacctgacacagtgacagacgaccgctgacccggactctgaaaaatcgattatctgtgtgtgtgcacaacacaggccgcgagtgcgagtgcagttcagcgtcttgaagagagccagcaccaccctccgcccgcttacgaaggtcagccccatctgattgcctttccagagcggtcagttgccaaaagccacaacaacggagccgttaacaaacaatcgccgcagcagcgaggaaggaacgaggcttagaggcggaacgcaaacgccgccgaacaaaaggaagacaacgccgcaccggtagaatggcctacctaatcaacatcctcaagttcaatgtgaagtacttaaaaaatcaataactggacaccagcaccgaccgagcaaccagccaaacatccatatattccgcaacaggagcagtcgcattccaactgaaacacagcggggaatcccccaccaagcgctagctctctctttctctcggtcgccctgtcttgcttgctcctctcttggtttttggttatcggttttgtcgccaccgctccgctgcgccttaatctgcgccacccggaagcttggacatttggacaatggaaatggaaaagtctggcaaattttcagattacctcttcgccaaaatgggtccccccacctcaactgagctgcctccgaagaccacggaatgcagcgatgcccccgtggagttgaccggttaccgcaggtggctctccgagaatctaatgctcctggtcaccctttccggagttctccttggtgtaatactaggtaagtacgattagttcaacagacaacctaattttagtgcatacactttgattgccaacgcaatatagttatgctgaaatattccattaatgtactacttttccgacaggactctccttacggccgcttaatttacatggggactccatcatgctgatttcctatcctggcgaactgtttatgcgcgtactcaagctgatgattttgccgctagttatatcgagccttattgccggatcggccagccttaacgccaaaatgaacggcaagatagcgctgcgcacgttggtttactttgccagcacttcgttctttaacgctgcactgggaatcgctctcgttctgctcatccatcctggaaatccggatctgcacaatgcggacgatcgatctacagatcggcgggcagttaaccttctagatagtcttttggatttgggcaggtgagttacatttaagtagcatacgaaaagtagctcttagcaacataaaaagctataaaacctgttagcatcctcagtggcgccctctacatgtgagcttaacgctgcaactagtgtcttaacctggcaagcagtctgattctgtagtacgactaagcagtttacgaatataactgcttgaagcagtgcaacgaaaattattttgtagtttgtagtagatcgacattaaaagtcgacccaattgtgatacaatcatacacatatttatcttttatatgctccaagagttgattttcatatttcaatattagctgtgttttcttattttcttcttttcttcaggaacgtattcccggacaacctgtttcaggcctccattcagcaggcgcacaccgtctacttgcccaagccgagtatcctgcacgtcttcaacgaaacgatgaatgacaccttggcatccggatcggaggcccaacgcttgtctgaagaccttacggaggatgtggtgctggtgagggacatccagtaccgcagtggaaccaacaccctgggcatcgtcttcttctgcctggtgtttggtacttttttgggaaccatcggccagaagggtcaggtcgtggttgacttctttgccgccatttttgaggtgatcatgaagatggtcacctgcgtgatgtggctgacacccgtgggcattagttctgtgatcgctgggaagatactgagcgtgggcgatttgggcctggtgatgtcgcaactcatgtggttcatcgtcacggtggccatcggcgtctttatctaccagtttgtggtgatgcaggccatatatttcgtcgtcgtgcgtcgaaatccgttcaagttctacgccggactcatccaggccatgcttaccgccttcgccacggcctcaacgtgagttctgtgttcattcgggatttataagtccttgggtctataatctgatgaatctgtttggcctttgatgaaagttaagcttcaggagattttcaagtgaaatttttcggcccaacgacagatgaaataaccgttgttgatacggctttgtcttaagcaatggacaaatttataaaccatattcaaaaaatattgtatgacaaaattttgacctaaatgaacttggagtccgctcataacattgaagtaaagtaaatcaacgaaacgaagttattggaaagtttttaaataacaacattcccattttaactggccaagtttctgaacaacttttttctagacaagccacaaaattagtttactaaagtttacatttctttactgttttctttaagacttagcaatagccaatcaaaattccttgaattgtttaaatgactaggagctcagtttcagtttcagtaggagtgcgttaaatgtgtattttttctttctttcggtatttgctacgacctgatgttgtatccgaaccacccactaatactcattcaccaaaaaaaatcaacacactcctcgacaaaactgtgactgccacgccccttagcgccgctgccctgcccattacattccgctgcatgaacgagaaactcaaggtggatccgcggatcacgcgatttgtccttccaatcggatgcaacatcaacatggacggaacggccctatatatcgcagtggcatcgatattcattgcccagatgagcggcatggttctgggatttggagagctccttacggtccttctgacctccacggctgcctccatgagctcggccagcgttccgagtgctgccctggtactccttctcgtggtgctgaccgccattgatgcgcctgttcaggatgtcacgctgctcttcgccgtggactggtttgtgtgagtatggatctaatttgtaatggcagttccactgcgaaaaagctttatcgaagatccatctccttgcagggatcggattcgcaccaccaataatatgctgggtgactgctacactgctgccgtagtcgaggagttgtcgcgaaaggagttgatggctttggatgccgcttccgttaactatcaggtatgaatatcaacttggggacatttaaccaatctgatgactatcccttcaggacatgcccgctggcacccccaatggacatggacatggacatggacaccacgatggaggacttctcgaggggcagaccgagttggagacgagcagcaagtgcgttatgacaatgacggactcggtggtggtggacattagtgcggtgatgaataacgtgaacctgcagcaggagcattgtaaccgcagggtctaggatgttttgaacagcccagattcgattttagttcgtcagcatcagctctatagtcccagtagcgccaccaccacaattacaacacatatgatattcaccaccaatagaccgcagtgttccccaacaaacaaatttttgatataggatctttaaacaacaaatgatcggatatatatcgagagactgtctgacgaacccacccgcattgaatttactcctcttttggaccagtgtcgatagcaattaattagcctgaacacttaaaggactccgcatacgtaaatatggaatattcatcttgtaggactcgcataagaatattatatgccacatgtaagcaaaggacgaaaaaacgctgagcgcgggattttttgggatccatcctgggaactatgtgcataatctatgggtattattttgtaagctcgattgtgatggggtcaccaagctgatttgttttataatgttgtttatttatacgttatatatgtgttgtttgggaatattatgagagatcaatgtttaagttgattgaggagggattgaaaggtagaatcgcaggttgtacaagaagctggcctagatttagttttagttgacctcctattttcccgaaactcacgtttggttatacgcccctgataaacaattaacaactaatggctatggaatatcacttaccaattactcattttcagttactgataccaaatatcacacatgcattcgtagactgatagcagacttagtagcgataactaatatgtatctgcatatatgcaatacttactaaccaatatccgacattcgatttgtacgcggacgcatacgctgaatacaataaagttattatataccacctacttcaaagtaatttacagtgtatactttctgggccttttctcagataacacccaatgcaacgatgtgcctacaatcaaatgattactcttatatttatgttaattgacacttaaaaacgaagccaacatcttggcgttgcatcataatttattcccataaatttaaaccttgctttcatatatatgaggattatattcagaggtcagcttttgattggacttccaaacaataatttacgtcgaacatttgtgctaagcgtgtgtattattcagagaatgagtagttgtctattcattgatctactaattatgtgtcactagattgagtttcttcgagttcacacactacatcttagtctgtaccattattaactgtgacttaatttctgcgcttcggacgggaacggaaatttgcctatcaacatgcccataaatctgccgatcgatgggtgagtattaacgatcggtcgaatgaatgaaatgaatcatcattgggctcaataactcaacgcctgcaccactcggccagtggttttgcacaagtgagccaaatcgggattatataattatatggatacattcaaaagtgcatgtgcatatgaatgagtgaataaattactccgaactgagggcccgaagataaggtacacggtactgagatctgcgaaggcaactggattatggattcggttatttttcacactttaactactaccatgacgaagtacgatatatgattgccttacccataaaaatactacaaatatgcgaaaaatatccattaaaccacatgctgctctatcttaaatgcactactactgctactccatatatattttctatgacgctttcattatgtcgggtgtaagatctgaaaccccgagatccgctttgctgttcgattccgccgccatgtcaggtgtcaatccgcagtgcagacttctcgcagactggagagcccaactgcacaggtgaatgaaatcggcggcgggtaaacgca

SEQ ID NO: 5582 - DNA, 3058 bp, DROSOPHILA
actttctgttcaattggcgagcccagcggacatcggaggagccgcttcagatcgcgttcagttcagagtggattccgttcaagattccgttccgttagagcgctcagcgtccgtcgatcgccaggcagttaagaccgcgacctcgcggcattccggctgcagtctccggttccgtgtcgcgtcgatcgtttcgtcttgaggtagaagacaatcctctacaacggctacagcagtgcaacgcattttgaaactgttgatgcaacggcagcagaaattgctgcggaaaatattccaactgactgcattggcaaaacgttaagtattcgcagtggtgtgcgcgcaaaaaaaccaaaaggcggtgataaagtgccaagcaaaataccaacgagtgagtggaaagtgagacatacagcacagaacaataattatcgcggggagtgccatcaaccagctccatcctgggtaatctgtggttaatcgtccgagattacctcttcgccaaaatgggtccccccacctcaactgagctgcctccgaagaccacggaatgcagcgatgcccccgtggagttgaccggttaccgcaggtggctctccgagaatctaatgctcctggtcaccctttccggagttctccttggtgtaatactaggactctccttacggccgcttaatttacatggggactccatcatgctgatttcctatcctggcgaactgtttatgcgcgtactcaagctgatgattttgccgctagttatatcgagccttattgccggatcggccagccttaacgccaaaatgaacggcaagatagcgctgcgcacgttggtttactttgccagcacttcgttctttaacgctgcactgggaatcgctctcgttctgctcatccatcctggaaatccggatctgcacaatgcggacgatcgatctacagatcggcgggcagttaaccttctagatagtcttttggatttgggcaggaacgtattcccggacaacctgtttcaggcctccattcagcaggcgcacaccgtctacttgcccaagccgagtatcctgcacgtcttcaacgaaacgatgaatgacaccttggcatccggatcggaggcccaacgcttgtctgaagaccttacggaggatgtggtgctggtgagggacatccagtaccgcagtggaaccaacaccctgggcatcgtcttcttctgcctggtgtttggtacttttttgggaaccatcggccagaagggtcaggtcgtggttgacttctttgccgccatttttgaggtgatcatgaagatggtcacctgcgtgatgtggctgacacccgtgggcattagttctgtgatcgctgggaagatactgagcgtgggcgatttgggcctggtgatgtcgcaactcatgtggttcatcgtcacggtggccatcggcgtctttatctaccagtttgtggtgatgcaggccatatatttcgtcgtcgtgcgtcgaaatccgttcaagttctacgccggactcatccaggccatgcttaccgccttcgccacggcctcaaccgccgctgccctgcccattacattccgctgcatgaacgagaaactcaaggtggatccgcggatcacgcgatttgtccttccaatcggatgcaacatcaacatggacggaacggccctatatatcgcagtggcatcgatattcattgcccagatgagcggcatggttctgggatttggagagctccttacggtccttctgacctccacggctgcctccatgagctcggccagcgttccgagtgctgccctggtactccttctcgtggtgctgaccgccattgatgcgcctgttcaggatgtcacgctgctcttcgccgtggactggtttgtggatcggattcgcaccaccaataatatgctgggtgactgctacactgctgccgtagtcgaggagttgtcgcgaaaggagttgatggctttggatgccgcttccgttaactatcaggacatgcccgctggcacccccaatggacatggacatggacatggacaccacgatggaggacttctcgaggggcagaccgagttggagacgagcagcaagtgcgttatgacaatgacggactcggtggtggtggacattagtgcggtgatgaataacgtgaacctgcagcaggagcattgtaaccgcagggtctaggatgttttgaacagcccagattcgattttagttcgtcagcatcagctctatagtcccagtagcgccaccaccacaattacaacacatatgatattcaccaccaatagaccgcagtgttccccaacaaacaaatttttgatataggatctttaaacaacaaatgatcggatatatatcgagagactgtctgacgaacccacccgcattgaatttactcctcttttggaccagtgtcgatagcaattaattagcctgaacacttaaaggactccgcatacgtaaatatggaatattcatcttgtaggactcgcataagaatattatatgccacatgtaagcaaaggacgaaaaaacgctgagcgcgggattttttgggatccatcctgggaactatgtgcataatctatgggtattattttgtaagctcgattgtgatggggtcaccaagctgatttgttttataatgttgtttatttatacgttatatatgtgttgtttgggaatattatgagagatcaatgtttaagttgattgaggagggattgaaaggtagaatcgcaggttgtacaagaagctggcctagatttagttttagttgacctcctattttcccgaaactcacgtttggttatacgcccctgataaacaattaacaactaatggctatggaatatcacttaccaattactcattttcagttactgataccaaatatcacacatgcattcgtagactgatagcagacttagtagcgataactaatatgtatctgcatatatgcaatacttactaaccaatatccgacattcgatttgtacgcggacgcatacgctgaatacaataaagttattatataccaccta

SEQ ID NO: 5583 - protein, 563 aa, DROSOPHILA
MGPPTSTELPPKTTECSDAPVELTGYRRWLSENLMLLVTLSGVLLGVILGLSLRPLNLHGDSIMLISYPGELFMRVLKLMILPLVISSLIAGSASLNAKMNGKIALRTLVYFASTSFFNAALGIALVLLIHPGNPDLHNADDRSTDRRAVNLLDSLLDLGRNVFPDNLFQASIQQAHTVYLPKPSILHVFNETMNDTLASGSEAQRLSEDLTEDVVLVRDIQYRSGTNTLGIVFFCLVFGTFLGTIGQKGQVVVDFFAAIFEVIMKMVTCVMWLTPVGISSVIAGKILSVGDLGLVMSQLMWFIVTVAIGVFIYQFVVMQAIYFVVVRRNPFKFYAGLIQAMLTAFATASTAAALPITFRCMNEKLKVDPRITRFVLPIGCNINMDGTALYIAVASIFIAQMSGMVLGFGELLTVLLTSTAASMSSASVPSAALVLLLVVLTAIDAPVQDVTLLFAVDWFVDRIRTTNNMLGDCYTAAVVEELSRKELMALDAASVNYQDMPAGTPNGHGHGHGHHDGGLLEGQTELETSSKCVMTMTDSVVVDISAVMNNVNLQQEHCNRRV

SEQ ID NO: 5584 - DNA, 2050 bp, DROSOPHILA
gaagtttttgttgtagatctaggagtagttgttgttgggcgacttgtggaaggtgttgttgtgcatctaggagtagttgtcgttgggcgacttgtggaagttgttgttgtggatctaggagtagttctcgttggggaacaagtggaagttgttgttgtgcatctaggagtagttgtccgttgggccgacttgtggtagttgttgttgtggatctaggagtagttgtcgttggggcacaagtggaagttgttgttgtgcatctaggagtagttgtcgttgggcgacgtgtggtagttgttgttgtggatctaggagtagttgtcgttgggcgacttgtggtagttgttgttgtggatctgggagtagttgtcgttgggcgacttgtggaagttgttgttgtggatctaggagtagttgtcgtttgggcacatgtgcagggggttgtttgggttccttgggttgaacacgttggtgttggagtagtggtttcttgagtacacggacttgtgggaatgacggtggaagtatctatgcaaggagaactgggtattgcagtagaagattcttcagaacaggtgcatggtggagtatcggtacacaatggagtggtccagtctgtgtttgtcccagtcgttctgtcggtggtcgaatcggtgctacttgcagtagttcgatcagagcatgtgcactccgcacccgtggtcgttataggggaatctgttgtatccggggttttcggtgtggtcggacgccttctggtggtccttttggtggtcctcttggtggcccttttagtggtccatttggttgtttttctgcgaggacgtttcgttcgtttggttgttctacgcgtagatttgggccttttagttttttgtctcggttttgtagtagtcggattgctgtcagtgtcacagggttgcactggatctgggtagtagatagtgtcccctccacatccgggtattatctcctcactgggaccatcttgcatactatcccagtcgtaattagctttcacatttttaacctgtatgagcaaaatgctcactgcataaaaaaaacttaaacttgtaaaacgaattcatcgtgccaaaaattcggatactacttaccagttaaaaagataagggcgactttcattttattactccttgcagtggagctattatagtattctaaaataagcaatgcgtatggcttttataggttcgaattctgacgaaatccagtttgctcaaacccttgcatgtgtgcaaatatttcatttgcgaacttagcatattataaatagggcaaaagttgtataaacaaggtaacttttatgtttaagcaagcttactagaacagccgttttaaagcacgtttcttgtgtacacaataatgtttgattaacccacagttaatagccttcgcaggatgaaaattcgaagatatgtcagaaaactttccattcaaaaatgcacaaaaatgcacttctaaaatcaggttgggttaagaaattatagattatatatatcgttaaatgtaattttgttttgtactgccatatatacaaataaatttaagcaactgctaaaataaaaggtaatcaatatagtgaatattttcttaatcaaacatcttttttagcttttactgtgccgtaattaaatgtgagaaacctattttggcagcctaaataatatgcataaattctgttataatgagcgaaccaatacagtggctaatccgttttttcccgaagattcaataggaaaaacggaccacatgtcgtatgagcaattgagtccaactaagatcggggatggcaaaaattaatgggtcaagtaaatgcgtctcaataagccattgtgtgggtgcataatgcaaacttgttgataggaattgtgccacccccgaatgaggcgagcaaaacatgggaatccacaagaatatttcggcgcctgcgccatcctggaaatcggcgaatataaagctccgtgggaccgaaggtcggtgggtggtacgatggcgatggttttcactttcaatattgaaagcagcgccg

SEQ ID NO: 5585 - DNA, 1048 bp, DROSOPHILA
tgagcattttgctcatacaggttaaaaatgtgaaagctaattacgactgggatagtatgcaagatggtcccagtgaggagataatacccggatgtggaggggacactatctactacccagatccagtgcaaccctgtgacactgacagcaatccgactactacaaaaccgagacaaaaaactaaaaggcccaaatctacgcgtagaacaaccaaacgaacgaaacgtcctcgcagaaaaacaaccaaatggaccactaaaagggccaccaagaggaccaccaaaaggaccaccagaaggcgtccgaccacaccgaaaaccccggatacaacagattcccctataacgaccacgggtgcggagtgcacatgctctgatcgaactactgcaagtagcaccgattcgaccaccgacagaacgactgggacaaacacagactggaccactccattgtgtaccgatactccaccatgcacctgttctgaagaatcttctactgcaatacccagttctccttgcatagatacttccaccgtcattcccacaagtccgtgtactcaagaaaccactactccaacaccaacgtgttcaacccaaggaacccaaacaaccccctgcacatgtgcccaaacgacaactactcctagatccacaacaacaacttccacaagtcgcccaacgacaactactcccagatccacaacaacaactaccacaagtcgcccaacgacaactactcctagatccacaacaacaactaccacacgtcgcccaacgacaactactcctagatgcacaacaacaacttccacttgtgccccaacgacaactactcctagatccacaacaacaactaccacaagtcggcccaacggacaactactcctagatgcacaacaacaacttccacttgttccccaacgagaactactcctagatccacaacaacaacttccacaagtcgcccaacgacaactactcctagatgcacaacaacaccttccacaagtcgcccaacaacaactactcctagatctacaacaaaaact

SEQ ID NO: 5586 - protein, 330 aa, DROSOPHILA
MQDGPSEEIIPGCGGDTIYYPDPVQPCDTDSNPTTTKPRQKTKRPKSTRRTTKRTKRPRRKTTKWTTKRATKRTTKRTTRRRPTTPKTPDTTDSPITTTGAECTCSDRTTASSTDSTTDRTTGTNTDWTTPLCTDTPPCTCSEESSTAIPSSPCIDTSTVIPTSPCTQETTTPTPTCSTQGTQTTPCTCAQTTTTPRSTTTTSTSRPTTTTPRSTTTTTTSRPTTTTPRSTTTTTTRRPTTTTPRCTTTTSTCAPTTTTPRSTTTTTTSRPNGQLLLDAQQQLPLVPQRELLLDPQQQLPQVAQRQLLLDAQQHLPQVAQQQLLLDLQQK

SEQ ID NO: 5587 - DNA, 7897 bp, DROSOPHILA
tatcaacaggtacaatttaccatgaagaagtatacaacttatataagtgcataagtggaagtgcattttataatgcgtaatgaaaaagtaaaaataaaaaacatcttaccatgtcttttatgtgagccgtacgccaataaaacaccagcacttccgttctaaacagtagatttttattacttttaaccatttgaatcaaccctccgccaaccgattgatatataagcttttagagttccctcaacaactacaattccattacatttactaaattttaattagtatgacttctttgatttttgctttgcgaatcaacaacatttaaaaactacgtttcaacatttgcttccacatattgcttttaggagagcacagcgagggagaaggatttgggattgtattcgagttggaccagaatttggcctaatatatttggattttcgatagaagaaatgcatataaacattgctcattgtgaatgttttgacaatataacgattacaattagttcttagttcagtatgctacaaactcttggtttgccaccagcttgggtttctcgggggtctctttacacagcgcaactaacagttaattagagtagttttcggaattatggctacttatttgaattaccgataggtagtttaaaagattcccataacgcttaggttgcattagtctattatacaagtatcacattccttttgatgatgatatatattcggttttaatttgcatcttgactcgactatgactacacacgctacgccggctaatccgtgattattattgcttaagggatcatcagccgagggataataatatacctagccagggactgaatttaattgcaattatcactaggcaggcttacggactagttcacttagttgctagcatgacatataaagcgcacagaaaggaacacagtagcgtagcagacaaaaaccgatggctatagccacccccctcctctactctccattatcctatatatctagaccatgccgaatccctcgctgccctcgctgatggccaaaagcagcgacttctcgaactgctcgtagctctcgtagtcgggcaaacacagctggttgaaactgcaatcgaaaaagtttcgttttttagagaacgccgagattaaaggcaaataatagacgatggataaagttcacccaccaggtgtgcgccgtgggcaggttgccaaaggtcggagccgccgttatctggaactgcggatttagctcctggaatcccccgggcggcagctgggagcatcccgtggtgaactgcagcaggcgggccatctccgtctggctgaagttgctcactccggcccaaaaccaggccaaaacccgccgaaactcagccgaattgccgttggcgatgtggtgcgccttaaagtcgctgatggagtattccccagttccgcacatcagcagctgcacacgagaaaatgtttatttagcgctgtgaaattaaattagctaattataaaagtttataataacactcacctccagttcgttttcatcgaaaatgctgagaaggttatccggtataatggaatttagacccttcaggaagctatccacttcatccttgacgttgttgcacagacgctgctgagccagggcatccaggtactggttcttggtggcattggtcacccgcgtcttggccccgttgggtatcagttcgatggtcttgctcagctgtccactactggagtcgtacatctcctccacgaagtacagctccagcgtgtccgtggcatccagatcggtgtccagaatgtacttgatcttggacaggtacaagtcgggatcgtcctgttcgaagtactggtaggtaaggaacgaatttagataggaacatgattaattatctcgtttttgccgactaaccttgtaatgcaccctcagaccaataagttgagccagaaaagagcgactgaatctggctctgaccagctgacgataggtgccgcccagggcgctctcaaacagacactttcccaccatcttgccggcgaattcaaagtgcttcagcttcagatgggctggacgggtgggattcggatggaccagcgcctggtgcttgtcgtggaaggtgcagaagagacctccgcgggcgtcgaagagtgcactgcagaccagctcaaaccactccctccgcaaacctccccagtcgatgccctgttcaccctggaaggtgacctcgaagttgccacaccagtcggacaccgagaagcccttgacggccttcatgctgctctccaggatcttctcgcgctgcactttcagggccatcttctcgtgatagtagctggcatggaatttgcgaacctcgtggtaaaagaagtcctgcttgtccttgaaggtctccgatccaccaatgttcttcagcagaaaatgggtgaaggtggcagctatgatattccgatccttggaggccaactcaatcttgggttgggctccgtcgtctatgatgaaaacagggccgtgcagctgggacaccaactgcggcaggaaatggaacttggtcgagggacacagccggaatgtggcaatcctcttggggatgaacttgaggatcatctccttgatggtcacctggaagatcagcgagttctgagccctcacatttcacccgatgtcaacgtgctgcccagataaccactcacctgtttgggtcccacatagcagagcaccttcctcggcttgttcttggacacaccgaaaatactcagcagtttggcctcgtagcagatgttgtgcttccgggaggctatgttcttgtgcaccaaggtggtgtcgctgcctgggaggggttacaaatttatttactccctgtaaagagcctgtaaagatccccacacttactgctcaacacaatgatgtcgaagtcgccgttgggcagctgctgatcccggtagctgatcactgcccgtagacaagtcggttccggaaacagagcagtcaccgagactcgggagttgaccttgtcgtaggcgaagacaatcgcatgctgcagtttctccactggaactccatgcaggtcgtatattgccacttggtagccctgcaaagttacccaaaaaagttagctaaaagcgttctaaggaaaatgaacatcctgtacctgcagcgcctcatccgattgattctggtcgaacagacaggagttgccgaactcatcccgtggctcgatgtgcatcaaagtgggtgcacctgcgcagcagatgaccgtgctggcgggcctgatgaacctggagcgcctggcatcgatggctcctggcaggaaggatcgcagaaagggcgatccggcgatgtggctggcgccaatcagcacggatatcttgtactggcccgcagtgcgaaccgtgaacttgaccttggcgatgttggcgttgttgggatcggtggaggagcccagctcgctaatggtgaccaccttgcgagtgccctcggtgacctcgacaaagaagtggtccgtatcacagatgggatatggctggccgttgcgctggaagaagcgcaccacgaagcacatggtgccgcccacgctggcgggatccttccagtcccactgcaccttgcaattggcaggcagcagatactttccggtgacatattgcagcagggaatggcgggcctacgagtaaaaatgatgtagtgaacaatccgtaacccaatcggtatttaaaatcctctggcgtttacctctggggccaatgaaggctgcgtcatggcagccagggtgacgaggccggcgactgagacggatacgaccagcatgccgccccatgtccatgcgtcctgatgctggctgctcttgaccacagtcgaccagagctgcgccttcagggcgtccaattgggccttggacgtgggcaggttctgccgtgctcccgaccaaagctgccagtccttgccgaggatcttgctggcccgtgagtcctccagccagtagacgtcctccagcgaggcgacctccacggccagcagccgttggtagtgatgctgcagccggtgatcctttagccactcgcgcaggatcagcttttgctgcagatgcaatgcggcccgctgaagacgctgctcgtccagggggggcagctcaggcagacgctccggatcgccgcagctcgacaaggaggagattcctaaagtgagcggaaagtatggaaagtatgacgtattacataaggcttataattgcaatttttaactgtatagttcggcaatgaggggaatggagcgccttacaaatagcgggccaccaacttttctggtaattgagtttaatggttaaagtttcggcaactttgccgtcatgtcaactgtttgccaatgtcgccatcaacgtcgagcctccatccgtcgctataactctgggctcaacgacttccgatggtgcctaaaattacaggacaactaatttggccaggcgactacgtcaatgcccattttattccattccacccattttagtgcgccctcaacaaacttccaatcaattacgtttcaattttttatgacttaacccaatgccaaaccgaaaatagccagggaaacgacacttaatgcgttgtttgtcgcttatcgccggctgaaatcgaaaacaagaggttccccactgtcacgtcaggaccttttctccaccccccaaccgattccttgaaagcttaaccctgtagttacgagactcctgctgctccccccaatctcaattcggcgaaaaactttcatttggcattattgcagttcagttgttgctgtagctttgacttttcaccatgtaaaaatgtaagtcggtgacagaaacaaagcggaaaacttcaaggaggtgagaaaatcgagaaaaacacagttgttgcatttaatatgctaagtaacttcgaaggggaaaactaagttcaaatgtcttgaagcaaagagaaattatagttaaattttcacgaaaagcacgaaccaattttccaatgtctttatgccttcggaaaagaagactattttcccagaagaaaatcattccagtttaaaaatctattattaaaacttaaaaaaaaacccaaaagataatttcggtgggacatagacaagacttaatgccgactgcaatggcagtgccaaaaattggtaatgtatttatggggaatctctgccgatggtaagcccaaattaaccccaggaaagtcagaccatccggctagttaacctcggtgaaatgcacttaagcccggctcccacagcggaccacaaaatccagctaagccagggaccgcaggagtgcgaaaaaagtacagaccacgaaggaccgcaaagcgagtaacgtgcaaacgaaacccaggccaattgtggccgaaagggggtggtggtggtcctgccgccgcaggacccacttcactccccctcggaaaaagtacaaataatagaatattcgaggagggggtataggtcggtggtaggcaaagtttgcgtgcctgacattcgaaaacgaattcatttcgttaccaatttctttcgtatttccaaagcccccattggccaacacacgtccagaattcctaacttgttcatatttcgcgcgaaacgaacaacttccgtttgatttggccaaggcgataggaatatgtacgtatttcgatggcagaaaaatgcccgaacggcccacaaagtgcccacaatgaaaagttactttctgcggaaaacgagcttgccctttttggcgtcctgctacgagaattcctggttatttgtataattaaagtatttccactgcatatttaatggcgctgcagcaaacgacctttggcccgatggctgaacaggaattactaatcgtttttaattaaggaccagcgacagggtgacggcggaaaagctgggaaagtcaccaaagtggcgagctgacaaacaaagccgaggggagaggcggctaaatgaaaatgccttccgaaggttaaagcgcgacgtgccaggatggtgatgatgatgatgttgatacagatgatgggcatgatgatgaggataaatgtcaagtgaaagctgcgaggggcaaacggcggcggcggagcagcaatgactgatgaggccgacttttgacagtcgcagctgaaatgatgtgggatggcaggtggataacgccccaagtgaacacgaacacccacacagaaaggacaaaatagagacagagataattcccttatcaaaagttacttaacgacatcaaaataaaagtaattaaaagaacttagagctggatctaattccataacgccgagcaaatcgatttagatttcgcctcgagttaagcatctaatagaatattcacacttgggcactggaaattcggtcgattgttttcattatatttttggttagaattattgaattataaataagtctatttctttgccgaatcaattacttatgccaaacgagcaacgaggcgtatgcttgatgttttcatgtcgtcctgcctgctgatagccatctataattaattaagtttatggggtggaataatttcatttgaagcatgtgcacaaagtgagagcaatacacacatttgtatttacacatatatacaaaacatcattgaacaatttcaaaattaaatagtgaggtttagtagagacagaatgcctcgatggcaattcttacccattgattcaccgaagcacaattttactttgagcgtgggaaaagtcttgccacccgtggccgcatgcatgacgccacctacgttgatgtggctaactagcatggatatatcaaagcgagtggcatgatctggaggacgtcccttatagacgacaaagctgcggatgaggaccaaatcggacctgagcgaggcatcttcgggtgagcaatgcatctgacccattgttgttacttgtgttgctggtgttaaatttgacaaataactcatagatagacctgctgactatcgaatttgcacgtaagagtggcgattcgcccgcctccaaactcttttgttcgctcattagcccaaggatggcaggttggcccaggcgaagcgccgccaaagtgctgggcaaatgtttgcaaaacgagccaacttggcctattagccaagggctgcttaaggccagaaaatttaatgtccccagcgaggagtacagtgcttaatggatagggaggagggttctttttcttggatttgttgcaaaagaaagcagcttataaattagtaatgccttctattccatttaacgagcacagattttcaaagttggtttggcaactaggaaatgaaattgtaagctcatttttttgttacacgttacgtgtctttatcattcttcacgaaattgattttacaattttgaaacgcgctgttattgcacaatgccaccttttccagagggatgcacggaatgatttcgctgtttattgtttgcttttgactgtctgccctcgcttttcctccgctttcctcgccgaatgctccgcttttccatcgttttccctctttttgtgctcctgctcctttgttatccctccattgttgtgctctttgctttatccttttttatcgattgttctccgacgatggaggctgcagaaattacaatttgaatgacattcgatcgcagaggggcgcgggggctgcagggagggcagggacgttaagcggttggggggagggggggtagcgggcgattaaggttgccacaacaaaagccgcaatattttccttaacccacttgctccttttatgtttgtttaccaaagtgaaaaatgataaaattgccagcttcatcttccaccgaggacatcctgtgtgctgtgtgtgtgttcccgacccccccttcgcccccaacgcttttcatctcctttgtgggtgcactcaaaaaatattt

SEQ ID NO: 5588 - DNA, 2916 bp, DROSOPHILA
atgggtcagatgcattgctcacccgaagatgcctcgctcaggtccgatttggtcctcatccgcagctttgtcgtctataagggacgtcctccagatcatgccactcgctttgatatatccatgctagttagccacatcaacgtaggtggcgtcatgcatgcggccacgggtggcaagacttttcccacgctcaaagtaaaattgtgcttcggtgaatcaatgggaatctcctccttgtcgagctgcggcgatccggagcgtctgcctgagctgccccccctggacgagcagcgtcttcagcgggccgcattgcatctgcagcaaaagctgatcctgcgcgagtggctaaaggatcaccggctgcagcatcactaccaacggctgctggccgtggaggtcgcctcgctggaggacgtctactggctggaggactcacgggccagcaagatcctcggcaaggactggcagctttggtcgggagcacggcagaacctgcccacgtccaaggcccaattggacgccctgaaggcgcagctctggtcgactgtggtcaagagcagccagcatcaggacgcatggacatggggcggcatgctggtcgtatccgtctcagtcgccggcctcgtcaccctggctgccatgacgcagccttcattggccccagaggcccgccattccctgctgcaatatgtcaccggaaagtatctgctgcctgccaattgcaaggtgcagtgggactggaaggatcccgccagcgtgggcggcaccatgtgcttcgtggtgcgcttcttccagcgcaacggccagccatatcccatctgtgatacggaccacttctttgtcgaggtcaccgagggcactcgcaaggtggtcaccattagcgagctgggctcctccaccgatcccaacaacgccaacatcgccaaggtcaagttcacggttcgcactgcgggccagtacaagatatccgtgctgattggcgccagccacatcgccggatcgccctttctgcgatccttcctgccaggagccatcgatgccaggcgctccaggttcatcaggcccgccagcacggtcatctgctgcgcaggtgcacccactttgatgcacatcgagccacgggatgagttcggcaactcctgtctgttcgaccagaatcaatcggatgaggcgctgcagggctaccaagtggcaatatacgacctgcatggagttccagtggagaaactgcagcatgcgattgtcttcgcctacgacaaggtcaactcccgagtctcggtgactgctctgtttccggaaccgacttgtctacgggcagtgatcagctaccgggatcagcagctgcccaacggcgacttcgacatcattgtgttgagcagcagcgacaccaccttggtgcacaagaacatagcctcccggaagcacaacatctgctacgaggccaaactgctgagtattttcggtgtgtccaagaacaagccgaggaaggtgctctgctatgtgggacccaaacaggtgaccatcaaggagatgatcctcaagttcatccccaagaggattgccacattccggctgtgtccctcgaccaagttccatttcctgccgcagttggtgtcccagctgcacggccctgttttcatcatagacgacggagcccaacccaagattgagttggcctccaaggatcggaatatcatagctgccaccttcacccattttctgctgaagaacattggtggatcggagaccttcaaggacaagcaggacttcttttaccacgaggttcgcaaattccatgccagctactatcacgagaagatggccctgaaagtgcagcgcgagaagatcctggagagcagcatgaaggccgtcaagggcttctcggtgtccgactggtgtggcaacttcgaggtcaccttccagggtgaacagggcatcgactggggaggtttgcggagggagtggtttgagctggtctgcagtgcactcttcgacgcccgcggaggtctcttctgcaccttccacgacaagcaccaggcgctggtccatccgaatcccacccgtccagcccatctgaagctgaagcactttgaattcgccggcaagatggtgggaaagtgtctgtttgagagcgccctgggcggcacctatcgtcagctggtcagagccagattcagtcgctcttttctggctcaacttattggtctgagggtgcattacaagtacttcgaacaggacgatcccgacttgtacctgtccaagatcaagtacattctggacaccgatctggatgccacggacacgctggagctgtacttcgtggaggagatgtacgactccagtagtggacagctgagcaagaccatcgaactgatacccaacggggccaagacgcgggtgaccaatgccaccaagaaccagtacctggatgccctggctcagcagcgtctgtgcaacaacgtcaaggatgaagtggatagcttcctgaagggtctaaattccattataccggataaccttctcagcattttcgatgaaaacgaactggagctgctgatgtgcggaactggggaatactccatcagcgactttaaggcgcaccacatcgccaacggcaattcggctgagtttcggcgggttttggcctggttttgggccggagtgagcaacttcagccagacggagatggcccgcctgctgcagttcaccacgggatgctcccagctgccgcccgggggattccaggagctaaatccgcagttccagataacggcggctccgacctttggcaacctgcccacggcgcacacctgtttcaaccagctgtgtttgcccgactacgagagctacgagcagttcgagaagtcgctgcttttggccatcagcgagggcagcgagggattcggcatggtctag

SEQ ID NO: 5589 - protein, 971 aa, DROSOPHILA
MGQMHCSPEDASLRSDLVLIRSFVVYKGRPPDHATRFDISMLVSHINVGGVMHAATGGKTFPTLKVKLCFGESMGISSLSSCGDPERLPELPPLDEQRLQRAALHLQQKLILREWLKDHRLQHHYQRLLAVEVASLEDVYWLEDSRASKILGKDWQLWSGARQNLPTSKAQLDALKAQLWSTVVKSSQHQDAWTWGGMLVVSVSVAGLVTLAAMTQPSLAPEARHSLLQYVTGKYLLPANCKVQWDWKDPASVGGTMCFVVRFFQRNGQPYPICDTDHFFVEVTEGTRKVVTISELGSSTDPNNANIAKVKFTVRTAGQYKISVLIGASHIAGSPFLRSFLPGAIDARRSRFIRPASTVICCAGAPTLMHIEPRDEFGNSCLFDQNQSDEALQGYQVAIYDLHGVPVEKLQHAIVFAYDKVNSRVSVTALFPEPTCLRAVISYRDQQLPNGDFDIIVLSSSDTTLVHKNIASRKHNICYEAKLLSIFGVSKNKPRKVLCYVGPKQVTIKEMILKFIPKRIATFRLCPSTKFHFLPQLVSQLHGPVFIIDDGAQPKIELASKDRNIIAATFTHFLLKNIGGSETFKDKQDFFYHEVRKFHASYYHEKMALKVQREKILESSMKAVKGFSVSDWCGNFEVTFQGEQGIDWGGLRREWFELVCSALFDARGGLFCTFHDKHQALVHPNPTRPAHLKLKHFEFAGKMVGKCLFESALGGTYRQLVRARFSRSFLAQLIGLRVHYKYFEQDDPDLYLSKIKYILDTDLDATDTLELYFVEEMYDSSSGQLSKTIELIPNGAKTRVTNATKNQYLDALAQQRLCNNVKDEVDSFLKGLNSIIPDNLLSIFDENELELLMCGTGEYSISDFKAHHIANGNSAEFRRVLAWFWAGVSNFSQTEMARLLQFTTGCSQLPPGGFQELNPQFQITAAPTFGNLPTAHTCFNQLCLPDYESYEQFEKSLLLAISEGSEGFGMV

SEQ ID NO: 5590 - DNA, 10873 bp, DROSOPHILA
aagaaaatactatccagatgtaccgacaacctaaagaggagatcattgacatagattcaattccagtaaaaaacaagccagttgattatgaagttactgggaagccacctcacagatgccctcagtgcccaaagatattcttactcgccgccaaacttcaagctcacattcggactcataatgaaacgcgtaccaccgagcctccacggctgaaatgtcccatgtgtccaagtatatatatgaaacgcggatgtcttgaagcccatatgtggattcatagggcctctgatgaaagagaatcagagttggagcctccgtacaggtgccctcactgtccaaaactgttcctttactccagctttcttgaaattcacattcagacacatgaggatgtctctcagagactgtctcggaagtcatcgcacaagtgcgcgcagtgtgcagatgtattctcagacgtgtccagccttaaagaccacgtaaaaatccacgcgggggaacgaacgttcaaatgtcccctctgcctgatgtcctttcaagaagaaagtaacctaaagagtcacgattgtgctcacactcgtttcaagtgccacaagtgttccaagtttttcgaaagtcagaattatctagattttcacttcaagaaaagtcacacgacgaaaggtccgttcaagtgcataaagtgccagcaaacttttcaaaaaagaaacggtcttaaagaacacatcagttcgcaggtttgcgtacaatttctccggagtaagtctcctggacaaatattcccttgtcccaaatgcccgaaaaaatttagcatagaagacaattatcaaatgcaccacgccactcacaagaaagtaaagactgttatcgagaggcacaactgtacacagtgcaaaaagtcctatcaaaataaaaaacttcttaccaagcacattttgagtcacaaccggtgtgtccactgctcgatgtcctttacgagcaaatatcttctggagcagcacacttgttcccagagttaccaattaaatgggagcaggggtcgcaaaaatcctaatttgaactacaacgaatgcgaggagtccaacgaaagtgatttggaaccatagcataaatattataatatctatataagaaaacccccacaagcaaataaacagaaccagtttgaatttgtattttgttacttcatttattgtatgtttgacttcttagcttttaaacataaacttatttgactatgttgaaagttggattctcatgtttatgttcgcgttcatggtactaatgacttatgcgttcgcttaggcaactaactacgtgctacaacttaaactaggtttgcggtcgctgcggctgctccgaatttaacactatttacatgcaacttatggtctaagtgattttgagcgtatggtctagtttgaagatcttttgaaagtgatcgcatcgcgcgcaataatacaaatctctaaacaaaagacttaagacacaaacttaggcgtactttaatggatgaattgtatgagctctcaatgtatttctatgcgtaattatgctttggtttaattccagcactgcaaaaacctaaacaaatcgaatatgactatgacgcagtggcccagcggacggcattccaaggccagttagcgcctgccggccaacatcgcccgaagctgccgctgagactgaacaggctagactacgctaggctagaggggatttactcataaatttaaatacacagtatttacacaagtcgagtaaatgtctacggtactaatggtcctccttagacggccactatcttgctgggatccactttcacgcgcagaaacacggtatcgcccttgatgaagggtcggctgtgcagcagttcgtgggagatgaagcgtgggaagccgaatcctagctgatctggttcgttggacggcctctggaagttctcccaggtgggatcggggacgaaggattccgccacgcctccctggccactttgggcgccctgttcgaacagtgtgaaggtgatggagtgcgagaatggccacttgagcagagcatcgtactctcccggcaggacctttatgtagacggagacgtgcgtgttttccccaggtccattgccattgaggaacatcgacgcctgcagcttgtatccatactgggaggtgtagaacgggggtgagactagctccaggccatccttgcccctcgcttcggccatcttagccgaccagtcggtgatcttccacaacagagtgcctgtgtagttgatggacagcttggacaccgccgacttgagcatctggatctgctgaccctggcgcgagctgagggccaccatcagcgagagatgagcggcggcgttgctctccagatgggcctccagcatctggcgtggacccttgaagcggcatcccgcctccttgaagctgcaggacacggctagcgactggcattcatcacgcaaatgcgcctctagctcaccccggggaatcggaccagcatcgcatctctgcgggcaggccaacggggctcttgggcactgggcggcatgcaagggcagtgtgtcagccgagaattcccgctggcagtgggcacaacgacggagtcgcttggcacagtccttcgacttgtgaagggtcatcctgccgcgcagtatccgctggccgcacttggcctcgcagtaaaccggctcctggccgcagcttccgttgtgctcctctaggccagcaccggagaattcgctctggcagaactcgcagcgggtacgcctcatcgtgcaggtgtactggagatgatcggtcatcatgatgcggggaatctgggctccgcacttgttggggcactgggtggcatcgtgcttacaggcgttgagatgtcccttcagctttcgcagctcatcggaccacttgcagccctgtttgtgatgaatgcaaaagaccaaggagcccataatgtgttttggatcgggaccgggatagatctgcaaataagggaaataagaaatttgtaagtaagtaacgatcattgagaacttctgtataacaaatattttgtaaatggaaatgtaaaaaattatgcactacttggcttgtagttcgttttgcagtatttggtgtgaaaatacgtttccacaaacccatgattgtgagctgactttacaagtgcggaagttgaactgaaactaatgagttccctggggttccccttcctttaaaaaggttttccagatttactttcccaagctgatagacaggagttggcacttctcttcttatcttccgatccccttgacctgttgtttatccagtgcatcgcagatattgattttccagctacctgcccgccaccttttcgccgcacattttccctcgagggattttcacacatgactgctcatgttcctaggcacacccagacaggcacttcctgtcctaccttctaacgctctttttgggcactctcccaacttctccagccatcgcttgactgcctttgcccatatacttgtactcgtacttcgggtttttgaagaactgcacccgcttctggttctgctccccagtttttttccctatgcacatcagtcgtatgcatttaattgctggggacggcgagaggagtgcgacttcgcatccggtagattaaaataataaattgcgccgttgtgcgaaaatatttatgactgcctgcgatggtctaatctaattaaaacgcccccatttcgaatgaccagccacccacttttggatatggtaattgttcgatccgttgatgttgtttgacaaaccattaaagcgatgagcagacaattcgaaatcgggataaagatagatagatgttgtaggggagatgtggctcctaaccgagcgtcgcgacatttccggttgactcttttaattgaccttatctgcagcatgtatgcgtataaggggccagcgggaagaggggaaggtcagggggcttggaagagcgtggcttgacttttgataaatgaacatgtcgctgcatctggttctggtcccagagacagactcgtagaggcggcataaaaacgaagatataataagcaattaacacaagagcagggagcgggttgagttcggattcggactcggattcggatcccatgtgcccggcaaatgggcgtagtgaaaaaaaataaaatattatttctatggaatcgcctcttgctggtaatttcatttcttttaacatgaaaacgagtttggtgctcctcttctccgctccgccgttaaatgtcactttaaatgtggtgaactgcggttgaactctcgatggggccatggaccaattaggcaattggacttgcaagtggaatcgaaccgcccaccgaggagttcgttcaggaagtaaccgccactcaatcggagatggcgtaaacaaactggcgatgtttacacaaattccgcatcacgtagtggctggattaatgaagaacatgcagcagcacccgaggagatcagagatcaaaagctggccccgtccaactgtttgtcaaccgtctccaaatgtttacggggcaaccaaaacaattatgggcccgaacggcagtaggaaaaaactgaagagacttttttctctttagtggcaattacttgccgctctgctaaggttaatttactctgacttccacatcggggaccacacaaagatggaatggcaatggaggtcgtttgccacatttcggcggatgattatataattaggcgatattatggcaacttttgcttttttccccatgccaaaaaaagaggagtaaggcgcaaggaaatcgagaatattgttattcaactgctccgagtcattcagtttgattggttctgatgtaaagccgcagtcaaaaaccaattgaaattccgattcagacacgaaagcgtggccaaatttcaagcttcggtaattaaaaaaataacaaaaaaccgaatgaataagacggacagacaacacaactccaaaccaaatcaaaatcaaaatcaatgctcaggccaatgaaagtggaaacagcaaacagaaatgtgagcgaacaacgcattatttatgagcaacagcagttgttggcgcattttgttttatttttatgggacgctcaacctggagcctcctggagtggagtggcaacttgcccactccacatggaactgcacttccaacggcggatcataaaaatgaagttaggaataggcaggaagacaaatttataattttagacatcgaattcgattcgatgccccgtaagacatgtgcctcctacttggaattgccacaaccttaaagttcaaggcgctcataggcgaagaagtttgttttatttgattttatggctctgcctggcttcaatcagactacatcccattgtttatgcttctgttgaaagtttggggcggccaaaacttcgggttcggccatgtttctggaagatgtgttcctcttggggctttattaatagacaaattgattgggatgcactttaatttgaagggttgcagtccgttgggatacattgatttgtttgcctgattatccaaatgagttttgaagccatgcggtatctggtcgagtctatttaagtgatccccccaccaaataataatataattgagtctagaaaaaaaaatagtatcccatgttcccacataaacacaatggacttcacaggttgattagatggaaatcgacttgattatttcatatttctgataggcaaatgccaaacaaagcatttcgaactaaatctgaatgcaggcattatgatctcagagtgttccattattcttctagagcacgatttcccgacttgctaaccaaaagatcatcagattctggagcaaggggacttagcacctttccattattggtaaactattccccgctgcgagaacttccgtttgttcagttaacacaaaatattcccaaccaaaatatgttgacgttcatttgtgtaatgcacaaaaggcagagaagtggctggttgggggggaacttggcatgggtctgctgtccaaatatccccctaaaaaaaacgcccctggcatgctttttatttggtacgtgagcattggcattatagctttttatatgtatttcgagactcggcggtctgtgtttgcccaagaaattctcagcattcatatggggctacagtatcaacattataagctctatgaaaactgtgctaaatgcttctgatatttacccgcagctggaacactaattagatcgcttttttttcggctaggtgtttgcctaaggccaaaacttcccacagtcgcagggattgccaaagttacatggctaatatgggtgacccagtaaagtgcatcgatgccggatttaaaagtgcaacgctggcgaattggtgagccaaacaagctggccataaaggaaaccgctaaaacagctgatgtgcacttttgtcaatttcaaagatactcaagcagtgtgtaatttcagcaatagccagcgaagccaacggcaacaatggttggatgtggatgtggatgcgagctgagctcagacagctgcaaaatacaaaacccaaaacaaggcaaagagagagagagagagagaaaaaaatgaaaacaaaacatggccaaagccagaaactggtttcacccgagaaaatgaggggacaaagcggagcagagcagctgatttctaaccaggtaaaaacaccatgttgctgctccctctgcacctgcaatatggcaatatcgcaatatatccactgtggccatgttaaatgctgctttttgccactcttaatcacggtgatgaatttgcatgcgttggccccaagaaatgtataaattatgacttgaaactctgatccccggtgatcagatgttctagtttcagccactatttattacgaaaccgtcttggttgccaaacctcaacgcaggtgaactttgttgcagctgccacattttgtggctcttttttttttttgtgcggatctgacctttatgttggcctggttggcagctgtttgtctggaaaagcgacaggaaatgcagttgtttttgttcattttggggtcgtcagactttgggccaaattcttgctggcattagcgaaaatatttcgaattgacaaggtccccaaaagtcggcgaatgggagaaatccgttgagtcagccagccataggcggtgcgaaatgtgtcattaccagcaatatgttaattgattgctaatcgaaagcgaaatgtttgtcaaaatatacgttgagcacgttctaaactatatatggtctccaatttcaacttgctattgaaaatatggccctaataaattgaataaaatgaatctctagttcctcattatagaaactccatgataatatttataatgatccccaattaccaaagcagatattatagaacttgagttcctgttacactaatctgttgaccatatgctaatcggattttccgtgtgggaaatgcaattctggattggtgggaaccattctcccagacggaagctccattccgccacttaacgggttgcaccataattgcaaaattccaggaatgccagtccaggaggaggtaaaaaaaaaacagggcagacgcccccgtcagcagttggcaactggaactggttaactggtttacctttggccaaggatgtttgtactttgcaccgacgcagcactgcagcagcagctgaaaagcggctgggcaacttttccgaccgattcgctagtctaagaccaaaaccaaaacaagaaactcgttttctgaattgtttctgttggcaaaaatgcgaacctgccttacataagcccaggtccacctggcttttccttcggctaacggttgcgttggactcccgtatcttgagtgctcttcaactttggcatttgccgcgtcggatgcgtcggcggcgcctcgtcgccactggtcacgattatccatttcccggccgccgatgaaaactgtggcatgctcgtggcgtcgtcgtcttgctgaattttcattatttatgtttttatttttttttttttaagccaagcagcgccacttggtcgtgccgcgtgggtgtggctcgcagtgggtctgggtctgcaaatgaatgcagcactcgtctgcggaatccactgaccagggagagaatgtcagaagcggattgcgaaaaagtgcaagcgaaatcgaagtacgggaattctgattactttgcagactcgaatccgcattgaaatgggcttagtcggtgggaaaatgtgtcttgggcggcagaaaaagtagattgagtttaggctaattggaactatcaccttattgttaggtaatcgatggctcatagaacagttaactagttaaatttaattttcctccaaactgcagtttgtttatgccgcgcaataaaccctatttccccattcgatgcggctcttctttccatttctagaaatcggtccacgttgtgcccatatgttgtcgcccaagatgggactgtcagtatccctgcacaaaaaattcccatcgcatcctcagttgttcaagcgcgtctacatcctgtttgcctttcggatttttatttcaatctcttttggaatttttttttagttccattttcctgccatgtgtgtaaggccgggcaatctgtcgcacagctttggcaaattgctctcaacttggccgtcaaacggtgggggcttaattgcacccgatttggtgcggaaaatccatacatacatgtatatgaaatatatatgtatattcgatagttgtcagccagcttatcgggtgtggaaatccgctatcagtggacgtccccacgctctagatggccctatttgctttacgaaactgattgattgataatgataagtggcggctaagccctagtatctggccgctggtctagggctccccattcaattgggtcaatgagctttatcgggaatggagtagaatggaatgcactcgtgtcgcttttatggctgtggcaattatatgcgggctttagttgttaaatgtttgcacagctggctcgccaaaacaggaagtccccgccacaggcgtacggatgcgttccctgtttgtaatctctgtttacgcacatctgaatatcattaatgaatttaactgagtttctccaaactatctattgtttatattaagcttttgttatcctatgattcagaaacaataatagcctttgtcctatgactaattttgcgtatagtacgccatacaccaaagatatgaaatttgcagcattagcacgtaatgtaatctgcaagacgaaaagatcacatctctggtgcattgccctcgatatttctagggagccccgactttatcttggtgaacttacaatctgttccagttccgtgatgggcatgttgttgttgttgttcccaggagtgggtgaactgtgtgaggacgagtgcgatgaggacaccgtcgacgaggaggagcgcgatgtggcgcagtttccactgccggaggtcgtcttgttccgggggggagttggtggcggtacgggactggccagagtggagcagtccttggagttgcgattgggcgagagacgcgaggggaagctcagcgtcttcgtccactgggccaaacttcgaaccatattgttaatgtttttgttttttgtttattttcttgtcgtgaaactaatccaaaagtgtttcaattggcaagttttttgggggtctttgattgctttgcttgggcaattgcacttagtttattggcacatcactcagaaaagatcttggctatttcaaaacttggcgaaattcacacggcgcacgcgcatcgtttgtcttgtgttttccgttcaggctcagtttcagatacagatgcgaacttcacgaatacgaaccgcttgcgtcgacttctcgaaagcaattgatgtgacgcagaaacggcagaaacgtccaagccgctctgaaactcccgctctctcacacacactcgtgcacggccgctctcacggatgtggcgtaggggttgtgcaagggagacggcatgcgtcgatctgctctggcattgcactttagagcgagacggagactgcttttgtgtcggtgtctgtgagcaagagtgcacagtgggcaatagttgattttgcctgcttaaaacagaactaggagatatgcatattcttctacaccattttatacttaagataatattcttgtaagcttatatatatcattgaatttagtttaaggagtcccacatggcgtataagtaatataatttatcaatagtattaatttcgagctcattttatgtttgataataatagtttttaaggttactgtgtaacagtttagggttttaaaataaccttaatgtttgtgagatgtataaaacaagggatattttaacttctcaccactgtgcggtggttgaaaagtgccaaaaagtggttgattggttaaaatgctgaaactctctttgaaactgcattcggtttattcacaaaaggatcattacaaagatcgcaaaccggggtactaattttgtataatatacatacatatttacttctgcttttcaatagtctagatattcagaaattttatatttgaaaaattgccatttgaaaacaacgagcaactcgttaaaagtagtattattttccatcacatttccttgatggtgcctgtcgtgtacaccttatccttttctattaatttcgtcacttaatttcctttgtcattttccattttctatgggctttccgctcaatttggcaaaaggacatactgcggatactgtaattgctatatttacccaaacgcagctctaatgacgccaacaagccattgccaagtgcaattatccaaagggcctcaacatctgttggccagaagtc

SEQ ID NO: 5591 - DNA, 2507 bp, DROSOPHILA
cggttcgtattcgtgaagttcgcatctgtatctgaaactgagcctgaacggaaaacacaagacaaacgatgcgcgtgcgccgtgtgaatttcgccaagttttgaaatagccaagatcttttctgagtgatgtgccaataaactaagtgcaattgcccaagcaaagcaatcaaagacccccaaaaaacttgccaattgaaacacttttggattagtttcacgacaagaaaataaacaaaaaacaaaaacattaacaatatggttcgaagtttggcccagtggacgaagacgctgagcttcccctcgcgtctctcgcccaatcgcaactccaaggactgctccactctggccagtcccgtaccgccaccaactcccccccggaacaagacgacctccggcagtggaaactgcgccacatcgcgctcctcctcgtcgacggtgtcctcatcgcactcgtcctcacacagttcacccactcctgggaacaacaacaacaacatgcccatcacggaactggaacagattatctatcccggtcccgatccaaaacacattatgggctccttggtcttttgcattcatcacaaacagggctgcaagtggtccgatgagctgcgaaagctgaagggacatctcaacgcctgtaagcacgatgccacccagtgccccaacaagtgcggagcccagattccccgcatcatgatgaccgatcatctccagtacacctgcacgatgaggcgtacccgctgcgagttctgccagagcgaattctccggtgctggcctagaggagcacaacggaagctgcggccaggagccggtttactgcgaggccaagtgcggccagcggatactgcgcggcaggatgacccttcacaagtcgaaggactgtgccaagcgactccgtcgttgtgcccactgccagcgggaattctcggctgacacactgcccttgcatgccgcccagtgcccaagagccccgttggcctgcccgcagagatgcgatgctggtccgattccccggggtgagctagaggcgcatttgcgtgatgaatgccagtcgctagccgtgtcctgcagcttcaaggaggcgggatgccgcttcaagggtccacgccagatgctggaggcccatctggagagcaacgccgccgctcatctctcgctgatggtggccctcagctcgcgccagggtcagcagatccagatgctcaagtcggcggtgtccaagctgtccatcaactacacaggcactctgttgtggaagatcaccgactggtcggctaagatggccgaagcgaggggcaaggatggcctggagctagtctcacccccgttctacacctcccagtatggatacaagctgcaggcgtcgatgttcctcaatggcaatggacctggggaaaacacgcacgtctccgtctacataaaggtcctgccgggagagtacgatgctctgctcaagtggccattctcgcactccatcaccttcacactgttcgaacagggcgcccaaagtggccagggaggcgtggcggaatccttcgtccccgatcccacctgggagaacttccagaggccgtccaacgaaccagatcagctaggattcggcttcccacgcttcatctcccacgaactgctgcacagccgacccttcatcaagggcgataccgtgtttctgcgcgtgaaagtggatcccagcaagatagtggccgtctaaggaggaccattagtaccgtagacatttactcgacttgtgtaaatactgtgtatttaaatttatgagtaaatcccctctagcctagcgtagtctagcctgttcagtctcagcggcagcttcgggcgatgttggccggcaggcgctaactggccttggaatgccgtccgctgggccactgcgtcatagtcatattcgatttgtttaggtttttgcagtgctggaattaaaccaaagcataattacgcatagaaatacattgagagctcatacaattcatccattaaagtacgcctaagtttgtgtcttaagtcttttgtttagagatttgtattattgcgcgcgatgcgatcactttcaaaagatcttcaaactagaccatacgctcaaaatcacttagaccataagttgcatgtaaatagtgttaaattcggagcagccgcagcgaccgcaaacctagtttaagttgtagcacgtagttagttgcctaagcgaacgcataagtcattagtaccatgaacgcgaacataaacatgagaatccaactttcaacatagtcaaataagtttatgtttaaaagctaagaagtcaaacatacaataaatgaagtaacaaaatacaaattcaaactggttctgtttatttgcttgtgggggttttcttatatagatattataatatttatgctatggttccaaatcactttcgttggactcctcgcattcgttgtagttcaaattaggatttttgcgacccctgctcccatttaattggtaactctgggaacaagtg

SEQ ID NO: 5592 - protein, 486 aa, DROSOPHILA
MVRSLAQWTKTLSFPSRLSPNRNSKDCSTLASPVPPPTPPRNKTTSGSGNCATSRSSSSTVSSSHSSSHSSPTPGNNNNNMPITELEQIIYPGPDPKHIMGSLVFCIHHKQGCKWSDELRKLKGHLNACKHDATQCPNKCGAQIPRIMMTDHLQYTCTMRRTRCEFCQSEFSGAGLEEHNGSCGQEPVYCEAKCGQRILRGRMTLHKSKDCAKRLRRCAHCQREFSADTLPLHAAQCPRAPLACPQRCDAGPIPRGELEAHLRDECQSLAVSCSFKEAGCRFKGPRQMLEAHLESNAAAHLSLMVALSSRQGQQIQMLKSAVSKLSINYTGTLLWKITDWSAKMAEARGKDGLELVSPPFYTSQYGYKLQASMFLNGNGPGENTHVSVYIKVLPGEYDALLKWPFSHSITFTLFEQGAQSGQGGVAESFVPDPTWENFQRPSNEPDQLGFGFPRFISHELLHSRPFIKGDTVFLRVKVDPSKIVAV

SEQ ID NO: 5593 - DNA, 4221 bp, DROSOPHILA
aacgtgtaatcaaatttaaatttcataccgacttatgtatatactatctgcagttttaaaaactagtttatatccatcgagtatatatgtatctcctttaattaatcagaaatggtacaacaaaatcaatttggagatcccagataaattataaacccttactatgaagatatgttataagttattccatacatacatacgttattaacctgttttcgcggtttataaatagttgcctaattgttagtgctgtataagtttataatgattatatgtatacaaaaaactagttatacatatttactaatgcggatatgaatacaatgttcctttacatatgtgaaaaatcgactgattaaaacaaaaccaaatcggcaaaaggggttccacataaaaataacaccattactacgactaagtgttataaatttttacgtatacacatcattagcaatcttctcgggaattaaaatagttgtataaccgttgagatgaataagagttatgtgtatgtgtaagtgattggcacaagtgacattataaattccttagatgtagtcagtgtagatcaatgcatgtaaagttcctcaattccgatacgccatcaagaatatatgtatagaaagaaaagtactccatcattatctcgaaacgatttgccgtatcgccagcgcaacgttggctagatgggtcaaaagaaaatgctacctaccaatataataacgatttgtcggcacttttttgccgcccgctgagaactagaaacttgtcgtgtcacactgagaaagcattgtacgataatctcattgcgaggaatcctccagccaacagcaaacatatatactgatcgagctacactataagggaatcgctcgactcgagtggatttgtttacgcccgagcccaaagatacggtaatcaccccagcgatatggcgaaattgtttgccaacctaacgactataaatcggcagtggactacgactagtcagttgcgttgtagaccgctagaagtgcggacatagtaaacagtatagattcaatatgatcggaatatatttgctgatcgctgcagtcacgctgctatatgtctatctcaagtggacatttagctactgggatcgcaagggattcccatcgacgggagtgagcataccgttcggtgccctggaatccgtgacaaagggaaagcgatccttcggtatggccatatacgatatgtacaagtcgacaaaggaaccggtgatcggtttgtatctcacattgagaccggcacttctcgtccgagatgcccaactggcccacgatgtgttggtcaaggattttgccagttttcacgatcgtggcgtgtatgtggatgaaaagaacgatcccatgtccgcgagtttgttccaaatggaaggagccagctggcgggccttgcgcaacaagctgacgccctcattcacatccggcaaactgaaggccatgttcgagacctcagattcggttggagacaagttggtggacagcattaggaagcaactgcctgcgaacggcgccaaggagctggaactcaagaagctaatggctacgtaagttgaagcgattagattagcaaatatcaattgcgttgcaataatgtagctaattatttgagttttacaaatactaaacttattttttgaacaaccaattcacagtttcagactgcgatgcgattataaatcatgtcatttcatccgaactgagaacttgcaatagttttgctgtcttatgaaaaaaatgaacatactaaactaatgtaacgtaacgcattcgaaatttatggccgttgttaattgtatttaaacagataccccttatctgataaacaaactaatgaagtgtacttcatttatttcttttgttagatacgccatcgacattattgccacgactatttttggactggatgttgatagctttgcggatcccaacaacgaattccagattattagcaaaaaagtgaatcgtaacaacattgaagatattattcgtggaacatctagtttcctgtatcccgggtaagttgaaggtggactttatagactttataattaaacataaaacctatatctttcaaccatttgcaggctggagaaattctttgtgaaaatcggctggaaacaggaggccaccgaaagaatgcgcgagttgtccaatcgaaccgtcgatctcagggaacagaacaatatagttcgcaaggatctgctgcaacttctgctgcagctgcggaatcagggaaagatcaataccgatgacaatatttggtcggcggaaagcactaagaatggtgttaagtccatgtccaaggacttgattgccggccagctattcctcttctatgttgccggttatgagacgacagcttctacaacatcctttaccctatacgagctaacccaaaatcctgaagtgatggaaaaggctaaggaggatgttcgcagtgccatcgaaaagcatggcggaaagctgacatacgacgccatctcggacatgaagtatctggaggcgtgtatactcggtaagttttgatgggaatatatggcagttctttcatatatattttccatattttttttataaatggtttaatattgtatactttctaacagagactgctcgcaaatatcccgctctgccactgctgaatagaatctgcaccaaggactatcctgtgcccgatagcaaacttgtgatccaaaagggtactcccatcataatctccctcatcggaatgcaccgcgatgaggagtacttccccgatccgcttgcctacaaaccggaacggtatctggagaatggtaaagactacacccaggcggcctatttgccattcggcgagggacccaggatgtgtatcggtaagaagaaaggttccacatgaacagggtgaaatgggagtttgaatacttcagataagtaatactcaaatccactatatcccaccgatctctttccaattgcccatggaaactaagaaatttccgtctattttccaggcgcccgcatgggaaaggtgaatgtgaagatagcgattgccaaggttttgtcgaacttcgatctggagatccggaaggaaaagtgtgagattgagttcggcgtgtatggaataccgctgatgcccaaatcaggtgttcccgtgcgtctgtctctcaaaaagtagctcctagtcttgtaattaaaccatgtaaaccgtataataaacgtgcaatttgtaatgaaaatatggacaaacatatcaattggatgcacttctccctcacacagttacacgcacacacacaaacacaggcacacgggcgtacgcacctttgtaaatgtaaatagtttctcgttctccgctttacataagtcgccctatttactcgaaattggggggattctgagtaaactttggctcagcgaatatttattcgcatatgatctgaatctccatatggccgggaaatgcactttttccagctatgacaacacaatatggccgaaaaaatactctttcactttttccaggccaagttgtgtgaactgcgccacacacacgcacatacacacacacacgagagcgcacgcactggggacacgcacactgtcgcactcgcggcgatgacgttttcggccgcaatgcacctaattaacggatatttttgcatctaattcgattgcactcgttcggcggcgacccttggctattagtttgcaaatttccaagtaaatacgacgaatttggcgaatcagcgaatcactcgcttcccatgctgcggcacacactcacacgctaccacccacacgaacgcatacatatgtttgtcgccggcggtccggcaacgctgcggcaatgcaactctgcctggccacttggctaattttggctatttaccagccaactactttatagctagctgcttatatattttctttttgattgttccagtttaataataataatataatacaattatatttagaaatttaaatttttcataaattgttttaaatatgcttacgatttttattcttatttatttcttaaaatattaggtgactggattttagcaataaaaacaagctatataatagcacagcctgcatatgaaagcatctctgctcgtgttttttgccttgactgggtggcaactcccttgtttttctcggctgacgaaaaatttgaccgaaataaatcaattaaattgaaagtgta

SEQ ID NO: 5594 - DNA, 1605 bp, DROSOPHILA
agaccgctagaagtgcggacatagtaaacagtatagattcaatatgatcggaatatatttgctgatcgctgcagtcacgctgctatatgtctatctcaagtggacatttagctactgggatcgcaagggattcccatcgacgggagtgagcataccgttcggtgccctggaatccgtgacaaagggaaagcgatccttcggtatggccatatacgatatgtacaagtcgacaaaggaaccggtgatcggtttgtatctcacattgagaccggcacttctcgtccgagatgcccaactggcccacgatgtgttggtcaaggattttgccagttttcacgatcgtggcgtgtatgtggatgaaaagaacgatcccatgtccgcgagtttgttccaaatggaaggagccagctggcgggccttgcgcaacaagctgacgccctcattcacatccggcaaactgaaggccatgttcgagacctcagattcggttggagacaagttggtggacagcattaggaagcaactgcctgcgaacggcgccaaggagctggaactcaagaagctaatggctacatacgccatcgacattattgccacgactatttttggactggatgttgatagctttgcggatcccaacaacgaattccagattattagcaaaaaagtgaatcgtaacaacattgaagatattattcgtggaacatctagtttcctgtatcccgggctggagaaattctttgtgaaaatcggctggaaacaggaggccaccgaaagaatgcgcgagttgtccaatcgaaccgtcgatctcagggaacagaacaatatagttcgcaaggatctgctgcaacttctgctgcagctgcggaatcagggaaagatcaataccgatgacaatatttggtcggcggaaagcactaagaatggtgttaagtccatgtccaaggacttgattgccggccagctattcctcttctatgttgccggttatgagacgacagcttctacaacatcctttaccctatacgagctaacccaaaatcctgaagtgatggaaaaggctaaggaggatgttcgcagtgccatcgaaaagcatggcggaaagctgacatacgacgccatctcggacatgaagtatctggaggcgtgtatactcgagactgctcgcaaatatcccgctctgccactgctgaatagaatctgcaccaaggactatcctgtgcccgatagcaaacttgtgatccaaaagggtactcccatcataatctccctcatcggaatgcaccgcgatgaggagtacttccccgatccgcttgcctacaaaccggaacggtatctggagaatggtaaagactacacccaggcggcctatttgccattcggcgagggacccaggatgtgtatcggcgcccgcatgggaaaggtgaatgtgaagatagcgattgccaaggttttgtcgaacttcgatctggagatccggaaggaaaagtgtgagattgagttcggcgtgtatggaataccgctgatgcccaaatcaggtgttcccgtgcgtctgtctctcaaaaagtagctcctagtcttgtaattaaaccatgtaaaccgtat

SEQ ID NO: 5595 - protein, 508 aa, DROSOPHILA
MIGIYLLIAAVTLLYVYLKWTFSYWDRKGFPSTGVSIPFGALESVTKGKRSFGMAIYDMYKSTKEPVIGLYLTLRPALLVRDAQLAHDVLVKDFASFHDRGVYVDEKNDPMSASLFQMEGASWRALRNKLTPSFTSGKLKAMFETSDSVGDKLVDSIRKQLPANGAKELELKKLMATYAIDIIATTIFGLDVDSFADPNNEFQIISKKVNRNNIEDIIRGTSSFLYPGLEKFFVKIGWKQEATERMRELSNRTVDLREQNNIVRKDLLQLLLQLRNQGKINTDDNIWSAESTKNGVKSMSKDLIAGQLFLFYVAGYETTASTTSFTLYELTQNPEVMEKAKEDVRSAIEKHGGKLTYDAISDMKYLEACILETARKYPALPLLNRICTKDYPVPDSKLVIQKGTPIIISLIGMHRDEEYFPDPLAYKPERYLENGKDYTQAAYLPFGEGPRMCIGARMGKVNVKIAIAKVLSNFDLEIRKEKCEIEFGVYGIPLMPKSGVPVRLSLKK

SEQ ID NO: 5596 - DNA, 4345 bp, DROSOPHILA
atcccgaggagatttctgccttgaggaaggaagtgaatatcgcacagggcactttccgcacctttgccagtattttcgtatttggcactactttgagttgcgtccgcgtggtcgttcgcccggatcgagagctcctgtatccggcctggttcggcgttgactggatgcactccaccagaaactatgtgctcatcaatatctaccagctcttcggcttgatagtgcaggctatacagaactgcgctagtgactcctatccgcctgcgtttctctgcctgctcacgggtcatatgcgtgctttggagctgagggtgcggcggattggctgcaggacggaaaagtccaataaagggcagacatatgaagcctggcgggaggaggtgtaccaggaactcatcgagtgcatccgcgatctggcgcgggtccatcggctgagggagatcattcagcgggtcctttcagtgccctgcatggcccagttcgtctgctccgccgccgtccagtgtaccgtcgccatgcacttcctgtacgtagcggatgaccacgaccacaccgccatgatcatctcgattgtatttttctcggccgtcaccttggaggtgtttgtaatctgctattttggggacaggatgcggacacagagcgaggcgctgtgcgatgccttctacgattgcaactggatagaacagctgcccaagttcaagcgcgaactgctcttcaccctggccaggacgcagcggccttctcttatctacgcaggcaactacatcgcactctcgctggagaccttcgagcaggcaaggcacaattatatattcaaatgtcctttgatttgattcaaatatgatatgattcacttgattccaggtcatgaggttcacatactctgttttcacactcttgctgagggccaagtaagaactttataatctctttttggggagaaaaattttaaagcacaatagcagaaaaatatatcagataatataacaaaaaaaaagatcattatagttttttatttaagtggtttattactaaggtatccaaaaataaagcgaaaaatctgcaatttcagatatttagctttgttcaaaagcaacgatttttaggcggaagtgaatcagtcaccgctatccgtcgtatccgctggggcagcatcagctgcaggttctggctcagatgcaatagctgtagcgggcgggtcgtccaccgtgttgtctttttgtgtcttccacatcttagctgcagccagcaacttgagattgggtcgagccatttcgtcctcgggaaagatgtagtcgaatacctcctcccaaccttcctcgacgccattgtccgagacgatcttttgccgcttcttgatgcgccgcggcatcttgtccattaccttttgcatctcctgcgaatcggaggcgtcgcgttcaaagtcgcgccatgcctctagcaacagaacacgcgactccttgtctcccagctgacgcaacatctcgttggctcgctcatagattctccttgccagctgcacgttcagctccgcatctggcccgctgtcgccgtggctgaggcccatctcgaacttggcaaacgacatccacactttcacatgctgcgtccgctcaaggagtcgctcgtaaagctgtctggctagctctgtttcgcctagggctacctcgaagtcgatgtacgccttccacagcagctctggcatgtccaggcgcggctgctgcaccgccagctcgaaaatggctctcgcccggtccgtgtcgcccaacagattctccagctcggcaaacttcatccaagtgacacaattctccggtccaaactccaggaacttctcgtacagcatgcggcagcgctcgaactcacgcaactgaatctccagatcaatatagcctctgaagagcttatctctgggacacatgccgatggccaagcccagagctttgcgtgctcgctgcagctccttgcagcggatctcgaattgggcgtacagcagccaaagcttgctgaaggtgaactgcttgtgaggtattagctccagacaggtcttgtagatctgccgcgtgcgttccgcgtcctccgcttcaagctcctcgtacaaagcataattgatccaaaggtaaatgtagcgtcgccagaagttcttttcattggcaggcggcacgttggaaatggcccgttcgtacgtctcacggatctgatcccgatcgccctcagcctcaatcaagcgcaaatagtcgaaccaggcatcgtagttggtgggattggcggccacctcctgctcgtactggtacttgcgcttggaaacaatcacatcctcaatacccgctctgtcgccgtactttttctcgtgtttcgtataggccttgaacagctcctgtgtgcgatctttaggtaggtgatctaaagcgtacttgtagatgatgcgcgccctgtcgtgctccttttgaccctcctcgaaacgtgcaaaggcgatgaacaggcgctcctcgatgtagtcgtcaccaaagaactccacagcgcgctcaaatacccgccgagagccgtggataaacccatgagactcctcaaagcgggcgaactttatccagttcttcacgtccgggtgcacatagacaaatcgctcgtagatctcccgtgcccggtcgatctccttgtagcgcagctcgaagttgacgtaggtctgccaggcctgctcctccggttgccactccatccagcgctcgaacacctgtcgcgcccctgccacattctccagcatctcctccatgtaggtgtacttgtaccagaactggttgactcgcggcatgatggtcactgcccgatcccacagattgcgagcatgattcacctgcttgttcttcatctccatctcggcgtatttcagccagagggtcacgttccggtgctcattgtccaacgcccgctcccagatagagcgcgcccgctggatctcctgctgctgctcctcccactgagcatatttgatccaatggctgactaccatgcggttcttgcggagattgtcctcgaaggtctttcgcttccgctgctgatagtctgccaactcggcgggatcggagatcttctgctttggcggcggcggcagaatctccagatctcgctccttggcctcacggagcaactgctccgccgtaatttgcacctccgccggcgctttgtttttgacctggtgaaattttggattggataagttggtttggtggattgccgacgatggcacataccttggccaccttgggcatcttctgtggccgctccatgctgtgcgattcggggtccctcacttagcaatgttatgttggaaaaacgctaaatcgcaacaaaataaataatgccactaacaacgtcgtgcgataacgataggcatatttcgatagttcgctatcgataatcgctttttgtctccactggccttttgcgcattctacttttgaatgtgtgtttcaattaaatccctttttttgttgtatttccataaatatatactagtataataattgtacattgttgggttaaaaataaaacggataacgcattttttacttatttatttttgagcaatttcaacacaaatttaaaaaaaaaatggatatttaagagatgaaaagccacaggaactgtttatcccaatacacttgaaacacttttaaccgtcttcagttgaaggagactccttgctaccgtggaagatgttctaggtaatcatttgaaaaatctccacgaactctcgttccgcttctccggcttcaccaccacccagtgatcggggtccatcagatagtcgctacaaaaggcaacgaggcgttactgaataactataacatgcagatcgaaacccaccgatgctcaaccaaggccttttgggtatgggtccgcagtgcttctaaggacccggctcctccgccgtactcctccggcagcatctcccgcggcacgaactcgtacagcgtatttatgctttgcgtgtggaaacggatctaaagtgtagaaagtaatggtgagatgaagctattagagacataatggcttctcaagaaacccaccagcttgaagacctcgtcgctgatgaacggcttcaccacgctgacgatccgatccaggtaagttggacagttaatcatgtgaatggcgcgcaggcgcaccggaaatgccagctggaggaacttgatgtaggcgcgcagcgtgctgatcgtcagccgcgaaatgtgccgcattgtggtgcccttcatgtcgaatatctgcacctctccttcggacaggacatccggtttggcgagatcgtccggcgtcacgaaccggcagtcgctgaccataaaga

SEQ ID NO: 5597 - DNA, 2287 bp, DROSOPHILA
gcgatttagcgtttttccaacataacattgctaagtgagggaccccgaatcgcacagcatggagcggccacagaagatgcccaaggtggccaaggtcaaaaacaaagcgccggcggaggtgcaaattacggcggagcagttgctccgtgaggccaaggagcgagatctggagattctgccgccgccgccaaagcagaagatctccgatcccgccgagttggcagactatcagcagcggaagcgaaagaccttcgaggacaatctccgcaagaaccgcatggtagtcagccattggatcaaatatgctcagtgggaggagcagcagcaggagatccagcgggcgcgctctatctgggagcgggcgttggacaatgagcaccggaacgtgaccctctggctgaaatacgccgagatggagatgaagaacaagcaggtgaatcatgctcgcaatctgtgggatcgggcagtgaccatcatgccgcgagtcaaccagttctggtacaagtacacctacatggaggagatgctggagaatgtggcaggggcgcgacaggtgttcgagcgctggatggagtggcaaccggaggagcaggcctggcagacctacgtcaacttcgagctgcgctacaaggagatcgaccgggcacgggagatctacgagcgatttgtctatgtgcacccggacgtgaagaactggataaagttcgcccgctttgaggagtctcatgggtttatccacggctctcggcgggtatttgagcgcgctgtggagttctttggtgacgactacatcgaggagcgcctgttcatcgcctttgcacgtttcgaggagggtcaaaaggagcacgacagggcgcgcatcatctacaagtacgctttagatcacctacctaaagatcgcacacaggagctgttcaaggcctatacgaaacacgagaaaaagtacggcgacagagcgggtattgaggatgtgattgtttccaagcgcaagtaccagtacgagcaggaggtggccgccaatcccaccaactacgatgcctggttcgactatttgcgcttgattgaggctgagggcgatcgggatcagatccgtgagacgtacgaacgggccatttccaacgtgccgcctgccaatgaaaagaacttctggcgacgctacatttacctttggatcaattatgctttgtacgaggagcttgaagcggaggacgcggaacgcacgcggcagatctacaagacctgtctggagctaatacctcacaagcagttcaccttcagcaagctttggctgctgtacgcccaattcgagatccgctgcaaggagctgcagcgagcacgcaaagctctgggcttggccatcggcatgtgtcccagagataagctcttcagaggctatattgatctggagattcagttgcgtgagttcgagcgctgccgcatgctgtacgagaagttcctggagtttggaccggagaattgtgtcacttggatgaagtttgccgagctggagaatctgttgggcgacacggaccgggcgagagccattttcgagctggcggtgcagcagccgcgcctggacatgccagagctgctgtggaaggcgtacatcgacttcgaggtagccctaggcgaaacagagctagccagacagctttacgagcgactccttgagcggacgcagcatgtgaaagtgtggatgtcgtttgccaagttcgagatgggcctcagccacggcgacagcgggccagatgcggagctgaacgtgcagctggcaaggagaatctatgagcgagccaacgagatgttgcgtcagctgggagacaaggagtcgcgtgttctgttgctagaggcatggcgcgactttgaacgcgacgcctccgattcgcaggagatgcaaaaggtaatggacaagatgccgcggcgcatcaagaagcggcaaaagatcgtctcggacaatggcgtcgaggaaggttgggaggaggtattcgactacatctttcccgaggacgaaatggctcgacccaatctcaagttgctggctgcagctaagatgtggaagacacaaaaagacaacacggtggacgacccgcccgctacagctattgcatctgagccagaacctgcagctgatgctgccccagcggatacgacggatagcggtgactgattcacttccgcctaaaaatcgttgcttttgaacaaagctaaatatctgaaattgcagatttttcgctttatttttggataccttagtaataaaccacttaaataaaaaactataatgatc

SEQ ID NO: 5598 - protein, 702 aa, DROSOPHILA
MERPQKMPKVAKVKNKAPAEVQITAEQLLREAKERDLEILPPPPKQKISDPAELADYQQRKRKTFEDNLRKNRMVVSHWIKYAQWEEQQQEIQRARSIWERALDNEHRNVTLWLKYAEMEMKNKQVNHARNLWDRAVTIMPRVNQFWYKYTYMEEMLENVAGARQVFERWMEWQPEEQAWQTYVNFELRYKEIDRAREIYERFVYVHPDVKNWIKFARFEESHGFIHGSRRVFERAVEFFGDDYIEERLFIAFARFEEGQKEHDRARIIYKYALDHLPKDRTQELFKAYTKHEKKYGDRAGIEDVIVSKRKYQYEQEVAANPTNYDAWFDYLRLIEAEGDRDQIRETYERAISNVPPANEKNFWRRYIYLWINYALYEELEAEDAERTRQIYKTCLELIPHKQFTFSKLWLLYAQFEIRCKELQRARKALGLAIGMCPRDKLFRGYIDLEIQLREFERCRMLYEKFLEFGPENCVTWMKFAELENLLGDTDRARAIFELAVQQPRLDMPELLWKAYIDFEVALGETELARQLYERLLERTQHVKVWMSFAKFEMGLSHGDSGPDAELNVQLARRIYERANEMLRQLGDKESRVLLLEAWRDFERDASDSQEMQKVMDKMPRRIKKRQKIVSDNGVEEGWEEVFDYIFPEDEMARPNLKLLAAAKMWKTQKDNTVDDPPATAIASEPEPAADAAPADTTDSGD

SEQ ID NO: 5599 - DNA, 5277 bp, DROSOPHILA
tttttttttagtattgataatctctaaacgtaaatcctagtctcgtagcaatatcatagttaaggtgacttttttttcagaataaacttaaagcacgaaagaaatacatgtatttaaaccttaaatcctaaagtttataataaacgaacacaaattgaattcttgagtctgcgagcgagatggtgcgatgcagcctcagcgaaagagagcgagagagatgatacagatttgaggtacagtcagcacagtacagtgcggatcagagcttaagttgacgatatactattgttgtaaattgatgttaggctaagcaaataaatagttaaaatgttcaattttcgcttagctgaatcctgatcgtcgtaaaaacgcatttacacgaacattatatactagtcattaagcggttctatttgacaggtgaaaacaagaagctgtggcagccttttactacagaaactaaaaaagaaaaatacaaagcttgacatatacacgcatatttgtgaacaaactgaattttaccatacatctttgagaattttaggacagtattcttgataatctatattgaatgttgatctacacttaacgttgcacaaaagaggtatctttctgaccttctatgcgcgtggagtggatccaaaaaatcaacttggtgtaataaatgtgtatttaaatcacaaaacgggcatcttttccctttcaattggacatcagagagtttcgacaacgcacacctactagtttttttgcgagcttaactatttcaaatgtggttgagtaaagccattaatattgctttttataaattcagcataagtggcaagatggttttaaattgcgcgccactgcggaactacctggcatcactggccgccacttatcgatagccactggaaggcgagagagagagagaaagagagggcgcgaatcagctgctggaacgagtgttgttggaaggcagtgttgttggaagtggcagcgccttccaatgtcaattaaataagcaaaacgcgaagaaaacccaagcgtaaaggagagtctcgttgccgcgctcgaatagaaatccaggaaatcagtatcaattcaaccgcccttgacacatccacaaccactttgacatccgaatccgtatccgggcgaggtggcacggctggcaggaagaacgtaacgtgagtggctgctctattctattctattctgttgattcagcggagtacactacgcaataaccgataacgaccttaccaccgctcccctctccgcgcccatccgcagcggagcagtggagcacccccagtccaacaaggagctacctgctcgagatgccccagatgagggctgcggccgctgaggcggtggccgccggcagcgccaatggccagccgctggtcaagattgggcactacctactgggcgcaaccctgggaacgggaaccttcggcaaggtgaagatcggcgagcaccagatcacacgcgtcaaggtggccgtcaagatactcaatcgtcagaagatcaaaagcctggacgtcgtgggcaagatccggcgtgagatccagaacctaaagctcttccgccatccgcacatcatcaagttgtaccaggtgagttcatggctccaagcttagactttctaagtccaagctttccaggaaactgggttactggtttcctcttccaattacgctggccagctactaataacaaacaatcaagccgcagtttaataaacaaaaaggcaggatatgcccgaagggggaatagcttttctataacaacattttggaggtttgtttatctataaagtacacggtcatgcctagtcatccgaattttgttgcggaaggcaaatgcatatctagaaactgggccactggctagacattcgcaacagacatagaagcccaacttaaatgagcaaaaagtttggaaggaaagtttataaaaggaatatgtacggggtctgctttggttttacaagcacattttccctcgattttcggattggatcagttaccaattaggttaggcagggcttgggggaacctagggacggctgcagtcatcagctgatataaacgtgcttgctaacctttccgtaactctccgaaggtcatatcgacgccgtcggacatcttcatgatcatggagtacgtgagcggcggggagctgttcgactatattgtgaagcacggcaagctgcaggagcaccaagcgcgccgcttttttcagcagattatctctggcgtggactattgccaccggcacatgatcgtgcatcgagacctgaagccagagaacctgctgctcgaccacaacatgcacgtgaagatcgccgactttgggctctcgaacatgatgctggacggcgagttcctgcgcacctcgtgcggctcgcccaactacgcggcgcccgaggtgatttccggcaagctgtacgccggtcccgaggtggacatctggtcgtgcggcgtcatcctgtacgccctgctgtgcgggacgctgccctttgacgacgagcatgtgcctacgctgtttcgcaagatcaagtcgggcattttccccattcccgagtacctcaacaaacaagtggtcaatctggtctgtcagatgctgcaagtggacccgctcaagcgggccaacatcgaggaaatcaagaagcacgagtggttccaaaaggacctcccggcctacctcttcccctcgtccatcgagcaggactccaatgtgatcgacacctacgctgtggcagaggtctgcaccaagttcggcgtcaaggagaccgaggtgcacaactcgctgctcagcggcgatccgcacgatcagctggccatcgcttaccatctgatcatcgacaacaaacgcttcgccgacgacgcggccaaccaaataaacgagatcaacaacttctttgtggccggctctccaccaccgccgccgcctccgcccgttccccaatcatcgatggaccaccaagcccctctggccaccgtgaccgttggcggaggtacctcagccagctcgggcaccgccacaccagtgccaccagtggctggaggcacgcctagcagcaccatacccattcgaccgcatccggagcggattgcgccgatgcgggaccgtcaactggccatgtccgtgcagacatctggcggcggagccttcccggagaaaaccgcacgtggcggcactcccatcaagcgcgccaagtggcatctgggcatccggtcgcagagcaagcccaacgacataatgctcgaggtataccgagcgatgaaggcactcagctacgagtggaagatcatcaatccgtaccacgttcgggtgcgcaggcagaacgtgaagaccggcaagttctcgaagatgtcactgcagctgtaccaggtggacgccaagagctatctgctcgacttcaagtcgctgaccaacgacgaggtcgagcagggcgacgacgtcatcatggagagccttactccgccgccgcttagcgtgtccggggtgatgccgctgcagccgaccggccaccacaccatggagtttttcgaaatgtgcgccgccctgatcattcaactggctcgctaaggatgaggtgaccgccatcggccgcagcggaccggatgggatcttctcggctggcgatccgcactcggacagtcctgaggattgaccattacccggaagacacagtcccacaaaggaaagctggggggagtttcgggctccgcggatcccggagtctggccttaaccacatgactaagttcttgcattcgtcccaaacccttttgattttaatcggaaacccaatgtgcaattatcggtagcaggatttgggaatagattttaaaaatggcctgctactagacgacgaacaagagcttgggactccgactccagcttttctttgtgcggctgtgtaatccacataaaatgttattgaactcggacaccgccaaccgccgttgccgctacgctaccgttacccgctttgccgtatcgatttccgcttccggttagtctaagtctgtaggttccgcccggtcggcgggcttcgatccgtttctgttctgttctgtttctatttcgatttatgtttataagcaagttgagttattatccaaaccgcatgtgcacgtggatgtatttgtattatgcctaacgaattgtaattggaacctcgtctggggaagctgtcagataacaaccagatgtggaccaagttttatgtatctgtatctgaaccaaccaaacaataaagcgatccattaatattctaaatcgattgtggacgaagtgtgaattaagagtagccataattaaagttagttttattgcatattaaggtatgttgtgcacattctttcagcatcgatgattgcaaattctgcctcggcattgggcttcatatcgcagttccagtctcccgtttcgtgtgtaaaatcatagcatccctgatctaatccacctgtgcatcgcatcgccgctccagctcactactgcttctgctgttgcttccgcttcagtttgtcgattagggtctcgatgctgttggcgtcgaccagaccaatgaacttgtccactacgacgccgttcctgaaggccagaacagcgggcacggccttcacctcgaaggtctcgacgagatccaggttcgtctccacatcgatgaccgccaggtcgatctcgttcgagttctcaagcagctcgagcatcttgggcgtgagtatcttacaggggtcgcaccactcggcgtggaagttcacgatcaccgggttgtcgctgttgatcacctgcggaacaaggcataatacataggtggtggttgaacagactttaaaattggagtgctttgctcggaactaacaaaacacctcattgtcatccccataacgtcaccacaacgtcgagtatgccagattatgccacttataggcataacgtcatagctaaaaaggggagatggacctgcggctgccggggtgactatcgagattgatttgcggcagaatactgcagttttcatatagtgagtgattcatacaattgtagccagtgtctgctatattagtagttttaaattccgtctactctgagattgcggggtggtcacttgggaggctacaaaatgtgtgtgtgtgtgtgactcacgtttctcttatctcgcctaatccaactgcaattgataactcggccatggagcgatatgctgaagggtcttctgcagctggctcccgtttcttcgcggacgcagcggctggctgaaaggggtttaaaccgg

SEQ ID NO: 5600 - DNA, 2663 bp, DROSOPHILA
aaataagcaaaacgcgaagaaaacccaagcgtaaaggagagtctcgttgccgcgctcgaatagaaatccaggaaatcagtatcaattcaaccgcccttgacacatccacaaccactttgacatccgaatccgtatccgggcgaggtggcacggctggcaggaagaacgtaaccggagcagtggagcacccccagtccaacaaggagctacctgctcgagatgccccagatgagggctgcggccgctgaggcggtggccgccggcagcgccaatggccagccgctggtcaagattgggcactacctactgggcgcaaccctgggaacgggaaccttcggcaaggtgaagatcggcgagcaccagatcacacgcgtcaaggtggccgtcaagatactcaatcgtcagaagatcaaaagcctggacgtcgtgggcaagatccggcgtgagatccagaacctaaagctcttccgccatccgcacatcatcaagttgtaccaggtcatatcgacgccgtcggacatcttcatgatcatggagtacgtgagcggcggggagctgttcgactatattgtgaagcacggcaagctgcaggagcaccaagcgcgccgcttttttcagcagattatctctggcgtggactattgccaccggcacatgatcgtgcatcgagacctgaagccagagaacctgctgctcgaccacaacatgcacgtgaagatcgccgactttgggctctcgaacatgatgctggacggcgagttcctgcgcacctcgtgcggctcgcccaactacgcggcgcccgaggtgatttccggcaagctgtacgccggtcccgaggtggacatctggtcgtgcggcgtcatcctgtacgccctgctgtgcgggacgctgccctttgacgacgagcatgtgcctacgctgtttcgcaagatcaagtcgggcattttccccattcccgagtacctcaacaaacaagtggtcaatctggtctgtcagatgctgcaagtggacccgctcaagcgggccaacatcgaggaaatcaagaagcacgagtggttccaaaaggacctcccggcctacctcttcccctcgtccatcgagcaggactccaatgtgatcgacacctacgctgtggcagaggtctgcaccaagttcggcgtcaaggagaccgaggtgcacaactcgctgctcagcggcgatccgcacgatcagctggccatcgcttaccatctgatcatcgacaacaaacgcttcgccgacgacgcggccaaccaaataaacgagatcaacaacttctttgtggccggctctccaccaccgccgccgcctccgcccgttccccaatcatcgatggaccaccaagcccctctggccaccgtgaccgttggcggaggtacctcagccagctcgggcaccgccacaccagtgccaccagtggctggaggcacgcctagcagcaccatacccattcgaccgcatccggagcggattgcgccgatgcgggaccgtcaactggccatgtccgtgcagacatctggcggcggagccttcccggagaaaaccgcacgtggcggcactcccatcaagcgcgccaagtggcatctgggcatccggtcgcagagcaagcccaacgacataatgctcgaggtataccgagcgatgaaggcactcagctacgagtggaagatcatcaatccgtaccacgttcgggtgcgcaggcagaacgtgaagaccggcaagttctcgaagatgtcactgcagctgtaccaggtggacgccaagagctatctgctcgacttcaagtcgctgaccaacgacgaggtcgagcagggcgacgacgtcatcatggagagccttactccgccgccgcttagcgtgtccggggtgatgccgctgcagccgaccggccaccacaccatggagtttttcgaaatgtgcgccgccctgatcattcaactggctcgctaaggatgaggtgaccgccatcggccgcagcggaccggatgggatcttctcggctggcgatccgcactcggacagtcctgaggattgaccattacccggaagacacagtcccacaaaggaaagctggggggagtttcgggctccgcggatcccggagtctggccttaaccacatgactaagttcttgcattcgtcccaaacccttttgattttaatcggaaacccaatgtgcaattatcggtagcaggatttgggaatagattttaaaaatggcctgctactagacgacgaacaagagcttgggactccgactccagcttttctttgtgcggctgtgtaatccacataaaatgttattgaactcggacaccgccaaccgccgttgccgctacgctaccgttacccgctttgccgtatcgatttccgcttccggttagtctaagtctgtaggttccgcccggtcggcgggcttcgatccgtttctgttctgttctgtttctatttcgatttatgtttataagcaagttgagttattatccaaaccgcatgtgcacgtggatgtatttgtattatgcctaacgaattgtaattggaacctcgtctggggaagctgtcagataacaaccagatgtggaccaagttttatgtatctgtatctgaaccaaccaaacaataaagcgatccattaatattctaaa

SEQ ID NO: 5601 - protein, 582 aa, DROSOPHILA
MPQMRAAAAEAVAAGSANGQPLVKIGHYLLGATLGTGTFGKVKIGEHQITRVKVAVKILNRQKIKSLDVVGKIRREIQNLKLFRHPHIIKLYQVISTPSDIFMIMEYVSGGELFDYIVKHGKLQEHQARRFFQQIISGVDYCHRHMIVHRDLKPENLLLDHNMHVKIADFGLSNMMLDGEFLRTSCGSPNYAAPEVISGKLYAGPEVDIWSCGVILYALLCGTLPFDDEHVPTLFRKIKSGIFPIPEYLNKQVVNLVCQMLQVDPLKRANIEEIKKHEWFQKDLPAYLFPSSIEQDSNVIDTYAVAEVCTKFGVKETEVHNSLLSGDPHDQLAIAYHLIIDNKRFADDAANQINEINNFFVAGSPPPPPPPPVPQSSMDHQAPLATVTVGGGTSASSGTATPVPPVAGGTPSSTIPIRPHPERIAPMRDRQLAMSVQTSGGGAFPEKTARGGTPIKRAKWHLGIRSQSKPNDIMLEVYRAMKALSYEWKIINPYHVRVRRQNVKTGKFSKMSLQLYQVDAKSYLLDFKSLTNDEVEQGDDVIMESLTPPPLSVSGVMPLQPTGHHTMEFFEMCAALIIQLAR

SEQ ID NO: 5602 - DNA, 7338 bp, DROSOPHILA
tcatgaaaaatgaggatgtatctgctcaatcttattgatcaggttaaacagaaaaaaccatacaaatagttggaataatttcgtaatttattaaaaatacttgatattggaggtgccacacgcgtgttagttacctatgtaaatattacttctacttaacgtctacaaaatacaaaacacaatattctatcattactctagtaacttttttaaacacattgatgaatgaaaaatacaaatatttccacatcaggatctaatattgaccgatttctgttgataaagtaaagacataaatatctgtcaacttcctggccgcggatgtgggtcagtaactgcggcacttgctgcggcgtgcctctccggattagcacctgttcgggcgtgctatatagtattgcccctcccagttatcatcttggtattaaggtatctgcggagaaccagttctaggcatgccactttcccaattcaattattgaaaatgcctgcgacttttacttgtttaaagatgggacttcagtttaaccatacgtatatttcatacaataattgcaagtcttttacatgttagtacacaaaggtttttctcatcgaaacaaggaactcgaaacaaaccgttttagaaacaagaataacaaatgtgtggttcgttactcgatgggggtgtcacaaactaaaataaacatgtgtaagtactagtggctaaaataacgatgttgcacctaagaacaaatgctgacagaaacaacttcgtctaaggatacccagactgttggtcagaatcggaaaagtagcaagaagtatgtcgagtggtggtgttatatacagccttgacgtctttttgcttgctaagtctttgacgtgattcttagaagggcgaattcatgcccaatttggtaccgaagtcaagacgcgcccgacgctgatagcgcgcgttaaccctgaaataaacaaagcaaacatttaatattatcatagaacattggtcagctagcacctacttgttctcctggaatttcgccagctcgctgacgagcatactcagcaagctgccaccaaataagattaacaaggccaaccactggttgggcagctgaacccagaaatcctccagcagcagttgcacaaagcaaataataccatggatgaggactaagaacaaacatgtaaaagcccaaatacgattggtaaatggattgcgctgccagagcgcgtggtctcgatgcacaaaggtgacagaaatgaaaactggaatgatacaattatggtcgggcttatcaaaggtatggcaagttaatttaccgaagtgtaggattatgcctagcagcgcagagcttctagcaatgtaaagaaattgataaaactccgggtcgtcatcatcgtcgatttccaacacgggttcctcagtggctggttcagcgggatttaattgggtgtttggtaagagcatccaataggaaacaagctaaaataaatattgatcgacaccttaacttcctcctaacgtttatgaccaacacaacttaccagagacacgaccagtacaataaacttgcagccgtagcaccacatgacaaaggcaaaggcgcgagaatcatagtccgtctgctttttgcttgttgcccgattcatgattttgggatccacgtcgatgtgtgctagcgaaatggctattagcggcaccggcacacacatcagataaatgccgagcagcggcgttacgagcgggggttgcgagaggcacgcgcacagcacgttcagaatggagatagagcctgcgcagcaagcccagtactggatgcagttccacaggcccagagagaatcgacgtgaaagctcaattatggccaccagcgaaagcgggtcgtcgcggcaaacggcaatggaacagggcagagagttgagcagccggcttaagtacagtggcgagatggtgtgagctggcgactgcatggcgcatccatgaaggccgccctccagaagctcctcatcatcgtttccctttgacttgccggaatgccgctgccacaacagtttgttgttctggatattggcttccgtgtacgcgtccacatcctggcacacttgcggatacaacggctccacggctatactacagtcggcctgcagaaaaatgtccgcattggcattactggccgaacttccaaggcagacaacaatctcgccgtaggattgcatgatgtccagcatctgacgcgtggcttccgctgagcagtccgtaaaaagcgatacttgcagtgggacattgtcaacctgttccaaatgcggccgaatgttttcaatgccccttggcagctttgccctatttgacatatcgaagttgatgggtgcactctgatccgtgctttcagtgagtgtgctcaacgaacggcagttttcgtccatggcagagtccagcgaatggcgctgcttgtgcttgttcgcctcggtttccgcctccaactcagaatcgcctggtgggttattctttgtgcagctatcctgagagctctccttactgccctcgctatcaggtgaatgggaatccccactattgagggcgttaagtggattctcatccggattggaaatggcaccaggagctgaagagctcagggtctttgacgactccagattgtttggcggtcccaagagataactaatttctgggccgtcacctacaatttcagtggttttagctgcagatatggattcggatacagatgcagtggcaggtgcgggtgcggggggcgatatgtacatgactttggcactgggatgatggttgttctcatggtctgttgtagtggtggtggcagtggttgaggtggtggcttggggtttaccaatattttccgggaactcctttggcttggcacttatccgctccttttcactatccggctcaggttcgctcagtagcgagatgtggcagttccatccggactctagacccattttctcagagaagacacgcgagcgcagttcgttttctttgctaaagtgaacaaagcgtatgcaggcctgttcgagatgctcaacgagtcgtacgatatcgttttgcgcctggtactgcattgtcaccatgccgatgaatacctgatggcactgcatctcgaagcagccctccacatcgttacactcctcgtccttgttctccgaaaatagcaatgagtccgtgctaatgctgtggctcagcttgacgtgatgtccgccctggaagtcgcaatgggtcttgtccacgtgctgcatgcgcagctttgactccggcggtagctccagatacaaacagtcacctccactccgttgaggaccgctaagggctccatggatgccgtgccttagaggtcgataggcaaacgctgtacaataggacgtcagcgcgctgcgctgataaaagtccagtgcacgcttgcgatcctgtgcggacaatggtcgcagatcaatgccgtcccaaaagtcatcgcagcagtccagtataatgtctgctgttccctgggtgaaaagtgataaatagccgcctggattctcgcgcatgaccacagacaaagagtgcgggaatgggaccttcaccttggaggacagctggagctgccgggcgaaacgaatgtcccttcgcacaacatcaggttgctgcaatggagatattttaaataataactagaatactattttacaacgtcaccgagtcttaccaagtggcgatagctagccaattgaccctccagcgcgaaccgatcagtggcatggtcggtgaatccaatctgtttggccagttcgcaaaggcagcgtctgtttatagagaacaaccgattagaactggttccaactaccgctggatgggatgcgtcggtggtgcgtgagcatgcaggcaagcgtggcggacggaggtcgacggatggggcggtttcggtggcgggaatggggcgactatatttaagcgttcttgaatgtctgttacttaaaatagcatgccaatggggatggggcggggaggcgaaggagatcgatttacgagtacgaacaaattaatagaggtagaataatacataaatacaaggtttacatgtccacattgcaattactttttaggcttgaatgatatgggaaattatagagcaaaacgattaaggaatagcaagttactggaaatcaaaaatactttttcttacgcttgtaatttttaaatctttaccaatctcttgtgcttgttttgtagggaaatcgtccaattggattcaaaaatcaaaaatacccaaagaaaagactaatttgatcgggctggctttggatgcaatggtattcaataccattattttggagaaaatcattagactatataagtagtatatttgcggtcgatgcaaacgaccatatatataactggttagacagaaactaacgatgagtatggcaatgaactacgtacccatgcaaaaagcttttactggactcaatgagtgcatacgcataccgattagtcacaggtaccagatctttgtcgagcatagccaccgcggttacatgaccgcagaactgtgcgtagtgctcgtgggtgagtggagaacaggtgtttagcagaatggcaagacctagaaacattgaaatacgttagagaaggtacaaaactatgttcagagtcaagtgtcacccagtggcttcaaggacttgatgtgcgccttccattcgtgatcgtcgaactccagccgaaaggggcagtgttggtcgtgcgtgaggtccagcacttcagccactattccgcgctccttgtggtcctcatccacaaccggtacgtcgtcgctctcgctctgtgaagaagactgactgcctgctccatcctcgcgagcctcctcgtctgtgttgtgcaggaagaataccttttcggcggtgggattgggccacgacaggatacctttcttgtccacgcagcacagcgccgaaatggaccccagcacctgtaccagattggctgagcgcggcaggagttcactgtcaccacgccacagctgcatccagatgcggagcacactggaacgaagcatggacatattctgatagtcgtacgagggcgtgtccaggtcctcttcgaacgatttgcttgtactcttttccaacgcagcctgaggcgtctttagaaaacactgcaatcgagctattccccacaggttcatggatatccacatgagcgggaagataagcggcaataggggaactatggccgccgccgaggattcgacgagcacaaagcgccagttgtgcttctcatcggtaggcaggccatagccatggaggcgcagtaaccccgagatgagcgtgataactagggcactaatgaagccccactgctgtatatacttggtgaccagctgtcgacgtaaacaaagatagcaacgggttccaatttctttttaagatcttcttaccagatagcgctgctgattgtagatggtcggcggtcgcttcagagagtttttgaggcaaacagtaaggttatccaggtaaggtgtgctttccaaacaacaaacgagattgggcagcggaggtcgtgccacaggtttcactggaggatctccgtgaggagcagctccatatatttcgttagcagcaaaaaatttatttgtctccagttcgtgacaaggtccgggtgaaatgtgtcccggccgtagaacgatgtaatccccgcgcaccaacaaagcccacggcaagttgacaatttttccatctcggtaggtccactgcagggaaacgcagggcgacatgggattacttaggtgcggatagttggattgctgccaatcgtcactgaagtgctgttccgctagtttaatttccgaaatcgcgtgtcgtgccttccggaagatctctgtgcgccgcaggttgttctcccggaccaccacaaagaggtccagcgataagatggccagcaggcacaaggcgggccatagcattcctgtagcgagcagtgctccactagccagcaaactgcttccaatggaaagccatcccagtgggctatcgtaccgcttcacaaaggccgcccgcaattttcgataggggctaggaaagggattggctattatcagtacattccatcgtctatggattgactcacctctccgctccgtattgccgctcgtgctccagttgcacccgtttttcaatctcctcatgtagacgccgcagcgccacctttgtggttagtccacgcagagtgggctccggactagcccgcttctccggactttccgcccgcttcgctgccattttccttgacgtgctcctgcagctgcagttcaagaattcgcctccacctacagcatagtttacaaaatttgcgtctgtttaggtttgggttcggcgatcaagtgttcgcaacagccgtcggcgccgagtacggtcactctagaacaggggtggccattctaacaggttagccactagaaatcggattccactcttatctacataaattgttaggcggtcaaagtaaatgcctgcctatttcgtttgtgcttttcaatatttcaagaaatttaattttctgggaatcttgtaatatagaatttttgctctgaatgcattaataaaaatacggatatgtattgaaattgataaaaaatagaattaagctttactgttgttattttttcagaaattttaaaaaaagctacagactcaccggtcatgcttgttatcgataaccgttatcgatgggtgaataattactgggtcacagtccacggtcacactgtctactacgtattttttgtcgatgtaaacgtttatatattaaacttagcagataataccgatggattccaaactagatgtgagtcaggagctttaaacaggaatttaatctctaatatatgctccaccctactagatgttcgaggacgtgaacacgtcgccttcattggagggcgacatgtcgattccgggcaaaagaaccacaactgcaacgtccgcgagcggagtgccggaatacaatactctggatgagcccatccgcgagacagtgctgagggacattcgggccgtaggcattaagttctaccacgtcctgtaccccaaggagaagtccagtctgctacgagattgtacgtcatcaaatggtttcgttatgcattcgtatgcagttttcttattgtgtttacccgtctttcaggggacctttggggtccactggtgctgtgcaccttcatggccaccatactacaaggctcctccaccgccgacagcatgtctgacaacggacccgagttcgcccaggtcttcgtaatcgtctggataggtgcagccgtagtcacactcaactccaagctgctgggcggc

SEQ ID NO: 5603 - DNA, 4406 bp, DROSOPHILA
caaattttgtaaactatgctgtaggtggaggcgaattcttgaactgcagctgcaggagcacgtcaaggaaaatggcagcgaagcgggcggaaagtccggagaagcgggctagtccggagcccactctgcgtggactaaccacaaaggtggcgctgcggcgtctacatgaggagattgaaaaacgggtgcaactggagcacgagcggcaatacggagcggagagcccctatcgaaaattgcgggcggcctttgtgaagcggtacgatagcccactgggatggctttccattggaagcagtttgctggctagtggagcactgctcgctacaggaatgctatggcccgccttgtgcctgctggccatcttatcgctggacctctttgtggtggtccgggagaacaacctgcggcgcacagagatcttccggaaggcacgacacgcgatttcggaaattaaactagcggaacagcacttcagtgacgattggcagcaatccaactatccgcacctaagtaatcccatgtcgccctgcgtttccctgcagtggacctaccgagatggaaaaattgtcaacttgccgtgggctttgttggtgcgcggggattacatcgttctacggccgggacacatttcacccggaccttgtcacgaactggagacaaataaattttttgctgctaacgaaatatatggagctgctcctcacggagatcctccagtgaaacctgtggcacgacctccgctgcccaatctcgtttgttgtttggaaagcacaccttacctggataaccttactgtttgcctcaaaaactctctgaagcgaccgccgaccatctacaatcagcagcgctatctgctggtcaccaagtatatacagcagtggggcttcattagtgccctagttatcacgctcatctcggggttactgcgcctccatggctatggcctgcctaccgatgagaagcacaactggcgctttgtgctcgtcgaatcctcggcggcggccatagttcccctattgccgcttatcttcccgctcatgtggatatccatgaacctgtggggaatagctcgattgcagtgttttctaaagacgcctcaggctgcgttggaaaagagtacaagcaaatcgttcgaagaggacctggacacgccctcgtacgactatcagaatatgtccatgcttcgttccagtgtgctccgcatctggatgcagctgtggcgtggtgacagtgaactcctgccgcgctcagccaatctggtacaggtgctggggtccatttcggcgctgtgctgcgtggacaagaaaggtatcctgtcgtggcccaatcccaccgccgaaaaggtattcttcctgcacaacacagacgaggaggctcgcgaggatggagcaggcagtcagtcttcttcacagagcgagagcgacgacgtaccggttgtggatgaggaccacaaggagcgcggaatagtggctgaagtgctggacctcacgcacgaccaacactgcccctttcggctggagttcgacgatcacgaatggaaggcgcacatcaagtccttgaagccactgggtcttgccattctgctaaacacctgttctccactcacccacgagcactacgcacagttctgcggtcatgtaaccgcggtggctatgctcgacaaagatctggtacctgtgactaatcggtatgcgtatgcactcattgagtccagtaaaagctttttgcatggacgctgcctttgcgaactggccaaacagattggattcaccgaccatgccactgatcggttcgcgctggagggtcaattggctagctatcgccacttgcaacctgatgttgtgcgaagggacattcgtttcgcccggcagctccagctgtcctccaaggtgaaggtcccattcccgcactctttgtctgtggtcatgcgcgagaatccaggcggctatttatcacttttcacccagggaacagcagacattatactggactgctgcgatgacttttgggacggcattgatctgcgaccattgtccgcacaggatcgcaagcgtgcactggacttttatcagcgcagcgcgctgacgtcctattgtacagcgtttgcctatcgacctctaaggcacggcatccatggagcccttagcggtcctcaacggagtggaggtgactgtttgtatctggagctaccgccggagtcaaagctgcgcatgcagcacgtggacaagacccattgcgacttccagggcggacatcacgtcaagctgagccacagcattagcacggactcattgctattttcggagaacaaggacgaggagtgtaacgatgtggagggctgcttcgagatgcagtgccatcaggtattcatcggcatggtgacaatgcagtaccaggcgcaaaacgatatcgtacgactcgttgagcatctcgaacaggcctgcatacgctttgttcactttagcaaagaaaacgaactgcgctcgcgtgtcttctctgagaaaatgggtctagagtccggatggaactgccacatctcgctactgagcgaacctgagccggatagtgaaaaggagcggataagtgccaagccaaaggagttcccggaaaatattggtaaaccccaagccaccacctcaaccactgccaccaccactacaacagaccatgagaacaaccatcatcccagtgccaaagtcatgtacatatcgccccccgcacccgcacctgccactgcatctgtatccgaatccatatctgcagctaaaaccactgaaattgtaggtgacggcccagaaattagttatctcttgggaccgccaaacaatctggagtcgtcaaagaccctgagctcttcagctcctggtgccatttccaatccggatgagaatccacttaacgccctcaatagtggggattcccattcacctgatagcgagggcagtaaggagagctctcaggatagctgcacaaagaataacccaccaggcgattctgagttggaggcggaaaccgaggcgaacaagcacaagcagcgccattcgctggactctgccatggacgaaaactgccgttcgttgagcacactcactgaaagcacggatcagagtgcacccatcaacttcgatatgtcaaatagggcaaagctgccaaggggcattgaaaacattcggccgcatttggaacaggttgacaatgtcccactgcaagtatcgctttttacggactgctcagcggaagccacgcgtcagatgctggacatcatgcaatcctacggcgagattgttgtctgccttggaagttcggccagtaatgccaatgcggacatttttctgcaggccgactgtagtatagccgtggagccgttgtatccgcaagtgtgccaggatgtggacgcgtacacggaagccaatatccagaacaacaaactgttgtggcagcggcattccggcaagtcaaagggaaacgatgatgaggagcttctggagggcggccttcatggatgcgccatgcagtcgccagctcacaccatctcgccactgtacttaagccggctgctcaactctctgccctgttccattgccgtttgccgcgacgacccgctttcgctggtggccataattgagctttcacgtcgattctctctgggcctgtggaactgcatccagtactgggcttgctgcgcaggctctatctccattctgaacgtgctgtgcgcgtgcctctcgcaacccccgctcgtaacgccgctgctcggcatttatctgatgtgtgtgccggtgccgctaatagccatttcgctagcacacatcgacgtggatcccaaaatcatgaatcgggcaacaagcaaaaagcagacggactatgattctcgcgcctttgcctttgtcatgtggtgctacggctgcaagtttattgtactggtcgtgtctctgcttgtttcctattggatgctcttaccaaacacccaattaaatcccgctgaaccagccactgaggaacccgtgttggaaatcgacgatgatgacgacccggagttttatcaatttctttacattgctagaagctctgcgctgctaggcataatcctacacttcggtaaattaacttgccatacctttgataagcccgaccataattgtatcattccagttttcatttctgtcacctttgtgcatcgagaccacgcgctctggcagcgcaatccatttaccaatcgtatttgggcttttacatgtttgttcttagtcctcatccatggtattatttgctttgtgcaactgctgctggaggatttctgggttcagctgcccaaccagtggttggccttgttaatcttatttggtggcagcttgctgagtatgctcgtcagcgagctggcgaaattccaggagaacaagtag

SEQ ID NO: 5604 - protein, 1444 aa, DROSOPHILA
MAAKRAESPEKRASPEPTLRGLTTKVALRRLHEEIEKRVQLEHERQYGAESPYRKLRAAFVKRYDSPLGWLSIGSSLLASGALLATGMLWPALCLLAILSLDLFVVVRENNLRRTEIFRKARHAISEIKLAEQHFSDDWQQSNYPHLSNPMSPCVSLQWTYRDGKIVNLPWALLVRGDYIVLRPGHISPGPCHELETNKFFAANEIYGAAPHGDPPVKPVARPPLPNLVCCLESTPYLDNLTVCLKNSLKRPPTIYNQQRYLLVTKYIQQWGFISALVITLISGLLRLHGYGLPTDEKHNWRFVLVESSAAAIVPLLPLIFPLMWISMNLWGIARLQCFLKTPQAALEKSTSKSFEEDLDTPSYDYQNMSMLRSSVLRIWMQLWRGDSELLPRSANLVQVLGSISALCCVDKKGILSWPNPTAEKVFFLHNTDEEAREDGAGSQSSSQSESDDVPVVDEDHKERGIVAEVLDLTHDQHCPFRLEFDDHEWKAHIKSLKPLGLAILLNTCSPLTHEHYAQFCGHVTAVAMLDKDLVPVTNRYAYALIESSKSFLHGRCLCELAKQIGFTDHATDRFALEGQLASYRHLQPDVVRRDIRFARQLQLSSKVKVPFPHSLSVVMRENPGGYLSLFTQGTADIILDCCDDFWDGIDLRPLSAQDRKRALDFYQRSALTSYCTAFAYRPLRHGIHGALSGPQRSGGDCLYLELPPESKLRMQHVDKTHCDFQGGHHVKLSHSISTDSLLFSENKDEECNDVEGCFEMQCHQVFIGMVTMQYQAQNDIVRLVEHLEQACIRFVHFSKENELRSRVFSEKMGLESGWNCHISLLSEPEPDSEKERISAKPKEFPENIGKPQATTSTTATTTTTDHENNHHPSAKVMYISPPAPAPATASVSESISAAKTTEIVGDGPEISYLLGPPNNLESSKTLSSSAPGAISNPDENPLNALNSGDSHSPDSEGSKESSQDSCTKNNPPGDSELEAETEANKHKQRHSLDSAMDENCRSLSTLTESTDQSAPINFDMSNRAKLPRGIENIRPHLEQVDNVPLQVSLFTDCSAEATRQMLDIMQSYGEIVVCLGSSASNANADIFLQADCSIAVEPLYPQVCQDVDAYTEANIQNNKLLWQRHSGKSKGNDDEELLEGGLHGCAMQSPAHTISPLYLSRLLNSLPCSIAVCRDDPLSLVAIIELSRRFSLGLWNCIQYWACCAGSISILNVLCACLSQPPLVTPLLGIYLMCVPVPLIAISLAHIDVDPKIMNRATSKKQTDYDSRAFAFVMWCYGCKFIVLVVSLLVSYWMLLPNTQLNPAEPATEEPVLEIDDDDDPEFYQFLYIARSSALLGIILHFGKLTCHTFDKPDHNCIIPVFISVTFVHRDHALWQRNPFTNRIWAFTCLFLVLIHGIICFVQLLLEDFWVQLPNQWLALLILFGGSLLSMLVSELAKFQENK

SEQ ID NO: 5605 - DNA, 4288 bp, DROSOPHILA
gcagtgggctctccgtaggggaacgtgaccggcgtaaccttaattagatgcttgatcttccacaggcgggcattgttctccggtatgttcttgacgacagtaaaatcgctctgctttccgtctagtcccagatctttgaggattcgattctcccagtagggattgccctttagcggcttgatgcgctgcacccggaaaagtttcgccggctccacgggtggatcctggtgatcgggagtcctgagcgggatagatttagcattaacaaatgctggatttcgtgtgttttccttttatacactgcacacgtgaatacgaacctgggatagtaggtgataccctcaaatttctggccatttttgtagaggaacttcttgttgtgctttccgtagctgcgcaccgaacatgcggtgctcctcagtggattcagcagccttcccaggttcatcttaattgttttcccccctttgtaataaaattaaatgcaaaacgcttatgaaataattgatgtttccccgacgataacgattacacagacatctggttaactagttgcctatcgatgggcagcatggatactgccgttatgtaaaccaatgttaaccgcttgctgttaagcgatacaattcaaatgcaaaggcggcaaagttaaaagtgataatttatcatgtacaaactgaagataatttatcatttacaaactgaagatagcgaaaacattatcaataagatggtaatatatattcgttgtttttttttttaatatttcaagaattagttgagaaaagaaagtttttaggtcatcggattacacagcctccaggggatgatgtccatttctggaaaggggcggtctcatatcaaaatctccgccattttgtcagctacaattggcgctaatcgacgagggtggataacttggcattggctggctttcaacgcaatggggttgtttccgattttggttataaaggaggctgcagcttcccgaccggaagtcagttccacgtgagcatccatccggcgagcaaccgactctagtggcaagcaaggatatctgccagacaactcaaggatctagaataactctgcacctgtgataactgctgtaagttcaggcaacaaagcccaaaaattgtgagcaatgcaaatgaagtgaatgtactagcgagtagaataatcaaattaaagatacaaatagctgaatgaagtctctagttcgtttaaaattatatctagaaatttgttaattagctaacttgaccatgtgcacgcactcgacatgtgtaagtgtactggagtttcatagtcttgaggggacttgagttacacgacaagttcttaaaactagatcggatttccatcatcccatgggatcaatagacacgtcttcgacttgatgcaattccagtgacactttttggacccaaaacccattaaatcaatagatataaaatcatacgttaaccgcaacaatacaaaaaagggtggccaagcctaaggggttggcatcgctgaggtttgccaactcccgcgggcaaataaacgtgccgattgttcagctatttgtgtaggtgtgaaaatatgctgcgaataaacaatacacgcacaatgccgacaataagcacaataagtacaataaaaataaatgaaaataatagcaaacgcaaacagaatgcagcgaaaaaggggtgtgtccttcatcggcaaggacgacacacacacacacggacacccttcatcacaaatgtccacaaatgaagcataaataattcgagtgcaaggattatgatttcttcaacgcctattgtaaccttttttttttcaatagcatgagcgctccaccgcaaaggtagccacacttttcgtcttccttgagtttgaaatgcagatctgtgaagcaatcaagtacacatttcgttgtattcatagtctaagctgtgcatcctcttgcttccatttccatttccagcattcagcagcaggctgggcagcgcaagaaagtccagtgtccagcaccgaaatcagtggtgcaaatagccagagaatggtctacgatatgagccatatggcggcgggtccgccgcaaagcatttcgcttagtcgctactatctggtcgacgatgatgagatgattgggccaaataatccgcatctggtcaacgaggactatgcggccagtacgacgctggatatcgataagcgttttcaggcgcgaatggcgtgcgaaacggccgcacaaccggcaccgccaccgccgcccacgccggcgccacgtcgccggaccacgcccattgcccatttggatccatcggaattggtgggtctatcgcgggaggagcggcgtcgtcgcaggcgagcgacactcaaataccgaacggcacatgcgacgcgggagcgtatacgggtggaggcattcaatgtttcctttgccgagctgcgcaagctgttgcccacattgccgccggacaagaagctttccaagatcgagatcctcaagctggccatctgctacattgcctatttgaatcatgtgctggagacgccctgagatagcgccggcgcctccagtttcgccaccagctgcctctttaacgaggccaattttttcgcccccccgtaggaggtgggggggcgtggcgggcggatttagggggaaaacattgcgaatattccacatccgataaacgcatttcaccatgctctgtaatccgcacatcgctccattggatactttgccggtggcggctatggataatgcgattatcgaattagccatctcaccaacttaaccgaagtgttcgatggattttgccgatttgctaacctatttaacctatggttaaatacatacatttttttgttttttgtttttttttttccttgccactgttgaaagacaaatgcccgtcgtttcgtttcgattcgtttttttttttaggcttaggtttgttttcgtagaaacaattgtaaagccacgatttaacctaaggttaaaatatgcccgtactaaatgtagaagatataagctattagtttgtgtaatttaattgaaaagtagaaatatcgaaggaaataacaaaactaaatatgccagtagtacatacaattaaatttatgggaaagcagtgcttaatcctcggagtaaaccttgatcatggtttatataatataaataaccaagaaaaaaaaaacagaaccttaaactaagatccattttttgtctagcctttaagtcgtgatatttgtttatactcaaacgattaatatatacagcattgtaatcgcaataaaaaattgtctactttatgtattttggcgcgcctttgcacgacactcccctcgacttttggacaccagctgctctgactgagttttccatttgtctgaacgctttgctcggaaaagccagatgctaacagttccccctttttcaccaaccttcaagaaccacgtatccacgtatcaaaagcgggcgtgtcctttgcgccaagccccgcccatttgtgtaaaagcgaagtagagcagcctctgtcataattttcaaaaattgaggatacatttttatttttttgttttagaaactgtgaaagcgtcacggaaatttcgacttttgtgcaaaatttcgaaatggcccttcattttagtgcacagcaggtaagacaaatttattctagtcgattgggaggctgttttcaatatccataaatagtggcctaatttggttggtacgggtaacgggtatatatatatatacatatatatatatttgtgtggatccatggatgtaaacattttcgcaataataataacaacaaacgtggcaatggcaaccaactcgattcggcgccatccttttctatccagtgaaaaacgactcctgcattccgacaatcggctgtttgtccctgtatgggtgctattttcatgggtgtgggtgtactggcgttcataaacaaaaacaaaggccaggcgacaaggaagttttgttgtgtgcatattttagtttttaccagttatatattttattctttatttatatttttatatattttaaattaactcattttgaatggcatgtgtttcctttgctcgaattttaaacttttgtttatttatttttgaaaatatatgtcgggtgttttcttgtttttgagtgtcgtacgcataacgttaccgctaccgctccgttaccgtttccgctcccataaccgtttgagctcgctttttcatttcctccccgcccaccgcccaccgcccaccgcccaccgccgcctttgcacatttg

SEQ ID NO: 5606 - DNA, 1424 bp, DROSOPHILA
agttccacgtgagcatccatccggcgagcaaccgactctagtggcaagcaaggatatctgccagacaactcaaggatctagaataactctgcacctgtgataactgctcattcagcagcaggctgggcagcgcaagaaagtccagtgtccagcaccgaaatcagtggtgcaaatagccagagaatggtctacgatatgagccatatggcggcgggtccgccgcaaagcatttcgcttagtcgctactatctggtcgacgatgatgagatgattgggccaaataatccgcatctggtcaacgaggactatgcggccagtacgacgctggatatcgataagcgttttcaggcgcgaatggcgtgcgaaacggccgcacaaccggcaccgccaccgccgcccacgccggcgccacgtcgccggaccacgcccattgcccatttggatccatcggaattggtgggtctatcgcgggaggagcggcgtcgtcgcaggcgagcgacactcaaataccgaacggcacatgcgacgcgggagcgtatacgggtggaggcattcaatgtttcctttgccgagctgcgcaagctgttgcccacattgccgccggacaagaagctttccaagatcgagatcctcaagctggccatctgctacattgcctatttgaatcatgtgctggagacgccctgagatagcgccggcgcctccagtttcgccaccagctgcctctttaacgaggccaattttttcgcccccccgtaggaggtgggggggcgtggcgggcggatttagggggaaaacattgcgaatattccacatccgataaacgcatttcaccatgctctgtaatccgcacatcgctccattggatactttgccggtggcggctatggataatgcgattatcgaattagccatctcaccaacttaaccgaagtgttcgatggattttgccgatttgctaacctatttaacctatggttaaatacatacatttttttgttttttgtttttttttttccttgccactgttgaaagacaaatgcccgtcgtttcgtttcgattcgtttttttttttaggcttaggtttgttttcgtagaaacaattgtaaagccacgatttaacctaaggttaaaatatgcccgtactaaatgtagaagatataagctattagtttgtgtaatttaattgaaaagtagaaatatcgaaggaaataacaaaactaaatatgccagtagtacatacaattaaatttatgggaaagcagtgcttaatcctcggagtaaaccttgatcatggtttatataatataaataaccaagaaaaaaaaaacagaaccttaaactaagatccattttttgtctagcctttaagtcgtgatatttgtttatactcaaacgattaatatatacagcattgtaatcgc

SEQ ID NO: 5607 - protein, 167 aa, DROSOPHILA
MVYDMSHMAAGPPQSISLSRYYLVDDDEMIGPNNPHLVNEDYAASTTLDIDKRFQARMACETAAQPAPPPPPTPAPRRRTTPIAHLDPSELVGLSREERRRRRRATLKYRTAHATRERIRVEAFNVSFAELRKLLPTLPPDKKLSKIEILKLAICYIAYLNHVLETP

SEQ ID NO: 5608 - DNA, 5619 bp, DROSOPHILA
acaatccaatactcatttgattaaagcacgccttaggcaaacccttaattgatcagccactattcgtattagttctcttttaatttagtcctcactatcatttttatttcgctatttttagttataaataaagataaaaggattagaacctgcttccaatagaaatcggttcattgttcgactcccaagtaatgttctcagttcaagcttttcttcatgggtcacttcaatagattttatttgcttgtatttctatattgtttttgacaatgctgtcaagaaagtgttggaatttatccctagctctcccactagctgagtaacaagtatctgttagtcggggaaatcgagtataccgttctctattttgttattgttgttaatagaaaagaagacgttcattgtgcgtttcgtcacaattttttcgtcaaagtttttaatgtattgtgtttagctaaaatagttttgaaaagaatagatcaaaaacatattctttagcctcagtcactaataattgataaaactaaagattttgaattcaaaatactaaaaagtttttcaaagtttttcatttcttttgagccatatcatcttcaattgacaatcattagaaaccgtaaataccaacttttcaaattactttacttatttcccttttgattttcttacagaaccatggcctataccacactttggccgccgctgcacacaagaaaagagctcaagattttcgaattggacttttgcaagcttaaccctcaagagcagaagcgctataacaaaataatggcgaccaacttttcttagtctttaagttttaatatataaaattttataatttaaaaaaaaaatatataaaataataaaagcaacaaaagtgttgatgaaaacaatatcgttctgggaatataataattatcggaagccctcacagtatttcagtattttttatatatactttaaagtcatttagtacggcaacgttactaaaaatggcgtgattaacaaaaacgtgataagcaataaaaaaaatatatcaaacgaagttttttcagattccagattaatacacgcttccttaactttgtaaaggttgtaaaatatgatcaagttttggtaggtatgagtgcaaaaataaaatgctgtctgatcttaaccaaaagccttttgaataaaaaacatgaagactgtgcaaaaatgttaaattttgatgccacttgtaaacatgtgcgcattaaggagggtgttgaaataggaactcaaaatcacgaaggcacttaacaacgcaaatagtgaagctatttagtgaacacagactattatatgtgacataacaaccggaaattgcaggatgatatgaaaaaggtaaaatgcaacaacaaatacagataatcagtagcaagaaatcatcgaagtgtagcacggcaaaataggagttgacatgtatcttttaagaagacctaccgaaatttcaaacatcttgatccagccggccaaaaccgcatctctgtgcaataattcatcgatcgtgtcaacaaactagttagtgcctaccaatgggtcgagaagtctctactacttgcaatctgttcacgacacgaatccagcaaagatgtagctcgattcgtctcctgtgaagcgttgcagaagtacatttcaatatgggtaacgcctgttgtgacttgaggtatctcgcccttccatgaccaaaggagaaaaagaatccatgttgtgagaaatttcagaagccaaatagagtttgcaaagctacaaatctaagtggatgagtatttaggaattttacatatgaagacattgttcatcgggctggatcactgttgaggatcgacttacaaagcaaatttttgaatatttttgaatacatttcactacgtacaaaatatatacatttaaacataatattttcagagcgaggctgtttttgggtccagcaaaaaataatctaaaaatgttttgatctgtaagaagtacgtgcttagtgaggtctacctgtatataggatctgtacactctagggagaaagcatcaaaatccgagtaccaaagcttttcaaaagatctctttcttagttgtgataagctcggctcaagtctcttgatgggcttgaaagctttactcacggcctctctgggacagtatctctcaacgacgaatcgattatcatctgcgatcgcatttaaaaagtctctcgcccgttaattcgcgatcagttgtctctgcgtatcgaaggcgttcgtagtttaatttcgctcttcacggttctctggttcgaggtcgacgcgcgtaatcgcaaagacgcgttcttattaaataagctgtgaaatttcttattaaaattggtgggaaatatcccagaagatgaaatcaacacgcaaagtagttgggatttttttggccacctgcctgctgcctttcaccgttctacaaaatgttgcggcacaaggaagtaagtaccgagctataaatatgtgattcactcagagctgactcattaattgagaccggtacttatccgtgttaagcgcaatagcttaacagaattcaatgcggttatcagacttgaacttgaacaaatttcccatgtcaatgacttaattgagcgcactcgtgtattctttcattctcctcaataaattttatgggaccactcgtcaaacaacatattacattatcaagggatttgattgatgtcaaaaaattaatcgtattttttattatcaagtagcaactcctgacaattttaaatatcgttcttaatgcttgtgttctcaaaaacgaaacataattgaaataacgtataagtgcaatttaaatgtttattaaacataaaccaaattcttaataggatttttataatttgaaattaattaagctgcaaaattaggtcactaatattgactacaattattgatagcataatcaagcgaattaaaatgtttaatgaagtcgtttttgacttaagtgttttgttttaattcaacgacgtgctgattgatagtattattgcttaatttatttaaattaaataaatatttatatttaatttaaatagctttatcagcaggttgatttccgaattcaaaatttcccaagttgccttcatgttttataccactcttaactcattttgacaggagtaactgatcttcctacttgtgtctttaattgttatgtgtaggttgtaggaatcccaaccagaaacagggacaatgtttgtccatatacgactgtcaaagtctgctttccgtgattcagcagtcttatgtcagcccggaggacagaacctttcttcgaaactcacagtgcctcgatggagtaggtcgccagccatatgtttgctgtacaagtgatcgcagctttggatcccaggaggccacctccgcagcccctcctccaacgactaccagttcaagttcacgaggtcaagacggtcaagcgggtctgggcaacctgctgccctcgccacccaagtgcgggccccactccttcagcaataaggtctataatggcaacgacactgctattgacgagttcaactggatggcactgcttgagtacgtggatagtaagtgacatcttatataaaatcatgtaactttagttaacgcatctttatccatgttgatagacaggggacggcgggaactcagttgcggtggcagtttgatcaacaatcgttacgttcttaccgccgcccattgcgtcattggtgcggtggaaacggaagtaggtcacctgtaagtatttacgtggtttgatgtttatccacgtttttaaataactaaatgagttgtgcccctatacagaactaccgttcggttgggggaatacgataccagcaaggacgtggactgcatagatgacatttgcaaccagcccatcctacaattgggcatcgaacaggccactgtacatccccaatatgatcctgccaacaagaaccgcattcacgacattgccttattgcgattagatcggcccgttgtgcttaatgagtatattcagccggtttgtttgcctttggtaagcacacgaatggcaatcaataccggggagctcttggtggtcagcgggtggggccgaaccacaacaggtgagtttggatattaaagatacttatattcattctaaagatatcaattgaagctcttgaccaagaagaatctataatttcataactaattgattcaaattcttattctatagcccgcaagagcaccataaagcagcgattggatctgccggtgaatgaccacgattactgcgcacgaaagttcgccacgaggaatatccacctgatcagttcccagctctgtgttggcggggaattctaccgcgacagctgtgatggcgactccggcggaccgctgatgcgaaggggttttgaccaggcttggtaccaggagggcgtggtctcctttggcaaccgctgcggactagagggttggccaggtgtctacactcgggtagccgactacatggactggatcgtggagaccattcgtccctgagcagcggaacgaaggccgcttttgttctgataatgttttaattaaagtcaagtcgagagtgctctttgggctgggcgcccatcctttaattaacttgcattcaatgtgattttatcagctgcacttaccacgctgcgtatacttaatgcgcttacagtctagcgccgtttgcggtaattaaaatcgctgttccccactgggatgggatggtgagagttcagtggaataactttcaagatgcgggccaacttgcccagaggcaccttcttagcgcccccagctattttctatgcaatttggcaatgaatttctattatggaagcagtgcttttcagagcttccggcgctccatccgcaaagttttcacttgtttgctggctgattgcactgaaggcgtggctaggctggaaaacgaagtagacaatggctaggctcattaattgtgtgcacgcggaaaggttaatgatgcctgcaggaaccggttagcacggacaaagggcttgggtttctttaccaaatttacagagtccacataacagctttttaatgcggatccaaatacaagcgcaagaagtaaacgaggatcgcaaaggaatttcaaacaacttaacatatatatatagttgttatagttttatataacatatatagttatagtatatccatctttccttcttaacacgatggatttaaagacggccgaataaatgaataaataaatccgagccctgataaccgaatcccatctctagttggacatacgcactgtgtaagaatatttctttattttttcttttatcttttttatattttatttttgagaaaattcattgcgtacacatggaaaaaatggatcgaaagccattcatttccttaaacctataaaaatttggattgaagacggaaagaacttatctaataaaatgttggttcttggaataattaaaaaaatctgtatgaataaaccacgaattggtgttattctgagtacaatacttttttatttcagcataattaaatacgttgattcagttatattatcatatataagtaatatatatatatatatacattacattttaaaaag

SEQ ID NO: 5609 - DNA, 1829 bp, DROSOPHILA
attaacaaaaacgtgataagcaataaaaaaaatatatcaaacgaagttttttcagattccagattaatacacgcttccttaactttgtaaaggttgtaaaatatgatcaagttttgagcgaggctgtttttgggtccagcaaaaaataatctaaaaatgttttgatctgtaagaagtacgtgcttagtgaggtctacctgtatataggatctgtacactctagggagaaagcatcaaaatccgagtaccaaagcttttcaaaagatctctttcttagttgtgataagctcggctcaagtctcttgatgggcttgaaagctttactcacggcctctctgggacagtatctctcaacgacgaatcgattatcatctgcgatcgcatttaaaaagtctctcgcccgttaattcgcgatcagttgtctctgcgtatcgaaggcgttcgtagtttaatttcgctcttcacggttctctggttcgaggtcgacgcgcgtaatcgcaaagacgcgttcttattaaataagctgtgaaatttcttattaaaattggtgggaaatatcccagaagatgaaatcaacacgcaaagtagttgggatttttttggccacctgcctgctgcctttcaccgttctacaaaatgttgcggcacaaggaagttgtaggaatcccaaccagaaacagggacaatgtttgtccatatacgactgtcaaagtctgctttccgtgattcagcagtcttatgtcagcccggaggacagaacctttcttcgaaactcacagtgcctcgatggagtaggtcgccagccatatgtttgctgtacaagtgatcgcagctttggatcccaggaggccacctccgcagcccctcctccaacgactaccagttcaagttcacgaggtcaagacggtcaagcgggtctgggcaacctgctgccctcgccacccaagtgcgggccccactccttcagcaataaggtctataatggcaacgacactgctattgacgagttcaactggatggcactgcttgagtacgtggataacaggggacggcgggaactcagttgcggtggcagtttgatcaacaatcgttacgttcttaccgccgcccattgcgtcattggtgcggtggaaacggaagtaggtcacctaactaccgttcggttgggggaatacgataccagcaaggacgtggactgcatagatgacatttgcaaccagcccatcctacaattgggcatcgaacaggccactgtacatccccaatatgatcctgccaacaagaaccgcattcacgacattgccttattgcgattagatcggcccgttgtgcttaatgagtatattcagccggtttgtttgcctttggtaagcacacgaatggcaatcaataccggggagctcttggtggtcagcgggtggggccgaaccacaacagcccgcaagagcaccataaagcagcgattggatctgccggtgaatgaccacgattactgcgcacgaaagttcgccacgaggaatatccacctgatcagttcccagctctgtgttggcggggaattctaccgcgacagctgtgatggcgactccggcggaccgctgatgcgaaggggttttgaccaggcttggtaccaggagggcgtggtctcctttggcaaccgctgcggactagagggttggccaggtgtctacactcgggtagccgactacatggactggatcgtggagaccattcgtccctgagcagcggaacgaaggccgcttttgttctgataatgttttaattaaagtcaagtcgagagtgctctttgggctgggcgcccatccttt

SEQ ID NO: 5610 - protein, 391 aa, DROSOPHILA
MKSTRKVVGIFLATCLLPFTVLQNVAAQGSCRNPNQKQGQCLSIYDCQSLLSVIQQSYVSPEDRTFLRNSQCLDGVGRQPYVCCTSDRSFGSQEATSAAPPPTTTSSSSRGQDGQAGLGNLLPSPPKCGPHSFSNKVYNGNDTAIDEFNWMALLEYVDNRGRRELSCGGSLINNRYVLTAAHCVIGAVETEVGHLTTVRLGEYDTSKDVDCIDDICNQPILQLGIEQATVHPQYDPANKNRIHDIALLRLDRPVVLNEYIQPVCLPLVSTRMAINTGELLVVSGWGRTTTARKSTIKQRLDLPVNDHDYCARKFATRNIHLISSQLCVGGEFYRDSCDGDSGGPLMRRGFDQAWYQEGVVSFGNRCGLEGWPGVYTRVADYMDWIVETIRP

SEQ ID NO: 5611 - DNA, 4957 bp, DROSOPHILA
agcaccagcagcccgtgagcattatcgacatccaccacaagccgataaagattaagctggaacggccggagcacagcgacaagtaccagatcgtatctcctgaacaccagatggataaccatggccacaaccagagccagttgcccgatttccttaaccaggcgaagcccgaggtaaaatacgaaccgaccgaagaaattgtaaataccctctctcagctaccgccggcggacggacccggcacgtatgggatgccccagttcgttcaggatcggcctttctactgccggcagtgtgagaagcggttcaagcggcaggacgacctcaaccgacacatacgaacgcacaccggggagaagccctacgcctgtcagcagtgctgtcgccggtttgtgcggagcgaccacttgaaaaagcatcagcagacgcatttgaagatacgatagtttcatagttactccttactccttaagtcgctagccattggcatccgcatccaatcgatattggctaccacacgggcgtgtgtcgggtgacgcacacagtacaataaaattaaataaattcgcaatctaactatattcctatgcaagatcagcgccggctctcaaatctcaatttgtatgtatgtatgtaaataagtcgtatgcaatttaattttagctctaactgtttgtgtttgccggaacgtgaagacatacatctgtatttctgaaactcttgctgtttcttattttctggctactaagctccccgtatctattaatataatttattttagtaaaactgttatttatatttatgggctaattgatggggaactgatagttcatcaggatcaggactcgatccagtttgaaatttggaatatgattaataatggcctataagaatgaataatagatatatgtataatttctgataaatcaaagattcatcgactatcggttcggttgatagaatcgacttatcgataacagcattatcatcaccattggcgtttgattcagagtttcaagcaatgttttgcactgtttaaaataattacacacaagcgatgtgcgactttgacgctttgtgggcggatgtactgagaatctttccggttttgggtggagcggtaggtttattccttcggttcagtaatagggattggcgctagcactcagaaactcttacagaacgctgtatccaatgatccggttgaggagaatgtattccaaaatgttcgccagcacctgatggtgttgggcagcatagacaccttcgcggcggttgtggacctggaaatccagtcgactattcggaatgtcctggtgcccaagttctggaagcacatccacgacggcttggtctcgtctaaattgcagggctggattaacgaccaagctctggccatagaagcactgcccgataagaacggactgttcacccagttcatcgacgccatcaatgagctgcatgacagctttcagagcctgatgcaggtgaagcccaggctgatccagctagttggagctgagacaaagcccaccgcaaagacggtgaagctcatgcaggaggaaggcattaagaactgcttaagggactgcttgctggctcaactgccacccaatttcagtgtggtcgttggggccttctactgggtgcactttaagctcttcaccaaggcctcaaatctcgcattgaccacagttggtatgtatccgatacatactcctgtggttcccatgctcacttgctttccccttcagactctgatgttttcgatgagctcctctgcgttggctgcaacttcgaagcagagcaatgctgctgccaaaggctgacggatatggttaacaagacaaacatgaagctcttcgagatgaacctcattgaccgtctaactgggagtgctttaaccgctctcatcaagcttaaaatcaaggagcacatcagcgatacatgcatgggaatcttcgacagaagtcatcttaagcaactggaaactgtaagttgaatgggaataccttctgttgtcataaataaactacttaagtaactcatttattacctacctttgcagtggctatcggatgtcataatgtcctggctcacaaacatattcacggaatggaagtctaaggatagcataagcgatatcgaagttcccgagtctgtaaaatccttcaaagtcaaactgacttactttatgtacgaaacgtttgcccaaagcgttattggtcagttcttcagcattataattggtatgtgcccgtagattcagccaagagtcccccaactacatgtatttatttgtaaacagactatcccgattccattccggctatagatgacttaaagatttgcatggagaaaatagatatgcgagtctacctcactgaatcccttaggaactcgctagaggcaaggattctgcatcctggagtcaacaccatggacatattaacgggttacgtggcagccatcaaagctattcgccatctggatagtaccggagtcatcttagagatggtaactgctccaatcaaagattacctgcggaaacgaaacgacacagtgcgacgcgtagtcactgggttgactgaagaggggcccacggacttatccgaggaactcgccaagggagaaacaattaaggaatgcaaggactcgggtaccgatgagttcagcaactgggaaaattggcaacccgatccgtttggtatagatgccagcattatgcagtacaacagctcgcggaagatgagatcggccgacattatatcgatggttgtagacatatacggcagtaaggagttgtttatgacagagtatcgcaatctaatggcggacagactgctggcccagttagattttaattccgaaaaagaaattcgaaatctggaactgctgaaaatccgctttggcgaatcgctgctgcacagctgcgaggtgatgttgaaagacgtaaccgactccaagcgaattaacgcgcacatccacagcgatggcgaccgaactgaaagtgagttacttttaattttcaaaatgctttaacgaaaccatctcattttagatcagttgttcgacatctcctcgctgattgtttctgctcagttttggccgtccttcaataaagaaagcctccaacttcctgaggagattgagaatgagttcaagaagtacaccaaggcctacgaggcatacaagggcaaccgtacgctcaactggcgtacagtgactggccgtgtaaatattgaaatcgagatcggtgaccggaccatggaaatggttgtgagccccattttggcggttattatataccactttcaaactaagagtacgtgtttacagggcagtcaagttttacagttttacaaccgcatggtcatatttttttttcagatgaatggactatcgaggatcttagttccattacgaaagttccagcgtctgcactgcggcgtcgtctgagtttttggcaaaaccacggattgatctcggaaacgacacccggaatattcacgctgctggaaaaggaatcggagaagtctcagtacgaggacatgagtctggcagaagctgacgaagaggatttggaatccgcaatggcttctgccagcgatcaaagggaagaagaactccaagtaagtgccttcaactgttcctaattccggctttttcttatacaattatgccgcaggttttttggtcctatattgttggaatgctcacgaatcttgactccatgccaattgaccgaatccaccagatgctgaagctgttcgcctcccacagcggcggagtggagtttactcaggatgagctgaaacactttctccagcgaaaagtcagggagcacaagctaatattctcgggtggagtttaccaattggccaaataagtttcggagatccaaaaccaagttgcaaacgactgaaggaatcatgaaataaataatgaattaacgcgataacatttatgaaatttactgctccatgttaaacgtacctattttttcaaactgccgtcttatctgtttctattcagagcttatctctcacccacgtacacacaaagtctttacccaaacttgtttggcttgggaatttggaacacaatgcaagcaatcttatgtgaaaagaagaacacacagtaaaatacgtctattgcttaatttatttcaagttatattaaggtatatgctaatcccgttatcaacaaattcaaacttcttagggctctaaaactaaaggcgaagaaaagtgtacgtggttttgatatactttacaggttaaacagtttttggcttcataaaatcaatcacgaacgcagtggctaaatcgatcactttatacacgcaaacaacttggaatttaatgctgtaatcgttctaaactgtaatctgtacatcaaaagttacttcaggtatgcggaccagctagtcctcgtgcaagaatcgagcttggtagacacgatctcggtgaactggagtcaggacggcattgagaatgggtgaaatccgccgaatccgctgctgaaagcgatcccgatctcgcgccattacctgccattcgctctttctggcagcccgataagcgtagtcccaggcgagcattacgtgaacttcgggtttcatgttgaaacgaacctgtgcgcataaataggaaattagatatgcccacttatgccgcgcaaaaatattcttcaccttcttgacaggagtcgagctgtcgtcgctgcactggcaggcctttagctcctcggtattttcatcctcaccgcatgctgtaaactgcacgctgctgtcgtcgtcatcatcatcctcgtcttcctcgacatcctcatccgcctgctctgcgtcgtcctcaaagcaaatgaagctgtcctcactgcactcggaaatactacgctgccgctgccaggagctcttggcagccgatccttgcgaacagccagcgttgttattccg

SEQ ID NO: 5612 - DNA, 2534 bp, DROSOPHILA
tttgattcagagtttcaagcaatgttttgcactgtttaaaataattacacacaagcgatgtgcgactttgacgctttgtgggcggatgtactgagaatctttccggttttgggtggagcgaacgctgtatccaatgatccggttgaggagaatgtattccaaaatgttcgccagcacctgatggtgttgggcagcatagacaccttcgcggcggttgtggacctggaaatccagtcgactattcggaatgtcctggtgcccaagttctggaagcacatccacgacggcttggtctcgtctaaattgcagggctggattaacgaccaagctctggccatagaagcactgcccgataagaacggactgttcacccagttcatcgacgccatcaatgagctgcatgacagctttcagagcctgatgcaggtgaagcccaggctgatccagctagttggagctgagacaaagcccaccgcaaagacggtgaagctcatgcaggaggaaggcattaagaactgcttaagggactgcttgctggctcaactgccacccaatttcagtgtggtcgttggggccttctactgggtgcactttaagctcttcaccaaggcctcaaatctcgcattgaccacagttgactctgatgttttcgatgagctcctctgcgttggctgcaacttcgaagcagagcaatgctgctgccaaaggctgacggatatggttaacaagacaaacatgaagctcttcgagatgaacctcattgaccgtctaactgggagtgctttaaccgctctcatcaagcttaaaatcaaggagcacatcagcgatacatgcatgggaatcttcgacagaagtcatcttaagcaactggaaacttggctatcggatgtcataatgtcctggctcacaaacatattcacggaatggaagtctaaggatagcataagcgatatcgaagttcccgagtctgtaaaatccttcaaagtcaaactgacttactttatgtacgaaacgtttgcccaaagcgttattggtcagttcttcagcattataattgactatcccgattccattccggctatagatgacttaaagatttgcatggagaaaatagatatgcgagtctacctcactgaatcccttaggaactcgctagaggcaaggattctgcatcctggagtcaacaccatggacatattaacgggttacgtggcagccatcaaagctattcgccatctggatagtaccggagtcatcttagagatggtaactgctccaatcaaagattacctgcggaaacgaaacgacacagtgcgacgcgtagtcactgggttgactgaagaggggcccacggacttatccgaggaactcgccaagggagaaacaattaaggaatgcaaggactcgggtaccgatgagttcagcaactgggaaaattggcaacccgatccgtttggtatagatgccagcattatgcagtacaacagctcgcggaagatgagatcggccgacattatatcgatggttgtagacatatacggcagtaaggagttgtttatgacagagtatcgcaatctaatggcggacagactgctggcccagttagattttaattccgaaaaagaaattcgaaatctggaactgctgaaaatccgctttggcgaatcgctgctgcacagctgcgaggtgatgttgaaagacgtaaccgactccaagcgaattaacgcgcacatccacagcgatggcgaccgaactgaaaatcagttgttcgacatctcctcgctgattgtttctgctcagttttggccgtccttcaataaagaaagcctccaacttcctgaggagattgagaatgagttcaagaagtacaccaaggcctacgaggcatacaagggcaaccgtacgctcaactggcgtacagtgactggccgtgtaaatattgaaatcgagatcggtgaccggaccatggaaatggttgtgagccccattttggcggttattatataccactttcaaactaagaatgaatggactatcgaggatcttagttccattacgaaagttccagcgtctgcactgcggcgtcgtctgagtttttggcaaaaccacggattgatctcggaaacgacacccggaatattcacgctgctggaaaaggaatcggagaagtctcagtacgaggacatgagtctggcagaagctgacgaagaggatttggaatccgcaatggcttctgccagcgatcaaagggaagaagaactccaagttttttggtcctatattgttggaatgctcacgaatcttgactccatgccaattgaccgaatccaccagatgctgaagctgttcgcctcccacagcggcggagtggagtttactcaggatgagctgaaacactttctccagcgaaaagtcagggagcacaagctaatattctcgggtggagtttaccaattggccaaataagtttcggagatccaaaaccaagttgcaaacgactgaaggaatcatgaaataaataatgaattaacgcg

SEQ ID NO: 5613 - protein, 802 aa, DROSOPHILA
MCDFDALWADVLRIFPVLGGANAVSNDPVEENVFQNVRQHLMVLGSIDTFAAVVDLEIQSTIRNVLVPKFWKHIHDGLVSSKLQGWINDQALAIEALPDKNGLFTQFIDAINELHDSFQSLMQVKPRLIQLVGAETKPTAKTVKLMQEEGIKNCLRDCLLAQLPPNFSVVVGAFYWVHFKLFTKASNLALTTVDSDVFDELLCVGCNFEAEQCCCQRLTDMVNKTNMKLFEMNLIDRLTGSALTALIKLKIKEHISDTCMGIFDRSHLKQLETWLSDVIMSWLTNIFTEWKSKDSISDIEVPESVKSFKVKLTYFMYETFAQSVIGQFFSIIIDYPDSIPAIDDLKICMEKIDMRVYLTESLRNSLEARILHPGVNTMDILTGYVAAIKAIRHLDSTGVILEMVTAPIKDYLRKRNDTVRRVVTGLTEEGPTDLSEELAKGETIKECKDSGTDEFSNWENWQPDPFGIDASIMQYNSSRKMRSADIISMVVDIYGSKELFMTEYRNLMADRLLAQLDFNSEKEIRNLELLKIRFGESLLHSCEVMLKDVTDSKRINAHIHSDGDRTENQLFDISSLIVSAQFWPSFNKESLQLPEEIENEFKKYTKAYEAYKGNRTLNWRTVTGRVNIEIEIGDRTMEMVVSPILAVIIYHFQTKNEWTIEDLSSITKVPASALRRRLSFWQNHGLISETTPGIFTLLEKESEKSQYEDMSLAEADEEDLESAMASASDQREEELQVFWSYIVGMLTNLDSMPIDRIHQMLKLFASHSGGVEFTQDELKHFLQRKVREHKLIFSGGVYQLAK

SEQ ID NO: 5614 - DNA, 5190 bp, DROSOPHILA
gcagattacctgcctggcccttctggccgttagtggagctctgaagatccacgactaccaccaggggcacgaggagtacgagcaccacgaccatcatgagcaccacgagccggagcaccatgtgaagtacgagccggagcacgaggagacggagctgcaccacgaggtggaccacaagcacgccacctcgcaccagagcgtcaagttccaccactaccatgccgtgcccgtctacatcaagaaggaggaccagcacctggtgaaaaagcctatcgagatcggcggcaccaagcagaagctgaagatcctgcacccgaagagtgagcacaaccacaaccacggactggtgctcgaaaaccacagcgagtcgcaccacgagcacggccactacgaggagccggtgcaccactcggagcactacgagcactactcgcaccacgagtaggacttggactaccagaatcggaaatgccaaatgagctgtggggatttcgttagcgtttaaggatttgctacgttaattttcttgtgttaataaagcgttgacctagagtatagagtaccacccaaatcaagagatcttatattatattgcttaaacttttttgattgctccactctgaatttgccacaacttctttcacagtgtatttaactgctcaggtgaacttcgataacgatctatcaataattgaacgcgcaggcaatttatcgcaccacgaccgcttgtggtatttctgtgttctggtatatttttaggttcaaccctggcgaaaaattgtttttggcataactgctataaagtactgaagaaattcaataataatcttaacaatggcaattagacaaaaaatggtttaaaacacttgatgccttccagaggcggacggcatgagttatcgaactatcaaagaactgctggccccgataggttccgatacaaatcgcaccgctatcgaagaagaattgacttccattgtatatcgtttggaaacgcaagaagtgcacaaaactcgctgctttccggtgcagtttgtgaagaagtttgctaaaaagtgagtattttgcacctgcagagtattccgtggccgccgctggctgcttcccgaggactccgtgctgcctacgctttttcgtgttgcttttttcggctgcacggccccaagccaaaaaacacggacgcatcgcctgccgtgtgtatgtgtgcgtgcgtgtatgggcgagtgcgcgagtgttggtagttacttttccagcagctttttccaagtattgcgggtagcgccggagttgctattgggactccctggtacggacccctaaaaagaccaggggcgggcagtggcaggctaccgagtgcaaccgcattccagcaaagctggcgccctccgtccggctcctcccccttggctcggctgccgagatgtacacacacatattcggattctgattttgccgagaggaagtgcagttccggagtcccgagtgtggagctgcgctcaatctgcatcctgcagccgcgcaacaaggagcatcgctcgtccctactgcgactcctaatcggaatccctcttgaacttcttcttggcgaactaattgatttgcactctcttgtatcgttgcagctcgtggcgccaactgcgacgcaaacacgcaagaaacccagacaaacaggagctatcaaggcttgacacagaaggtcatgtccaacgcggataagatgcaggaccaggagcacgacgacgagcagtcctccgacatagaggtgagtttttggattctcttagcgagccgacgaacctgttttcacgcgtatattcccgactattcgctgcttcggtgcagggatccggcgacaatgtgggccgtgatgacggcaccgacgatgacgacgacagcaacggcaacatgcagcaggagaatggagatggcggcaacggtggcgacggccaggagcactctggcgacgaggagcaacaccacagccaggacaacgagggcaacgataactccgcaggccaacagcagcaaatgcagcaagtggaccgaaccagcgccaccaatctgatcatcaattacttgccacaggacatgaccgaccgcgaactgtacaacctctttagcggctgcgggcccatcaacacctgcaagataatgcgcgacttcaaggtaagttcggttgtggccgcctgagcgcccagaatacctgctgaactgcacgtaacaggtgccatccctgtcgcacgttgcatgtacacacgaatgcagcttacactcccctctgctttgtatgcccgccaacggaacagaccggatatagcttcggctacggcttcgtggactacaaaacggagtcggactcggaggacgccatccagaagctaaatggcttctatgtgcgcaacaagcgattaaaggtgcgttagaatcccccggaattcccatgactcctttgtgactctctttttcgtctccctcaggtgtcgtatgctcgaccgggtgggcagtccattaaggatacgaatttgtacgtcatcaacctgtcgcgaaacatcaacgacgacatgctcgaccgcatcttctcgccctatggcctgattgttcagcgaaacatcctgcgggataagctcactggacgaccgcgcggcgttgcttttgtgcggtgagtacgggtgcgatctgcgtgtgcagcatccacgattcgaaattaggtcacggtgctcaattcccgtccagtgtgccccacttaattgtatgctcacagaaatccacgtccaaatttatcatgagttcgactggtggctgaactgcacttacttcgattctgcttttgaaacccgctttcttgcttgcagttacaataagcgcgaggaagctcaagaggcgatcaaggcgctgaacaacacggtgccggagggcggatcccagccaatctgggtacgactcgccgaggaacacggcaaggccaaggcggcccagtttatggcccagatcggaggtggcaatggtggcggaggcggtggtccgccccacatgggcccaggtggaccgatgcacccacctcatcaccacaataatcaccatcacaacaaccaccacaatccgcatatgccgccgcatcatcatcagccgcagcatccacaccagcatccgcagcaccatccgcagctgcaccacatgcagcaccaccatcccaacaaccacaacaacaatcaccccaacaaccaccatcataacaacaacaacaacaaccaccacaacatgggcggcccgcatccgcaccacatgcagcaaatgcacccgatgggcatgaacatgggcatgggcgtaaacatgggaatgggcatgggcatgggcatgcccattcacggaggcggcggtggtggtggtggcggcggcggtggaggcggtggtggtaacttccaccacatggcgcacagaggtagatcaaatagaacaacacgatctcaaaaaccgcatccatataaccatgcacagaaatttatttaaacgccattaatttctttacacgatattagctgcatctcacaggtgaagtgttcatgctgccattgccgatttgcagccgattccccagccagccgcatcccgtaggcaatggcatttgccacagccccaacaagaacagcagattccgtttaagccgccgcccgcaagcctccagaacaaccatcagatatattgcgcattcggtggcagatcccgttcccactccgactacctagtgccgctctactttccagcccccgcccatccatcagttgtttccatctcctcgccagctgcgtcactttcggcctacccagctgttttggccgtgtatgttccggtatatgtcacggttccggtctctcttcctgttaccatgaacagagccagtccacaagcttaaagtgagtgcagacggaggcggcggaggcggtggccacatggtagaagcgagtagaaatagattgagtgcaatcggaggagggaagaggagatattacccagaagcgatatccaatagtagccaactctctcgctctctatgtgtatgtatgtatcttgctatccatatatgtatatccatatcagagagccaggattggttgagaccatacgatataacccgaaaccacactggccaggaatagcaaatccaagcattggcagcaagaggcaaagcaaaggtgcacggcagacataggcagtaccacaagaacactatcacagaattaagcagagcaaattaaagatgcatagcgtgtattaagatgtacgaaataatgttccaaagttaaccagcctacacaatccccaacaacacacacacacacacacataaagacggtcggagtcgaatccttgatcgaaccacataagaaaaaattccaatgagtttgtatgagcaacatacaaagccccaaacgcaaaccatcagccactcaagacgagacgagaacgcaaccaaaactcaaatataactttcctgcactcatctccagttcacgaaacaatcttcgctcttggtggattgcgaattgtaaatgaattgagtaactgcacggatgcaaagccccaagatgtggcgactattccggccggacactgtgagacggacgttacacacacggatatatagagagacgaaccttatgacaacagacagaagacgcttgctctgaatagatggttaatttgtagacttataaggaacgtcgacagcgagggttcgttcgcgtcacttgctttttactacattataaataaattattgatgtactaccaacaaaccaagaacaagaacaccacactatacaaacacctatatattagataatatatatgaatgatgtataaatacccgaacttcgggtaaacttccaacagaaacccgacaagaagatggctgaatatgaaataaacttgaaattttccaaccagcatacccgtgagacccagaggtccgaaattttttttttttagtattgataatctctaaacgtaaatcctagtctcgtagcaatatcatagttaaggtgacttttttttcagaataaacttaaagcacgaaagaaatacatgtatttaaaccttaaatcctaaagtttataataaacgaacacaaattgaattcttgagtctgcgagcgagatggtgcgatgcagcctcagcgaaagagagcgagag

SEQ ID NO: 5615 - DNA, 2037 bp, DROSOPHILA
aagtgcacaaaactcgctgctttccggtgcagtttgtgaagaagtttgctaaaaactcgtggcgccaactgcgacgcaaacacgcaagaaacccagacaaacaggagctatcaaggcttgacacagaaggtcatgtccaacgcggataagatgcaggaccaggagcacgacgacgagcagtcctccgacatagagggatccggcgacaatgtgggccgtgatgacggcaccgacgatgacgacgacagcaacggcaacatgcagcaggagaatggagatggcggcaacggtggcgacggccaggagcactctggcgacgaggagcaacaccacagccaggacaacgagggcaacgataactccgcaggccaacagcagcaaatgcagcaagtggaccgaaccagcgccaccaatctgatcatcaattacttgccacaggacatgaccgaccgcgaactgtacaacctctttagcggctgcgggcccatcaacacctgcaagataatgcgcgacttcaagaccggatatagcttcggctacggcttcgtggactacaaaacggagtcggactcggaggacgccatccagaagctaaatggcttctatgtgcgcaacaagcgattaaaggtgtcgtatgctcgaccgggtgggcagtccattaaggatacgaatttgtacgtcatcaacctgtcgcgaaacatcaacgacgacatgctcgaccgcatcttctcgccctatggcctgattgttcagcgaaacatcctgcgggataagctcactggacgaccgcgcggcgttgcttttgtgcgttacaataagcgcgaggaagctcaagaggcgatcaaggcgctgaacaacacggtgccggagggcggatcccagccaatctgggtacgactcgccgaggaacacggcaaggccaaggcggcccagtttatggcccagatcggaggtggcaatggtggcggaggcggtggtccgccccacatgggcccaggtggaccgatgcacccacctcatcaccacaataatcaccatcacaacaaccaccacaatccgcatatgccgccgcatcatcatcagccgcagcatccacaccagcatccgcagcaccatccgcagctgcaccacatgcagcaccaccatcccaacaaccacaacaacaatcaccccaacaaccaccatcataacaacaacaacaacaaccaccacaacatgggcggcccgcatccgcaccacatgcagcaaatgcacccgatgggcatgaacatgggcatgggcgtaaacatgggaatgggcatgggcatgggcatgcccattcacggaggcggcggtggtggtggtggcggcggcggtggaggcggtggtggtaacttccaccacatggcgcacagaggtgaagtgttcatgctgccattgccgatttgcagccgattccccagccagccgcatcccgtaggcaatggcatttgccacagccccaacaagaacagcagattccgtttaagccgccgcccgcaagcctccagaacaaccatcagatatattgcgcattcggtggcagatcccgttcccactccgactacctagtgccgctctactttccagcccccgcccatccatcagttgtttccatctcctcgccagctgcgtcactttcggcctacccagctgttttggccgtgtatgttccggtatatgtcacggttccggtctctcttcctgttaccatgaacagagccagtccacaagcttaaagtgagtgcagacggaggcggcggaggcggtggccacatggtagaagcgagtagaaatagattgagtgcaatcggaggagggaagaggagatattacccagaagcgatatccaatagtagccaactctctcgctctctatgtgtatgtatgtatcttgctatccatatatgtatatccatatcagagagccaggattggttgagaccatacgatataacccgaaaccacactggccaggaatagcaaatccaagcattggcagcaagaggcaaagcaaag

SEQ ID NO: 5616 - protein, 485 aa, DROSOPHILA
MSNADKMQDQEHDDEQSSDIEGSGDNVGRDDGTDDDDDSNGNMQQENGDGGNGGDGQEHSGDEEQHHSQDNEGNDNSAGQQQQMQQVDRTSATNLIINYLPQDMTDRELYNLFSGCGPINTCKIMRDFKTGYSFGYGFVDYKTESDSEDAIQKLNGFYVRNKRLKVSYARPGGQSIKDTNLYVINLSRNINDDMLDRIFSPYGLIVQRNILRDKLTGRPRGVAFVRYNKREEAQEAIKALNNTVPEGGSQPIWVRLAEEHGKAKAAQFMAQIGGGNGGGGGGPPHMGPGGPMHPPHHHNNHHHNNHHNPHMPPHHHQPQHPHQHPQHHPQLHHMQHHHPNNHNNNHPNNHHHNNNNNNHHNMGGPHPHHMQQMHPMGMNMGMGVNMGMGMGMGMPIHGGGGGGGGGGGGGGGGNFHHMAHRGEVFMLPLPICSRFPSQPHPVGNGICHSPNKNSRFRLSRRPQASRTTIRYIAHSVADPVPTPTT

SEQ ID NO: 5617 - DNA, 2519 bp, DROSOPHILA
tatatacaccacacatgtataaatcgagccctatttgaatattttttaatactagtaagtattttgtacgacgagatcaactcgaaaggcgcctaggaaatggaaatggtatatcaaaaggaaaatcccccagaaacacaaacatttaattgttggttatatgctgaagaacgtaagcgtaaatgaaaattcgtaaatgaaaatattgtaattgtagcgttgatttgtttcaaatgagcaaacatatacatataactaataacgtagataaatatacatacctatatttaatgaaaccaatgagcaaacctaacttgtgtaagtcaaagagtagcggaaccaattgttaaacctaagcataataaatctgtaataaaactgagctgttgtattaaatgaacaataacaatgttgaagacaaagtttggatatcggcaccaatgcgtaggccattcaatttgtgaacttcgaatacgagtacttagtgtttttactagaaaagacttctttccttttcccgcgaatgtttcgttgcgatgttttcttttatacttttgtactaacgcccccctttccatagtccgacctaatttccataatgtttataagctcgattgatgtctatatgtacctctagctaaactcaaagcataattgatcaaattggtaaatgaaagcaattcgaaattaaaacgaatatgtgtactactaacgcgcaaatacaagaattattaatgaaagtttactttaaagaacggattaaaatttttaaaagtatgagctattaaagaacaaacttagttaaatgttatatatgaaaaaccaagaaattgatgtacatgttagcgatattaatgagaaatgtgacaagtgaaaaataaaccagaagaaaatacatatacacaagttgccaagagacagtcgcttctatttgggatcatcaatttgttacgcctaaatgggatacattaaactaagtcggcggggtacgcgacccaccttagtatctgtacttggtagagtagtccttgggcgagactaccagaccacggcccttacgggcacctcgatacaccgtttccacaatgtcgatcatctcctgcttgtcctccagtggccagttgatcttgttgttgttgcccgtgcccaaatcgatcatgatgtgcttgttgcggaagaagaacatcaccgtgcaaggatcgtacaactcgtacatcttgttgaagtccggcacctcggtaatgtccaccaaatagatgacagcaaagttcttcaccttctcggcgatgctgtacatgacctcatccattttcatgcaggcggggtcccaatcgtgaccgaaacgtattacctgaaggggaaacaattctgattatttatgtctgatgggtgattgaccaagtggtgctccacgaagcagtgtcttcttaaaccgactgcgattactcacaactactcggtcctcctcggagagaatggcctggtccacctgccagccattgtgcaaatgagggagcatatacgacatcctggcgcgttttttatttcaagttaccgcagaaaaattaaaacataaacaaagtctcacaaaatagtgatgtactaacaatgatagcataaccttatcgattacatatcgatgacagctgtcagcggaaacggaaccatgtggctatcgaaatttaaaatgtgtttcccaataaaacgcagtgcaagaacgttcggtttataattaagtttttaataggcatttagtaattagtagcgtccttatcagttcaagtatttctgcttaaagctatctatgtgttccagcaccctgaccgtcatctcgttgatatactcgtcccgtccctgctcggtaaatggatcgggagcactgcgtcgcgagacgtagtgattgggtaggttcactttgtggcgaccgatggacttgatgatcagccacaggatgtagaagctgaaccacaccgtaaagtagagcgggatgtaccagagcttgcggccaatgtagaagtagctgtacttcttcacacgtggctctggtggcggcggaggaggtggtggtggttccgtcggcggtggcggtggcggtggtggtggtgccggtggaggaggaggcggtgggtggtggacatggtgatggtggtgtggatgatcatcgtaaatgacatccggataggaatcatccggatacgagggctggtagtcgaagtgagtcggatagtgatcgtggtggtgatcatgcacgtgatcatgatcgggtgcatggtcgtgatcgtgatcatccggcttgggagccgcagattctgggtgagattgcagccaaccgggcggtggtgtggcatactccatattgggatcatatttgtgatcgtcgtcgggacctgaaccatcattgtgcagagatggcagaccgccgatgtccccatctccgccgccaccgccacccccatctccaccatcagcaggagatcccatatccatgccatctgcaggagcaggaccgctcatactgt

SEQ ID NO: 5618 - DNA, 420 bp, DROSOPHILA
atgctccctcatttgcacaatggctggcaggtggaccaggccattctctccgaggaggaccgagtagttgtaatacgtttcggtcacgattgggaccccgcctgcatgaaaatggatgaggtcatgtacagcatcgccgagaaggtgaagaactttgctgtcatctatttggtggacattaccgaggtgccggacttcaacaagatgtacgagttgtacgatccttgcacggtgatgttcttcttccgcaacaagcacatcatgatcgatttgggcacgggcaacaacaacaagatcaactggccactggaggacaagcaggagatgatcgacattgtggaaacggtgtatcgaggtgcccgtaagggccgtggtctggtagtctcgcccaaggactactctaccaagtacagatactaa

SEQ ID NO: 5619 - protein, 139 aa, DROSOPHILA
MLPHLHNGWQVDQAILSEEDRVVVIRFGHDWDPACMKMDEVMYSIAEKVKNFAVIYLVDITEVPDFNKMYELYDPCTVMFFFRNKHIMIDLGTGNNNKINWPLEDKQEMIDIVETVYRGARKGRGLVVSPKDYSTKYRY

SEQ ID NO: 5620 - DNA, 4103 bp, DROSOPHILA
ggtgttcccgtgcgtctgtctctcaaaaagtagctcctagtcttgtaattaaaccatgtaaaccgtataataaacgtgcaatttgtaatgaaaatatggacaaacatatcaattggatgcacttctccctcacacagttacacgcacacacacaaacacaggcacacgggcgtacgcacctttgtaaatgtaaatagtttctcgttctccgctttacataagtcgccctatttactcgaaattggggggattctgagtaaactttggctcagcgaatatttattcgcatatgatctgaatctccatatggccgggaaatgcactttttccagctatgacaacacaatatggccgaaaaaatactctttcactttttccaggccaagttgtgtgaactgcgccacacacacgcacatacacacacacacgagagcgcacgcactggggacacgcacactgtcgcactcgcggcgatgacgttttcggccgcaatgcacctaattaacggatatttttgcatctaattcgattgcactcgttcggcggcgacccttggctattagtttgcaaatttccaagtaaatacgacgaatttggcgaatcagcgaatcactcgcttcccatgctgcggcacacactcacacgctaccacccacacgaacgcatacatatgtttgtcgccggcggtccggcaacgctgcggcaatgcaactctgcctggccacttggctaattttggctatttaccagccaactactttatagctagctgcttatatattttctttttgattgttccagtttaataataataatataatacaattatatttagaaatttaaatttttcataaattgttttaaatatgcttacgatttttattcttatttatttcttaaaatattaggtgactggattttagcaataaaaacaagctatataatagcacagcctgcatatgaaagcatctctgctcgtgttttttgccttgactgggtggcaactcccttgtttttctcggctgacgaaaaatttgaccgaaataaatcaattaaattgaaagtgtagtgaaaagcaaattcacagtgaaaaaggtgcaaggtgggaggctaaaaaaagccgtgtttaacaaggcttttcgagcccagaacccagcaggcgtacgtgtgtgttggtgcgtaagcccatagacgtcacacgctcacgcacacaaataaagagagcggagcctcactatttactttgatcaccacgtagttaactagctaaaactagtgattacgcactaaggcgccatggacggaaacaaggacgaggcccagcggtgcatcgacttcgcggtccaagcgctcgccgcgggcaaaatcgaaaaggccgagaagttccttctcaaggcggagaggctctttcctacggataatgccaaaagtaaggataacaaaggaagtagatccactggatcaactacgttcacattcccatatcaattgatgcgatttagtttggcaagcatgcttccctttgccttttaaaagcggttatctttgaggcttgttatcagtagaaacaaccaagttatgtttgtgttatgtcgcacctttcgtgggtaagccaggtagagtggtacgatctttatcgaattagcttttaacatacagccttgacgatattctaaagatgaaaagcagtaaagtaatagtcattacacaatacaagagatgcgttgcattcattattttcacaagagcattattgcagcacctttgttttaaagtccttgtaaaacttaacaacagatcaacaacatcatgccacagcattaaatgaatattgacctttgacctgctgacgtgtttcttttccatcttgtagagctacttgcccagttgaagagcactccgagcaacgaaagcaatggcaaatcccgtacagcgggtgccagcgatgagaaggacagcgggccgaggaaacgtgtgaactcggattcccgttccagtgccccagattacaccaaagatcagttggaagctgtgcgaaaggtcaaaacgtaggtaccactctatatagccagcctttcacattactaattgcatttgtgcatttggtattagatgtaaggactactacgaagtactgggcgttagcaagacggccactgattcggagatcaaaaaggcctacaagaagctagctctgcaattgcatcccgacaagaataaggctcctggtgcggtggaggctttcaaggctctcggcaatgctgctggcgtacttacggatgccgaaaagcgcaagaactacgatctgtatggcatcaatgagtcgcacaatggtcacggcaacaatggtggcggacaccatggacacgggcaatactacaacaacgagtatggatattcgcgtggattccaggctgacatcagtgccgaggagctgttcaacatgttcttcaacggcggattcccacagcagaatgtccatatgcggcagcagcgacgtcgtcagcaggctcgcgaggatcgagaagtaagtgtaccgagtcgaaatcatttgtgcacattataaacgactgccttttatctccatatcaagggtaacaactcttcggccttggtaaacttgctgcccatcgtgctgctcattggactctccatgatgtcgtccttcttcatctcggacccaatgtacagcttgacgccctctcagtaagcaaaccaaattaaaaattagcttagcactaatgtggattcatttctctaatccgcagtaaatattcggtgaagcgtgagacgaactccctgaaggtaccatactacgtaaaggacaacttctattcagaatatcagggatcagtggcccgattagaggaatccgtggaagaggactttgtgaatcatctaaaacactcctgcagtcgagagaggaattatcgtaagttaggcagaggaactatactaaactgatattaacataaacgatttacaggcgactcaatgctggccaaggcgcgtacctttggcgatcgggatctgtacagaaaggcgcagaacatcaatacgccatcgtgcgagaatctgcaaaagtatttaatcacataaattagttaatgctatcacacgaaaagctactcctcaaatccaccactatttgaaaccttaactgctgggttgtgtagttattgcatattttgctttagttgttataaatgaatttcattgtctattttgtttcataatttatatgtctatttaaataccttccctctctcccccaaaaaaaaaaatgaaacggaatgaaacgtatagagctgctatgaggcatcaggttttccccaataacgtttggtagcattttcatttcgtatagaaagcaatcgggcaatatgtgaaagcgaagcaaacgcaactgccaaaaagtcatatttacacgatttacgaatataagtgggcggctgagacgaaggactttgcgtttgtttcatttagcaatcggatacataaattataaacataaattatacacggatacgacgcatcatcacatttttcttaaggacacggaacgcatgggcagtggcgatattctgaataaaattgcaagttattataactccaaaataaattcgtttagacgatgtaagcactctcactcatttgtgggcttaaaagtctttttgttttgtattgttttcttcgctagagtttataaatgtacaaataaagcagtgtgttgttacgctacataaaagaaacagacggcggattgcttcggattccacgagcacctcaattgctgatgatggcttccaaggcggccaccacatcgccgctctgctcgcggagcactttctcggcatgcgccttgctaaccagcagctcgttcatctgaaagggcagaggggaaggaaaccattacaaaaggaagatcggaagaaagttatctatgggaaaccaaaggaggaaatctaagggaactggagctaatgcaatgaactatatttgtatctctacaatgaaagggaatacttccttgtagtttcgcatacgtacaatcagttcaatgtcctccttcttgacttggaccttctggagctccttctctt

SEQ ID NO: 5621 - DNA, 1413 bp, DROSOPHILA
gcaactcccttgtttttctcggctgacgaaaaatttgaccgaaataaatcaattaaattgaaagtgtagtgaaaagcaaattcacagtgaaaaaggtgcaaggtgggaggctaaaaaaagccgtgtttaacaaggcttttcgagcccagaacccagcaggcgtacgtgtgtgttggtgcgtaagcccatagacgtcacacgctcacgcacacaaataaagagagcggagcctcactatttactttgatcaccacgtagttaactagctaaaactagtgattacgcactaaggcgccatggacggaaacaaggacgaggcccagcggtgcatcgacttcgcggtccaagcgctcgccgcgggcaaaatcgaaaaggccgagaagttccttctcaaggcggagaggctctttcctacggataatgccaaaaagctacttgcccagttgaagagcactccgagcaacgaaagcaatggcaaatcccgtacagcgggtgccagcgatgagaaggacagcgggccgaggaaacgtgtgaactcggattcccgttccagtgccccagattacaccaaagatcagttggaagctgtgcgaaaggtcaaaacatgtaaggactactacgaagtactgggcgttagcaagacggccactgattcggagatcaaaaaggcctacaagaagctagctctgcaattgcatcccgacaagaataaggctcctggtgcggtggaggctttcaaggctctcggcaatgctgctggcgtacttacggatgccgaaaagcgcaagaactacgatctgtatggcatcaatgagtcgcacaatggtcacggcaacaatggtggcggacaccatggacacgggcaatactacaacaacgagtatggatattcgcgtggattccaggctgacatcagtgccgaggagctgttcaacatgttcttcaacggcggattcccacagcagaatgtccatatgcggcagcagcgacgtcgtcagcaggctcgcgaggatcgagaaggtaacaactcttcggccttggtaaacttgctgcccatcgtgctgctcattggactctccatgatgtcgtccttcttcatctcggacccaatgtacagcttgacgccctctcataaatattcggtgaagcgtgagacgaactccctgaaggtaccatactacgtaaaggacaacttctattcagaatatcagggatcagtggcccgattagaggaatccgtggaagaggactttgtgaatcatctaaaacactcctgcagtcgagagaggaattatcgcgactcaatgctggccaaggcgcgtacctttggcgatcgggatctgtacagaaaggcgcagaacatcaatacgccatcgtgcgagaatctgcaaaagtatttaatcacataaatta

SEQ ID NO: 5622 - protein, 370 aa, DROSOPHILA
MDGNKDEAQRCIDFAVQALAAGKIEKAEKFLLKAERLFPTDNAKKLLAQLKSTPSNESNGKSRTAGASDEKDSGPRKRVNSDSRSSAPDYTKDQLEAVRKVKTCKDYYEVLGVSKTATDSEIKKAYKKLALQLHPDKNKAPGAVEAFKALGNAAGVLTDAEKRKNYDLYGINESHNGHGNNGGGHHGHGQYYNNEYGYSRGFQADISAEELFNMFFNGGFPQQNVHMRQQRRRQQAREDREGNNSSALVNLLPIVLLIGLSMMSSFFISDPMYSLTPSHKYSVKRETNSLKVPYYVKDNFYSEYQGSVARLEESVEEDFVNHLKHSCSRERNYRDSMLAKARTFGDRDLYRKAQNINTPSCENLQKYLIT

SEQ ID NO: 5623 - DNA, 5987 bp, DROSOPHILA
cacacacagcaactagtaattctgctgtgcgaaagagacaacatgagagcgcttacgaaaaaaatgtttgtgtaagtttccccgaaaacgcgatttcatccggaaaatgcactgcgctcgcatttcgcctccgccgcgttggccatttaatcactttatatggttccgtttcgattgcattgtttttagtaggggtttttaaccgaaatttagttgcgtgttttgtgttggtgcagagagagcaggaaaatacacatatcgttatcgatgggtcggctatcgatacggcaactatcgcccagctgattggcgggcgatcagctgtgcgacgataggtccagttctggaaaatgtcggtaccgcatatttgctaaaaatttcgattttctcttacttaatgaatgatttttggaaccggtttgtctaacgatctgagttttatctagcaatgtgtttatccgagcgtttttgaaaattcataagcagttttcagtgttggttttcaacactggtttcttatctcaatgtctaatccagaaaacccaattttggaatgggcaagtatcttaatgggaaatatgatatacctatataatctaatctacacttagcttgaatgaatatctattgaatccaattatcttatttgtcggtacaaaataatgataagaatctacgaatgaatctatgataaatccttattgatttaaatagcggattaaggcacaacgaatcctctaatatatgtcaattatagtactatgcactggatttctgcacctgttatcagaattccgttaagaagtatacttatcaaaatcgaataatttcacaattttaaatatttctatgttatccacatcaatttttggcatccctgccgcccccgcagtgtggccgtatgcgctgatagtgggcgccgcagcgaacagctgatagggctgcagcatataaatgagcaggtggtaaataaatgtttttagttgattccaagacgccattccgtgcgcgttggcttcctgatcagagtttatcattcggcgggcgcggccatcattagattagatcgacattagtgcgttccgctcggcgatcggcagcaatcgatccgaaataaacaaacgctcgcgtatttacataatttaagtgaaaagtaacgacgacagaatgacgaacaccgatgtgcgaaagagaaaagtaaggaaaaggtcaaaagggcaatccacagcacaaatttaatgccaatttcatggcgctctctcacacacacacgcacacatgcgaattcctcaaattgctgctcttttgacgcggaagtaaaacatcaaatgactcgcagaataatcgtttcaagttctattctattcgattgtgccaatttgtatctgaaaatgtatgtttacaagacatttaaatatagatacgcaatggccgctaagcacgcttttgttaacaattatgcaaattttgattttagttacgaaagagatgactagtgggttttctatcaacatcttaatgccggccggtttattttgaaatattttcgtattcgcattagggtgaccagtcagcaggaactttctcatttgcaaggtcattagggggggctgataaaaaaaaagcatagaaaagtccaacgattcagttggcagccgtttcgaccgaatctcgctagacaacttttgcaatcgctttctcgcatcggaacccaaagatcacaggtacacatagagtgtcccatttcgggggcgattggatcgcatagtttcgactgatttgcatcgcaagtgggtggagaacaggatgcgggcaaaccggaaccggttgcaagtgagtgcagatagtgcctggctgctaacgtggccttaaccctcgtgtacctacgtgtactcggtactacaatatatactagatacttttgtatctaactcgatatttgttgttttcacaacatctgtgtctaaacttatcagcattttctagatagcacacttctaccagctttcaatgtttgtatctttcaactcattttgtgcgtcatatttatatatttcaagatacatttatcaattagggttctttaagacttaagatttacttttcagctgatgcaaaatagtgttcggcttcgaaataaatgagttatctatagaaccgattaaagtattcccctttataaatggggagcaggcttcttagtcactagatcggcacaaaaggcgccttttatcagtagatttattgattgcagtagcgtgcgcctggaaacatatgcgttaagttcacaccctgaatgtttaatgagtttcacttatgccaacagtgtaattattgggaagtagtatgtgtattcgaaactaatgggtgtacttgattgtatagatatagatatatataccatctacctgtcaactccattactgcttaattatatatactcgctatttgtgctttgtttgactacttttcattggctttaactattttttttttgcgtcagtcgcttaccaacagcgtaacatttgtttaaacaatgggaatttcatcaggtttgtttgggaactttaatatttgatcaagctaaaagatcgcttcgtggcctgccccacttatgattgttgccagtggtgcccagacgcgccaatcgcccccgaaaactgattgcgtcttatcactgtcatatcgcccagaaagctacgcgataagattctagtcgaatggccactggcttcgctgacttcctcagcgaaaatgtgtaatttggcatgactttatattttaagaaaattaataatagccatagctaaagccatagaaacgcattttttactatttttagtgtttatcgtttgttcttataagaactaatataaactagcgaaaagttaggtagaacaataatatatactaatcgtggaaatatccaagtaatgcgctttaaaaggttattttgtttgaagtaacggttttctgtttaccaactgccctaaattaccgttgccaaaagtgtggcccaaccctggttaacgttatcgatgagccacggactctgcagccctggcacatgttaacgataaagcccgtaaaatagaccgaaaacaagagaagaaatgaaattcattgacattcgcagagatagcaaacagccagcgtgttaatatttgagcagcaaacaactgaaatgtgttccgaccaagaaaccggccatgcataaatgtggagccagcagaggcaacggaacgaaccatgaaatacgaatataagctggtagacccgatgaacttggccaagaaaaacaccatcaaataactgagtagtcggtcacaaaactaatttgtctttcgccttttcagctggccacggatgagaagccaccgcggcggaaaagtagcggatcaccaaatgccagcagtggtggaaaccgcgggcccagcggcctcaagatctccttcctgtgcctgatcatctccgtcatcctcctgctctttgtctttggtgtgtaccatttgtattatgtaaaagacgaagtgcccaaagttgtactaacgaaaacctctgattttcccactgttaccgtgccctacgcccacgtggaaccccattttgcgccacccgttcgccgtgttatcactaaaaaacccatcgccaataaaccaacgactgacaacgatgcaggcttcgtctccgagaacgccagtccgtatctggcccgtttggcctccaagtttggctacagcaaggtgcagtatgcggccatcatcgatgccggatcgacgggcagccgtgtgctggcctacaagttcaatcgcagcttcatcgacaacaaactggtgctgtacgaggagctgttcaaggagcgcaagccgggtctgagctccttcgcggataatcccgccgagggtgcccactccatcaaactgctgctggacgaggcccgcgccttcatacccaaggagcactggtcttccacaccgctggttctgaaagcgaccgccggcctgagactcctgcccgccagcaaggcggaaaacattctaaatgccgtccgagatctcttcgccaagtccgagtttagtgtggatatggatgccgtggagatcatggacggcacggacgagggcatcttcagctggtttaccgtgaacttcctgctgggccgcctgtccaagacgaaccaggcagctgccttggacttgggcggcggtagcacgcaggtaaccttctcgccaacggatccggaccaggtgcccgtgtacgataagtacatgcacgaggtggtcacgtccagcaagaagatcaacgtcttcacgcacagctatctgggactgggtctaatggctgcacgccatgctgtcttcacgcacggctacaagaaggaggatacggtgctggagagcgtctgcgtgaatcccataatcgccaatcgcacgtggacatacggcaatgtgcagtacaaggtcagcggcaaggagaatggcaagtccagtgccgagcagcccattgtggacttcgatgcctgcctggagctggtcaagagcaaggtaatgccgctggtcaagcccaagccgttcacactcaagcagcacgcggtggccgcgttcagctactactttgagcgggccatcgagtcgggtctggtggatccactggctggcggcgagaccacggtggaagcttatcgcaagaaggcccaggagatctgtgccattcccaacgatgagcagcccttcatgtgcttcgaccttaccttcatctcgacgctgctgcgcgaaggatttggcctcaacgatggcaagaagattaaggtgagtcctggcgcacttaacacaaattgaactctctagtaactcgttttaaattgtgcagctttacaagaagatagatggccacgaaatctcctgggccctcggctgtgcatacaacgttctgactagcgacgagaaattcagtaattcctaatgctcctccattagtccgtagttgaagacataaattttaaacggattgttagctgaaattgtttatagagtgccttagacgtgcatcgagtatactacaatcacaacacaccgcacacaccgcacacaccacacacacacagaacacacactcggacattgtccacagcatatgtatgatgtggtcgattaatatttgtttgtgctctgcaagattcgtttcaattgcctctaattgagctaacccatacacggtgactacacttagcgtttagtttgtaattccaattttgtgtgattcgccatatttgtaatgcagttttttgccaacttcttaactaattagtccctacactcgtatcgtatcctcatgtacataaatttacacaatgatatgtatttacctaatatgtataacgacctagactactagccgcaaacatttcacacggtttttcacacatgcaaatgttagtttagttatctttgcaaataaatcaaatgttaactgatctgaattaaagtaaaatatttgtttattgctgattttcgttcgctatacaaaatattctatatttaataataatagaggggtaaatgcataacgaagaaaatgagtaaagaaagggtgttcctgctatggaattttggtctttttacaaataaaactaagaaacgctagcgtgggaatacgtcagaggtctgctgcactacacattggctacgcactggctgcatgtggaatcgatgaatcccctcatggcctcggcaatagttgcggcttgatgcccagccggtcgatgatgtactgcggcatgcagagcgttgggttgatggccttcaggccggaatgtcccagtagcgagagtccgccgatgccgaacagcgtgtggaatatgtccggcatgttgccagttctgtccgagaagccaccggtctccgtgtcctggcacgacagtatgaactgctgcagcttctccgagctgatccagtgcaggcggcccatgatggtgagcgaggcgagca

SEQ ID NO: 5624 - DNA, 1587 bp, DROSOPHILA
ttccgtgcgcgttggcttcctgatcagagtttatcattcggcgggcgcggccatcattagattagatcgacattagtgcgttccgctcggcgatcggcagcaatcgatccgaaataaacaaacgctcgcgtatttacataatttaagtgaaaagtaacgacgacagaatgacgaacaccgatgtgcgaaagagaaaactggccacggatgagaagccaccgcggcggaaaagtagcggatcaccaaatgccagcagtggtggaaaccgcgggcccagcggcctcaagatctccttcctgtgcctgatcatctccgtcatcctcctgctctttgtctttggcttcgtctccgagaacgccagtccgtatctggcccgtttggcctccaagtttggctacagcaaggtgcagtatgcggccatcatcgatgccggatcgacgggcagccgtgtgctggcctacaagttcaatcgcagcttcatcgacaacaaactggtgctgtacgaggagctgttcaaggagcgcaagccgggtctgagctccttcgcggataatcccgccgagggtgcccactccatcaaactgctgctggacgaggcccgcgccttcatacccaaggagcactggtcttccacaccgctggttctgaaagcgaccgccggcctgagactcctgcccgccagcaaggcggaaaacattctaaatgccgtccgagatctcttcgccaagtccgagtttagtgtggatatggatgccgtggagatcatggacggcacggacgagggcatcttcagctggtttaccgtgaacttcctgctgggccgcctgtccaagacgaaccaggcagctgccttggacttgggcggcggtagcacgcaggtaaccttctcgccaacggatccggaccaggtgcccgtgtacgataagtacatgcacgaggtggtcacgtccagcaagaagatcaacgtcttcacgcacagctatctgggactgggtctaatggctgcacgccatgctgtcttcacgcacggctacaagaaggaggatacggtgctggagagcgtctgcgtgaatcccataatcgccaatcgcacgtggacatacggcaatgtgcagtacaaggtcagcggcaaggagaatggcaagtccagtgccgagcagcccattgtggacttcgatgcctgcctggagctggtcaagagcaaggtaatgccgctggtcaagcccaagccgttcacactcaagcagcacgcggtggccgcgttcagctactactttgagcgggccatcgagtcgggtctggtggatccactggctggcggcgagaccacggtggaagcttatcgcaagaaggcccaggagatctgtgccattcccaacgatgagcagcccttcatgtgcttcgaccttaccttcatctcgacgctgctgcgcgaaggatttggcctcaacgatggcaagaagattaagctttacaagaagatagatggccacgaaatctcctgggccctcggctgtgcatacaacgttctgactagcgacgagaaattcagtaattcctaatgctcctccattagtccgtagttga

SEQ ID NO: 5625 - protein, 464 aa, DROSOPHILA
MTNTDVRKRKLATDEKPPRRKSSGSPNASSGGNRGPSGLKISFLCLIISVILLLFVFGFVSENASPYLARLASKFGYSKVQYAAIIDAGSTGSRVLAYKFNRSFIDNKLVLYEELFKERKPGLSSFADNPAEGAHSIKLLLDEARAFIPKEHWSSTPLVLKATAGLRLLPASKAENILNAVRDLFAKSEFSVDMDAVEIMDGTDEGIFSWFTVNFLLGRLSKTNQAAALDLGGGSTQVTFSPTDPDQVPVYDKYMHEVVTSSKKINVFTHSYLGLGLMAARHAVFTHGYKKEDTVLESVCVNPIIANRTWTYGNVQYKVSGKENGKSSAEQPIVDFDACLELVKSKVMPLVKPKPFTLKQHAVAAFSYYFERAIESGLVDPLAGGETTVEAYRKKAQEICAIPNDEQPFMCFDLTFISTLLREGFGLNDGKKIKLYKKIDGHEISWALGCAYNVLTSDEKFSNS

SEQ ID NO: 5626 - DNA, 3895 bp, DROSOPHILA
tatgcagttcactgtttaattgcacagctccgtttgtgggtgcggtgcggtcatagtttccaagtttatactcgtgccgaggactgacgctgctgccttgcatctcttccagttgagtaataagattattagttccactccggggcacaaacacaaacgcattataaatctagccccagcacacgcatatgcacacgcacacagacgcacgcccgccacccacccggccacttccccttgttagaggacgtccttgctgcaggacctctaaattaatgccaatccacaagtcttgcacaacttagccttctgtctagcagctactctaaaactagttcaataccttatccaaaaatgtgtcaattatactgatacaactttttttaatggttaatatttcacaaaatccatttggctacgaaatgaaagtgactccttaagtattatttattccgcttgatatggaatctatacattggtatgacaataatggcaactttaaataacgaatggaaaactcaaaatataccaatgaaatggtagtgcaatttaaaatattttggcaaatcaaagctaagctgcttaactttgcagctatttccattgacttagtgtagccaggctgccgatgactcatttaaatgtcaattacacgaacttaaatccaggccaggatgttgccgagactttcagttgataaattcaattaaataaatctgtgaaatacaggaggactactaagccaggagcttagacggtgggttcgggtgttcaacttacgcaacacgcaaatatttgcttaaattaactggcattcaatgagggatgtggcttatgttcgcctaagggcttccctggggcggcttaatgtttagctgtagaagatttgaataattatcctcatacagccgctgcagttgcttcatacgttcgtgcaactcctcctcctttggattatcgttcaaatgtaattgggttagaaggccgatatttctgtttcttaaaaccacacagtcggccaagtcttgtatttggtcattaaaggcttcgatgcattgcttgttagccttacaacagcgttttaattttatcttggcgaggcttacgagctcggagaactcctggagacgcaggcgttgcagttggagttcatggagggtctctttttgaaaatccaggagtctgacgaagtcctgattcccatcgcgctccgtaactttatccatgtccttggatacgggggattccggcatcagagattcttggtaattgtttaatctttctttctctatttttatgttttcaaacttctgttgcaggctcattacatcataggatgtaccagatgccgatgcaagttgttcaattctctgcttttcagaaacaacggggagcgcacacatgccttctccttttcgatgttcgaggacatccagcaagaaattgagtaattccagcacatgggcgatggcttgtgtgctgttcggcgtttgaagccagcttttgttcacctttttggtgtactgcagctgctgcagtgcctccaccatctgctgcacatagcaatccctgctaagatgcgaaaatgttatcccattaaagggtaggaggcgcactagttgtttcacaaaacccgagataagctgacgtaactggtagtcagtctttttccgccattccttgccaatcttttccagctcccgccgcagccagtcagtccccagctcagttttgaagtccaactttcgctttgaggtggtcagcttgattcctttgtcggattcgtgaagccttttcggatccttggggtacgaaaatcccatctgtggcactagaagcctgctcgatgtaaagctactccttggtggctttgtttttaggcggtcaatagaagttgatgccaagcgattggttatagactcctggcgctcccgttcgaggatcaattttggacggataggctgtggctccgaggatggtatgcatgtatggctgttaaatagcagaaaacatgagatgatatcgactaggttgtttttagcagggaaagctgcgtcaaaagccatttttgttttttagtagcattttaatattgactgggatatggaattgattggctattcaatagacagcattttaaaacttaaataatggaagcggtattttaatgcacaattcctttagaaatatccttaacacacctctttgaaagttcttggttttcctttggattcctctgggacggaattttcgtggcaggagttccttgatgcttggacctaagatcctccagaagttccttagcacgtcttggacgaggttccgaagcgggtatagttttgttggtacggctactgagaatagcaatgaagttgattagaacttgggtcattggaatttcactttaccggaactctggtgttttgggtccttcccaggtccgctgcctgttctgggaagctaacaatgagtgttttggtggtactttggaagcagaggaagatcgatatagtgatcgctccaggcgctgtagcaattgtttcgggcgctccaagccgtagtcggcatcggtaacgaatatggaaggtatccgcatctctgggtgtttggggctctggcagttgcgtggggttagatatccttttgcgggggtgcacctactggacctttgtctctccagcaattcctttgtacgcaagggggagcagcaccctggagttctaagcaaggatgtcgaaattagtatgtgagaaaacatggacttgttgccaaacccaccgcatatctggcgatttagccatactactcatttttcaagcaattaatgtaagtgtttttaattttcctcaggatatttacactttttaaatttgagcaataacaacaagccagtgacaacaaatgctcagatgtaagtgacatgacagcatctggcaacgctgccacagaagaggatacaagtggcagcactcggcgatcagctgtggcagcagggaaaggatcgattaaattataaaaccaaacggttttttaaaaccaaaagtgaaatcgattcgtgctcattcaccaggcggctgaaaataagtggcactcgccagcaattactagcagcgcccaccgctacctttattaactttaaaactgcatccattggcaaggcgacccgggcggtgagaacataaatcatggatgaaagtgaaaattggttgcacctaccacgagcacgggttcccaggttcccaggtgggcgtcgaaaggtgccgcgtccgccgacccacgaccccgcccatttgcggcgtaattacgaaacaatacacgcgtcggaagagaaaccagcaggaggccagccaggaatgaagaggcagaggagccgccaggcgtccggaacatggagctcggagccatgagtcagagggccgcagtagcatagccccaatccccagagcttcgcgaaggtgttatctgcggggcccccaagtaagcactttaaaaaatgtatggtcacatatgtatacccccaaaaggatggaaccccaaatttaaccagaaaatagtttaagcaccattttgataggatctaccagcaaaatcctctcagtgcatcgccacctgtacgctgtgtagttttcctgttttgactgctgtgtttttgcaatttaaccgcaataaataatggagcagcttgttaaatttgagcgcccgcccaccaggaggcgctgcaaaaatgtaggttagacagcccaggataacgatagtgatgttggtggttatgatggcaatgatgacggggatgatgatggcgatgttatcagtggccatttcactggctgaccgaaacgagactcgtttggtgtggaaatgcgatttttacatatgtgatatagattttaattgc

SEQ ID NO: 5627 - DNA, 1510 bp, DROSOPHILA
tcactggcttgttgttattgctcaaatttaaaaagtgtaaatatcctgaggaaaattaaaaacacttacattaattgcttgaaaaatgagtagtatggctaaatcgccagatatgcgaactccagggtgctgctcccccttgcgtacaaaggaattgctggagagacaaaggtccagtaggtgcacccccgcaaaaggatatctaaccccacgcaactgccagagccccaaacacccagagatgcggataccttccatattcgttaccgatgccgactacggcttggagcgcccgaaacaattgctacagcgcctggagcgatcactatatcgatcttcctctgcttccaaagtaccaccaaaacactcattgttagcttcccagaacaggcagcggacctgggaaggacccaaaacaccagagttccgccgtaccaacaaaactatacccgcttcggaacctcgtccaagacgtgctaaggaacttctggaggatcttaggtccaagcatcaaggaactcctgccacgaaaattccgtcccagaggaatccaaaggaaaaccaagaactttcaaagagccatacatgcataccatcctcggagccacagcctatccgtccaaaattgatcctcgaacgggagcgccaggagtctataaccaatcgcttggcatcaacttctattgaccgcctaaaaacaaagccaccaaggagtagctttacatcgagcaggcttctagtgccacagatgggattttcgtaccccaaggatccgaaaaggcttcacgaatccgacaaaggaatcaagctgaccacctcaaagcgaaagttggacttcaaaactgagctggggactgactggctgcggcgggagctggaaaagattggcaaggaatggcggaaaaagactgactaccagttacgtcagcttatctcgggttttgtgaaacaactagtgcgcctcctaccctttaatgggataacattttcgcatcttagcagggattgctatgtgcagcagatggtggaggcactgcagcagctgcagtacaccaaaaaggtgaacaaaagctggcttcaaacgccgaacagcacacaagccatcgcccatgtgctggaattactcaatttcttgctggatgtcctcgaacatcgaaaaggagaaggcatgtgtgcgctccccgttgtttctgaaaagcagagaattgaacaacttgcatcggcatctggtacatcctatgatgtaatgagcctgcaacagaagtttgaaaacataaaaatagagaaagaaagattaaacaattaccaagaatctctgatgccggaatcccccgtatccaaggacatggataaagttacggagcgcgatgggaatcaggacttcgtcagactcctggattttcaaaaagagaccctccatgaactccaactgcaacgcctgcgtctccaggagttctccgagctccctttaatgaccaaatacaagacttggccgactgtgtggttttaa

SEQ ID NO: 5628 - protein, 474 aa, DROSOPHILA
MSSMAKSPDMRTPGCCSPLRTKELLERQRSSRCTPAKGYLTPRNCQSPKHPEMRIPSIFVTDADYGLERPKQLLQRLERSLYRSSSASKVPPKHSLLASQNRQRTWEGPKTPEFRRTNKTIPASEPRPRRAKELLEDLRSKHQGTPATKIPSQRNPKENQELSKSHTCIPSSEPQPIRPKLILERERQESITNRLASTSIDRLKTKPPRSSFTSSRLLVPQMGFSYPKDPKRLHESDKGIKLTTSKRKLDFKTELGTDWLRRELEKIGKEWRKKTDYQLRQLISGFVKQLVRLLPFNGITFSHLSRDCYVQQMVEALQQLQYTKKVNKSWLQTPNSTQAIAHVLELLNFLLDVLEHRKGEGMCALPVVSEKQRIEQLASASGTSYDVMSLQQKFENIKIEKERLNNYQESLMPESPVSKDMDKVTERDGNQDFVRLLDFQKETLHELQLQRLRLQEFSELPLMTKYKTWPTVWF

SEQ ID NO: 5629 - DNA, 18506 bp, DROSOPHILA
gctgaccggcgcctgtaactgtaattactttggagccaaacaaaaaggcgaaaaaaaaagcaacgaaatcatgaaacacaaaaagtttccgcctgctgttgttatgcaaatttttttcccatttttccctttgtttcgcaaaaagttcgttactctggccacggactagtgccaaaagccggttgcagctattaacggttaatctggtgccatgctgatactttggctcgaggtgcggatagcatcctgcccagctattcccaccgcagtctcaaaaccctattgcgttgctccctccatcgccactgggtactgactgaccacttactgcaactttgtatctgtatcctgctcagattaagcgcctcttaaagtggaccaccccctgcctgacaacaaaccgatctccgccgccgatgtccaactttcaagtgcccaccatctatatttgaactaaaagttcttcctgaggagtattctactgcagacagatagatggcacaaaaagaacaccaccaagatctgctttcccagggcgcggcatccgcaccgtaggtacaaattagtaattccttcgattatgtcctgggcatgggacagcagcgagcagcagaggtggagacagaggtggacctgagttcgcaatattgcgtatacgcacggtatgcctagtcactacgttaaatctaagccgtaggagggctcacaaagtcaggttgggtggcggggacaataatttatgtggagagcaaggggatacacacgccacgaggccaacagctggtcgaagccatacaagccaaccgactgccatccaccgatgctcttgtcttgtattttttacgcgtacgtggccacgtttgaccgctgctgcggatggtggtggtgctcccaaccatccacttatccgctcacgtccaccctgcagttggcttgtcaacgactatttggtgcggaaagtgcgtaaattatttacgcatatatgtgtatatgcgtttatatgtcggacgaaggcggccaaaaacctcatcacagccctcatctgcgccgtcatcatcatcgtcattaccgtggtgcgctaagggtggtggccaaggtcgccggcaaggtcgctccgacgtgcacggagggcttaattaaagcattaaaattaaagattcattaaataatttctagccgtggcaactgcgccacgggggacgctgctctggaagcagtcgagacaataaagcttgacaattcaaacccacttgatgcgccgtgcgtgctcgagtccatgtccgtgcctgccagcccgggcatcgctttcatctctgacagcacctctgaccgttcggctatccgttcattgggggcatgggggtagtgcagcatgctccacccaaaagactgcgggcggagttagtgccctgccagaaggagatcagctcagaaaaagggttgaagcaatgtcatagctccattcccgcaacagaatgtggggttgaggcaaatatgagaagatattcaaatcaaaatcgacgaaaatgacggaacaacttttttcacgaccctcttttcaggcgaacggctcatccagtatgccagcgagaatctggtcacggaggtgctcatccacccgcagtacaatacgctgatccagtgcatgcgaaacctgcttagcagtttcacccgccaccggcacatcatccacgccggttacaccttcagtggaaatggttcctggatattgcaggtcgatattgcttgtgcccccttttctgacaagtggtgctcatacccatctatttgcaggacggaaccttctcggtggcggacttctctgaggccttccaagagcacgacgtacaaagggtgattcgggcctatgccgacaccatcaccatgaacattcactgcgcggacgcgggtctatggcacacattgcccgagaaggcctttgcccgccagtgccggatacggataaatcccgtggacgtcctggacacgagcagcgagtgcatcaacggattcattggtaagactgtgcacactatttccgatgcagcatttatcaaggtcgttcttctgcagattacctcgcgcccatggtgatgccaacctcgctgagggagctgcttgagacctcggacgtggtgggcaacattcgctttacccatccaacgttatatgtcttccccggcggccagggtgatgcggcgcttttcgggatcaacggctttaacatgcttggtgggtatagcacatgtattgaggaaatgcaacctaatcccctcctgtctcttttccacgcagttgacggcggcttcaaccgcaaggcatgcttctgggacttcgcccggcacctagaccgactggacgcggtgctgatgacccgcctaaacaacagcaacgtgcagggcctgggtgcggtcgtgtcgcgcaagcgggacgctcacgtctacccccagatcgggcactttttcggtaatgtacctgaccgcaaggggcttcccagccccgacggcgataaggaccgcgatccacttctgatcgatctattcgagcgtgggcacggtatcgttagtgacctgaaggcactggatctaaagccacaatgctgctaccgcaaccaggagccggtcaacctctatcacaaggtcggccacggcactctggatatgtatgtgataagtccagcgcgtgactcaaaggaagtaaaggagtttctccagaagtggcatgccggcgaccagcggctctttgccgcccgggattcgcgcgactttaacttcccgctgcaaaacttggtatctatttgcgccctgcttgtttggcagccagccaacccggacgacactatcactcgcattctcttcccgggtagcacacccgactttaaaatccaggagggcctcgaaaagctaaagcatctggagttcatgaagcactccacatgcacagcaaagtcaattgccccagccattcagaccgtgacctcaactcgcaagagcttaaaatcggccatcgaagcgactccagccccgcccagcgccagttacaagactacaaagttcagtccggtggcaagtgccgctctagccgtccagcatccgcagcagcaggataacaaagcgaaggaagctgctgctgctgctgctgctgctgcagctgcagctgcttctgcagctactattgcccgcgccaaagccgattccatggacacggatgcagaaccggagcacgaggcagaccccgaacctgctgacacaggggacgaggctgctcccacagagcaggagcctgaggcggagactgaacccgaacccgagcatgaacccgaagcggagcaggacaaggatgttggtgaggagaagaaggtggaagtgttaatcatgaagccccagcaggcgacacctgcagtaatcgcagcatctggcaaggatggagttgatgcagcttctgctgatgctacgcccaccggcaaactgagcaaagcgtcagccaagggcaaggcggataagccgcgggctgaggttaagccggtggtacgctcccgcatcgacaccaagcctcccaagtccatggaccggaaactagccaaacgggatgagaaaaagagctcgcccacaactacgccggccgccagggcacccgttgcccaaaatgccaagcctaaagttctgagccgcccagcaaccaagtccagtcccagtagcactcctgcaaagagtgccaaggaggccaacaaccggaaggtgctcgagtccaagcagcaggcggctcgagtgcaggccaccagcaccgtctctaggcgagttacaagcactgccagtgaaaggcgagtccaacagcaggcggaagcaaagacagcggctactggggccacccaagcgacccagagaaaaccaatctcaaggagacctcgtggcgtttcaccctcgaaacgcgcaccagcacccggaagtccggtgaagcaggcgaagccgaaagcggcagacttaaaaaagacacgtttggacaagggaggcaccaccgactctagtctggtgtccaccccctctgcagatgaagccacggctgccaagaaactgcaagacttaaccgcttctcaggaactcgacgcagagaagcagcgtgaattggacgaccttaaggaggagcaggaggtggtacgggaaatagaagcggtgtttagtcgtgatgaaatgaaacgacagcagcaccaacagatcaaggccgagcttcgagaaatgcctgccgaaggaaccggcgatggtgaaaatgagcctgatgaagaggaggagtacctgatcatcgaaaaggaggaagtggagcagtataccgaagattcgatcgttgaacaggagagcagcatgaccaaggaagaggagatccagaagcaccagcgtgactcgcaggaatcagagaagaagcgaaagaagagcgccgaagaggagatcgaggcggccattgccaaggtagaagccgctgagcgtaaagcgcgactagagggtgcgtctgcgaggcaggatgagtcggaactggacgttgagccggagcagagcaagataaaagctgaggtgcaggatatcattgccactgccaaggatattgccaagtcacgcaccgaggagcagttggcgaagcccgccgaggaggagctctcatcgccaacccccgaggagaagctaagcaaaaagacttcggatacgaaggacgatcaaatcggagccccagtcgacgttctacccgtcaatcttcaagaaagcctacccgaagagaagttctcggctaccattgagtcgggggccaccactgctccgacactacccgaggatgagcgcattccgctggatcagataaaggaggacctcgtgatcgaggagaaatatgtgaaagaagagaccaaggaagcggaggccatcgtagtggccaccgtacagactcttcccgaagcagctccattggcaatcgataccatccttgcctcagctaccaaggatgcccccaaagacgccaacgctgaagctttaggcgagctgcccgactcaggcgaacgggtgctgcccatgaagatgacatttgaggcccagcagaaccttctccgcgatgtcatcaaaacgcctgacgaagttgcagatttacccgtccatgaggaagccgatcttgggctatacgagaaggacagtcaggacgccggcgccaaaagtatctcccataaagaggagtccgcaaaagaagaaaaggagacggacgacgaaaaggagaataaggtaggagagatcgaattgggggatgaaccgaataaggtggacatctctcacgtactactcaaggagtcggtacaggaagtggccgagaaagtcgtggttattgaaactacagtggagaaaaagcaggaggagattgtggaggccactacagtcattacccaagaaaaccaggaagatctaatggagcaggttaaggataaagaagagcatgaacaaaaaatagagtctggaatcattaccgaaaaggaagctaaaaagtcggctagcactcccgaggaaaaggagaccagcgacattacatccgatgatgagcttcctgcccaactggcggacccgaccactgtgccacccaaatcagccaaagaccgcgaagataccggctccattgaaagtccccctaccattgaggaggccattgaggttgaggtgcaggccaagcaagaagcccaaaaaccagtgccagctccggaggaggctatcaagacggaaaagtcgccacttgcctcaaaggagacctcccgacctgaatctgcgacaggaagcgtcaaggaagacactgagcagacgaaatccaagaaatccccagtaccctcccgacctgaatctgaggcaaaagataagaagtctccattcgcttcaggagaagcttctcgaccggaatctgtagcggaaagcgtcaaagacgaagcaggaaaagcagagagtcgacgagaatccattgccaaaactcataaggatgaaagttctcttgataaagcaaaagagcaggaaagccgtcgcgaatctcttgcggaaagcatcaaaccagaaagtggaatagatgaaaagtctgccttggcttcgaaggaagcctccagaccagaatctgtgacggacaagtcaaaggagccgtcccgccgcgaatccatcgcagagagcttaaaggcggagagtacaaaagatgaaaaatccgctcctccctctaaagaagcttcgcggccaggatcagtggtggaaagtgttaaagatgagactgaaaagtcgaaggaaccatcgcgacgggagtcaattgctgaaagtgccaagccccctattgaattcagggaagtctcacgacccgaatcggtaattgacggtatcaaagatgaatctgcgaagcccgagagtcgtcgtgattccccccttgcctcaaaagaggcttcccgaccagaatcggtattggaaagcgtcaaagacgaaccaattaaatccacagaaaagagtcgccgtgagtcggtggcggaaagcttcaaagcagatagtacaaaggacgaaaagtccccacttacgtccaaggatatatcgcgaccagaatcggctgtggaaaatgtgatggatgcagtaggatctgcagagcggtctcagccagaatccgtaacagcctccagggatgtctctagaccggaatcagtagcggaaagtgaaaaggatgacactgacaaacctgaatctgttgtggaaagtgttattcctgcttccgatgttgttgaaatcgagaaaggtgcggctgataaagaaaaaggtgttttcgtatcacttgaaattggcaagccagatagcccttctgaggttatatccaggccaggacccgtagtagaaagcgtaaagcctgagagccggcgtgagtcctctactgaaattgttcttccatgccatgctgaggactccaaggaaccatccagaccagaatccaaagtagaatgccttaaagatgaatctgaagtattgaagggttctacccgaagagagtctgtggcagaaagcgacaaatcttcacagccattcaaagagacttctaggccagaatccgctgtgggtagtatgaaagatgagagtatgtcaaaggaaccatctcgacgtgagagcgtaaaagatggagctgcccaatcacgggagacttctcgtcccgcgtccgttgcagaaagtgccaaggatggggctgatgatttaaaggaactgtctagacccgaatcgacgacccaaagcaaagaagcgggaagtataaaagacgaaaaatcacctttggcctccgaagaagcttcgagaccagcatccgttgcagaaagtgttaaggacgaagctgagaagtctaaggaagaatctaggcgagagtcggtggccgaaaaatctcctttgccctccaaggaagcttccagaccagcttccgttgcagaaagtattaaggacgaagctgagaagtctaaggaagaatcaaggcgagagtcagtggccgaaaaatctcctttgccctccaaggaagcttccagaccagcttccgttgcagaaagtattaaggacgaagctgagaagtctaaggaagaatcaaggcgagagtcggtggccgaaaaatctcctttgccctccaaggaagcttccagaccagcttccgttgcagaaagtattaaggacgaagctgagaagtctaaggaagaatctaggcgagagtcggtggccgaaaaatctcctttgccctccaaggaagcttccagaccagcttccgttgcagaaagtattaaggacgaagctgagaagtctaaggaagaatctaggcgagagtcggtggccgaaaaatctcctttgccctccaaggaagcttccagaccagcatccgttgcagaaagtattaaggacgaagctgagaagtctaaggaagaatctaggcgagagtcggcggccgaaaaatctcctttgccctccaaggaagcttccagaccagcttccgttgcagaaagtgttaaggatgaagctgataagtccaaagaagaatctaggcgggaatcgatggccgaaagcggtaaggcgcagagtatcaagggtgatcaatctcctctgaaggaagtttcacgaccagagtctgtggcggagagtgttaaagacgatcctgtcaaatccaaggaaccatcccgtcgagaatctgtagcaggaagtgtcacagcggatagtgctagagacgaccaatctcctttggaatccaagggagcgtcaaggccagaatcagtggttgacagcgttaaggacgaagctgaaaagcaagaaagtcgtcgcgaatctaaaacagagagtgttatacctccaaaagctaaggatgataagtctccaaaggaagttttacaaccagtgtctatgacggagactattagggaagacgccgaccaacccatgaagccatcacaagcagaaagtcgaagggaatcgattgctgaaagcattaaggcctccagtcctagggacgagaagtctccattggcttcgaaagaagcctctaggccaggatctgtagctgaaagtattaagtatgatcttgataagcctcagatcattaaggacgacaagtccacagagcactcccgacgcgaatcgctagaggataagtctgctgttacatcagaaaagtctgtttctcgaccactatctgtggccagtgaccatgaagctgccgtagctattgaggatgatgcaaagagttccatctctcccaaagataaatcccgtccaggttttgttgctgaaactgtatcatctccaattgaggaagcaacaatggagttctcaaagattgaagtcgtagaaaagtccagcctagctcttagcctacaaggtggctcaggaggtaaactgcaaacggattccagtcctgttgacgtggccgagggtgacttttcgcatgcggtcgcttcggtttccaccgtcacgcccacacttacgaaacctgctgaactcgcacagattggtgcagctaaaacggtctcgtctcctttagacgaggctctaagaactccatctgctccagagcatatatccagagcagattcacccgcagaatgtgcgagtgaagagattgccagtcaagacaaatcaccgcaagttttgaaggagtcctcaagaccagcgtgggtcgcagaaagcaaggatgacgctgcgcagctaaaaagttctgtggaagatcttagatctccagttgcctccacggaaatttctcgcccggcatcagcgggagagacagcatcatcgcccattgaggaagcaccaaaagacttcgcggaattcgaacaggccgagaaagcagtgctgcccttgactattgaactaaagggtaatctcccaacgttgtcgagccctgtagatgtggctcatggtgacttcccccagacatcaacccccacaagctcaccaactgtagcttcagtccaaccagctgaactctctaaagtcgacattgagaagacagcatcaagtccgatagacgaggctccgaaatcactaattggatgtccggcagaagagcgtccagaatctcctgcagaaagtgccaaggatgcagctgaatcggtggaaaaatccaaggatgcatcacgtccaccatctgtagttgaaagcactaaggcggatagcacgaaaggcgatatatcaccttctccggaatcggtgttggaagggccaaaggacgatgttgaaaaatctaaggaatcatcgcgtccgccatctgtttcagcaagtattacgggggattccactaaagatgtctcccgaccagcctcagtagtggaaagtgttaaggatgagcatgataaggcagagagccgtcgagagtcaattgctaaagtggaaagtgttattgacgaagccggcaaatctgattccaaaagctctagtcaggacagtcagaaagatgaaaagtcgactctagcatcgaaagaagcctctcgaagagaatccgttgtggaaagctcaaaggatgacgctgagaagtctgaaagccgtccagaatcggtcatcgcaagcggagagccagtacccagggaatcgaaatcccccctggactcaaaggatacgtctcgtccaggctcaatggtagaaagcgttacagctgaagatgagaaatctgaacagcaatcccgtcgggagtctgtagcggaaagcgtcaaggcagataccaaaaaagatgggaaatctcaagaagcgtcccgaccatcctctgttgatgaacttctaaaagacgatgacgaaaaacaggaaagtaggcggcaatcgatcacaggcagccataaagcaatgagtacaatgggcgatgagtctccgatggataaagctgacaaatccaaagagccatcccgaccagaatccgtcgcagagagtattaagcatgaaaatacaaaggatgaagagtctccactaggctcccggcgagattccgtcgcagaaagtattaagtcagatatcacaaaaggcgaaaagtccccattgccgtcaaaagaggtctctcgacctgaatccgtcgtaggaagcattaaagatgaaaaggctgaaagccgtcgtgaatctgtggcggagagcgtgaagccggaaagttctaaggacgcaacatcagctccaccatcaaaggaacattctcgaccggaatccgttttgggaagcctcaaagatgaaggcgataagaccacaagtcgccgcgtttcggtagctgacagtataaaagatgagaagtcccttcttgtatcacaagaagcttcccggccagaatctgaggcagaaagcttgaaagatgcggcagcaccgtcgcaggagacctctcgtcccgaatctgttacagaaagcgttaaggatggaaaatccccagtcgcatccaaagaagcgtccagaccagcatccgttgcagaaaatgccaaggattcggctgatgaatcaaaggaacaacgaccagagtcgttgcctcaaagcaaggcgggaagtattaaagatgaaaaatcacctttggcctctaaagatgaagctgagaagtctaaggaagaatcaaggcgagagtcggtggccgaacaatttcctttggtctccaaggaagtttccagaccagcatccgttgcagaaagtgttaaggacgaagctgagaagtctaaggaagaatcacctttaatgtctaaggaagcttccagaccagcatccgttgcaggaagtgttaaggatgaagctgagaagtccaaggaagaatctaggcgagagtcagttgctgaaaaatcacctttgccctccaaagaagcttcgagaccagcttccgttgcagaaagtgtaaaggatgaagctgataagtccaaagaagaatctaggcgagagtcgggggccgaaaaatctcctttggcctccaaggaagcttccagaccagcttccgttgcagaaagtattaaggacgaagctgagaagtctaaggaagaatctaggcgagagtcggttgctgaaaaatctcctttgccctccaaggaagcttcgagaccaacttccgttgcagaaagtgttaaggatgaagctgagaagtctaaggaagaatctagaagagactcggtggccgaaaaatctcctttggcgtccaaggaagcttccagaccagcttccgttgcagaaagtgttcaggacgaagctgagaagtctaaggaagaatctaggcgagagtcggtggccgaaaaatctcctttggcctccaaggaagcttccagaccagcttccgttgcagaaagtattaaggacgaagctgagaagtctaaggaagaatctaggcgagagtcgggtggccgaaaaatctcctttggcctccaaggaagcttcgagacccaacttccgttgcagaaagtgttaaggatgaagctgagaagtctaaggaagaatctagtcgagactcggtggccgaaaaatctcccttggcgtccaaggaagcttccagaccagcttccgttgcagaaagtgttcaggacgaagctgagaagtctaaggaagaatctaggcgagagtcggtggccgaaaaatctcctttggcctccaaggaagcttccagaccagcttccgttgcagaaagtgtaaaggatgaagctgagaagtccaaagaagaatctaggcgagagtcggtggccgaaaaatctcctttggcctccaaggaagcttccagaccagcttccgttgcagaaagtgttaaggatgaagctgagaagtctaaggaagaatctaggcgagagtcggtggcccgaaaaatctcctttgccctccaaggaagcttccagaccaacttccgttgcagaaagtgttaaggatgaagctgagaagtctaaggaagaatcaaggcgagagtcggtggccgaaaaatcttctttggcctccaagaaagcttccagaccagcttccgttgcagaaagtgttaaggatgaagctgagaagtctaaggaagaatctaggcgagagtcggtggccgaaaaatctcctttggcctccaaggaagcttccagaccagcttccgttgcagaaagtgttaaggacgaagctgagaagtctaaggaagaatctaggcgagagtcggtggccgaaaaatcacctttgccctccaaagaagcttcgagaccaacttccgttgcagaaagtgtaaaggatgaagctgataagtccaaagaggaatctaggcgagagtcgggggccgaaaaatctcctttggcctccatggaagcttccagaccaacttccgttgcagaaagtgttaaggacgaaactgagaagtctaaggaagaatctaggcgagagtcggtgaccgaaaaatctcctttgccctccaaggaagcttccagaccaacttccgttgcagaaagtgttaaggatgaagctgagaagtctaaggaagaatctaggcgagagtcggtggccgaaaaatctcctttggcctccaaggaatcttccagaccagcttccgttgcagaaagtattaaggacgaagctgaggggactaagcaggaatctaggcgagagtcgatgcccgaaagcggtaaggcggagagtatcaagggtgatcaatcttctttagcgtccaaagaaacgtcaagacccgattctgttgtggaaagcgttaaggacgaaactgaaaagccagaagggtcagcgatcgacaagtcgcaggtggcatcccgaccagagtccgtggcagtaagtgctaaggacgagaagtcaccgcttcattcgcgtcctgaatcagttgccgacaagtcgccagatgcctcgaaggaagcatctcgttctttatcggttgccgaaaccgcctcatcacccattgaagaaggtccacgatccattgctgacctcagtctgccccttaaccttacaggtgaagctaagggcaagcttccaactctttcgagtcccattgatgtggcagaaggagactttttagaagtaaaggcggaatcctccccgcggccagctgtactttcaaaaccagcggagttttcgcagcccgatactgggcatacagcctccacgcccgtggacgaggcttctcccgttctggaggaaatcgaagtagttgaacagcataccacttctggagtcggggctacgggcgcaacagcagaaacggacctacttgacctgactgaaaccaaatccgagactgtaaccaagcaatcggagacaacgttatttgaaacccttacctcgaaggttgaaagtaaggtggaagtactggagagctcggtgaaacaagttgaagagaaagtccagacctcagtaaagcaagcagaaaccactgtgaccgattccttggaacaactaaccaagaagagcagtgagcagttgacagagatcaaatcagtgctagacaccaactttgaagaagtagcgaaaatcgttgccgatgtggccaaggtacttaagtctgacaaggacattacagacatcatacccgactttgacgaacggcaactggaggagaaactgaagtcaactgccgatacagaggaggagtccgacaaaagtacccgggacgagaaatccctggaaatcagcgtcaaagtagaaatcgaatctgagaagtcatcgcccgatcagaagtccggccccatttccatcgaggagaaggacaaaatcgagcaatcagaaaaagcacagttgaggcagggaatattgaccagcagtcggccggagtcagttgccagccagccggagtcggtgccctccccttcccagtcagcagccagccatgaacataaggaggtggagctatccgagagccataaagctgagaagtcttctcgccccgagtccgttgccagccaggtcagcgaaaaggacatgaagacatcgcgcccagcatccagcaccagccaatttagcaccaaggaaggcgatgaggagacgactgagtcgctacttcactcgcttactaccacagagacagtggagacgaaacagatggaagagaaatcgagctttgagtctgtctccacttcagtcactaagtccacagtcctctccagtcagtcaactgttcaacttcgagaagagtccaccagcgaatcgttgagtagcagtctcaaggtggaggacagctcccgacgcgagtcgctttccagcttgttggcggagaaaggaggaatcgctaccaacactagtttgaaggaggacactagcgcctctgcatctcagctggaggagctgcttgtgcagtccgaggaatgctcatcagagtcaatcgttagcgagattcagaccagcatcgctcagaagtcaaataaggaaatcaaggatgctagagaaaccaaagtaaccagccagtttaccactaccaccagcagcgccaccaaagacgatagcttaaaggaaactgtggccgagtttctggccaccgagaagattgtttccgccaaggaagccttcagcactgaagccactaagtcggccgacgactgcttgaagaagaccaccgccagcgccgtctccagcacatccgcctcccagcgagcgctattcgtaggcacggacgaatcacggagagagtctctgctcagtcaggcaagtgagagccgcttgacccacagtgatcctgaagatgaggaacccgctgatgacgtcgacgagcggtccagtgttaaggagagccgttccaagtctattgctaccatcatgatgaccagcatctacaaaccttccgaggatatggaaccgatttcaaagctcgtcgaggaggagcacgagcacgtggaggagctggctcaggaggtcacctctaccagcaagaccacaactcttttgcaatccagcgaacagagcagcacaaccaccagtagcaccagcaagaccggtgcctcaagggtggagtccattaccctcacacagatggatcagcaaactagccagagtcagggcgaccctgccgatcgcaagacaccgccaactgcgccagtaagtcccggcgtcaaagcaatgagctcgacaggatcagccggctctgtgattggagctggagctggagccgtagccgctggtggaaagtgtgagtcgagtgccgccagcatcgtatcttcatcgggcccgatgtcgcccaaggacatcagcggcaaatctagccccggtgccctcacctcggagagccagtcaattcccactccgctaggacgggagtcgcatacggacaccccggaatcctcgccaaagcccacatcacctttcccgcgcgtcagcaaggacgagcttaagtctctggaaatgcaggtatgtttaagcagttttgtgctggatttatttgtcgtattatatcctatgttttttaacccatgtagcaccactcgcaggagcagatgttggcaggagcagctgctgcagccggagctgagtgtgagggtgacattcccgagctgcacgaactgcgtggactagagtgcaccacagccctcagcgggagcaccgacaagataatcaccaccacaatcaccacggtgacaaaagtaatttcggcggatggcaaggaaatagtaaccgagcaaaagacggtgacaaccacagacagctcagagcccgacagtgaaaaggtagtggtgaccacaacgcgtaccaccagcgagagcgaacgagaccagctgctgcccaaagaggtggcgctgctgcgcggcctgtaccgcgccagcaccccgggcagcgaggacgacgaggacctgctactaggatccccgcgtagtgctaccagctacgagctgcaacactctagctccggtgtgagcaagcgctccgatctggatgccgacggcgacgagagccaagatgacattcctcctcagtatggcagcgaggagcactcaacggcacgatcaattcttctgcctcgcacagccgaccccatggccacctccttctacggcgccctgcccgacagtttcgacgttgtgatgaaacccagcaccgaaccaatcccgatccagggcgcaccgtccggcgatagccagtcgtcggagagcgtggagagcagtagccagacctgggcaggacacaagttcctggaccaggcggacaaagacttccagcgagcacttgaggagcacgtacaggcgcgcggcgccgaggtcatgtcttccgtcaccgccaagtactcgtactcgccctcgaaggccgaggaaatggaacagatcgtaagcggcactgcggaacggcagcgcttcccgcttagcgatgtccagcgagcccgtgtcgcggaaagtggctttgccacagttggcagtgtcgcctcccagcagcagcaacaggagaaaggaggggaagtagaacaagccgtccctaccacaactgcagttacagcaagcactacagccacagcgagttccactggagctctgcccaaggaccgcctcgaggagtggggcaagcccctaggcctgccctcaccagcaccactgcctgtagagggcggtgctgacattcgcaccactcccaagaaggaacgccgcctggtggccaccaagacgcgactgaacaacgagaagaacctgcgcaggcgcagcgaatcacccaacaaggccggcaagaagccagcgcccgtctacgtggacctcacatacgtgccgcacaacggaaactcctactacgcccacgtggacttctttaagcgggtacgagcccgctactacgtcttctccggcacggaacccagtcgccaggtgtatgatgcgctgctcgaggccaaacagacatgggaggacaaggagttgggtgagtagatgcttgttatgtcgatcctgcaatgagttcattttccaaatctccgacttgcagaggtcaccattatacctacgtacgacacagatgttctaggttattgggtggctgaaaacgaggagctgctagccaagcaccgcatcgacctctcgccctccgcgtctcgttgcaccatcaacctgcaggaccacgagacctcgtgctcggcctaccgcctagagttctaggccacgggtctgtttattgcattcgacgatgactaagccaacccacaacgcacccagccatagacgcagacgagccgagcactgccagagaattgagtctatgtacggactacaaagtgcatggactcgagctctgacacgacaagaaccgggactaggactaggaccagcacaacgacgaccacagcaagaggagaaggattggaatgcagatcacaatgggaatgacaattcagacaattcaattggccaattttcgtgagcaggagccgcaggaaacggaaatgagacgcacgttggctgatatggcggagtttgggtcacgcgaatgactccattttgtttaccaatgccgcctattgagctttcgacgacttgtttcggccgaccaaaagctacgtaattaattaatattaagttttaaaaattaattaccaaaagatgcattgcaaccgatcctcagtggtttagtcgaggagaagctatttatgtcactttcattgcataacgtcaagctaccttgcttagtaatccaaagatcaaaatagttttcaaaaccgcatagctaaaatatacaaaggagaaacgaaaggcgagaaaatactaagaaaagacaaactctatatatagagtacttaatattcatgtttaatatatgtattagtcgaaacttttacgaaccctctcgtatggtctccccataccaaaggtattcgaattttaaagcgagcattagctaattgaacgtgtataacccgtaaagtcagagctctttagccgtaggataataagcgatcataatacagaacgaagatcggagacggattcactacccgcccttcggactaaactgaatcaaacgttagggctaacaattgagtgcaacaaagattttcgatttaccccttaccgaagcaaatctagtatccgagtgtcgggatttaggattcgataccctcaatatttaagtaattccagatctaatagttttcatagtccg

SEQ ID NO: 5630 - DNA, 6919 bp, DROSOPHILA
atgtcggacgaaggcggccaaaaacctcatcacagccctcatctgcgccgtcatcatcatcgtcattaccgtggtgcgctaagggtggtggccaaggtcgccggcaaggtcgctccgacccgtggcaactgcgccacgggggacgctgctctggaagcagtcgagacaataaagcttgacaattcaaacccacttgatgcgccgtgcgtgctcgagtccatgtccgtgcctgccagcccgggcatcgctttcatctctgacagcacctctgaccgcgaacggctcatccagtatgccagcgagaatctggtcacggaggtgctcatccacccgcagtacaatacgctgatccagtgcatgcgaaacctgcttagcagtttcacccgccaccggcacatcatccacgccggttacaccttcagtggaaatggttcctggatattgcaggacggaaccttctcggtggcggacttctctgaggccttccaagagcacgacgtacaaagggtgattcgggcctatgccgacaccatcaccatgaacattcactgcgcggacgcgggtctatggcacacattgcccgagaaggcctttgcccgccagtgccggatacggataaatcccgtggacgtcctggacacgagcagcgagtgcatcaacggattcattgattacctcgcgcccatggtgatgccaacctcgctgagggagctgcttgagacctcggacgtggtgggcaacattcgctttacccatccaacgttatatgtcttccccggcggccagggtgatgcggcgcttttcgggatcaacggctttaacatgcttgttgacggcggcttcaaccgcaaggcatgcttctgggacttcgcccggcacctagaccgactggacgcggtgctgatgacccgcctaaacaacagcaacgtgcagggcctgggtgcggtcgtgtcgcgcaagcgggacgctcacgtctacccccagatcgggcactttttcggtaatgtacctgaccgcaaggggcttcccagccccgacggcgataaggaccgcgatccacttctgatcgatctattcgagcgtgggcacggtatcgttagtgacctgaaggcactggatctaaagccacaatgctgctaccgcaaccaggagccggtcaacctctatcacaaggtcggccacggcactctggatatgtatgtgataagtccagcgcgtgactcaaaggaagtaaaggagtttctccagaagtggcatgccggcgaccagcggctctttgccgcccgggattcgcgcgactttaacttcccgctgcaaaacttggtatctatttgcgccctgcttgtttggcagccagccaacccggacgacactatcactcgcattctcttcccgggtagcacacccgactttaaaatccaggagggcctcgaaaagctaaagcatctggagttcatgaagcactccacatgcacagcaaagtcaattgccccagccattcagaccgtgacctcaactcgcaagagcttaaaatcggccatcgaagcgactccagccccgcccagcgccagttacaagactacaaagttcagtccggtggcaagtgccgctctagccgtccagcatccgcagcagcaggataacaaagcgaaggaagctgctgctgctgctgctgctgctgcagctgcagctgcttctgcagctactattgcccgcgccaaagccgattccatggacacggatgcagaaccggagcacgaggcagaccccgaacctgctgacacaggggacgaggctgctcccacagagcaggagcctgaggcggagactgaacccgaacccgagcatgaacccgaagcggagcaggacaaggatgttggtgaggagaagaaggtggaagtgttaatcatgaagccccagcaggcgacacctgcagtaatcgcagcatctggcaaggatggagttgatgcagcttctgctgatgctacgcccaccggcaaactgagcaaagcgtcagccaagggcaaggcggataagccgcgggctgaggttaagccggtggtacgctcccgcatcgacaccaagcctcccaagtccatggaccggaaactagccaaacgggatgagaaaaagagctcgcccacaactacgccggccgccagggcacccgttgcccaaaatgccaagcctaaagttctgagccgcccagcaaccaagtccagtcccagtagcactcctgcaaagagtgccaaggaggccaacaaccggaaggtgctcgagtccaagcagcaggcggctcgagtgcaggccaccagcaccgtctctaggcgagttacaagcactgccagtgaaaggcgagtccaacagcaggcggaagcaaagacagcggctactggggccacccaagcgacccagagaaaaccaatctcaaggagacctcgtggcgtttcaccctcgaaacgcgcaccagcacccggaagtccggtgaagcaggcgaagccgaaagcggcagacttaaaaaagacacgtttggacaagggaggcaccaccgactctagtctggtgtccaccccctctgcagatgaagccacggctgccaagaaactgcaagacttaaccgcttctcaggaactcgacgcagagaagcagcgtgaattggacgaccttaaggaggagcaggaggtggtacgggaaatagaagcggtgtttagtcgtgatgaaatgaaacgacagcagcaccaacagatcaaggccgagcttcgagaaatgcctgccgaaggaaccggcgatggtgaaaatgagcctgatgaagaggaggagtacctgatcatcgaaaaggaggaagtggagcagtataccgaagattcgatcgttgaacaggagagcagcatgaccaaggaagaggagatccagaagcaccagcgtgactcgcaggaatcagagaagaagcgaaagaagagcgccgaagaggagatcgaggcggccattgccaaggtagaagccgctgagcgtaaagcgcgactagagggtgcgtctgcgaggcaggatgagtcggaactggacgttgagccggagcagagcaagataaaagctgaggtgcaggatatcattgccactgccaaggatattgccaagtcacgcaccgaggagcagttggcgaagcccgccgaggaggagctctcatcgccaacccccgaggagaagctaagcaaaaagacttcggatacgaaggacgatcaaatcggagccccagtcgacgttctacccgtcaatcttcaagaaagcctacccgaagagaagttctcggctaccattgagtcgggggccaccactgctccgacactacccgaggatgagcgcattccgctggatcagataaaggaggacctcgtgatcgaggagaaatatgtgaaagaagagaccaaggaagcggaggccatcgtagtggccaccgtacagactcttcccgaagcagctccattggcaatcgataccatccttgcctcagctaccaaggatgcccccaaagacgccaacgctgaagctttaggcgagctgcccgactcaggcgaacgggtgctgcccatgaagatgacatttgaggcccagcagaaccttctccgcgatgtcatcaaaacgcctgacgaagttgcagatttacccgtccatgaggaagccgatcttgggctatacgagaaggacagtcaggacgccggcgccaaaagtatctcccataaagaggagtccgcaaaagaagaaaaggagacggacgacgaaaaggagaataaggtaggagagatcgaattgggggatgaaccgaataaggtggacatctctcacgtactactcaaggagtcggtacaggaagtggccgagaaagtcgtggttattgaaactacagtggagaaaaagcaggaggagattgtggaggccactacagtcattacccaagaaaaccaggaagatctaatggagcaggttaaggataaagaagagcatgaacaaaaaatagagtctggaatcattaccgaaaaggaagctaaaaagtcggctagcactcccgaggaaaaggagaccagcgacattacatccgatgatgagcttcctgcccaactggcggacccgaccactgtgccacccaaatcagccaaagaccgcgaagataccggctccattgaaagtccccctaccattgaggaggccattgaggttgaggtgcaggccaagcaagaagcccaaaaaccagtgccagctccggaggaggctatcaagacggaaaagtcgccacttgcctcaaaggagacctcccgacctgaatctgcgacaggaagcgtcaaggaagacactgagcagacgaaatccaagaaatccccagtaccctcccgacctgaatctgaggcaaaagataagaagtctccattcgcttcaggagaagcttctcgaccggaatctgtagcggaaagcgtcaaagacgaagcaggaaaagcagagagtcgacgagaatccattgccaaaactcataaggatgaaagttctcttgataaagcaaaagagcaggaaagccgtcgcgaatctcttgcggaaagcatcaaaccagaaagtggaatagatgaaaagtctgccttggcttcgaaggaagcctccagaccagaatctgtgacggacaagtcaaaggagccgtcccgccgcgaatccatcgcagagagcttaaaggcggagagtacaaaagatgaaaaatccgctcctccctctaaagaagcttcgcggccaggatcagtggtggaaagtgttaaagatgagactgaaaagtcgaaggaaccatcgcgacgggagtcaattgctgaaagtgccaagccccctattgaattcagggaagtctcacgacccgaatcggtaattgacggtatcaaagatgaatctgcgaagcccgagagtcgtcgtgattccccccttgcctcaaaagaggcttcccgaccagaatcggtattggaaagcgtcaaagacgaaccaattaaatccacagaaaagagtcgccgtgagtcggtggcggaaagcttcaaagcagatagtacaaaggacgaaaagtccccacttacgtccaaggatatatcgcgaccagaatcggctgtggaaaatgtgatggatgcagtaggatctgcagagcggtctcagccagaatccgtaacagcctccagggatgtctctagaccggaatcagtagcggaaagtgaaaaggatgacactgacaaacctgaatctgttgtggaaagtgttattcctgcttccgatgttgttgaaatcgagaaaggtgcggctgataaagaaaaagcaccactcgcaggagcagatgttggcaggagcagctgctgcagccggagctgagtgtgagggtgacattcccgagctgcacgaactgcgtggactagagtgcaccacagccctcagcgggagcaccgacaagataatcaccaccacaatcaccacggtgacaaaagtaatttcggcggatggcaaggaaatagtaaccgagcaaaagacggtgacaaccacagacagctcagagcccgacagtgaaaaggtagtggtgaccacaacgcgtaccaccagcgagagcgaacgagaccagctgctgcccaaagaggtggcgctgctgcgcggcctgtaccgcgccagcaccccgggcagcgaggacgacgaggacctgctactaggatccccgcgtagtgctaccagctacgagctgcaacactctagctccggtgtgagcaagcgctccgatctggatgccgacggcgacgagagccaagatgacattcctcctcagtatggcagcgaggagcactcaacggcacgatcaattcttctgcctcgcacagccgaccccatggccacctccttctacggcgccctgcccgacagtttcgacgttgtgatgaaacccagcaccgaaccaatcccgatccagggcgcaccgtccggcgatagccagtcgtcggagagcgtggagagcagtagccagacctgggcaggacacaagttcctggaccaggcggacaaagacttccagcgagcacttgaggagcacgtacaggcgcgcggcgccgaggtcatgtcttccgtcaccgccaagtactcgtactcgccctcgaaggccgaggaaatggaacagatcgtaagcggcactgcggaacggcagcgcttcccgcttagcgatgtccagcgagcccgtgtcgcggaaagtggctttgccacagttggcagtgtcgcctcccagcagcagcaacaggagaaaggaggggaagtagaacaagccgtccctaccacaactgcagttacagcaagcactacagccacagcgagttccactggagctctgcccaaggaccgcctcgaggagtggggcaagcccctaggcctgccctcaccagcaccactgcctgtagagggcggtgctgacattcgcaccactcccaagaaggaacgccgcctggtggccaccaagacgcgactgaacaacgagaagaacctgcgcaggcgcagcgaatcacccaacaaggccggcaagaagccagcgcccgtctacgtggacctcacatacgtgccgcacaacggaaactcctactacgcccacgtggacttctttaagcgggtacgagcccgctactacgtcttctccggcacggaacccagtcgccaggtgtatgatgcgctgctcgaggccaaacagacatgggaggacaaggagttggaggtcaccattatacctacgtacgacacagatgttctaggttattgggtggctgaaaacgaggagctgctagccaagcaccgcatcgacctctcgccctccgcgtctcgttgcaccatcaacctgcaggaccacgagacctcgtgctcggcctaccgcctagagttctag

SEQ ID NO: 5631 - protein, 1793 aa, DROSOPHILA
MSDEGGQKPHHSPHLRRHHHRHYRGALRVVAKVAGKVAPTRGNCATGDAALEAVETIKLDNSNPLDAPCVLESMSVPASPGIAFISDSTSDRERLIQYASENLVTEVLIHPQYNTLIQCMRNLLSSFTRHRHIIHAGYTFSGNGSWILQDGTFSVADFSEAFQEHDVQRVIRAYADTITMNIHCADAGLWHTLPEKAFARQCRIRINPVDVLDTSSECINGFIDYLAPMVMPTSLRELLETSDVVGNIRFTHPTLYVFPGGQGDAALFGINGFNMLVDGGFNRKACFWDFARHLDRLDAVLMTRLNNSNVQGLGAVVSRKRDAHVYPQIGHFFGNVPDRKGLPSPDGDKDRDPLLIDLFERGHGIVSDLKALDLKPQCCYRNQEPVNLYHKVGHGTLDMYVISPARDSKEVKEFLQKWHAGDQRLFAARDSRDFNFPLQNLVSICALLVWQPANPDDTITRILFPGSTPDFKIQEGLEKLKHLEFMKHSTCTAKSIAPAIQTVTSTRKSLKSAIEATPAPPSASYKTTKFSPVASAALAVQHPQQQDNKAKEAAAAAAAAAAAAASAATIARAKADSMDTDAEPEHEADPEPADTGDEAAPTEQEPEAETEPEPEHEPEAEQDKDVGEEKKVEVLIMKPQQATPAVIAASGKDGVDAASADATPTGKLSKASAKGKADKPRAEVKPVVRSRIDTKPPKSMDRKLAKRDEKKSSPTTTPAARAPVAQNAKPKVLSRPATKSSPSSTPAKSAKEANNRKVLESKQQAARVQATSTVSRRVTSTASERRVQQQAEAKTAATGATQATQRKPISRRPRGVSPSKRAPAPGSPVKQAKPKAADLKKTRLDKGGTTDSSLVSTPSADEATAAKKLQDLTASQELDAEKQRELDDLKEEQEVVREIEAVFSRDEMKRQQHQQIKAELREMPAEGTGDGENEPDEEEEYLIIEKEEVEQYTEDSIVEQESSMTKEEEIQKHQRDSQESEKKRKKSAEEEIEAAIAKVEAAERKARLEGASARQDESELDVEPEQSKIKAEVQDIIATAKDIAKSRTEEQLAKPAEEELSSPTPEEKLSKKTSDTKDDQIGAPVDVLPVNLQESLPEEKFSATIESGATTAPTLPEDERIPLDQIKEDLVIEEKYVKEETKEAEAIVVATVQTLPEAAPLAIDTILASATKDAPKDANAEALGELPDSGERVLPMKMTFEAQQNLLRDVIKTPDEVADLPVHEEADLGLYEKDSQDAGAKSISHKEESAKEEKETDDEKENKVGEIELGDEPNKVDISHVLLKESVQEVAEKVVVIETTVEKKQEEIVEATTVITQENQEDLMEQVKDKEEHEQKIESGIITEKEAKKSASTPEEKETSDITSDDELPAQLADPTTVPPKSAKDREDTGSIESPPTIEEAIEVEVQAKQEAQKPVPAPEEAIKTEKSPLASKETSRPESATGSVKEDTEQTKSKKSPVPSRPESEAKDKKSPFASGEASRPESVAESVKDEAGKAESRRESIAKTHKDESSLDKAKEQESRRESLAESIKPESGIDEKSALASKEASRPESVTDKSKEPSRRESIAESLKAESTKDEKSAPPSKEASRPGSVVESVKDETEKSKEPSRRESIAESAKPPIEFREVSRPESVIDGIKDESAKPESRRDSPLASKEASRPESVLESVKDEPIKSTEKSRRESVAESFKADSTKDEKSPLTSKDISRPESAVENVMDAVGSAERSQPESVTASRDVSRPESVAESEKDDTDKPESVVESVIPASDVVEIEKGAADKEKAPLAGADVGRSSCCSRS

SEQ ID NO: 5632 - DNA, 3017 bp, DROSOPHILA
tatctgtctattgtgtagcgttagcatagataccacaccatcgagccaagtgctgttagctcctttgttgctaattgagtttaaaatcaatttgtattttttcacgccgcaatttgttcgagcgcacagctacattgcgtaattgccgtgcaaatttaattacagcgccgatgcggtaatgctggttgaccaacaaaacagccacgcgctgcgaacgtgcgcccttgtcacacccactcacaatacggaatcagcacccagtggaacacccactgcagcacccatcgatcaaggcctcaatcaagtggtgacactcggagcgctccgagtatcgagttaccagcgaaggtccatttgcattccttaattgaaattcgtacgcgtgggaagaccacgcagcctgaaagctttgaatctcccaaagttggatgttgctccatgtttttttttttttttggaagagatgatcttccatttaacagatttcacttctcatattcatattcaattatgccacatagtagttcaatccaattcaattgcaggcatattgccgggctcacttgctcctgtgcccgcttagggctggctaatccttctgataaatggtccgggctttggatgagatgcagtggctcgttttttagcgcgcgcagagatgttggaaatttttagaaaggcaaacacaaacaaggcattaagtggcattagacaaatgcctttctacacatgttccagcgtagagattacgccgtgtaattggccccacctccattcgcccggggtgggttccggttttcgattgacatttggccacggctgcggggtgggctactgctctgctctgctctgctccttctacaatttttttttttttttttgttctttctttttatcaattgccttgtttgcgctgggaccataaataagggcattactcgcagggggcgtgcgcgttttcctaacaggtgtctatcgactcctggctaatcccatgcccatgcccatgcccagctccctgacatcgagttccttacttactcgttcgttgcagttcgaaggccgattccagtcgaagcgtctcaacaactgggaatatccgcgattctcaccaccccgcccacgtggtctgcagaagaacgccaaggttgtggcggccaataacggtcacctgctgcccgaagtgataaagtaagcaattgccaatgccccacaattatacagtttaattttaatccacagggagggcaactcatttggccaatatcgtggaacctacgagctaccgcgtcgaataacccgtgccttttgcgcccactacgatgcctgtctgagtgggcggtacaagtttgttgactttccgcgtgacctgtgcaattgtcagcgagagaaccgcagggcactggcctgcgatcagcggttgaccttgggccacaaggacgatccctactggatgcgcgaacggtgccagacgaagtgcgagggactacagaagctgagggcgttgagcgagcggagtgcgcgctgcaatcgggccaagtgcgacgtggtggtgagtgggaatcggggtcaccatcggggtcaccatcggtgtcacctcttaccaattatgtgcacccagattattgagttatctgcaaccaagctatacatattttcatttctggttgcactttttgcactttcatcctgcaccctgcacactcacattcacattcacctgcaaccgtagagcgagaaaaccgtgaagatgacgccgaaggcaatcaagacgacgggtgtggccaccgaaaagcggcgtcgaaagcgcaccataaccgccttttccaaaggacgaacggcattgcatcccaatgagctgaccaagccgattccatcgtcggagaaaccggcggcgactgtcgccactcccaaggacaagccgaaggacaagccaaaggacaaggaggcgggcaagaaggataagacgaaggataagggcaaggagaaagagcgcaaggcggcgaagggccattagtaaaacttcattattttgttcaaccgaaattcaaatcaaattcattgtaaccgcaggtttaaaatacattttaaagggcagcacgattgcactcaacacaaatcatatagcatatatattttataactaaacccaggttaaaccatctgttacatatgtacataaatcatacatcattatcatctccatctccatctccatcttatctcatcccattccattctgcaccaccaacgcattgcaacaagtgaacgaacctgaaagccacctactccattactccatccaatcatgtcgcaaacagctctcccggaactgagctacacgccgggcgacctaacagagccgcagttccggctgccctcgcaccaggagctcctcgaccagaaacgcaacagcacggacagcgtgccacttggtcgtctcaccttggacacgcgcgacacgcagcccatcaagtacagggagcagctgggctcggcggccggtcgtcaatttccggcattggcagcggcccaaaatcgctatacggatcacttggagcgcagcagcgagttgagctttgcgtgcctggagccgggcaaggatctaatctcattgccgacggtgggtatacgaagctttgatctcgatcccgtatccgtatccgaacccgatttgatcaagaagatgccgctgcactcgatcacggagaagcccaacgagcggtgtccatcgccagtggtgccggcatatgccaatttcgagctggccaaacggatgcaccaggacaatttggaccaccagccgctgcccgattgcgtcgccgatttggcattccggcgagcgcaaatatccggcggacatgctggcctggccctggaaatcgatcccattgccacgggcgtgggtgtgaaaacgcacaatgctggtccgacgcactgcaccaagatgaaggtctttcgtccgaagaccggcggtggcatcgtgccacgtgccctcggcaatggcgatgcctttc

SEQ ID NO: 5633 - DNA, 786 bp, DROSOPHILA
atgcccatgcccagctccctgacatcgagttccttacttactcgttcgttgcagttcgaaggccgattccagtcgaagcgtctcaacaactgggaatatccgcgattctcaccaccccgcccacgtggtctgcagaagaacgccaaggttgtggcggccaataacggtcacctgctgcccgaagtgataaaggagggcaactcatttggccaatatcgtggaacctacgagctaccgcgtcgaataacccgtgccttttgcgcccactacgatgcctgtctgagtgggcggtacaagtttgttgactttccgcgtgacctgtgcaattgtcagcgagagaaccgcagggcactggcctgcgatcagcggttgaccttgggccacaaggacgatccctactggatgcgcgaacggtgccagacgaagtgcgagggactacagaagctgagggcgttgagcgagcggagtgcgcgctgcaatcgggccaagtgcgacgtggtgagcgagaaaaccgtgaagatgacgccgaaggcaatcaagacgacgggtgtggccaccgaaaagcggcgtcgaaagcgcaccataaccgccttttccaaaggacgaacggcattgcatcccaatgagctgaccaagccgattccatcgtcggagaaaccggcggcgactgtcgccactcccaaggacaagccgaaggacaagccaaaggacaaggaggcgggcaagaaggataagacgaaggataagggcaaggagaaagagcgcaaggcggcgaagggccattag

SEQ ID NO: 5634 - protein, 261 aa, DROSOPHILA
MPMPSSLTSSSLLTRSLQFEGRFQSKRLNNWEYPRFSPPRPRGLQKNAKVVAANNGHLLPEVIKEGNSFGQYRGTYELPRRITRAFCAHYDACLSGRYKFVDFPRDLCNCQRENRRALACDQRLTLGHKDDPYWMRERCQTKCEGLQKLRALSERSARCNRAKCDVVSEKTVKMTPKAIKTTGVATEKRRRKRTITAFSKGRTALHPNELTKPIPSSEKPAATVATPKDKPKDKPKDKEAGKKDKTKDKGKEKERKAAKGH

SEQ ID NO: 5635 - DNA, 4141 bp, DROSOPHILA
tgcaaaatgtaaacccactagcagggcttccacttcgatgaagccgtcgcggaggaggtgctgaccatcgaacaggaagccgaagtggagaccgaggacggcaatggtggacaggacagcgaggatatacccacggcggaggaggtgcacgccactatgaagcagtttcacctgcgcaagtgccagccagcacaggatgaggccgctcgtcgcgccaaaagtgctcgtgttcgtcgccgaaacaagtgagttcccatcccagtgtccgtttcatatcttaatcccacgttttccttgggcgccagagtttcgccggagcaaagcgatgatccggacgagcgcagccagcggggacgttccgcttacacgcggcgaacgcaatcgccgcccgatccgctggaaccatggagcacccgcgaactgcaggacatcaacaagatcctggccagaaagtgaatacagttagcgcaggagtttctggcacatagtccttggtggcttataattgtttatcagatcttagcttagttagaagtacaaatacataataaagagcgcggatgccacgcgaaacgctgggttatgctttggaccggtggcatccgtcacccgtcacatacatacactaatacactcgatttcccattattctctctaagtgctaggtttaaaagtggtggaggtggcggtttttttttttggagaaggtgaaacctgctgccagggggcgggagggtcagcaataaattacaattgagaaatcgtttctacacagatgcctacgacttagacactagctatatataatctcccccgcgatatacaatcgtatacacctacgtaaactataatattatacattgtgctggatgacaggggatggcgcaatcaatgcccgcttgccaatgcccgattccaatgcctcccgatgctttcgatatgattgccaactgtccgtctgtccgtccgtccgttggtacggatatcatacttccagcttttaccgaaatccgccggttaatgtgcgatccgtggacatggtggagatcgtttgtgcctgttgctgctgcgccgactgctgctgctgcgcctgcgtcgccgccgcctgggcaccagtcatggtcgagttgataaagatcggcgtgccactggccaccgcactggcgttgctctgctgcgtgagattggcgtgctgctgctgttgctgctgctgctgatgggccactgtgggtgctccgcccagctggagcagttgctgtgtcgtcagcagttgggttggtatgatgacctgttgttgctgctgctgctgttgctgctgctgttgttgctgctgctgctgctgttgcatttgtagtcgctgcaggagattcaaatgactggcattgatggcgatctgcaatgggaaaggcaagtcttaatctgggattcaatacaattacctcaagtgatacctaccggcacattagtcagctcccccgtgggcgtaaccacttgctgcagcagctgaatctgctgctgatgttgctggtgctgctgttgctgctgggcgagattctggagcagcgccgtctgttgctgggcagtcgtttgcggcgctggcgttgcggtcagctgaccattgggaccggcggtcagtatcaactgctgggtgggttgttgggttgacaaaatgttgatgggtagatgattctgcgcgggctgcggctgctgcacgagctgcgccgcctgctgactcggcagtgcgataaagtattgcaactgttggccaccagcgccctgctgaataatctgaacctgctgtggatgtgcctggtgatgttgctgctgctgttgttgctgctgctgctgggcggcgtgctgttgctgctgttgttgttgctgctgcagttgcgctgagaagatgtccgagttgacagtgctgaagccgagcacctcggcggcattggttgcacccgtggtgtccagcttgaggccaccagcggtggtcgcaggtacggtggaaccactggctacaaagttgcccgtggcggtagcattgcccgccacggaggcggccgcattggaggtggctgtgttggaggtggaggcggcactgctggctgcgcccgccattccgctcgaactggatgtactgccatccttggtcttttgcgccgacgacggtttgatctcttcgcgcggcacaatgtcgatgaggaagtcgaactggtcgtagttggctatggcctgggcaatgtccgaacgctggagcgtacgccgccggctctcctcggtgtgcacccaagcgtgcatagtcagctcctgaatgaagtactcgcaggctttggcaaacagtagcggcgcctcgccggcaatcatcttggcgttctcgtccagcttcatgattttcttgatgcgcgccagcggcagcacctggtgcttggcatccacctggccgatgctgtgcacctcgctcacgatatttggccagaagttgtcgatggtgggcggcggtttgcgtgccacctgagttcgtgtggccttcgtggtcttctccttggcgccgctcgcaacggtggtggccaccgtcacactcatgctgggattaaccagcgtacaggcgttggacaccaaactggccatgggaaccgtctgctgttgctgctggccctgctgttgctgctgctgctgggcggaggagacggtggaggaggaggtgaccaccactgcattcggtgttcttcgctgcatagccgctgaattttgcgatttggcatacgcctggcccagttccatctttatgggcgtcactgtgatggtgttgtcgaacatggaggtggcattgctgtagggcattcacattagtttcattcaaattatttggcatgcacaaatcgcagaatgaaaacaaaaaggatcggcgcacacactaaaaatctcggctgtaccgcctgtttttttgggggaggggcgctagattttgctggcggaggcggaacttacctgtttggcgccttgttcgtgccgccattgttggtggcgtacatggcccggttggctggagaccttagctcggcgttggcggcaaccgtgggactctggcgaccggctcgagtccacaatattcgctttaattagcttctaattcgcaaagcaaatgcgtaatgtaatgcacacacacacacatgcatacacgcgagcgtcagtgtgaccaggcggcggtgagggcgaaaactggacagcccgataacgatagcttttagtcgggctaactggctacttccaagccacatttagccggcacaatcgacaatcgcattctgcccgctttcaagccagatcggacagcacttaccgctgataaggaatgcatcgaatctaaactacaatcccaatccctgagagaaacgaagatgaaggacctcttctggcacctggtgggcatagccaccggcctaaagatcctgctgattccagcctagtaaatgcagtgctctgtccacttatcaagcccactaaatcaacttcatccttagccattccacggatttcgaagtccatcgcaactggctggccatcacccacagtttgccgctgaatcagtggtatgtggacgccaccagcgagtggacactggactatccgccgttcttcgcctacttcgagtggctgctctcgcaggtggccaagtacgtggatccacgaatgctggtggtggataacctgaattacgagtccaaggccaccgtttactttcagcggctctcggtgattgttacggatctagtgtatgtgctcggcgtgcgcagctgcctgggctcactgggattgggcagggatacgcagcagttctttgccgcctccatgttgctgctcctcaacgtgggattgatcttcgtggaccacattcactttcagtacaatggcttgctgttcggcatactgctcctgagcatcggttccctcatccggcagcggttcctctggagcgcctttgccttcgccgtgctgctcaactttaagcacatctttctgtacatggcgcccgcttttggggtctacctgctgcgtttctattgcctggagcaagcgagtgtggtgtctgcggtgggtgccgttgtcaagctgctggtcgttggacttactccgttcgccgtgtctt

SEQ ID NO: 5636 - DNA, 1921 bp, DROSOPHILA
cgcatttgctttgcgaattagaagctaattaaagcgaatattgtggactcgagccggtcgccagagtcccacggttgccgccaacgccgagctaaggtctccagccaaccgggccatgtacgccaccaacaatggcggcacgaacaaggcgccaaacagcaatgccacctccatgttcgacaacaccatcacagtgacgcccataaagatggaactgggccaggcgtatgccaaatcgcaaaattcagcggctatgcagcgaagaacaccgaatgcagtggtggtcacctcctcctccaccgtctcctccgcccagcagcagcagcaacagcagggccagcagcaacagcagacggttcccatggccagtttggtgtccaacgcctgtacgctggttaatcccagcatgagtgtgacggtggccaccaccgttgcgagcggcgccaaggagaagaccacgaaggccacacgaactcaggtggcacgcaaaccgccgcccaccatcgacaacttctggccaaatatcgtgagcgaggtgcacagcatcggccaggtggatgccaagcaccaggtgctgccgctggcgcgcatcaagaaaatcatgaagctggacgagaacgccaagatgattgccggcgaggcgccgctactgtttgccaaagcctgcgagtacttcattcaggagctgactatgcacgcttgggtgcacaccgaggagagccggcggcgtacgctccagcgttcggacattgcccaggccatagccaactacgaccagttcgacttcctcatcgacattgtgccgcgcgaagagatcaaaccgtcgtcggcgcaaaagaccaaggatggcagtacatccagttcgagcggaatggcgggcgcagccagcagtgccgcctccacctccaacacagccacctccaatgcggccgcctccgtggcgggcaatgctaccgccacgggcaactttgtagccagtggttccaccgtacctgcgaccaccgctggtggcctcaagctggacaccacgggtgcaaccaatgccgccgaggtgctcggcttcagcactgtcaactcggacatcttctcagcgcaactgcagcagcaacaacaacagcagcaacagcacgccgcccagcagcagcagcaacaacagcagcagcaacatcaccaggcacatccacagcaggttcagattattcagcagggcgctggtggccaacagttgcaatactttatcgcactgccgagtcagcaggcggcgcagctcgtgcagcagccgcagcccgcgcagaatcatctacccatcaacattttgtcaacccaacaacccacccagcagttgatactgaccgccggtcccaatggtcagctgaccgcaacgccagcgccgcaaacgactgcccagcaacagacggcgctgctccagaatctcgcccagcagcaacagcagcaccagcaacatcagcagcagattcagctgctgcagcaagtggttacgcccacgggggagctgactaatgtgccgatcgccatcaatgccagtcatttgaatctcctgcagcgactacaaatgcaacagcagcagcagcagcaacaacagcagcagcaacagcagcagcagcaacaacaggtcatcataccaacccaactgctgacgacacagcaactgctccagctgggcggagcacccacagtggcccatcagcagcagcagcaacagcagcagcacgccaatctcacgcagcagagcaacgccagtgcggtggccagtggcacgccgatctttatcaactcgaccatgactggtgcccaggcggcggcgacgcaggcgcagcagcagcagtcggcgcagcagcaacaggcacaaacgatctccaccatgtccacggatcgcacattaaccggcggatttcggtaa

SEQ ID NO: 5637 - protein, 601 aa, DROSOPHILA
MYATNNGGTNKAPNSNATSMFDNTITVTPIKMELGQAYAKSQNSAAMQRRTPNAVVVTSSSTVSSAQQQQQQQGQQQQQTVPMASLVSNACTLVNPSMSVTVATTVASGAKEKTTKATRTQVARKPPPTIDNFWPNIVSEVHSIGQVDAKHQVLPLARIKKIMKLDENAKMIAGEAPLLFAKACEYFIQELTMHAWVHTEESRRRTLQRSDIAQAIANYDQFDFLIDIVPREEIKPSSAQKTKDGSTSSSSGMAGAASSAASTSNTATSNAAASVAGNATATGNFVASGSTVPATTAGGLKLDTTGATNAAEVLGFSTVNSDIFSAQLQQQQQQQQQHAAQQQQQQQQQQHHQAHPQQVQIIQQGAGGQQLQYFIALPSQQAAQLVQQPQPAQNHLPINILSTQQPTQQLILTAGPNGQLTATPAPQTTAQQQTALLQNLAQQQQQHQQHQQQIQLLQQVVTPTGELTNVPIAINASHLNLLQRLQMQQQQQQQQQQQQQQQQQQQVIIPTQLLTTQQLLQLGGAPTVAHQQQQQQQQHANLTQQSNASAVASGTPIFINSTMTGAQAAATQAQQQQSAQQQQAQTISTMSTDRTLTGGFR

SEQ ID NO: 5638 - DNA, 3580 bp, DROSOPHILA
gcagctggagcttcgacagttcgatttggatcaacgaatttggaagacggcgcaggttcaggaggcatcggaggaatgggttcgctgaccttcggaggctgacagatttctgcatcgttctctatgatcatggattccagactttctatcgaggattggctctgcttttccacatcctgatccgggtagcacatgtccagcttcgataccaatttctaccaaaaaccaggatagattggttaacttatgggctaaagatttcgatttaaggagcccaccttgcccggagcaccttgttgatagcctggtcgtggttctataacagatcgtaggaacatcaacgtcttgaagtgctcccatcgacaagccttctccgaatctcgatctcctccagactcctcgagcctcctctccaacttcttgagctctgcattgaattgattgcgcaggttgtgcaccttcttgccatagtcgtgtttcgttatttcaagcgaagcgcagatggattcgatggctttagccctgcaatccttgtttttatatagctcggaatagtggttccacaagcagtccgacgagcggtaaagttcgattagcttggcgatcttctcccgcgtccagatcgtctgcttcctcctctgtcttttggtcagttgcgtttcgcccagctcctcggatttatttggcatctcagcaaactaacaacaatatgtcaatatgcatcgaatcttattgcagtgcacatttgggatgggcgagtctgaactatcgaaagtaaacagcaacgcagtatttttttttagtactttttgaaaaaaaaaagaaacgatgaatagttttatgatctatcaaacaaaatgtaattccattgcgctttatattgatttcttaatgttaactacacatttagttttagatatttaactgtgctaaactaatagcaatcaataaatacaacattgaaatccgatatctccgtacacgcattcagtcgcatctcttggtcctatcgactagtcgataattctcatcgcaattaaatggatatacttcagtatataaataaaataaagtaaaataagcaaatccgctggaatatgcaagcgcgctagccgaaaacaattggaaaatgtgtgcgggacgccaggaccgactatagaccgttttccgagctggctatggtgacaagggaccacagaactgataaatcctaggccgacgcccactgaacacagtttcctgtacaggagtgtagttttggataaacgcaattttggtaattagggagcggtaggcgcgcagctggcagtaaagtacctccactctcgattccagacataccggatagggcgctagcgagccccaaacgtaagcacaatgtcacaagtaataccaaacacgcccacaccccaaatgctgacgacatcaacgcccatagaacccatgaaaccaccaccagcgtttcccacgatgagcggcgcaaacatacacgagcaggcgtccgatatgatactgcgggcctcgacgattttcgaggacgtcaagcacgacgaggcgaatgtggagaatgtgccccatcacggagttgagactgagcctgaggacgactcgcactacggcgggaacggcaactctaagatccgcataatgcccagtgtgaagctaatggccacgacgctcgcctccgatcccaagcgcaagttcgtctgcccgtatgacaactgtacaaagagctacggcaagagctcccacctgcggtcccacctcacctggcacacgggcatcaagcccttcgtctgcagcgagcccaagtgcggcaagggattcacgcgctccgatgagctcaaccggcacctccggacgcacaccggcgagaagcccttcgagtgcatccagtgcaccaagaagttttcccgcagcgaccacctcaccaagcacctagctacccacgaccgccagctaaagggcagcaccccgaagcgaacagtaccgagcagcagtggtggagtccggctcaagcccccgaagaagcagattcattcggagtcggactcgggcttccacttcatggccgccatggttggttgcggggagccgagcatgaagcaccaccaccagcagcagcagcataaccagcaccagcagcccgtgagcattatcgacatccaccacaagccgataaagattaagctggaacggccggagcacagcgacaagtaccagatcgtatctcctgaacaccagatggataaccatggccacaaccagagccagttgcccgatttccttaaccaggcgaagcccgaggtaaaatacgaaccgaccgaagaaattgtaaataccctctctcagctaccgccggcggacggacccggcacgtatgggatgccccagttcgttcaggatcggcctttctactgccggcagtgtgagaagcggttcaagcggcaggacgacctcaaccgacacatacgaacgcacaccggggagaagccctacgcctgtcagcagtgctgtcgccggtttgtgcggagcgaccacttgaaaaagcatcagcagacgcatttgaagatacgatagtttcatagttactccttactccttaagtcgctagccattggcatccgcatccaatcgatattggctaccacacgggcgtgtgtcgggtgacgcacacagtacaataaaattaaataaattcgcaatctaactatattcctatgcaagatcagcgccggctctcaaatctcaatttgtatgtatgtatgtaaataagtcgtatgcaatttaattttagctctaactgtttgtgtttgccggaacgtgaagacatacatctgtatttctgaaactcttgctgtttcttattttctggctactaagctccccgtatctattaatataatttattttagtaaaactgttatttatatttatgggctaattgatggggaactgatagttcatcaggatcaggactcgatccagtttgaaatttggaatatgattaataatggcctataagaatgaataatagatatatgtataatttctgataaatcaaagattcatcgactatcggttcggttgatagaatcgacttatcgataacagcattatcatcaccattggcgtttgattcagagtttcaagcaatgttttgcactgtttaaaataattacacacaagcgatgtgcgactttgacgctttgtgggcggatgtactgagaatctttccggttttgggtggagcggtaggtttattccttcggttcagtaatagggattggcgctagcactcagaaactcttacagaacgctgtatccaatgatccggttgaggagaatgtattccaaaatgttcgccagcacctgatggtgttgggcagcatagacaccttcgcggcggttgtggacctggaaatccagtcgactattcggaatgtcctggtgcccaagttctggaagcacatccacgacggcttggtctcgtctaaattgcagggctggattaacgaccaagctctggccatagaagcactgcccgataagaacggactgttcacccagttcatcgacg

SEQ ID NO: 5639 - DNA, 1580 bp, DROSOPHILA
ttggtcctatcgactagtcgataattctcatcgcaattaaatggatatacttcagtatataaataaaataaagtaaaataagcaaatccgctggaatatgcaagcgcgctagccgaaaacaattggaaaatgtgtgcgggacgccaggaccgactatagaccgttttccgagctggctatggtgacaagggaccacagaactgataaatcctaggccgacgcccactgaacacagtttcctgtacaggagtgtagttttggataaacgcaattttggtaattagggagcggtaggcgcgcagctggcagtaaagtacctccactctcgattccagacataccggatagggcgctagcgagccccaaacgtaagcacaatgtcacaagtaataccaaacacgcccacaccccaaatgctgacgacatcaacgcccatagaacccatgaaaccaccaccagcgtttcccacgatgagcggcgcaaacatacacgagcaggcgtccgatatgatactgcgggcctcgacgattttcgaggacgtcaagcacgacgaggcgaatgtggagaatgtgccccatcacggagttgagactgagcctgaggacgactcgcactacggcgggaacggcaactctaagatccgcataatgcccagtgtgaagctaatggccacgacgctcgcctccgatcccaagcgcaagttcgtctgcccgtatgacaactgtacaaagagctacggcaagagctcccacctgcggtcccacctcacctggcacacgggcatcaagcccttcgtctgcagcgagcccaagtgcggcaagggattcacgcgctccgatgagctcaaccggcacctccggacgcacaccggcgagaagcccttcgagtgcatccagtgcaccaagaagttttcccgcagcgaccacctcaccaagcacctagctacccacgaccgccagctaaagggcagcaccccgaagcgaacagtaccgagcagcagtggtggagtccggctcaagcccccgaagaagcagattcattcggagtcggactcgggcttccacttcatggccgccatggttggttgcggggagccgagcatgaagcaccaccaccagcagcagcagcataaccagcaccagcagcccgtgagcattatcgacatccaccacaagccgataaagattaagctggaacggccggagcacagcgacaagtaccagatcgtatctcctgaacaccagatggataaccatggccacaaccagagccagttgcccgatttccttaaccaggcgaagcccgaggtaaaatacgaaccgaccgaagaaattgtaaataccctctctcagctaccgccggcggacggacccggcacgtatgggatgccccagttcgttcaggatcggcctttctactgccggcagtgtgagaagcggttcaagcggcaggacgacctcaaccgacacatacgaacgcacaccggggagaagccctacgcctgtcagcagtgctgtcgccggtttgtgcggagcgaccacttgaaaaagcatcagcagacgcatttgaagatacgatag

SEQ ID NO: 5640 - protein, 400 aa, DROSOPHILA
MSQVIPNTPTPQMLTTSTPIEPMKPPPAFPTMSGANIHEQASDMILRASTIFEDVKHDEANVENVPHHGVETEPEDDSHYGGNGNSKIRIMPSVKLMATTLASDPKRKFVCPYDNCTKSYGKSSHLRSHLTWHTGIKPFVCSEPKCGKGFTRSDELNRHLRTHTGEKPFECIQCTKKFSRSDHLTKHLATHDRQLKGSTPKRTVPSSSGGVRLKPPKKQIHSESDSGFHFMAAMVGCGEPSMKHHHQQQQHNQHQQPVSIIDIHHKPIKIKLERPEHSDKYQIVSPEHQMDNHGHNQSQLPDFLNQAKPEVKYEPTEEIVNTLSQLPPADGPGTYGMPQFVQDRPFYCRQCEKRFKRQDDLNRHIRTHTGEKPYACQQCCRRFVRSDHLKKHQQTHLKIR

SEQ ID NO: 5641 - DNA, 5819 bp, DROSOPHILA
gggggcgggcaaaggctaaagcatgtcctacctccgcttgtcttcgccgcctatcagctggccttcaagtacaaggcgatcgccgagcaggatgagaactgggacaagaagtgtcagaaaatcgtgcaatactgccacagtaccatcagtgcgctggccaaagccgatctcgcagacctagccctgcgtctatacctgcaaggtgccctggtcattggggagatcggttatacgaatcacgaaacggtggcatacgaattcatgacccaggccttctccctctacgaagacgagatctccgactcaaaggcccagcttgcagccataacgctcatcatgtccacttttgaacaaatgtcctgctttggcgaggagaacgctgagccgcttaggacgaattgtgcgctggctgcttcaaaattgctgaaaaaaccggatcaatgtcgcggtgttgtggcctgtgcggcgcttttctggagtggaaagtaagttggatatgaaatcttgattgaaattttactgatataacttaattcgctaccaggcaaaacggcgaggagatgcgtgacgagaagcgaactttggactgcttaaagaagggtgctcgcatcgcttcgcagtgcttggataccggagtgcaagttcaattgtatgtggagctgctgaatcactatctgttttacttcgaacgcggcaactcgcttatcactgtggctatgctcaaccaggttactatagctcattgaaaattgaaaagtccatttaactaaatagaatttcaatattacagctaattgccaaggtgaatgaggagctgcccaacctggagcccagcgaggagaccaaacagatcgagagccattacaagaacacgctggcacacatccgcagtcgcatggaatccaatgactcgtcgctggaggtctcctttgcgggcataactctcaattagcccagcgcacccactttggataaccctgggaagcatccaagcgctactaaagccctgcaggaggatcagccaggcccgtttttatacagctagttatcaacttgctcgtagaccgtttagacttattcaaagctctgcgagagtattcaaattgcttgtgtgtgaaactaaattccatggttaggaaagttgtgggccttcgaccaacttttgatttgtcaatttgatttcgatcgtaatcgtaagtgcaaagtaaaaacattcttgattatttccccaatttatttagtatgatagctatgcgtatatttaccccagaggatttttaatttaccatatttaatctccaaaccttccctaaaaaataatgtgaaaatattgttaaacaaaatcttacataccattatcgaattggttcacgaatcgccacgcgctacgtataaatatgtattacaaataaagttaagaccaaattgttttcgcaaaacaatgcgcctgtatgtgtggcctggactacagtgaatcaaaactcgtcagcgataaacatgtaaagtaattcgtttattaaaaatatataagccgactaatttccatcggtctatcaatcaatcagttaacttagcttccatttacaatacacgatgagttcgcactcgtacatatcctacagactctcgccgatcgaatctagctccgcgtccttattcgtccttccatcaatcacatgcgctacaagggtgctggatgttcgtgtccttccggttcctctgattggtgtggcagtattcgggggatggagcggtgttgggtggcagtttcgtgttgcttcgagaccagttagtgggtgagagtggttagggacaggcctggtactgcgggcagttaacttggtgcgtatgcgcaacttaaagctaatatttttagtcactaggttctaagcataaacattacagatagaagcgcctaattcactttgagtgccatatagcagcaaatggaaaattttaaagcatgagataaatttgttttaatttctgcatagctcgagattgctcggtgcgaggcgtaggccctctgattccccttaagccgacttcacattgtagtagctgtagacgtagggccaggaggccagcacgtactcctcgatgccgcactcgttggagcctcgtaggatgcggaagtagccatgctcgccccaccaagatccccacgagttcgctgcgatctgtttggaaagatgagacaagatcaatgaaataaagggctgtggcaagcgcagtagtgaagtgatagcgacactcacccaatacttttcaccattgtgctcctctccccagcccaccaacttcaccgagtggaacccagttggcgcctttcggttggctgctgtctcgcggtacacaccgcctgagtaggcgaagaagtccctgttaacccgcatggtggcctgtacgggaccggagtggaagatctcggccataatgtcggcttcccggttcaagctgtaggccggacccaccgtgtagagggagtccctgtccacattgaccggcttttggcatccattggccctcagagagcgactgttgtggcggatcttgcaggtgtcgcggtgctgtgtgtacggatagcagttctcgtcgaccacgcccttcttgtgcaagtagcgccaggcggcgtccaagtggccaccctcgcagccctgctggcggcgtgtgcaggagaggatgttctgggcggacagctggacattctccttgcccttgctctggatggcgaagcgatcgctggccaccgaggtggtggacagcacccatgaggcaccgcaccagccctggtcgggcacctcggagatgtagctggaccacttgtccagtgcgttgaaggagctgggcaggccatcggtgggattctttagacgcgtcatcgccttcacgcggtacgtgggctccttggtgcccagacgcagctttagtccctcggagtacttgcgaccccaccactggtcatacttgcgggcagaccagcccagtctgtgaatcgagttcacgctgtgcacaatcgcgtcgtcggtgaggcacagatcctcgtcgcactgcacgctgccgccctccaggcagcggcactcgttgcagttgtcccacgtggtattgtacttgctgaagtagacgccgttgtgctcgcaggagatgattgggtccacctcgccgatgcagaaggagcggtagtcgggacagcagtcgctggagtcgtcccgatcgcagaactcatcgcagtagcatagagtgtctgtaagataaagttcgagttcaggtcatcattcaatatacatgacaaataaccaatttgattattgattttaagtgtaatattgtatacatactggagatgggcaccgagcagccgtcgtgccgatccttgcagcaggtgttctcccgtgcgcagtaaggacctgggaagtcccttttcagtgtgtgatcgaaaagggcgttggccccgcccattagcaggaccagaaggcccaccaggtggacgcacttgatggacatggctctttggacgacctctaatctgcaactgaatcggaatatgtgcggaatttataattttgcatatatcgcttatcgcttagatcaacagccagataaacatcttgcaatttgtcaacaattagcgtggcgaatacacgactacttcgcatatcgcgcatacgacccgtggaacgcagtcgaaaaattagtcaggcactgagaaacccgtccggtctgggtgggataattaattggtgtatctcttggatacgggcagttcctcatcagaaattcgctggccgcgcacagccaagcagttaacagttagctccaccaaatatattctgatgacgccagctggtttggcgatccgcggtctaaacaaaaacgtttctttttccccactttttgctggctccgttttggtctctttgattcggcagcgaattcaaatttgcgcacaccaatcgaaaaatccaacaaagtcactcctcgaagcgcccctttatttcattttgttgttttcgcgctttcaaatatttcttttccgctgataattctggaggtaaagacgaagattaaactcgtttatctttaagaatgagaatacgacgcgaacccaaagtttcataaataaatgcaaattgcaaatagatttttcctgtttcgcctgctggctaagcatttttgtcgagcgtcccaccgtctaatatatctggaaatcttctgattcacgagtgctgcttgccaaacaaaagtttcgaaggtgttcaaacatacaccccaccccacggtttaatatacgaatatacatatttttttttttttaatcgattgttcgctaatgctgaacccgtttttaatttagtgataattaatttgaaagttcgtgttgataattaatgacccagtcaattggcaataaagttttggcacgaatacgacgcgccgaaaagaatcaaattgaattgtagtttgagccgtgacgagggttctataattagaagcccagtaaacagcgggaataatcaactcctttgcagatgggccaagattgttgacacatttcgacaatgtttatgcccgatggagccacagatattctgaataccagccaataaattgaactccaaacaatcttttcgtttgctgacacagcagtctggtaaacaaaatgggtttcgggcaccgtttactcttccagttaccgtgcggaatactaacatttcgtaagtttgcacaattcaagtcaaatgcccgcactttgtggccgatttaatatactcgatttcgatttccttgtcgcgcggtgttcttgctccgatcgcggctgcttgctgactgaattcagttagaattatgggccaccacataaggttgctgctgctgctgctgcttctgttaatattgctgctggcagcgctgctctgccgcccgatctcgggacctataggctatatagcttatagcttatggtggcgtaggtggtctgcttggcagagcgaaagggagagaaaagagagagtgagagtgaggcagccgtcctgctgttactgcgtatacgttatttgtatctgatgggttaacagagcgcatcccaaggtttctcggtgggcaaaatgtttggccgtttttggcaaacgcaattggcacgggaatgggcggataattggtatgtttggtataacccacttttatgtacaaattcctcgccggatttttgtgcgcagttaatattagcttgtttttgtttgcacttatctggttccgcaattgataagatatataaatgtgtgataatttaacccaatttgagttcaaggcctttggacagtaatcaaataaatttaatttttttgccaattcagtgcgaaatttgcataccatctacattttgtgtcttatagatttcatatctcactttctgtcttttgggtttgcgatcatcgacaatgtgtctgccatttcacttaacttcgatctggagcttctgctctttgcatacgagtaattatcattaagagcacttgcagtgccatatagaccgcatcatctcagttaactgggcttcgtcatctagaggataatccaattacgacttacgccgacagcaaaacaaactatgccgtcaacctttatttacttttcgatgaatccctcttagccggaagtaaaatgaattgaatcaccaatagtaatgtaaatatttccctttcgattgggaacgatagagtgaatcataaatttcctcttaataaactaagaaagctggaaaaaataggaaagctaattaaaagcatgtctccaccgccgaatgggcaacacaaatcaga

SEQ ID NO: 5642 - DNA, 1979 bp, DROSOPHILA
cagccgcgatcggagcaagaacaccgcgcgacaaggaaatcgaaatcgagtatattaaatcggccacaaagtgcgggcatttgacttgaattgtgcaaacttacgaaatttgcagattagaggtcgtccaaagagccatgtccatcaagtgcgtccacctggtgggccttctggtcctgctaatgggcggggccaacgcccttttcgatcacacactgaaaagggacttcccaggtccttactgcgcacgggagaacacctgctgcaaggatcggcacgacggctgctcggtgcccatctccaacactctatgctactgcgatgagttctgcgatcgggacgactccagcgactgctgtcccgactaccgctccttctgcatcggcgaggtggacccaatcatctcctgcgagcacaacggcgtctacttcagcaagtacaataccacgtgggacaactgcaacgagtgccgctgcctggagggcggcagcgtgcagtgcgacgaggatctgtgcctcaccgacgacgcgattgtgcacagcgtgaactcgattcacagactgggctggtctgcccgcaagtatgaccagtggtggggtcgcaagtactccgagggactaaagctgcgtctgggcaccaaggagcccacgtaccgcgtgaaggcgatgacgcgtctaaagaatcccaccgatggcctgcccagctccttcaacgcactggacaagtggtccagctacatctccgaggtgcccgaccagggctggtgcggtgcctcatgggtgctgtccaccacctcggtggccagcgatcgcttcgccatccagagcaagggcaaggagaatgtccagctgtccgcccagaacatcctctcctgcacacgccgccagcagggctgcgagggtggccacttggacgccgcctggcgctacttgcacaagaagggcgtggtcgacgagaactgctatccgtacacacagcaccgcgacacctgcaagatccgccacaacagtcgctctctgagggccaatggatgccaaaagccggtcaatgtggacagggactccctctacacggtgggtccggcctacagcttgaaccgggaagccgacattatggccgagatcttccactccggtcccgtacaggccaccatgcgggttaacagggacttcttcgcctactcaggcggtgtgtaccgcgagacagcagccaaccgaaaggcgccaactgggttccactcggtgaagttggtgggctggggagaggagcacaatggtgaaaagtattgggtgagtatcgcagcgaactcgtggggatcttggtggggcgagcatggctacttccgcatcctacgaggctccaacgagtgcggcatcgaggagtacgtgctggcctcctggccctacgtctacagctactacaatgtgaaaccgatggaaattagtcggcttatatatttttaataaacgaattactttacatgtttatcgctgacgagttttgattcactgtagtccaggccacacatacaggcgcattgttttgcgaaaacaatttggtcttaactttatttgtaatacatatttatacgtagcgcgtggcgattcgtgaaccaattcgataatggtatgtaagattttgtttaacaatattttcacattattttttagggaaggtttggagattaaatatggtaaattaaaaatcctctggggtaaatatacgcatagctatcatactaaataaattggggaaataatcaagaatgtttttactttgcacttacgattacgatcgaaatcaaattgacaaatcaaaagttggtcgaaggcccacaactttcctaaccatggaatttagtttcacacacaagcaatttgaatactctcgcagagctttgaataagtctaaacggtctacgagcaagttgataactagctgtataaaaacgggcctggctgatcctcctgcagggcttt

SEQ ID NO: 5643 - protein, 441 aa, DROSOPHILA
MSIKCVHLVGLLVLLMGGANALFDHTLKRDFPGPYCARENTCCKDRHDGCSVPISNTLCYCDEFCDRDDSSDCCPDYRSFCIGEVDPIISCEHNGVYFSKYNTTWDNCNECRCLEGGSVQCDEDLCLTDDAIVHSVNSIHRLGWSARKYDQWWGRKYSEGLKLRLGTKEPTYRVKAMTRLKNPTDGLPSSFNALDKWSSYISEVPDQGWCGASWVLSTTSVASDRFAIQSKGKENVQLSAQNILSCTRRQQGCEGGHLDAAWRYLHKKGVVDENCYPYTQHRDTCKIRHNSRSLRANGCQKPVNVDRDSLYTVGPAYSLNREADIMAEIFHSGPVQATMRVNRDFFAYSGGVYRETAANRKAPTGFHSVKLVGWGEEHNGEKYWVSIAANSWGSWWGEHGYFRILRGSNECGIEEYVLASWPYVYSYYNVKPMEISRLIYF

SEQ ID NO: 5644 - DNA, 8573 bp, DROSOPHILA
ttccagattactgaaaaccgcactcacaccactaccatttcagtaccctcgtgtatcagcaacgaatccgtgtcgcacccacagcaatatcagataaccccggatctctagcccccatctctggcgacttatcagagcagttaacatggcgaccacacggcgtaggaaagatactgaaactacatatatcgcttgcgccccgcccccacttcaacccccttttggcggcttggaaattaagtttacaaaataaatgtaattagcggcacatacacatgcagaaggcgcccccggtttgagtgtgtgcgcctgcaatcgccggcaaattgtttttataatgcctatgcagcctgtgtgtgtgtttgtttttatggggggctgacgcacacacacaagcgcactccactcgcaactcacatttctctgtgaccacaaaagtaaatacagaactgccgcacgaacgtcttctccggagtgcaaacgcgatctgaatcgcgaacatgaaattcatagcggcccactagctctgccggcggctctgctgagaacccaccatcagtggtgttggtgtgggcgagagtggagcctcgctctctgctctctctctctctctttggccctctccgtagcggtgatgttatttcgtacgtttattcatagggttttggtacatgttaaaaatcgcaacatgattaggctctacgagtatgtggttacgcgaaattatatatatgtagttgtatatagcatgaagcatttaataccagctgcggctttgttggacttctctattcgcccggatccttgagcacgaggagtactgagtaaataccatggaagctacatatgtacgtgtgtgcctccaggatgtcttgatcgaagcggaaagaaagcactaacactaaagaacggattgggtgcgaatagagaagccattgcatgtgccactgcaacttctcatgggtcaatcacatccaacccaccaaggttttcatataatctagttgtccagtacgctgcgcttcagcgcctcctccaggtccgcgtcgaagctctccggcttggaatagtctgcagcaaacttgtccttgaccggctccttgctctgaaacttcttgtccacctgcccgttctgcttctccttgcccgtcgttccgaaggaggcgtttccgaagtcactcgagaagttgtgtgcctcgaagccatcgaacttggcgaagttggcgttggggcttgtcttgaattggtcctcgaaattgtcgttgaaggcgtcaaatgcctttgccctttgatcgttgggcctgaccacgccagtgggtactgatgagctctggatcacactgaagttgtcgttaaatgcatcaaaaaaggaattgttgagtttcgtattgccagtggttgtggccgtggttgcagccccagatccaccagtggttgccagcgtagctgcgaagtcgtcgaagtcagcgaatgcgtccagcgccgtctgcgagtcgtggctcggcttggagttggagtggtacgaagtgcctgagtggtgcgacggcgccggactcgagttcaagttgaaggcgtcgaactgctgcagcaggtcgttgtttagcggcgtggccgccttgggcttaatgctattattgttcacgatgttactcagagttttggcggctgatccaatctcatctgtgtaatagaaaactttattagataggaataggcccgagaatagcactatactcaccacccgagctaaagtcctccgcaaagttcctcttgtggtcagcacccttgccttctgacaactcctcctcgccctcttcggcaaaaggatccttgatgctaaatggatcttcgtaacggtaatccttgaaggggtcatccttgaagtcggttggccctgtaatgagactgggagtcggggccttccgagttccaatctctccaaatgcatcaaacacactgactaccgccttggtctccaatttcacatccgccgtcctctggttctgcagcggtgtattggaacgcgacagatgctggttattcaagctgggggcggtggtaatggtgacgctactggggaggtctgcccccgctcccgctaccgatcccgatcctgatgttgatagagaagccaatgccggggatggggctgctggcgtggataaagatgtctggagcagggtgtgtacggtggggacagtgatgggcgtgggattgggcgtgcttgccgcctgcttgtggatttggccgggatcgtcgaatagcgtgaagctgtctagcaatgacgatccactgacgaccggaatgggggctgggagcgtgggtgggagcggggacagtgcagtggccgagggcgagggtgcgcttggaatgtggtggagctgcgtatatgcgttgtgtcgggggggggaatagaagtgaatgaaacaaaaataaattaaaacgaattcaaattaagcgaaatcgaaaaaaaaaaacacaacaaaggggaaaccgaaatcaatcagggtcaacaaaagcgttaaagcagccacggaggattgagtggttcgtgtgagattgtgaccagcaccatgaggatattgggtttccccagcaagagaactccgacaggcgtacgttgaatgatgtcgaacatagatatctttattaataatgcaaaacgttgtgtcggttacatttctgtatcggttaggccgggcttctctaaaagttgctcttgcagtatgtatgtatgtggtatgcacggaatatgaattttcattaaatcaatgctcggaagcttcttagtttcggtgtgggtgttcgtacgtctgtggctatgattatcgaggtctggcaaatatatatatatatatatgtatacaagtagtttatatagtagagcggagaccaaccccctttcaagccgaactgctggttacaccgcgacgcactccagaccgggaacactgagcggctctagaagctgagtggaaaagggtttcggtaaatagtaataggcagtccggatccggaggcggaccgcccgtaaaagtcgaactttcgcggcagttacataaatatctgtatgtttgtaaaatgcttgtaatacatgtatattatggatgtataattgctttaaactttagtattcgcatatgcaaaaacaacaaacaacttgcaataaattccttacagaggaggtctctaccctcaaaacctaatcgcgataatacactggccttgaaacgattcgaggggaatccataatattaataatagtaggtaagtacaatactgcacagcaaagggagtcgaacacttggaactctggggattccttccgcctgctgtctgttttaatttgagactacatctataacacgatacgtaacgcttgaaattggtttgagttcggttgagtttcgattgaattgatttagtacatttagctaattaggcatgaacgataatgctgcgtcctctagacattataccatgcaccgtgactgatatatatacgttaatatgctgctgcaaatagctttgtacgctcaaattgatttgttcgttatgctgctagaggaggccattcattaactgagtatgtgtgttagtactggtatatgtcgtatatagaatgggttatcttaaggtgttcactgaaagtagagaattgcagagatgaaagaccagacggttagttcaatacggcaccaagcgagaagaccatggcatgacaaagctactgggatgtacgaggttgggtggtgaggtgatctgggtggaatgtgttccgtcagtaccttctactaagggtaaacaaaaggtgctacaaatccaaaacaagtcagaaatcataatactcaagggctacgttcttggagtgtgcatcaaagtgttttatttctacaaaactcaggaagtgttagtgataataaacttaaaaccagggtttagcgcggcaataaatgccagcaacataaaaaaactcagggattcgggtgcggggcgcatgcattaccaccgatcccagcggacactgaattgtggggtaccaaccttattgtcgaagtcgtcaaagtcggcaaatcctcctccgccgccgcttccgaaaccacccgtgggctggcaaacataataatttagggattctccattgtacagcataaaggagtcgtcttacctgggctgctcgtggtggcgctggtcgtgggggcggcaccttggacttctttggcggcaatgctggactaggagactccggtctgggcggcggtccggacttctgggcgttgggactgagcacctgaccctggccggttggagcatgcaaggcagcaaacggatcactgccgaagtcgtccttgccgggctgtataagattggaaaagtgattcgggtacaaataagagtgttctattctaaatcctacctcaggagtaatggcgttgctcttgttggctgcaaaggcatccgagccgaatggatcccgctgggtctgaccaaaggctgagcccgctccgctctgaccaaaggcatcgaagccactatcgaagcctgagctcatgttgaagctgtcatcaaagcctgtagaaatagccggcttgttgaccggctgaccggagaagggatcgctgccaaagccgttggtagcttgattggcggcgccgctgttgttctcctcaaagggatcatccttgggcagttgcacttcctttgtcagggtcttgcgcgcctcatcaaagtccggctctatcttcaactggtattcggatacgagttccgcgttttggttctccatggcagcccgacaaatgagcaaagcgtcggtcatctgtcgctgcgtctccagcagctgtgtgaccattgatcggaccttcagacgacttatgttaatctctgatcacttgattgtatcatgtgtagtcttaccgagctgatttgcagttgggttgcctgcaggtggttggttagcttggataactcccgattgttgctgtcgtactccttttgcaacgaagcttcttcgtccttgagcttctgcagctccgagcgttttgcgtttaattcgccctcctgctcgttgatggtcacctcctgcatgtggcactggtcgcgaatcttggtcacctgcaagcaagcgggtttctcgatcaataattaggctattttataaaaatatttcggacaacagatggtcaaaaacataaattacatggccgagaacaaaacacaaaagaaatatatacagaaatcatgagaaactgaaacaaacctgctcgttggtgcgcgatatgtcaagacttacgttggccagcacggccgtattgtggctaaccttatgcgatcgtaattgtaagtgtaagtgcattcaccggtttagtatggatttagccaatagttaacaaagtggtgggggaacatgataaagaaaggaaaccaaagattgaatttaaatataaaattaaacgtaagcccaggagcaaggaaaaggcaagcagtggcgcaggggccaaaagcacccaaagaatcatgcaaataactacttgagcctgcaggtcatccagtcgcttctgggcctctcctcgctggttctccagctgcttcagtgtggcggtaagagtatccagttcactctgtgggtgaagattctgaattattaaattcgacttggaaactagttacagaagactcgcctgcaaactgcgcacttcgccgtttttgatgcgcacatccgcttccttttgggcaatctccgtctccagaacccgccgctcacgggccaactcctcaatctccttggagatcatttccagctccgggtttgagtaagtgggcttgacctcctgcggctgcagatcgactccagccacagtggcgcgcattgagggcggcaccatattggcgttgaggacatgtggcgggtccacaccgcgctgctttcgctccacgaaccacatggccagtgcaaactgctccacagtcagcttaccggactgattggtgtcacaaagagccctaaaaggaaaggcatcgttatagatattttggcaatatctatatacgaaataactaccagatgtctgctaggcttcgctgcggaatacccgacttgatgaaaatatccttcacctcaaggccggagaccaggccgtccttatccagatccgattgccggaagatctcctcgaaccgctttaggtccgctggggtgacaacccagtcggcattcgccatcaccggagccccaatcggtatcaatggatccgtctgaatcagcggctgagagctgactgctcccaccgggggaatgcgcgtcatggggggcacagccaccgggagcggcggaatagccgccggcggggctatatccttgggaaaatttgctacaaatccgccgtccccaaatccttccccactgggagcacgtggcatagcagcacccgctggcggtggtggcatggctggcttcggtggcggacctgctcctccgggctttcgcagctcgggcggcagaacgctaggaatggtgcgcttctgcagcgtctggtagaccaggtgcatggcaaccacgaattcgtgcatatccaggttgccgtccttgtcctggtcggccaggtcccatatagttcccagtatgctcatgggcagcttggagtccatgagcacgcctttaaccttgttgcccggcagcattccattactgggatgcagggactcgaagagctgctcgtacttgagccgatcgatcaccccgatggaccagtctccgtttgccactccgccgctagcaacgggaacagtctgaatacgcgacggcatcgtttttggtagttcaccctggcgattggggcgacattaatgtaatatatctcgtcttgcccatttcgggcgaagttgcgattactcaccaacttgggcgggttggcaatgtccaggtagatgttggccatgctggccacctgtcccgcctgcgacagggacaccagcttaagggctacaaaaaagcccggcttgtccagaaagcccttgccgctcggatcagacaggtcccagatcctgcttagcacaacgtcgctaaggcccgacttcttgagaaacttggccgcagtcatggcctcgattgcccctgtgcctttggggtcaatctgcaaaaatcgatagagggtgggtgtggatacggatgctcaacattggccgccatcctggtaacagtgcggcttggaggcgtggtgcgcttaccagtttgtagtaggcctcgtagacgcctatgtgcttcccgcacaccctcgcaaagtccacattcatggtgtggagtctactggcaattggttccgactagcagtgcaaaaacgcgtaagcgtaagcccgttatcacaaaatcgattttttcttcccaaggggcggataagctgctcttagtcagccgtcggcggagtcctgctgcctagcacctgtgcacctgcgacgagacacttgctggagccacttacaggtgagcttggcgcattgcggcccctaatttagctactctcgaattttaaaaagcctaaatttgcttttttgctcggtggatagtgtgaccgttcggataacgattaaaaataccgtacggctgatgattaagtataccactaggtaaaatgcgttaaaataccacataaattaataccgttaaattaacgaacattattatttttttaaagtataattttttaaaattcatttgtctatatttattcctttaacactaaacgtgaagaaaattgtgtactttgaaacggacggtgcagaacagcagtagcttataaaaatgcaatgtttccgttaccctaacggaacagataatgtttaaagtttaaatttttaattctaattcttctttaatgagtatatttcctgtatggatctctaacttaagctagaacttagagcagacgaaggcggcaattgggggccccgcactggcagtacaacaccttgccgggcaccacgcccacctcgtaattgtagttccaagtcagctcggtgccggagcggatgtgcgcggccgagaagaaggcaacccaggggaaacgcaggtcgtgagtatccacgaacacgttctgcacgaagagattggggctgcacgagtgctgcgggagaagaagagaatcagccacacggcaaaataacaaaaaacttccaactcacgttgaaatagcgtccaaggttgcccgttgtcttggcgtccatgatgtagggcgcctcgtccttgccgaaaagcctccgcaccgagttctcccgcaccgtctcgtccagatcagcatttgggttaaagttgatcaccgcacgctcctgcgagtccaactcgctgctctgagtggagctgttctgcgtggagccgcttctggaagagcgcttgattttgcgctggtagtgatagtttggccggaagtcgtcatcgtcctcggcatcgggtcccccgttgtcctcctcggcgtccgggtccgagtggtccacctccgactcgtatccctcttttaactgttcagcgacctctatgtaatctaagtccgcgaaatactcgtcgccggcgtcctgtccgc

SEQ ID NO: 5645 - DNA, 3807 bp, DROSOPHILA
aacggtcacactatccaccgagcaaaaaagcaaatttaggctttttaaaattcgagagtagctaaattaggggccgcaatgcgccaagctcacctgtaagtggctccagcaagtgtctcgtcgcaggtgcacaggtgctaggcagcaggactccgccgacggctgactaagagcagcttatccgccccttgggaagaaaaaatcgattttgtgataacgggcttacgcttacgcgtttttgcactgctagtcggaaccaattgccagtagactccacaccatgaatgtggactttgcgagggtgtgcgggaagcacataggcgtctacgaggcctactacaaactgattgaccccaaaggcacaggggcaatcgaggccatgactgcggccaagtttctcaagaagtcgggccttagcgacgttgtgctaagcaggatctgggacctgtctgatccgagcggcaagggctttctggacaagccgggcttttttgtagcccttaagctggtgtccctgtcgcaggcgggacaggtggccagcatggccaacatctacctggacattgccaacccgcccaagttgggtgaactaccaaaaacgatgccgtcgcgtattcagactgttcccgttgctagcggcggagtggcaaacggagactggtccatcggggtgatcgatcggctcaagtacgagcagctcttcgagtccctgcatcccagtaatggaatgctgccgggcaacaaggttaaaggcgtgctcatggactccaagctgcccatgagcatactgggaactatatgggacctggccgaccaggacaaggacggcaacctggatatgcacgaattcgtggttgccatgcacctggtctaccagacgctgcagaagcgcaccattcctagcgttctgccgcccgagctgcgaaagcccggaggagcaggtccgccaccgaagccagccatgccaccaccgccagcgggtgctgctatgccacgtgctcccagtggggaaggatttggggacggcggatttgtagcaaattttcccaaggatatagccccgccggcggctattccgccgctcccggtggctgtgccccccatgacgcgcattcccccggtgggagcagtcagctctcagccgctgattcagacggatccattgataccgattggggctccggtgatggcgaatgccgactgggttgtcaccccagcggacctaaagcggttcgaggagatcttccggcaatcggatctggataaggacggcctggtctccggccttgaggtgaaggatattttcatcaagtcgggtattccgcagcgaagcctagcagacatctgggctctttgtgacaccaatcagtccggtaagctgactgtggagcagtttgcactggccatgtggttcgtggagcgaaagcagcgcggtgtggacccgccacatgtcctcaacgccaatatggtgccgccctcaatgcgcgccactgtggctggagtcgatctgcagccgcaggaggtcaagcccacttactcaaacccggagctggaaatgatctccaaggagattgaggagttggcccgtgagcggcgggttctggagacggagattgcccaaaaggaagcggatgtgcgcatcaaaaacggcgaaagtgaactggatactcttaccgccacactgaagcagctggagaaccagcgaggagaggcccagaagcgactggatgacctgcaggctcaagttagccacaatacggccgtgctggccaacgtaagtcttgacatatcgcgcaccaacgagcaggtgaccaagattcgcgaccagtgccacatgcaggaggtgaccatcaacgagcaggagggcgaattaaacgcaaaacgctcggagctgcagaagctcaaggacgaagaagcttcgttgcaaaaggagtacgacagcaacaatcgggagttatccaagctaaccaaccacctgcaggcaacccaactgcaaatcagctcggtccgatcaatggtcacacagctgctggagacgcagcgacagatgaccgacgctttgctcatttgtcgggctgccatggagaaccaaaacgcggaactcgtatccgaataccagttgaagatagagccggactttgatgaggcgcgcaagaccctgacaaaggaagtgcaactgcccaaggatgatccctttgaggagaacaacagcggcgccgccaatcaagctaccaacggctttggcagcgatcccttctccgcccggcaaggacgacttcggcagtgatccgtttgctgccttgcatgctccaaccggccagggtcaggtgctcagtcccaacgcccagaagtccggaccgccgcccagaccggagtctcctagtccagcattgccgccaaagaagtccaaggtgccgcccccacgaccagcgccaccacgagcagcccagcccacgggtggtttcggaagcggcggcggaggaggatttgccgactttgacgacttcgacaataaggttggtaccccacaattcagtgtccgctgggatcggtgcccccattccggtcgtcagtggatcgtcattgctagacagcttcacgctattcgacgatcccggccaaatccacaagcaggcggcaagcacgcccaatcccacgcccatcactgtccccaccgtacacaccctgctccagacatctttatccacgccagcagccccatccccggcattggcttctctatcaacatcaggatcgggatcggtagcgggagcgggggcagacctccccagtagcgtcaccattaccaccgcccccagcttgaataaccagcatctgtcgcgttccaatacaccgctgcagaaccagaggacggcggatgtgaaattggagaccaaggcggtagtcagtgtgtttgatgcatttggagagattggaactcggaaggccccgactcccagtctcattacagggccaaccgacttcaaggatgaccccttcaaggattaccgttacgaagatccatttagcatcaaggatccttttgccgaagagggcgaggaggagttgtcagaaggcaagggtgctgaccacaagaggaactttgcggaggactttagctcgggtgatgagattggatcagccgccaaaactctgagtaacatcgtgaacaataatagcattaagcccaaggcggccacgccgctaaacaacgacctgctgcagcagttcgacgccttcaacttgaactcgagtccggcgccgtcgcaccactcaggcacttcgtaccactccaactccaagccgagccacgactcgcagacggcgctggacgcattcgctgacttcgacgacttcgcagctacgctggcaaccactggtggatctggggctgcaaccacggccacaaccactggcaatacgaaactcaacaattccttttttgatgcatttaacgacaacttcagtgtgatccagagctcatcagtacccactggcgtggtcaggcccaacgatcaaagggcaaaggcatttgacgccttcaacgacaatttcgaggaccaattcaagacaagccccaacgccaacttcgccaagttcgatggcttcgaggcacacaacttctcgagtgacttcggaaacgcctccttcggaacgacgggcaaggagaagcagaacgggcaggtggacaagaagtttcagagcaaggagccggtcaaggacaagtttgctgcagactattccaagccggagagcttcgacgcggacctggaggaggcgctgaagcgcagcgtactggacaactag

SEQ ID NO: 5646 - protein, 668 aa, DROSOPHILA
MNVDFARVCGKHIGVYEAYYKLIDPKGTGAIEAMTAAKFLKKSGLSDVVLSRIWDLSDPSGKGFLDKPGFFVALKLVSLSQAGQVASMANIYLDIANPPKLGELPKTMPSRIQTVPVASGGVANGDWSIGVIDRLKYEQLFESLHPSNGMLPGNKVKGVLMDSKLPMSILGTIWDLADQDKDGNLDMHEFVVAMHLVYQTLQKRTIPSVLPPELRKPGGAGPPPKPAMPPPPAGAAMPRAPSGEGFGDGGFVANFPKDIAPPAAIPPLPVAVPPMTRIPPVGAVSSQPLIQTDPLIPIGAPVMANADWVVTPADLKRFEEIFRQSDLDKDGLVSGLEVKDIFIKSGIPQRSLADIWALCDTNQSGKLTVEQFALAMWFVERKQRGVDPPHVLNANMVPPSMRATVAGVDLQPQEVKPTYSNPELEMISKEIEELARERRVLETEIAQKEADVRIKNGESELDTLTATLKQLENQRGEAQKRLDDLQAQVSHNTAVLANVSLDISRTNEQVTKIRDQCHMQEVTINEQEGELNAKRSELQKLKDEEASLQKEYDSNNRELSKLTNHLQATQLQISSVRSMVTQLLETQRQMTDALLICRAAMENQNAELVSEYQLKIEPDFDEARKTLTKEVQLPKDDPFEENNSGAANQATNGFGSDPFSARQGRLRQ

SEQ ID NO: 5647 - DNA, 2917 bp, DROSOPHILA
caaggatggacctctggccttgtaccgcggcgtgacgcccatcatgctccgagccttcccagccaacgctgcctgcttcttcggcattgagttggctaacaaattctttaacatcgtagctccaaatttctagtttgtctaataaagaaagtgcctcgctaaaatgtttttacaacttgaagaaaactagctatatttgtgtgcccaattcaaaactttagagcttaactaaatctaaacgaaatactgcggcttgcgcatggtgatgccgtggtccgcgagtgccggcaccaggtcctccatggccagcgtgtacttcctgtccttggggtttttcttgtccttgctggaactgtgtccgctggaatgctggatgttcgtggtgcgcgtcttgcagtgctgcagtgcgtcgttggcaatatccgagatgaacttctgcgcggacaccgagacgaggcgcactatcttggggtccactgtgcagaagccagcctgcagatttaatccaatattagaaatgctacaaagaatagtttccggtatatagctaccgttttcaagatgtgcatggtgagggcgtctggtatggtgggcgagtagtcctccagctgctttatcagctcatccatctccgattcctccgtcgtcagaggaacctcctccacgtccggttgctcctcgtcggaatgcagttcggactgcattagtggcgagtctatatcctcctcctcggtgtccgtggccgatgttacggattctgcgggtgtaacactgatgtcctcgccatcggaagccattgttttccactttttaattgtttatttccagaaatttgttatctcagctggcgtgtatatgtgtgtatgtttatattgtaatcgatgacgaaccgtaagaagaatcgatagcactggcagcaacaatacggaataattcgataactagcatctcccatcactacgtctgcactgtgtttaatttgtattgtacacttttttcgatggtgggctccaatttcggaattatttaccacaacagcgccggtggcgcaagcagtcatggacaatcctcgggaggaggtggcggtggagatcgggataggaccacaccatcttcgcatctcagcgacttcatgtcgcagctggaagattatactccattgattccggatgcggtcacctcgcactatctcaacatgggaggctttcagtcggacgacaagcgcatcgttcggctgatcagcctagccgcccagaagtacatgtccgacatcatcgacgatgcactgcagcactccaaggcgcgcacccatatgcaaaccaccaatacaccgggaggatcgaaggccaaggaccgcaagttcaccttgaccatggaggatctgcagccggctttggccgactacggtattaatgttaggaaagtggactatagtcagtagataatggcatgcattgtagtagtttttttctcattaaaaataatgtatcttaagatctgtgttttgggaatttattgcgaaagaccttgggatcttaatgcattctcattctttcaagaaatccatttagtaaagggatttaagtccatagaatgcgtaactaatcgagcatatacaaggtaatttgtttttttttataatgttatacaaaagctattaactaggcggttaatactaggagtatgtttactggcatgttatgaattttctgaaactgcgagatgttcctccagccacccggaaggccaggactcccgtaagtatggtgaccaagtagtttatcagcagagtggtcgtgtaaagctcattggcattgagcagagttatcagggagacgaacaggtggctgaaaaccacatagcctatgtggatatagttgtttgtgtcgaatgcgttgaagaaaataacgctccagaaggtgtgcagcaggataatcgacaacgcctgggcagccgaggtgacgaagaatagctcagttccgcccttcaagcccatggtgccgggaccactctaaaaaccaaaagatctgtcattgctcggagcacattacgcacctttgctgcactcaccatatcagccagcacattgaccagtgcaaacatcccggatataatgccgaatcccaagccggagacataggccaggatgtgcttgttgtccgtcactcgcgtgtcctccgccacggcgtgcaatccctgctccgtgctgcgcagtatccggtagatgatgtaccggaaggcttcctggaagcacaccgagaagaccacgccaaatgccaggaactccttcagcggaatcagggcataccacagggaagagatcagcagggaaagcagccagaagaatgccgccgcaatcagaatgatgatccgcactggatcattggcgatggtgaagacgaacaaggcgaagggcggtccgaaggcgatgaaggtgcagccaaagaactcgggcaacgtcatcttgtctttgtattattactgttttttcttttgctctgtgggtgttttggtttacttgggaagaggaagcagagactcgcatagagttgccagacttttgcagtgccattcgggctgccacactgtacgttttagtagtgtacataccctacacagatgagtacattagcttgtgcgtcacgcaaaagtatacaaattatttaaactgcgagaattatccaaacaaatgggaatcttttaatcttaacttaattgcctaattacctatcctttgctttaatttgtatataaaaaccaaatccagcctttaaaagtaatatctactgaactacagaaagggtatattaggaccgcttttgaagatacatttttgaaagctgccagactgcagagcactaatgtcttcataccctactatataaagtctgttaattcaaaaataacttgttgctaa

SEQ ID NO: 5648 - DNA, 917 bp, DROSOPHILA
atggtgggctccaatttcggaattatttaccacaacagcgccggtggcgcaagcagtcatggacaatcctcgggaggaggtggcggtggagatcgggataggaccacaccatcttcgcatctcagcgacttcatgtcgcagctggaagattatactccattgattccggatgcggtcacctcgcactatctcaacatgggaggctttcagtcggacgacaagcgcatcgttcggctgatcagcctagccgcccagaagtacatgtccgacatcatcgacgatgcactgcagcactccaaggcgcgcacccatatgcaaaccaccaatacaccgggaggatcgaaggccaaggaccgcaagttcaccttgaccatggaggatctgcagccggctttggccgactacggtattaatgttaggaaagtggactatagtcagtagataatggcatgcattgtagtagtttttttctcattaaaaataatgtatcttaagatctgtgttttgggaatttattgcgaaagaccttgggatcttaatgcattctcattctttcaagaaatccatttagtaaagggatttaagtccatagaatgcgtaactaatcgagcatatacaaggtaatttgtttttttttataatgttatacaaaagctattaactaggcggttaatactaggagtatgtttactggcatgttatgaattttctgaaactgcgagatgttcctccagccacccggaaggccaggactcccgtaagtatggtgaccaagtagtttatcagcagagtggtcgtgtaaagctcattggcattgagcagagttatcagggagacgaacaggtggctgaaaaccacatagcctatgtggatatagttgtttgtgtcgaatgcgttgaagaaaataacgctccaga

SEQ ID NO: 5649 - protein, 146 aa, DROSOPHILA
MVGSNFGIIYHNSAGGASSHGQSSGGGGGGDRDRTTPSSHLSDFMSQLEDYTPLIPDAVTSHYLNMGGFQSDDKRIVRLISLAAQKYMSDIIDDALQHSKARTHMQTTNTPGGSKAKDRKFTLTMEDLQPALADYGINVRKVDYSQ

SEQ ID NO: 5650 - DNA, 3015 bp, DROSOPHILA
ttgcgcccactacgatgcctgtctgagtgggcggtacaagtttgttgactttccgcgtgacctgtgcaattgtcagcgagagaaccgcagggcactggcctgcgatcagcggttgaccttgggccacaaggacgatccctactggatgcgcgaacggtgccagacgaagtgcgagggactacagaagctgagggcgttgagcgagcggagtgcgcgctgcaatcgggccaagtgcgacgtggtggtgagtgggaatcggggtcaccatcggggtcaccatcggtgtcacctcttaccaattatgtgcacccagattattgagttatctgcaaccaagctatacatattttcatttctggttgcactttttgcactttcatcctgcaccctgcacactcacattcacattcacctgcaaccgtagagcgagaaaaccgtgaagatgacgccgaaggcaatcaagacgacgggtgtggccaccgaaaagcggcgtcgaaagcgcaccataaccgccttttccaaaggacgaacggcattgcatcccaatgagctgaccaagccgattccatcgtcggagaaaccggcggcgactgtcgccactcccaaggacaagccgaaggacaagccaaaggacaaggaggcgggcaagaaggataagacgaaggataagggcaaggagaaagagcgcaaggcggcgaagggccattagtaaaacttcattattttgttcaaccgaaattcaaatcaaattcattgtaaccgcaggtttaaaatacattttaaagggcagcacgattgcactcaacacaaatcatatagcatatatattttataactaaacccaggttaaaccatctgttacatatgtacataaatcatacatcattatcatctccatctccatctccatcttatctcatcccattccattctgcaccaccaacgcattgcaacaagtgaacgaacctgaaagccacctactccattactccatccaatcatgtcgcaaacagctctcccggaactgagctacacgccgggcgacctaacagagccgcagttccggctgccctcgcaccaggagctcctcgaccagaaacgcaacagcacggacagcgtgccacttggtcgtctcaccttggacacgcgcgacacgcagcccatcaagtacagggagcagctgggctcggcggccggtcgtcaatttccggcattggcagcggcccaaaatcgctatacggatcacttggagcgcagcagcgagttgagctttgcgtgcctggagccgggcaaggatctaatctcattgccgacggtgggtatacgaagctttgatctcgatcccgtatccgtatccgaacccgatttgatcaagaagatgccgctgcactcgatcacggagaagcccaacgagcggtgtccatcgccagtggtgccggcatatgccaatttcgagctggccaaacggatgcaccaggacaatttggaccaccagccgctgcccgattgcgtcgccgatttggcattccggcgagcgcaaatatccggcggacatgctggcctggccctggaaatcgatcccattgccacgggcgtgggtgtgaaaacgcacaatgctggtccgacgcactgcaccaagatgaaggtctttcgtccgaagaccggcggtggcatcgtgccacgtgccctcggcaatggcgatgcctttcgaggtgttggctccgctccggccaaaaagatgggacccatggatttggccatttgttgggacttcaagccggcgaatccatcggatgagccgcgcctggccaggcacatagatggctccaatgactccgctggaccggctgtcttcacctgcgtgaaaacgcctcgcgaggaacagtcctcggacttgggccgatcggctggcgtcttcaccagcacgcttggtgaggccgatttcttcgacaaggacatcctgaggaagcgaacggattttggcggtgcccgtgtggatcgcgaggatccgtgcgcctgcgactactcgccaccggccagacaaagagcacgcagtgtctcccgcgattccagtgcatcgcattgcaggcgaggatcgggcatcggcggtccaactggcggtgtgagtttcggcaatttggcggagctacccggtcgcgggatgcccgatcgtctagccaagcagtatcaatcgtcacccctgctgggcgacaaagcctaccaggctttgagggagaaatatttgggtccggactctggacaggattgcagggccatggattgccggccaacgggtggtccaccatgcaagcgagacgttctcctccggcgtccagctcgacgtctctgccacaaggtggctccagctcccagatgctgtcccccatcgttcggcggacatggtcatcaccatggacatggacacggacacggacattgcttgaccagtaaggcggcatttcgcgccggagtgcccaagcataatgcctccggtgatttcgtgggaatagaaccgggctgcggaggaggtggcggtggcggtggtagggttctggtggtgccacgcccccggcagccgtatgccaaaaagaattacgacatcgaaaccctggtgccgcccttccaaagccaagcgggcggagcgggtcagggcggctatccagagcactggcgattggccagtgtctatcagcacgcctacaagcccatcgaccagcggcggcgaccccttctccaaactgtctacaagtaggtgtgctccaggatggcagtccgctcaagagagaaatgtccggacaaacgggataatgaataattgaaagctatacaaaaatgtccataagctaagcaagtatattaacttatcaacttaaatgtttgctagtcattagcattaaattgatgcatctgtacacacaaattagtcggaaaaatcggtccaagaataggaaatcacacgtttatgtataaaaaaacaaatgttatatatattagaaagcatatatatatatatat

SEQ ID NO: 5651 - DNA, 1752 bp, DROSOPHILA
atgtcgcaaacagctctcccggaactgagctacacgccgggcgacctaacagagccgcagttccggctgccctcgcaccaggagctcctcgaccagaaacgcaacagcacggacagcgtgccacttggtcgtctcaccttggacacgcgcgacacgcagcccatcaagtacagggagcagctgggctcggcggccggtcgtcaatttccggcattggcagcggcccaaaatcgctatacggatcacttggagcgcagcagcgagttgagctttgcgtgcctggagccgggcaaggatctaatctcattgccgacggtgggtatacgaagctttgatctcgatcccgtatccgtatccgaacccgatttgatcaagaagatgccgctgcactcgatcacggagaagcccaacgagcggtgtccatcgccagtggtgccggcatatgccaatttcgagctggccaaacggatgcaccaggacaatttggaccaccagccgctgcccgattgcgtcgccgatttggcattccggcgagcgcaaatatccggcggacatgctggcctggccctggaaatcgatcccattgccacgggcgtgggtgtgaaaacgcacaatgctggtccgacgcactgcaccaagatgaaggtctttcgtccgaagaccggcggtggcatcgtgccacgtgccctcggcaatggcgatgcctttcgaggtgttggctccgctccggccaaaaagatgggacccatggatttggccatttgttgggacttcaagccggcgaatccatcggatgagccgcgcctggccaggcacatagatggctccaatgactccgctggaccggctgtcttcacctgcgtgaaaacgcctcgcgaggaacagtcctcggacttgggccgatcggctggcgtcttcaccagcacgcttggtgaggccgatttcttcgacaaggacatcctgaggaagcgaacggattttggcggtgcccgtgtggatcgcgaggatccgtgcgcctgcgactactcgccaccggccagacaaagagcacgcagtgtctcccgcgattccagtgcatcgcattgcaggcgaggatcgggcatcggcggtccaactggcggtgtgagtttcggcaatttggcggagctacccggtcgcgggatgcccgatcgtctagccaagcagtatcaatcgtcacccctgctgggcgacaaagcctaccaggctttgagggagaaatatttgggtccggactctggacaggattgcagggccatggattgccggccaacgggtggtccaccatgcaagcgagacgttctcctccggcgtccagctcgacgtctctgccacaaggtggctccagctcccagatgctgtcccccatcgttcggcggacatggtcatcaccatggacatggacacggacacggacattgcttgaccagtaaggcggcatttcgcgccggagtgcccaagcataatgcctccggtgatttcgtgggaatagaaccgggctgcggaggaggtggcggtggcggtggtagggttctggtggtgccacgcccccggcagccgtatgccaaaaagaattacgacatcgaaaccctggtgccgcccttccaaagccaagcgggcggagcgggtcagggcggctatccagagcactggcgattggccagtgtctatcagcacgcctacaagcccatcgaccagcggcggcgaccccttctccaaactgtctacaagtag

SEQ ID NO: 5652 - protein, 457 aa, DROSOPHILA
MPLHSITEKPNERCPSPVVPAYANFELAKRMHQDNLDHQPLPDCVADLAFRRAQISGGHAGLALEIDPIATGVGVKTHNAGPTHCTKMKVFRPKTGGGIVPRALGNGDAFRGVGSAPAKKMGPMDLAICWDFKPANPSDEPRLARHIDGSNDSAGPAVFTCVKTPREEQSSDLGRSAGVFTSTLGEADFFDKDILRKRTDFGGARVDREDPCACDYSPPARQRARSVSRDSSASHCRRGSGIGGPTGGVSFGNLAELPGRGMPDRLAKQYQSSPLLGDKAYQALREKYLGPDSGQDCRAMDCRPTGGPPCKRDVLLRRPARRLCHKVAPAPRCCPPSFGGHGHHHGHGHGHGHCLTSKAAFRAGVPKHNASGDFVGIEPGCGGGGGGGGRVLVVPRPRQPYAKKNYDIETLVPPFQSQAGGAGQGGYPEHWRLASVYQHAYKPIDQRRRPLLQTVYK

SEQ ID NO: 5653 - DNA, 13019 bp, DROSOPHILA
tgtttgtatagtaaatgcacatctcccaacagacaagttgatggcgcacctttcccattacataatttgcaccattgccagtcacaatagcaacttcagaccaacttgcaacttgtgactttgtgcgatgctattatttaatttgcatctaggtgtatcgatggcaatttggtcaaaaactttgacaaaatcgctcagaggtaatcacgattactattcgaataaatatttcggccgtggtcgcgcaattgatgcatccacaaatcgagaaataccaacaaattacaaaaattaagatgatttgagaacgaaaagggcctttcataagcatcatattgctttagcataagatttcctatttaatatataaattaatcatttgattaatacataaagatttgattgattacgtgacttaatttcttgcagacaaaaaaaggatttcataaagttatttttgtgtggttattattatcttaaactacatatttaagaactacaaacctttaaatatgaatttcacttttagtattgtattgtatcattccccaccaggcaggctgcagttacatttcatttcggtcaatccaccagagccggcatcatctgcagtgtagtagatcagcgggtcaacgtcccgtgggctcgctcagtttaagctacaatgcagtgcaaagaaaacgtgtttgctgcctccatgaacctataatacttttggcatgtgtgaccacttctccccctagtccacaattttgttcaagctagggtttagtcagcaagacaaaagcaatcagtgaattaatcaagagacgtgggttcggcgggcaaactttcagcgatttccgagctcttacgtcaatatactatagctgtcatagattaatatagctgtaagctcaaaagtcgcatatcctgaccaaggtttaaaaacattgatcgcatccatccccctatatatcaatgttttttacgaaaaagtgactgacttgttgtacactcttttgtttatttaataattatgagtagtaacgataatcgttagctattatataatacgttatgtttaatgtgatgctctctggttacattgcattgcgttctttatgagttgtcctaagttaattgtataagttataaactcttatctttctcttaattttttattcagttggttagacatagcgaatgttgcacaagtttaccatatatgtaaagtcccacctacaagtaacgcttataatgtttacacctcggcatacgtttgttacaattttatagctaataaaatttagatttatattattttagagcaaaaaaaaactcacaaaaaatagtaggaattagggttttacgagtagttaaagatatttatatatgcaaagtctaaagtcctttcctggtggaaagcactcttaactatacatgcgatgactagatggtttatatttgggtagacgggaccatggggttcctattgcttctgtctccgttagcaacacctttcaggtacttggaaaacattttttttgtggggcaaaaggaaccctaagttatagacgggtagtcagtcaggagagctacgatgcccagaaaacatggcacgtcaatcgcttaatccaggcgaaatcatgccttctatgggctccagctattgttccataataatcgtgtcttcggactttacgttgccggaattaatggcctccatagccttgcttagcagagtggcatcctttaagctgaccacctggaccagctgcggctcttggccaggacctccttggatcatcatctggtgcattccaggcgacatggtgatggtctccagctggtcgccattctccacctttcaggagataaaaaaatggtcagctagttagtacaagagcaaatttatagcatttctttacagatcaaggggtcctcgaaaattctccagttttcctatctggttaaaagaaaagaacataaagtataaaattataagataaaatgtataatagcaaaatatacttacataaactcaatataaaatgaggacaagcaaaaaatgtatattctgagaccaacaataattaaaaataaaaattaatttgaagttaaattgttggctttatttagcatttcagtttacaaaatgtacaagcaaatattttaaggtaaaattatattaaaatcacaacaatcgcttttttttaaataaaatttgttgctttttcattctccctcttttgcaattgacttggcttgattaaattaaaatttgggctaaaacaattcaaattgcgataatgcgatatgaaaatcaaacatgtaaacacaataataacggtaaaatcaatattgatttcattgaaacacaagaacaataaagaaaatagtaatagatcaacataaaataaaatttggatccactttcaggagaatatattaaatatccctccacatatatagcacatttatatctcgtaaactcatttctccgcgtttgtgcattttttatgcgaatgactacattaaaagattacatggtggctaaaaaagtggtatggagcgagaactcacggggttacaggtacgtctaactgtaggctggctgatccctgttttttttaatacctacaggctaaaactatcgtaattgtacaacttaaatttgttaatatttggtttgattcgcgctcttagtaagtttacgtgcataaatatatgtactccacactttaacaactaaacaaatggctaaaactatattatgttttgtagttctggaaactaggaacaactttagtttttaatttagaattgatttttggtttaaattttcaaaaaaatttttggttttctattcccggcactaaattcaatttgtatagttagtaactgagggatttcctttggctataactatttagattttttggcattcacaatgtgcgcgtctaagtttaaatggcaagtgcattttttcattttttttatttttctatttgaggaaagccgtaattgactagattcgagataatatgaattattaaatgggaaactctaccccaagtgctccagtttaatggccggcagttgaagctgcacgttggttaaactggcactgtccacacaacggatggaagaggaagtaccggaggagtgggcattttcattagcatttagctgggatttgcttcttgaagaggaattgggtctcccacgcttctgaaccattacatcatctcccccactaaccccggtggaccttttcccggtggatctcttgttggccacctgcggaatgctgggagtggccaagactatgggcatctttacactattattgttatttgctagggtgcaattattgttgttgttgagccctaaactgctggaggtggttgtggctagatagtaacgttcgccaggagtgacctgatgcccaatcaccccaccactgcgccggcttaggactgacgatcccgctgagatcagcgaatagcactgaacgccgccatttcccaaagaggatgaggaactggcggcggtactggtggagcgattgatacttgtatctacctgcatcggcgcgaggcacactgttccatcgctgttcgtctggatctgctgcacgttggccattaccgactggtacatagagacgggaactgagatcacattgctcaccgaaacgggatatcctaaaaaatgcgagttcggtaagtgcgtatagcaacgataaaggtgtcgtgcactcgaagtacacaacgacaataaataccttggccatcctccgttgtaatatatatttgcccatcctgtgtctcggtgagatctacggtcatgttctcatgaccatttacatcagtgagactctgaacggtttgaatggtagcaccgccttcaccttggtggagctgaaaaagaagttgcaagtaaggactcgaatgcgtttgtagtaatcgctaaatgtacttaccgtggcaacaccttgaacctgggcagttgtaccatccggcagtgtgataattggattatttgggtctacctggattagcgatacggtaccatcggcgttctgtgagaggaccgtttgcgtggtgtactgtgtattaaagttaattacagtagttattaacttattaaaggttcatatgtctaagccaaaacgccgtaattgagtttaagtataaaaaaaaactactgaaaggcaattttagcaagcagtactaataactcttaaaataaaaatgtttgattctgtgtttttagagtgacggaagtcgtatttacatgtgggtgtgttttttcagtttgtggcggatgcaaataatgatggaaataaccaataactcgataacaatcagctgcaacagaacacaagcagacgaaacaaaaaatcaggtaatattaggttgacttaaataaaataagaggaaaatcgggaccaacaaaattaagcattaacgaagagtaatatcaataaaaacgcaatactgagccaaacatcaatcagttaatgcaagtttcaggaaaagggagtggggcttgtaaggtatgcacaaaagtttcaaatctgctattatgtagatacataaaaacccttagtttcaatttagttagaattggcttggttaatttaaaacgttgtatctgtatgcaattaaaataagattactaatttttttataatctgcgttacgtcaattcgtctaatgaaacctaatctcaacatactttgtcatagaaaccatttaaccattacagtaagcgtttaaagctacatagatatttaaataaaaggtatcttgctatcctaatgtgcatagtctgacaaatcccgaccctagtcccggctcggttgggaagcacaacagcaatttaaagggcatttcatccggattagtacgaacatcaacatcgctgagcgtaattggctcgatgcagacttgagcattggcgatctgctgggcagtgaccgtctggttagcactcgactgggagtgagcctgggactgcgaatgcgcgtgagcctgtgccgcacttacggcggcggctgtcgtctgaaccgctgtggcggtcgccgttccactggcagtggtcaactggattgtttgcggctgtcctccggccactggctgaatatgaacagcgttgggcaagtgcgtctggtggtgctgatggtgctgctgattctgagccggcgcctggcaaatctcaatctttgtagaggcgggcagcgtagccgtcgtggtcacatgctggttattggtactctggatgattgtcggagcaggagtgttgctttgggccgtgtgggtggtgatcactgttccagcactattgattttcacaacattcacctgctgcggttgctgtgatgatgattcgatgtggattggttgatggattagtaatacgatatatgccggttgcggataaataatggacatgacttatcacaggggagtcgcattcgactactgcaaattatgttcgtgtaaaatagggtagcctaaccatttaacatttatttaaaacccaaaaatgtgaaaacactttaggttaaataaaagtgttttttttttttgtatttaacccaacacggttatatccgagaacataaataaaagctgaaaccataaccttttaatggaacctgtgctatacttacattgctgttgcccgtcggcggcgtcattgtcgtcaccgtgtggatggtaggaggatttgaaagctccatgtcctcgtcttcgtcgcccgattgcgaaatcaacgcgttaaccttatcctcgtcatcggcaaaggtgggcagcagatcctcccttccatggtacttgtagcagttgatcacaatcttgcgtagagcatgtgtccagctgatctgaagagggagactcatacagttaataggattcaaaggagatcgggggcggctgttggaacacccaccccacccaccttctgtttgtcatcctctgaacgggcatccatcctcacattggcccagggtagctcctttggccaccagggcggtctggtagactccctgccccatcctggcttccctcgtcccgtagaatacttgagcatcagcggaataaaggctcttagctgcgcttgggtcatcttttctacgggagtgggaataccatcgattaccaagccaggaagttcgaagagcgatggatcatcttggggcggagggggagcttgctgggccagtgcattgtccagttcatccattacaatgttttttaggttgcgcaacacatcttccaggggtttggctccaaaaaccttatagcttgtgttgggtttacccggtgttgccaccaaaactaccgcttgtttgcccactctgcccgtaaactcatagataatagctctcagcttgcgcaacaatcgattttgttgcctttttctaaccgagggattcgtttcgaaacaatggggtctctttcgctttttagaactcgctattgctgccgctgctgccacgcctactggtcctgcggccgctagttggtgggccacatcatcattcactggcatggaacccagatctccctcgtataaactgccatcactgctgattagatcctcgtcgtcatcgtcggagcccaagctctggatatcctcttccagcatttcgatcttgtaggtggttccgttgctctgggaagtgttgccggcactttgcagctggccgccgctggttgctgttattgtagtcacgttgaggccgcttcccaaagtgctgctcccggcagaagttcctcctgtacctccgttagccccattcgaggagtgactacccgaggaggtggtggtgacaaccacatttccagtcgaactcctttggctgcccgccggcgccacgactagccgatagcttgtggtggccagtttggcggtggggattcccttttgaacctttctgcttccgatcctcttctttcctcaagccttactcactggattgagaacggtcttactcgcatgcacagtgtgataaaactgttcggaaaaacaaagccgggaatgtcttaagagagtgttaaggtatttaatacggtaaattatgcaaggcatacagcgaaaagaacggtgtggtcgaaatgtaaaattactcagtatgcacctatttttcaaacccaagaccatagtagctttcacagggttgattagaatacagatcaacaatgtttatacatgttactcatagattaaaaagaggtatacaacacaacaatttgtccacgctcgttcgttgtttgtttgcttaatagtgaagaagcagaagtagcagagctgcgcaacaccccaaatcagaataattcgacaacaaacgcagcggcaacaatacatgtccgtttgggcgtataaacgtcaatatctcacgaactataaaagctagaaggttgagattcagcatatagattctggacacaaagacgcagcgcaagttgaccaatgttgccacgcccaaaagtgggttgatattttttcacatttttattagtcttataaatttctatccatttgttaaaaaagctttttgccacacccactctgacgccctaaaaccgcccaaaactgcaacgatcacatttttgaaaaattgttagatatttttttataattttattagttgtataaatttgtatcgatttggaaaaactttttgccacgccctaaagccgccgaaccggtcacgctcacaccttcgagcaatttttaaattttttcgttcgcattcgcattaactgagtaacgggtatctgatagtcggggaactcgactatagcattttctcttgttttttcgtatgtttaagtacctaagtactatcctaagatcgtattggttttgtttgaaagttaagaaacggcgggacttgggtacttgtactatttgcaaataaatataaagatacactaagcataaggtctatatgacacaggcaggccaccctaagaaattggaaacaatcaggacgattttgactcggactcttatttcttctatggtagctttgtttataatttctaatattggtattctggaattgtattttctatacaaaatttctatttatttgaatatcccttcttctttaatattacttttttattcattgttaccagtcactaatcttgttctttaattttttcattctcccagtttttaggtgtatttttcactgcgcagaatccccaagcatatgctcccgctcaggtttgtaatctaaatcttctatctcttcaagtatatcgttctcgttcgcttttttggggaccgttgcacgtgcgcactgttatagagctcgaaaattggttgctgcttgggttgaacagtaaccataaaaaatgttcgtttatttttttgcttgcctcaggtattttagattgatgtgttgttgagggcaatgcaatcgggaatttgttttggttgatttggcaactattttttaggtagtttctctagttaattttctgttcaattttggttatttttatatcctaagtcaactcttaacttttggcacacactttttgtagtacaaaaaataaaatgagtaatttttggaacgagataagggccgctaacgaaccgcacaacactgcttttagtcgctctctgtgctcaagttctatttgcgtttgctcagaaactcaaaatccaacgacggcaacgcggcggcagaaagagagggtgctagctgatagcaagagaaggcactatctggcagaaaagagaaagaacgacaaaccaccccatggagtgattccgacgtcgacgcagtaaaaaatcaatacggcgcccatgcgtcaatattgctgcttgaaatgggtatatggaattctcgccgtctttctctgtccaggggctttattaaaaataccactttatttatgtgttatgaatgttattacttgaatgttcttataacttcggttaaacgtgcactactgtgtctccattaaagctcccttactttaaaccagaagagctcagatatatgagctgttatcaacacccctaataggaatgtataaggagagattcgggctccgaaaaaaccaaccccttaaatcccacacctttcaccgcactgaatacacacgcaaactcgcccagctcgaggtgcacctcacgatgaaactatcttatgcagtgtttttatttattttccttggatcttttttaaactaccacgcatgcactactcgaactacccaatcacccccgcgaaacaatgcagtgggaacaccaccaactcccacgtccttataggggatgtgagcacgacccacttgcgcgtgccacacatatatcgagaaaagtggcccagcaaaagtgagcacacttctaaaccttgattgtaatcaaaataggcatctgatgatgagagaaaggggaaaagagtagagagagtatatgttcaccccctaagacacatacatatatacattcttatccggattctgaaaaaggtgggtgatgaaattgtgtgaaggaacctaaagtattgccaaattaaaaagctctgcgtttgttggatgtagtcttcaggttttctttctaattatagaagtaggccattttagagtcctttaagatttaaggcctacacagtgatgcccacaggttgcagtaagcgcaactaaactttgtgtcggaagttagcaacactgtaaagaaggcatttgcgatgtatactattcttgatcagtgtcaacaccacaggcgacaaagccacgtccgtctatacgtgtctacgaaaattattctcttagttttaatgttatatgcttgcaccttttccaagagtattctttgtcttgcacatggtatattattcggtacggaataataaaaaaaaaaataatttaaaaaagtgtagcatcgttgttttaacatctgtacatatatatacataagtatatatatatatatatacatatatacacttcaatatatttcggttgtaattgcatcgagaagtcgaaaagtcacagggaaattgaggaaaaagaatcctagtttgtttttatatttcgcacaaagcgtatactcgtaaaagccgtttttgacatcataatttcggtttcaatttgatcaaaatattagaaaagaaattatactcttgttgtatccgatcataaattcttcttattcggtgttttctcaatttactatttaatgtaagcgtatgtgtgctttcgcgttttatatgtattcttaaggcaatttttagtattcgtgaatatttcattatttttgaatatttaaattctttaaccccagcttccgtaaactccaaaaagttactgccgtttacatcgaagtatcgtttattctatctatacatatataggaaaattaaaaataccttaagacacttttttataattttaagcatgcaagactaacagccgcaataattaccaaattatgataagacaatttgttatgttctgcaaagaattgaccccaccgtgtttttttactttccctttcccacaatcgaattttcttggtactgctgtttctctctctccctctcttaatttcccaccatactcttttttctgtgctggacagcacagctctacaaaaatgaaatgataacagcgaaaatacaaacgagaggcaagttacgcatgcgaaggttgtcgcggcagtggagtcggcgcaaagaccaccactgttcatagcaatgcagtgacagaaatatacatatgtatgtacatatacaaccaacagtaagagttcgtaggagtttatagtcggggaaacaggaaaataccagcaaaaatgtaatcttcttgttatgtctaaatttttatatttgtttgagctattaaatgttcttgactatcttaaactcatctcgagtagaaactatttttgttaggcatgtgtttaaatcggccataaaataaataaaatactcttattccttagatttaaaagatgtaacaaatataatctgtaattgtaggctggccgttgccctgttccaattggaactgtacttttatagcccaccccaatacaacctataacagtggcgtccttcactattggaactggaaaaacccaatgaaggttgctgtgagctagccatcccgctctgtttatccatgtgtgtatctacaaatttttcgtctctagggggtggtttgggtgtttttcgcaaccccaaaaacgtcagaatcacacagacacagatgcatcaaaaacacgcataccttccaatgcaaatgggaaatgcgtgtgctgtcgtgcacacaattggaagtgatacctgtttggcgtttctattctacaaccctactttacacatcatccttcctatcggagtttcctgtctttgttttaacttttagctgaggcgcatggttaagttacggacactcgcagttggattttcatttacggcgccgatgtaacggtaacacaagctaaatacaccagcacacatatatgataacctaatacacacacacaagccagcaagaaccgttagctcagaaactccgaaacttttgggcattcacttatgccactacaaatctctatatacacatataaattatagactgtcacagtggaaaatcggaaaatttgttgacccctaccactagtttacacccacatacgcacctgtgtatttttgttgtttttccagctcctttatgataacacacatacacactcacaaagaaaaaaaaggcgcacgcacacgaacgcgccgccgctattgtgcattggtgtgtttgcccctgcgccgaaaattttctttggcgtttatttattatcacactgcacatgcgaatattccgtgcattttacatttgcgcactgccgtttctaggttgtagctccaaaatttcccgctcgcaaagtttcgctgttttccctcacgatgcttttccgttagcttagttttcagctgcctgtcccagcacttttccccaagtttcgacgcaattttgcgatttaatttagccgaggaatggtatttagtacatgacaaatatcgatatacagcacgcgtgattttttcagacgtcgataatgtacacgcaatacatatcgcagtcgaaggaaagcggtcactctaaaatgcataggagaaacgaggattggcggtcccactaattgtgctatttaagtttaaattcaagtccccctagcggacttatattagttgaaaaattgattgtatatttttgagtaagcatataataatccataaatataataatataataataatttttgatataagaaatttaagttttctggtgccaaaaagattttagtctttctatgcagggaaaatttgttccctgggcttgccacgtcctctattacactcacatatttataatagtttcatatttatttagtttgttattttttagaagagtttttaaatttctctctagcactccaccatctccgtatctgataagagacagtttattagtagctttttttaaaggtttatattatgaacgctacaaagaatatacaacatttgatccacgaattaatcagatgtagttattaatgtaacaaaacttttaggataccccaaaataatggtaaattttaaacagtcgaaaaatttattattcgggagtcgaactgcaattacacgtaagcccttcacaaggcagctagcaatatttaaaaaggagtaagctagccaggccaaatgaaaaactgacatacaatcaacttcgtatttcacacgcgggaaatttaacaaaaaataaaaaacaaaaaaatagtttagggatatgaaatcctgaaggattggtaaactagaacgaccgaagacgactaactgcttgccaccaaaaatgttgggtttttatgtccgtcgtcggcactcacacaataaaattcattattaggatgtatatagtgataaaaggaattgtttttttttaacacagattgcccgtatgtaaaaaccaaagaattcatattatataaaaagaaaccac

SEQ ID NO: 5654 - DNA, 3790 bp, DROSOPHILA
cattcctcggctaaattaaatcgcaaaattgcgtcgaaacttggggaaaagtgctgggacaggcagctgaaaactaagctaacggaaaagcatcgtgagggaaaacagcgaaactttgcgagcgggaaattttggagctacaacctagaaacggcagtgcgcaaatgtaaaatgcacggaatattcgcatgtgcagtgtgataataaataaacgccaaagaaaattttcggcgcaggggcaaacacaccaatgcacaatagcggcggcgcgttcgtgtgcgtgcgccttttttttctttgtgagtgtgtatgtgtgttatcataaaggagctggaaaaacaacaaaaatacacagttttatcacactgtgcatgcgagtaagaccgttctcaatccagtgagtaaggcttgaggaaagaagaggatcggaagcagaaaggttcaaaagggaatccccaccgccaaactggccaccacaagctatcggctagtcgtggcgccggcgggcagccaaaggagttcgactggaaatgtggttgtcaccaccacctcctcgggtagtcactcctcgaatggggctaacggaggtacaggaggaacttctgccgggagcagcactttgggaagcggcctcaacgtgactacaataacagcaaccagcggcggccagctgcaaagtgccggcaacacttcccagagcaacggaaccacctacaagatcgaaatgctggaagaggatatccagagcttgggctccgacgatgacgacgaggatctaatcagcagtgatggcagtttatacgagggagatctgggttccatgccagtgaatgatgatgtggcccaccaactagcggccgcaggaccagtaggcgtggcagcagcggcagcaatagcgagttctaaaaagcgaaagagaccccattgtttcgaaacgaatccctcggttagaaaaaggcaacaaaatcgattgttgcgcaagctgagagctattatctatgagtttacgggcagagtgggcaaacaagcggtagttttggtggcaacaccgggtaaacccaacacaagctataaggtttttggagccaaacccctggaagatgtgttgcgcaacctaaaaaacattgtaatggatgaactggacaatgcactggcccagcaagctccccctccgccccaagatgatccatcgctcttcgaacttcctggcttggtaatcgatggtattcccactcccgtagaaaagatgacccaagcgcagctaagagcctttattccgctgatgctcaagtattctacgggacgagggaagccaggatggggcagggagtctaccagaccgccctggtggccaaaggagctaccctgggccaatgtgaggatggatgcccgttcagaggatgacaaacagaagatcagctggacacatgctctacgcaagattgtgatcaactgctacaagtaccatggaagggaggatctgctgcccacctttgccgatgacgaggataaggttaacgcgttgatttcgcaatcgggcgacgaagacgaggacatggagctttcaaatcctcctaccatccacacggtgacgacaatgacgccgccgacgggcaacagcaatcaaccgcagcaggtgaatgttgtgaaaatcaatagtgctggaacagtgatcaccacccacacggcccaaagcaacactcctgctccgacaatcatccagagtaccaataaccagcatgtgaccacgacggctacgctgcccgcctctacaaagattgagatttgccaggcgccggctcagaatcagcagcaccatcagcaccaccagacgcacttgcccaacgctgttcatattcagccagtggccggaggacagccgcaaacaatccagttgaccactgccagtggaacggcgaccgccacagcggttcagacgacagccgccgccgtaagtgcggcacaggctcacgcgcattcgcagtcccaggctcactcccagtcgagtgctaaccagacggtcactgcccagcagatcgccaatgctcaagtctgcatcgagccaattacgctcagcgatgttgattacaccacgcaaacggtcctctcacagaacgccgatggtaccgtatcgctaatccaggtagacccaaataatccaattatcacactgccggatggtacaactgcccaggttcaaggtgttgccacgctccaccaaggtgaaggcggtgctaccattcaaaccgttcagagtctcactgatgtaaatggtcatgagaacatgaccgtagatctcaccgagacacaggatgggcaaatatatattacaacggaggatggccaaggatatcccgtttcggtgagcaatgtgatctcagttcccgtctctatgtaccagtcggtaatggccaacgtgcagcagatccagacgaacagcgatggaacagtgtgcctcgcgccgatgcaggtagatacaagtatcaatcgctccaccagtaccgccgccagttcctcatcctctttgggaaatggcggcgttcagtgctattcgctgatctcagcgggatcgtcagtcctaagccggcgcagtggtggggtgattgggcatcaggtcactcctggcgaacgttactatctagccacaaccacctccagcagtttagggctcaacaacaacaataattgcaccctagcaaataacaataatagtgtaaagatgcccatagtcttggccactcccagcattccgcaggtggccaacaagagatccaccgggaaaaggtccaccggggttagtgggggagatgatgtaatggttcagaagcgtgggagacccaattcctcttcaagaagcaaatcccagctaaatgctaatgaaaatgcccactcctccggtacttcctcttccatccgttgtgtggacagtgccagtttaaccaacgtggagaatggcgaccagctggagaccatcaccatgtcgcctggaatgcaccagatgatgatccaaggaggtcctggccaagagccgcagctggtccaggtggtcagcttaaaggatgccactctgctaagcaaggctatggaggccattaattccggcaacgtaaagtccgaagacacgattattatggaacaatagctggagcccatagaaggcatgatttcgcctggattaagcgattgacgtgccatgttttctgggcatcgtagctctcctgactgactacccgtctataacttagggttccttttgccccacaaaaaaaatgttttccaagtacctgaaaggtgttgctaacggagacagaagcaataggaaccccatggtcccgtctacccaaatataaaccatctagtcatcgcatgtatagttaagagtgctttccaccaggaaaggactttagactttgcatatataaatatctttaactactcgtaaaaccctaattcctactattttttgtgagtttttttttgctctaaaataatataaatctaaattttattagctataaaattgtaacaaacgtatgccgaggtgtaaacattataagcgttacttgtaggtgggactttacatatatggtaaacttgtgcaacattcgctatgtctaaccaactgaataaaaaattaagagaaagataagagtttataacttatacaattaacttaggacaactcataaagaacgcaatgcaatgtaaccagagagcatcacattaaacataacgtattatataatagctaacgattatcgttactactcataattattaaataaacaaa

SEQ ID NO: 5655 - protein, 805 aa, DROSOPHILA
MLEEDIQSLGSDDDDEDLISSDGSLYEGDLGSMPVNDDVAHQLAAAGPVGVAAAAAIASSKKRKRPHCFETNPSVRKRQQNRLLRKLRAIIYEFTGRVGKQAVVLVATPGKPNTSYKVFGAKPLEDVLRNLKNIVMDELDNALAQQAPPPPQDDPSLFELPGLVIDGIPTPVEKMTQAQLRAFIPLMLKYSTGRGKPGWGRESTRPPWWPKELPWANVRMDARSEDDKQKISWTHALRKIVINCYKYHGREDLLPTFADDEDKVNALISQSGDEDEDMELSNPPTIHTVTTMTPPTGNSNQPQQVNVVKINSAGTVITTHTAQSNTPAPTIIQSTNNQHVTTTATLPASTKIEICQAPAQNQQHHQHHQTHLPNAVHIQPVAGGQPQTIQLTTASGTATATAVQTTAAAVSAAQAHAHSQSQAHSQSSANQTVTAQQIANAQVCIEPITLSDVDYTTQTVLSQNADGTVSLIQVDPNNPIITLPDGTTAQVQGVATLHQGEGGATIQTVQSLTDVNGHENMTVDLTETQDGQIYITTEDGQGYPVSVSNVISVPVSMYQSVMANVQQIQTNSDGTVCLAPMQVDTSINRSTSTAASSSSSLGNGGVQCYSLISAGSSVLSRRSGGVIGHQVTPGERYYLATTTSSSLGLNNNNNCTLANNNNSVKMPIVLATPSIPQVANKRSTGKRSTGVSGGDDVMVQKRGRPNSSSRSKSQLNANENAHSSGTSSSIRCVDSASLTNVENGDQLETITMSPGMHQMMIQGGPGQEPQLVQVVSLKDATLLSKAMEAINSGNVKSEDTIIMEQ

SEQ ID NO: 5656 - DNA, 7108 bp, DROSOPHILA
tatatgtatgtatgtgcaaggcatatatgcataattacatacagcgcagtacatggggctgcataagaaacaagtacaacaaaatcacaaatacacaaatgtacaacaaaataaaaacgtaaaatcttttgcgtagtttattcgctcgcgtcgcgctcgtttcttcacttactccactccagccgtcaatttcgattccacttccaatccaaacccaactcgcattcgtatctcatcgcttcggtttcgttgcgctgcgccgagagtttcgttttcagtgcttcttcagttcacagttcagttcagttcagttcggtgtggattcagttggattcgaatcgatgtttagtgtagattggccaggacacggagaacaaataagtccctcatcgcgcggcgtgcaaaaccatccgaactaactaagtctagccaagtctagtagctagaaactagaaacaagaaagctacatacatatgtgcgtaaaccgtggatgccacagagctgagatacatttaaccaagcgatctcgcttattgtcgagtgataacactaagattgggcagaaacattcggaaccagctggagttcaaacattatcaaaacatttgtgtttcaaaatcaacacacttaaagcaaacaaacacagtcgaaagcgcgagtgctgcagtattagtggtgaccacacacagatacacacatgcacacgaccatatcgttacatacgtgtgtaactctctgcacataaatgcgagccaatctatttaattcagtttcagtgcatttataaattaataaaatttaccaagtgcgagagtgagggagcgacacgcacacctatgcacgctcattacacggacgaggcgaacgtgagtcttggaatattgcaaacaacaccaacaacaacaagaacaacaacaaaaccaaaagcgaaacagcaaaaaataaataaataacgaggaaccagtttcaccttgaggagcaatacctagtgcacactcacactcgcactcgcattcacacaaatgaaacagcccgatcttactcttactgcgagtacggacacatagtgcacatatagtgcatatagtgcacagcacagagcacagagtagacatagtgaccaccacataatttcgtgataaagccacagagaatcggagcgctccgccttatcggcaacccactgccactggtccggctactatgctccagcggggatcgggacatcatcgctgggatagagacacagtggacaccagaactgggatgcagttgcagcggccccaaacgcattgaaagatgatagctaagcccaaccaggccaccaccgaaccaccattaagcttgcgccccggaacagtgccaacggttccagcaaccaccccagccagaccagcgaccatcaccatccagcgaaggcatccagccccgaaagcggattccacaccccacactttgccaccgttctcgccttcgccttcgccagcgtcgtcgccttcgccagcgccagcgcaaacgcctggagcacaaaaaacacaaagccaggcagctattactcatccagcggctgtggcttcgccttccgcgcctgttgctgcagctgcaccgaagacccccaagaccccggaaccccggagtacccacacccacactcacactcacagccagcacttcagcccccctccacgcgaatccgaaatggacggcgaaagatctccgagccacagcggccatgaaatgacactgagcatggacggcatcgattccagcctggtgttcggatctgcacgggttcctgtcaactccagcaccccgtactcggatgcgactcgagtgagtaacactgtctacactgagggaaattgggatcaagtaggaggtaggactgtataacccttattatatttcggtcttcgacaccattttccctaaggtacatatttctgtccaggctggcaggaatgtgttgttggttgatttggtcatctatccatccgattagaagatccgctctatcatccctcgcccgagggaactaccagatatacatacgaacccagctgtctgtcagcgaggcgaacgtatttgatattcggcagggagaccacttatagagcacatacaaatacttcgccaaccggaaaggtcaacaaaagtttgactgataagattcggtcagattagattcaagttccttgcgattattttctttgtttacaaataccagcaggcacaacaattatagcagattagcaatcgaattgtagctcaattggagtcttaatatgatgaaatagccaggattgatagatggtatcttcgggtgcactggcccatcgagtgctgatgagtcgcgaccatggatggatacatagatgcatagatccatagatatattgatacatagatacacggattcattcgtagagcgcgtggcagtgcagtttttgtccccgtgcatttcatttacggggcggttgtactcgcttttcgcttccccgatgactcacagtatttgtcgagcttgcatatatgtatgtatgtatgaatggatgtgttgtagcctgtaaatatgtatatgtgtatctggtggatatgttggtcgggcggatagtacgtctatatttcgtgagcagtacgtctgtatgctggctgatatgctttcgtcggaacagcagttccctatggcgatctacccatgaattcgtcatcttgtttaccgtccacctgcgcctcgaaatcaagaacgcactatctgcctaactgaaaagtccaaattttagcaagtgagttccccacacactcacacttacactcacggcactcatagcacatttggtgcattgaccttgcttagcagtttattttttacggttattagtgcggacggatggacggatggatggacggatggatggaggaggcaatggcttcgcctttgcctttgcctttcgcctttggcgtcacgaacagaacgctcaattgcgtattactcgcatatatagaactggcaactgggagctgggaactgggaacagggcatttgggaagcgggtacacacgaactgagtcgttgacttctgcgactacatgtttatctgtgctgcaaaaagcgtgtttaatatagtattcgagctgatgaccttaggatctaagcgtaagaacggttaaaatcgaaagccccagccccatttcatcacttttacttgttccccgaggagcggagcgagcgcacatagatacatagctgcatatgtatctgtatctcacggatgcgggtgtctgcaacttctgccctgttctgtgtgtgtgtgtgtgctttgggccctttgggtgtgagtgagagtgtgttgtgttgtgtctacaagagtcgggctgcttattagacttgaactgaaccgtctgactgacgacgtcggcgacattgagagtgagtttcggagcagagttgcgagggcaaaggcaacagaacggcagtggcagtggcagtggcaatggctgagccaatggccgatggagcatcgcatcccgtcggccccaataccacgtctgctccactcagcccgctcagcgttcggttcggttcagctcggagcgccaagggtatcgcctctgcttcggatgtggatgaactcgcgaggtgcacgaactgctgcaaggtcgaagttaacgctattaataggtggtttctgccgtctctcgcggcgcgaataaaacggttattcacattggccaaacgaggcggcgcgtcaccgcaatgacctattccaagtcaccaagtcagtcttcctggcctcgcgagcccagtttccagatgagtgcccacctgagatcgggctggatcggatgtttggatttttgggatggtcaggatgcttagggataagttgggaccagaagaacggggcaaccaggaagcggacccacttgtccgagcatcgcagcagccgcaacccgtcgagcagaaacacatttcagtacaaatgcacacagacacaagccatatttcgttttaggagcgttttattaaccttggcgagggacattgaacttcaaacgcggcggatacgtatttcgcacagatacaaacgccatagacaaggcggtatgagcgaaaatgagcgatgcatgtatgtcgggcacacagccgaactgttcagatgtactatatacgcatatatgtatatatactatatctggcgtgaatttgtttcctaactctttatctgcgatacgttaatatgcagtcggcatttatatatattatttatatgcgcaggtacaataggtaaatgtgtttttcgcatgaacgaattaacggagcgtatctgcggttgccgaaaggtaaagcaaatttcgttgttccataagttggtggaaacaagggagtgcattaatttacgggctctgaaatgccggaagtgaatttaatatcgtacgggcggccacatatgtattactcactcactttccttgcgttgcacttgacgccttgcctaggccaacatctgtgggcttagcgctgtgtggggatcccgcccccacccactcacaatcgcatctaagatagttataactagctataagattgaggcaataactaaaccgccttcttttccttccacctgcagaccaagaaacattcgcccggccatatcaagcgacccatgaacgccttcatggtttggagccagatggagcggcgcaagatctgcgagcggacccccgacctgcacaacgccgagatctccaaggagctgggccgccgctggcagctgctcagcaaggacgataagcagccgtacataatcgaggcggagaagctgcgcaagctgcacatgatcgagtatccgaactacaagtacaggccgcaaaagaagcagacgcgctccccgggatcgctgaagcccaaccaggacgcggacggctgcgaagccagaaatgacacgaccaacaacaacaactcactgaccacacttgcaattaatggaaccaccactgccggccgcaaaagcaaaagatctacctctacatgtcaatcgggttccgcttcgaaacgattgaggaacgactcgggtgatacctcctccaagcctaagtacgaagttaagatggagtctgctgagcagctcaactccgccgatattatactaccctcagccgataatctgataagctaccaatcgtctgaatacttacctctaagcacgctcagcaacgccgactgcgacgagaagctgcactctgagctgagctcgggtccgctggagtcgcgggagaacctgtcggaggtggtcaaccgcttcctgccgctcttcctcggcggcaacgaggactcccagctgggggtcagctccctgacgcagagccaacacaaccagtcggatcccaccgcaggactgatggacaacatctccgacatcagccccatcaacgaccgcgaggagctgaccgaggaggtgatgcgctacctgccctacctggaggtgaatccatcgagcgacgggctcacccttaaggtggagtcgtccagcctgctgggaaaaccgctaaacgagcccgtcttcgactccgaagacaacattgtgaacgacgccaacttgcactcggccagccatcaaatacctccatatgtgcctgacagccacgactgcttcgcggaggactgcggcggcgacagctcctcgcaccaggtggaattcgaggtggtgcggccccagacggtgaccatgaccatgacctgcacgctgccctacggcggaccggacgctgggcacaccacattccaggccgacgacttcaacgcgatcccgtcggccgccgaggacagcgaatgcagcattctgaccacctccaactcgccgcagattggcttcaacgggagcagcttcgtggaggcggacgccatcgggagcacttgtacatacgcgcaacaagactacaccggaagtgtaattgaaacacacaatgatctcaactacgccgcacacgataacaacggagctctgctagcctacacatttgaggacttgccgcctcagccaaccggtagtcatttagagtttaacactaacaaatacgagtttgcaagttattataaaatgtgagagatatttaagtttgtgtaatttataactaatctaattgtacgtttataattttacaccaaattatatattaaatatgtatatgtatgcagataataccatatattccataaattctatatacatacaaaaaacgcgagaataaatgctttgcattgaaaatatttacgtcggagcagtctcatttactgcgtagtggaatgatcgctgatcgctggttcctgctatgcgcgacgaatgggaaggagattaaccttgcggcgatcagctaagtgctcccaaatccattcaataggatctccagcggctctcgcgaattatctacatatgtttatttacacgttacacaaatatgttatataaatcattggtggccaacaaaaggggatacagaatgaggctaaaccatcattagttgttgcacacgataaaataatccagacagtaaggtagtatacattcgtttctctttccgcggccgatttcctggctctcgacgagcgctgattacaaggtgctcgcctcgatatgtgggatattgtgtaggccggagtcgggattggaccagaagtagtagggggcgccctggctgaagcagaacttcatgtttagtgtctccccgtgatccacgtagtacatgagatagaagttgcacatctcgtcctcgttcgtgggactgtcatcaataaatagttggattaggagtggtgctagagctgcgtttcaaatcactgcgtacttaccctattttggtagtccgatggcgagtgctctgcatagtacacctcacggcgatcttatctccctcgattatggggtctgtgttgctggtgttatagaacatctggggcgtgaggggatctctcttgcccagctgcagccactcctgttcgccgtcgctgtttgtcctcacccggtagccggaaacgacctttcccaggccgtgggtgtgcacccggtacgcaaaaggatgcagcaccttctgctcgttcacctcgca

SEQ ID NO: 5657 - DNA, 2310 bp, DROSOPHILA
cactcgcactcgcattcacacaaatgaaacagcccgatcttactcttactgcgagtacggacacatagtgcacatatagtgcatatagtgcacagcacagagcacagagtagacatagtgaccaccacataatttcgtgataaagccacagagaatcggagcgctccgccttatcggcaacccactgccactggtccggctactatgctccagcggggatcgggacatcatcgctgggatagagacacagtggacaccagaactgggatgcagttgcagcggccccaaacgcattgaaagatgatagctaagcccaaccaggccaccaccgaaccaccattaagcttgcgccccggaacagtgccaacggttccagcaaccaccccagccagaccagcgaccatcaccatccagcgaaggcatccagccccgaaagcggattccacaccccacactttgccaccgttctcgccttcgccttcgccagcgtcgtcgccttcgccagcgccagcgcaaacgcctggagcacaaaaaacacaaagccaggcagctattactcatccagcggctgtggcttcgccttccgcgcctgttgctgcagctgcaccgaagacccccaagaccccggaaccccggagtacccacacccacactcacactcacagccagcacttcagcccccctccacgcgaatccgaaatggacggcgaaagatctccgagccacagcggccatgaaatgacactgagcatggacggcatcgattccagcctggtgttcggatctgcacgggttcctgtcaactccagcaccccgtactcggatgcgactcgaaccaagaaacattcgcccggccatatcaagcgacccatgaacgccttcatggtttggagccagatggagcggcgcaagatctgcgagcggacccccgacctgcacaacgccgagatctccaaggagctgggccgccgctggcagctgctcagcaaggacgataagcagccgtacataatcgaggcggagaagctgcgcaagctgcacatgatcgagtatccgaactacaagtacaggccgcaaaagaagcagacgcgctccccgggatcgctgaagcccaaccaggacgcggacggctgcgaagccagaaatgacacgaccaacaacaacaactcactgaccacacttgcaattaatggaaccaccactgccggccgcaaaagcaaaagatctacctctacatgtcaatcgggttccgcttcgaaacgattgaggaacgactcgggtgatacctcctccaagcctaagtacgaagttaagatggagtctgctgagcagctcaactccgccgatattatactaccctcagccgataatctgataagctaccaatcgtctgaatacttacctctaagcacgctcagcaacgccgactgcgacgagaagctgcactctgagctgagctcgggtccgctggagtcgcgggagaacctgtcggaggtggtcaaccgcttcctgccgctcttcctcggcggcaacgaggactcccagctgggggtcagctccctgacgcagagccaacacaaccagtcggatcccaccgcaggactgatggacaacatctccgacatcagccccatcaacgaccgcgaggagctgaccgaggaggtgatgcgctacctgccctacctggaggtgaatccatcgagcgacgggctcacccttaaggtggagtcgtccagcctgctgggaaaaccgctaaacgagcccgtcttcgactccgaagacaacattgtgaacgacgccaacttgcactcggccagccatcaaatacctccatatgtgcctgacagccacgactgcttcgcggaggactgcggcggcgacagctcctcgcaccaggtggaattcgaggtggtgcggccccagacggtgaccatgaccatgacctgcacgctgccctacggcggaccggacgctgggcacaccacattccaggccgacgacttcaacgcgatcccgtcggccgccgaggacagcgaatgcagcattctgaccacctccaactcgccgcagattggcttcaacgggagcagcttcgtggaggcggacgccatcgggagcacttgtacatacgcgcaacaagactacaccggaagtgtaattgaaacacacaatgatctcaactacgccgcacacgataacaacggagctctgctagcctacacatttgaggacttgccgcctcagccaaccggtagtcatttagagtttaacactaacaaatacgagtttgcaagttattataaaatgtga

SEQ ID NO: 5658 - protein, 669 aa, DROSOPHILA
MIAKPNQATTEPPLSLRPGTVPTVPATTPARPATITIQRRHPAPKADSTPHTLPPFSPSPSPASSPSPAPAQTPGAQKTQSQAAITHPAAVASPSAPVAAAAPKTPKTPEPRSTHTHTHTHSQHFSPPPRESEMDGERSPSHSGHEMTLSMDGIDSSLVFGSARVPVNSSTPYSDATRTKKHSPGHIKRPMNAFMVWSQMERRKICERTPDLHNAEISKELGRRWQLLSKDDKQPYIIEAEKLRKLHMIEYPNYKYRPQKKQTRSPGSLKPNQDADGCEARNDTTNNNNSLTTLAINGTTTAGRKSKRSTSTCQSGSASKRLRNDSGDTSSKPKYEVKMESAEQLNSADIILPSADNLISYQSSEYLPLSTLSNADCDEKLHSELSSGPLESRENLSEVVNRFLPLFLGGNEDSQLGVSSLTQSQHNQSDPTAGLMDNISDISPINDREELTEEVMRYLPYLEVNPSSDGLTLKVESSSLLGKPLNEPVFDSEDNIVNDANLHSASHQIPPYVPDSHDCFAEDCGGDSSSHQVEFEVVRPQTVTMTMTCTLPYGGPDAGHTTFQADDFNAIPSAAEDSECSILTTSNSPQIGFNGSSFVEADAIGSTCTYAQQDYTGSVIETHNDLNYAAHDNNGALLAYTFEDLPPQPTGSHLEFNTNKYEFASYYKM

SEQ ID NO: 5659 - DNA, 6655 bp, DROSOPHILA
atgagaagcaagagctcagctttccggacgttcgcgtcgagagcatccaggtggagagccagggtcaggtcaacaggctgaccaccttctggcaggagtccgatgtggacatgtcccgtggccttgattttgtgccgcgcggccatgtcctcgctcggttcacccatctgcagcaccacgaattcagctacaccatcaaggtggagaactccagcgaggccacgcggtatggctacgtgcgcatcttcctggcgcccaagctggatgatcgcaatgcacccatgctgctggagcaacagcgcctgatgatggtggagctggacaagttcgtggttaccatgcctcccggcagccatacgatcacccggaactccacggagtcgagtgtcaccattccgttcgagcgcaccttccgcaacctggacaagctggaggagctgcagaacttcttgtgcggctgcggttggccccagcacatgctgattccgaagggtcggcccgagggtctgcgcttcgagctcttcgtcatggtttccaactacgaagaggataaggtaaggtgtctttagagtatactgcgaatgcctcctgatcccaatcctctttccttgtgcaggttgaccagacggtcgcagattgcggctgcagcatcgccgcttcctactgcggcctgcgcgatcgcctctatccggatcgcaagtccatgggcttccccttcgatcgcaagccgcgtcgaggctccgagatcctggagaacttcctgacgcccaacatgtgcgccgtggaggtcatcattacccacgaggaccgcaccgagaagcttcgcgaggtaccagctcgctcctgaataagagaagcatcttgttatggccagtttcattttttggcttaaagagaagccactaataacggtctatagctttctcgctgtgtagaaaataccaaataaattaatgaaatactatcagatgccaaaataccagtttaccgttggaactccccgcgaacggtcacactgtgctgcggttgggggcggaattgaatttatttgcaaacaaaaatcgaaacacgggagctcgacgttagcgtaagtgttacggccaccgattcagctgctggccaattaaaatatcatcgatgttgcacacagatacgccgcacagacactcacgcacacacgcaccgcctgggagcaagattcgagcccagaatctcaatttgatcaatttagcattctggccatttgacaatacaaattgagactcgtctgcactgggtacaaagttcagtccgtgtgcattggcctgtgcctgtgtgcgtgcattcgggcgtgtgtgcctgtgtgagtctgtgtgtgcagtacgcaaatgagaggagaaaaagcaagaaaccactgccaatcatttttcagtctgtgtccaaagcgcttgtgtgaaagtattctgattcgcccgcccgcccgtgaaagtgttttctgcaattttccgcatccgcattcgcatcacaatggctgcgcacttttttcgcactgcattttacgcaacggcggccagaaaatcgatgagtctgcccttcgccggccggacagccgcaactctagccgtgggcctatcattcggtggtaaatccctgtcctcccgcatctcaccgacttatttataacttttgcattgcccaccatccccaccgccatcgccactcccaatataccaacgcacgcgagtagcgcaaaatagccgggcagccgtgccgtacgagaatgcctacgcggacagcttcttcgggggctgccagacgcagggactgctccagcggattccccagaccggatacatccagcccccgctgatgcggaacttctcgagcctgcagacgggccaccagcagcagcagcagccggctccaaatgtaagcatattgattggttctggtcctccatcgattctggtaacgtggattccagcgactagatttccactaggatgcactccaaattttgactcttaaaacttatctcttcagttgttgcattacttactcgtatgattaatcaaaattgcgaactttgatcttatggttcagatactcttagaatccgctctatcttcacattaagacattatttctttagttacttattctaaagcaaaattatctccacgacgcaagtagttatgaaaatatatatgtactttacaaaaggataagataaacctgaaccgcctaagattaaatgtagttgtccatgacgcggtcaacgtagttagcattagaaaatagttttacagcttaaaaagcttaaaaaaaatgacaatagcttcgatgcatagatcagatatcatacgtggatgagccataaattgcagggtatacgctaatgagctgtagagcagcttgtattgaacatctgttgttgatctgcggttgaacctttaattacctccaattcgcttcttcattttaagcactttatagttggtgactttggaaatttgcatgcttgagtaaactgtagtccctgcactttgtacccggcaaatgatttcggtttccaatctctcccaacctcgcttcctctgcaatggtgatttgtacagataagcttagcttactttgtatatatttgtaaacatatgcacatattctaatcgttgttttgcaattagtgaaggctcattaaccgcttgaactaaccatacaattaacgatattattaatttatgtcatcaatattccagttccattgaactactgcccttatcctggggcacacttctggatccaccctcgcattcagcaagctcaattgagctggggcacagcttttttcacgattcaaatcataatggcgccccaatgccaagctttcgctcgatccgccaaatgttcgtgttctgtgtttatttttaggcggcaagttgatacccaagttaaaacttaagtctgggtatttcggattcaaagatagtcactatacactcatctataaaggttagtgttagctatcaacaaattagggcagaatactgcttaatataaaaagaatcctgttaagttaaatttcacatggtatcttttagtcgagactaagagttcacctttcgcaaatgggactgaggcttccagtgccgcaatgtaatttaaaccaatgccgcaaagagtagaaaaaacatattcctccctatacacacacacacatcagctgaaataactatgtaccttccatggggattgggaatgtaagctcgcctcaattccgctcaactatccgtgatcgttccactggatcgctggactatatgctatataatgtggatcagtcagtcggtcaaagtcgttgcacctgcttagttttatcttcgatatggacttcctaattgaaataacattactggtcatattggcaattatactgctgaagatctatcatcgggcgaaacgtgtgagtggccatacaatttggggtcgtcggtcaagttcaaagtgtcaagccaaagtgaaagtgtgctccagcattaagtcacgatttgtctcaattataatgagcctcatttaactcaatagtgcggaaactgttaggtcacaataatgtttcactaatctaaattgcaactgcttatcgtcagactttgcggggctatcttcgaacttataatgctatcagtcggcttagccttgctgaaatgggggaaaagaacctaaaacctttgcacctccttcatttggtcacttgccttcgtgcttgctacaagcaacttctgataactcgccactgaaaacggtatgaaaatagtctagtcttttgatttccttataaatcacagtgtttgagagttcgaaaagtgatcgtagtaattgaatatcaatcgcggtaacatgattccatgaaataaccaaatgcacacacacctgggcttatcttatcacaaacagctgttcatgattgtaacgtgttgagcgagtttcaaggtcagcagctgttgccgaggataaatcagtgctaaaatacttaatataagtattccccctaatttgcatggatttgggtgcccccgctaatctgcagccgatcggaccatattaaccacttaagctttcatatcttatcagttagctgctcagttagtgactggacctatccaaactttggttcgcagggcgattagttcatggaatagcctaggtgtaatcgcttggtcgcacatttgaagagcggagagaatcgaaatcgtatgcatatttgcttagttattgaattctaaacgtatgccttgcactccaacttgtttgttgtttctaaagtttcattttacccacccaacgcactaaccatcccgcatcagctgtgcccgaacatgactaatagcccgtttctcccgaactcagagtgccatggcgccgtcgaacaatcgccggtacttatcctcgcaggatattaccaagaacatgaccctgtacaccagcaccaagacccaagttgaggtggatcccaagacgctggccttcaagaagcccactggcaacccactggttctcatgatggcctggctgatggccaagcagaagcatctgaagaagtatgcccagatctacactgagatgggattcgatgtggtggtggtgcacattacgccgtggcagctactctggccggtcaaaggatcccaggtaatagccgcccttcaaagtttacattccaagttgagtcattcaaacactaatgcatccatttcctgctgaccaggtggtggccgccgagactattcgattcctggagaacaacaagtcgtacgaacccattgtgatgcatggcttctccgtgggcgcctaccagctgggcgagatcatgctgcagatgtcgcgcgacatggatcgctatggtagcattctggaccgcttcgtgtgccaggtgtgggacagcgccgccgacatcaccgagatcccggtgggcgtgcccaagtcgatcttcccgaggaacgagcgaatgcagagcgccctgcgcaactatacgctgtaccacctgaagacattccacaaccaggccaccatccactacatgcgctccagccagatgttccactccacgctgctcaaggccccggcgctgttcttcgtgtccgacaacgatcccatcggtccgccgtcctccaaccagtccgttcgcgaggactgggagcgtgcgaacatcaaggttaccttcaagtgctgggagcggtcccagcacgccgcccactatatacggcatcgcgaggagtacctgcagacgctgttccagcatctggagacctgcggtgtcttggaggccatcggcgtgccgaagcgcgccaagttgtaggtgtctctaacgaggagcggctgatcagttcagtgatatacatttattcaagaatcaatgcgattatgattttaccctagttgctaagacctaaagattaacgagcaatgtaaaaccaatgtcctctttgaatgattatgatctgtgtgtctctcgcgaggcagaatcttcaaaagcccgcacgggaaattcctaggctaagcttaaagtcgtatttcatcaaccgagagaagaatgcactacgcctctatattgttacatatattttgagatcgctgcaaaacagctaaataaagtaatttaaatgatacgaacacattaaatgagtgtttcaatcaagtatgtgctggttaaacaagtattttcacaagatatatgcgatgaaagattcttaaaaggtctgaaaaaatatctcgggttaaaattggttcgacaaaaaaaaaacgtgttacaactacactatcgctgcggacaggacttgaacctgtgcgggtagaacccaatggatttcaagtccatctccttaaccactcggacaccgcagccttattgaagtccgctccatttgtcactgatatctctccctgcataattctatgctgataagcatctgaatttctgcaaagcgatgacagtaaatcactagatatttgaatgcagaaatatgcagttcaatttcttcaataccacaagttttagtttaattgatagctgctcttcatgacatgtgctcatacttctatatgtaaactattagcttaagtgagagcgaactaaaaaataatgtattgctacattattttatttatttatgtattaagctaataatctttatggattcattagccccacgtgaacgaaactccaattttcattaagaatggcttaagccgagacaccaccccgtgaatagttcttggttcgtgtctgtataaatggtgcgtcatacctggcgaagataggtgaggggggtgctgaaatctatgcttcataccaaataggaactttgccaccggggcgacacagttgcggtgtccgagtggttaaggagatggacttgaaatccattgggttctacccgcgcaggttcgaatcctgtccgcagcgcagaactttttttattttttatttattgtgaatttgcagagggtactaatagctgaccttaatatttctttgacatttcattgttaagcattatactttctgtgatgaagatgaaaacaaactagtgtataccagccttgcccaaccattttccgcaatacccctcagaaaaaccacgtttgtacaaagattgactttaaagatcttcatctt

SEQ ID NO: 5660 - DNA, 1672 bp, DROSOPHILA
ccgcgaacggtcacactgtgctgcggttgggggcggaattgaatttatttgcaaacaaaaatcgaaacacgggagctcgacgttagctctgtgtccaaagcgcttgtgtgaaagtattctgattcgcccgcccgcccgtgaaagtgttttctgcaattttccgcatccgcattcgcatcacaatggctgcgcacttttttcgcactgcattttacgcaacggcggccagaaaatcgatgagtctgcccttcgccggccggacagccgcaactctagccgtgggcctatcattcggtgcgcaaaatagccgggcagccgtgccgtacgagaatgcctacgcggacagcttcttcgggggctgccagacgcagggactgctccagcggattccccagaccggatacatccagcccccgctgatgcggaacttctcgagcctgcagacgggccaccagcagcagcagcagccggctccaaatagtgccatggcgccgtcgaacaatcgccggtacttatcctcgcaggatattaccaagaacatgaccctgtacaccagcaccaagacccaagttgaggtggatcccaagacgctggccttcaagaagcccactggcaacccactggttctcatgatggcctggctgatggccaagcagaagcatctgaagaagtatgcccagatctacactgagatgggattcgatgtggtggtggtgcacattacgccgtggcagctactctggccggtcaaaggatcccaggtggtggccgccgagactattcgattcctggagaacaacaagtcgtacgaacccattgtgatgcatggcttctccgtgggcgcctaccagctgggcgagatcatgctgcagatgtcgcgcgacatggatcgctatggtagcattctggaccgcttcgtgtgccaggtgtgggacagcgccgccgacatcaccgagatcccggtgggcgtgcccaagtcgatcttcccgaggaacgagcgaatgcagagcgccctgcgcaactatacgctgtaccacctgaagacattccacaaccaggccaccatccactacatgcgctccagccagatgttccactccacgctgctcaaggccccggcgctgttcttcgtgtccgacaacgatcccatcggtccgccgtcctccaaccagtccgttcgcgaggactgggagcgtgcgaacatcaaggttaccttcaagtgctgggagcggtcccagcacgccgcccactatatacggcatcgcgaggagtacctgcagacgctgttccagcatctggagacctgcggtgtcttggaggccatcggcgtgccgaagcgcgccaagttgtaggtgtctctaacgaggagcggctgatcagttcagtgatatacatttattcaagaatcaatgcgattatgattttaccctagttgctaagacctaaagattaacgagcaatgtaaaaccaatgtcctctttgaatgattatgatctgtgtgtctctcgcgaggcagaatcttcaaaagcccgcacgggaaattcctaggctaagcttaaagtcgtatttcatcaaccgagagaagaatgcactacgcctctatattgttacatatattttgagatcgctgcaaaacagctaaataaagtaatttaaatgatacgaacacatt

SEQ ID NO: 5661 - protein, 389 aa, DROSOPHILA
MAAHFFRTAFYATAARKSMSLPFAGRTAATLAVGLSFGAQNSRAAVPYENAYADSFFGGCQTQGLLQRIPQTGYIQPPLMRNFSSLQTGHQQQQQPAPNSAMAPSNNRRYLSSQDITKNMTLYTSTKTQVEVDPKTLAFKKPTGNPLVLMMAWLMAKQKHLKKYAQIYTEMGFDVVVVHITPWQLLWPVKGSQVVAAETIRFLENNKSYEPIVMHGFSVGAYQLGEIMLQMSRDMDRYGSILDRFVCQVWDSAADITEIPVGVPKSIFPRNERMQSALRNYTLYHLKTFHNQATIHYMRSSQMFHSTLLKAPALFFVSDNDPIGPPSSNQSVREDWERANIKVTFKCWERSQHAAHYIRHREEYLQTLFQHLETCGVLEAIGVPKRAKL

SEQ ID NO: 5662 - DNA, 6276 bp, DROSOPHILA
tcagtttacaaaactatagctaaagaggattgaggattgatgatcgtagaacgggagtaatattcacggatggatcacgaagaaggacagccaggagaattggaaacgagtgcaggaatttaaagttcaactattagcgggaggagcccggaagcacggtgaatctcgctatctgccattaaactaaaattaaggctagcaaacagcatcggagcacacaaactactacggccaacaagtacatggaacaaaagaaaacaaatatgaaatcagaggacaggaagcaaagcaaagcaaagcaaccaaatgtatttttctaagcgaattttctgtcacatattttgtaaattgatataacacgcaactgaaagtacgtcaaggtaaacgtaaaacgcgaacaataaaacaatgaaaaaagaagcccgtaaaaacgatacagtaaagcagatcgaaaccacaacacgaacctcttacagaacctctgataaaaaaaaaaaaaaacaacaccacacacaagaaatacaaaagaaacgacacgaataaccgaatcacaagtacaagtacgtgaatgttaactattgtcttagtcgtagcctttagtccgggtattgtaatcgcggcctctcgcagctgttggcccatcacactgttggcaaattgttatttgcaacctgcacgaaaaacaacctcctcctacccatttccccacccgaccccacgccacgccccattcccgcccacaagcaccctatgcgaaaagcatcgttgatgattattgatggctcacatgccggagcactgttgttgatcatggaaatggaaaataaatgacactacaaaaccgaaatccagctgactttttgtttccataccagatggtggtggtggtagtgggtcaagctcagagtttttccagaagatgcaaccaccacttgttgttttctccctctaaaccgtgcttttatcccacttggcgttgaaatgaaagcaattttgttttatgttttaatcatagtaaaataagcttgatttgtttttattaatttgggggatgatcttgttgtttatggactacaaatatgctatacggtaaaatggtatatcgcttgcagaatcagcaaataaaagttataaacaacactgaatcttgcgcagattaatgctaacgtgaactggctgtataattgtttctccacacatatgccatacatacacagacggttatacatatacatatatatatataattataatcaaagtcacgtacacgtaaaaaacggttcggttacaaatgacacgtttttggaaaataatatttaaaaaaaaaaagggaatcgaaaaacgaaacactttcacgcgataccgagacattttgaatattcggctgggctggctggctagctaggcttgcacttggctttacttaagttcgttatttgcgcattacgctttatagtttcttttacaaaagagcacttttcagactacaaaataccctaagaacccttgactggaaatggatagatagataatgggacaaaatgaataagaaaacgtaacgtaacaataacatggagtagttgttttgcaaaggttgctgtcatcgtagtatattagttaatagcagatcttgccgccgtcgtagtatagtagtatttatcgtttttgtaaagcattgtacaacattgttatccgcttaagtgttaaaccgatggttcgcccatcctacatcctacgcccatctctcctcatctcatctcatctcactcccgggttggccgtgttagtcgctctggattcctcgttgtctagttgcgcgtcgcattggccatgtataactccatctcctcgatctttttcctgcgcttcgtcagcagcgggttgttcgacttgtccagcgccttgatttgcatctgcagaaaagaaaattccaattaggaaaagaccttctttcaagttttgaactaatcaaagcatttcaggcgcattaacctcctgttagttcttataattagtgactttccagttcacgactagaacaaaaagagggctaggaagtaggcgacttgctaattgcttaagcatactgaaattgaaatttatttttccattgtataaacaaattgaccgaaaagatactatgtacagtatgtggtgagaagcaaatgagtaatggttatataatagaagtgaaaactttggactcgcattgagatttatctttttgttgcaatgccaagttgccactgcgggtgactcacctgatcgtagtctacgcgcatggtggccagtgagcgcgtcatctcctcctgcacttccggccaggtttcctcggcctcctttagcatgcgacccgtgcagagcggtgtctgtggaacagcattgtactgggcaatccacttgttgctaatgacgtcctggatgcgcagacgcttgctggggtccacgttcagcatgcccttgatcagatcctttgccgcctggctcacattcgtccactccggatcgggaaagtcatactggccggtgcggatgcgatttttcatgccgggcgatatggctaggccgtggttgctgtagaacggcgggaatccgcacataatgatgtacatcaccacgcccagcgaccagatgtcgcagctcttgtcgtacttctccgggcccagaacctcaggagctgcaaaagaaaaaacatgtcattaaaatgggaactatccagaagaatatcttataatatattcaaaatggaaaatgtactaactttaaggaataagtacactgtatttacccaatgagaactgaattctaattgttaaaaccttattatgaatcccccgatatgttcgcaacctttctttccgttcgattgcaaatcgagtcgattgcactttgcaaactctcgaacaactctttcgcaacgagattgagaacaaggctgaattgaattacagaagttatagagaaagttcgcttagtagattatgtaagcggggcggtacaagcataaaaagtaattttactatcagcaaatgcctgtcatgcggcttccgggctaaaacaaaaactcctgacacaattccgtgtgggtaaacagacgattttaacaattatagagcaatttttcgtgcccaatgtgacaattgacctcaactagaaactagatgatgattatccctacaaaaggcacactcacccacgtaatagggagtgtagcagggcgtctgcagcgtgtaactggtgaatgtctccttggcgaagccaaagtccgtcaatttaagggtcgcattcggctgagtggtggtgtacagcaagttctccggcttgagatcgcgatgcgctatgtcgcgactgtgcagatagtctacggccgcgcagatctcgtgcattatctgggccgcctcccgctccgtaaaggcaccgtcggccttgtcctgaattctctggaagagctcgccgccctccatgcactccatgaccaccaggaggcacttcctgtccttaaacgtgttctcgtacacatcaatgatgttcacaatgtaccggcatccgctgacccgccaatgcaggtccacttcgcgacgcgccctttcactgtccaacagcaccttgagggcatagttctgttgggtgcggcgatgggtgcactgcaccaccttcccgttgatcccgtagcccagaaccgtgttcgaggtcacgtagtcgtccgtcagtggggtggtcttcggttgccgttgattctgcagagaaagcattctggaatcggctgatctttaactgaaaaaaagataaatggtcaatggagttcggtgatgagtggtcttaattttataagtaatctagtcagctttaaagccttgacttgataccaaactaacttcgtttttgtgcaattaaacaaagctttaaattgatttcattattgcaagacgcttcttttcattgttatcgtgaatggaaagccaattttggttaacgatttatgggcaacttatttgcttaacgatttcggcgtcattgagggtcgggccaaaaaaaaaagtagtcgcttgaggaacaataaattttatttaattattatctttcgcaaaactattgtcgtcgtaaatgtaaggttcagttaatctgggtgtatagcagttgggctttttaattactggcaattagtctgccgtgggaattgataggggattcctgcacaacgtttccactgctcttttggaaagtgaatccctggatagcaataataaaagtgcatcgagaaaaatgtgttattttctttgttttcgtataattaaccttttggatctagaaatatagtcaagatcttcaagaagggtacattgctttcatggcgtgtacgaaacgagaataggaattgctacatacattcagttctccagccttatagatatacagaatatggagatccgagaacctcgaagagctgcgatctcggctcgattcaaattgcatgcaaatgaacttacagagaggcagaaaaaaaatatcaaaaagaaatctgggggcggaggaagttgggtggggtggctggttaggtccacagtcgctgcatattttcgtgttttctttctttttctgtgttttcctggaaaaacggtatacaatgtttttctttctgttttttataacgggggaaaacaggaaaacggtagtaattgcatatgttggacgcgttatcggtaatcgctaatatcgatacacggctgtatgctgagtgcatttgtgtgcgtgctgccgcactgctgatgaaatacatggtgcatttggtttttgttaatttcgtgcacattacgcagtggcggagaatagaactattattttctcagtcttctttaaaattggttaattaacgagtattttactgcccacacacacaccgcacgcacaccgaaaaggccgcgcacacacacacacactatcgaacggccatacaaatgcaaacaatgcgtcatgttctcccactgtttaactagtaattcctagagttctcgttttcactgtacacgccagtacattttttttatcttgttatcgcctttcgatcgttttcaggtggtccagtttttttttttggccacgcgcagcgattttatcttatccgcttttcattctcgcccggatatatattccgcattattacctgctcttcagctgatcgtatttacctttcggatatttactttagcgtgctatgtaacggaacgaaaaaaaagaacaacacgaccagggaatttatttgtaaatgcttcgcggtgtgaccaggcgacactgaatggaaaaagctgtaaatacagtgcaatgtaccagtacaggtatgctagttaatcgatttgcgggttatcggcttgttcgaaagctaaaaatcgattaaattgatcgaatacaggataacggtacgtttttgtattagatctaactgaaactacgttttccaattagatttcgtattaattgattcttgttaaaaaataaaaaaatgaagttttacttgcggaacagttatgtctgaaatgcttacgttaaaatcggtcactgaatgacgttacttaatgtaacataaacaaaacataaaataaaattgtttgactatcgaatattttgtcgagctgcttatcgccgttcgcccatcactactaccgactgtctacaaagtggagtggggtgtgggtactgcaaaaagtggttaaaatgttgttgccacggccaaactgacgatgcgccgcgtccgctgagcctcgtgtccgcatccgtgagatccgtgatccccaggtccgagctctgggcacccggaaattccccaacgagcacatagtccggctgttttctgttcgttttcaattggtttgcattgatagaccaggcaaaccaaacaaacaaacaaacacactgaagcatcgggattctatatatataaatagaatagaaacagaaaagtagatagacatcctcactggccccatttgattgcggatcacatcagcgcgccatgtcgcaggtgcttagcccccacaaacagggcgtgtcggaggcggatgcgttggactacacgaacagcagctcgatcatcgagttcctggccaaagagcaggactgcggcggaatactgaacgatccggacccggagtccatattccaggaggtgagtcgcctgtccgacagcacagatatgcgatccgtggatgaattgctgcaggaagcggagcgcctgatccaacagcagttgcgtctcggcggtattgttccaaaactggacgc

SEQ ID NO: 5663 - DNA, 2000 bp, DROSOPHILA
caccgcgaagcatttacaaataaattccctggtcgtgttgttcttttttttcgttccgttacatagcacgctaaagtaaatatccgaaagttaaagatcagccgattccagaatgctttctctgcagaatcaacggcaaccgaagaccaccccactgacggacgactacgtgacctcgaacacggttctgggctacgggatcaacgggaaggtggtgcagtgcacccatcgccgcacccaacagaactatgccctcaaggtgctgttggacagtgaaagggcgcgtcgcgaagtggacctgcattggcgggtcagcggatgccggtacattgtgaacatcattgatgtgtacgagaacacgtttaaggacaggaagtgcctcctggtggtcatggagtgcatggagggcggcgagctcttccagagaattcaggacaaggccgacggtgcctttacggagcgggaggcggcccagataatgcacgagatctgcgcggccgtagactatctgcacagtcgcgacatagcgcatcgcgatctcaagccggagaacttgctgtacaccaccactcagccgaatgcgacccttaaattgacggactttggcttcgccaaggagacattcaccagttacacgctgcagacgccctgctacactccctattacgtggctcctgaggttctgggcccggagaagtacgacaagagctgcgacatctggtcgctgggcgtggtgatgtacatcattatgtgcggattcccgccgttctacagcaaccacggcctagccatatcgcccggcatgaaaaatcgcatccgcaccggccagtatgactttcccgatccggagtggacgaatgtgagccaggcggcaaaggatctgatcaagggcatgctgaacgtggaccccagcaagcgtctgcgcatccaggacgtcattagcaacaagtggattgcccagtacaatgctgttccacagacaccgctctgcacgggtcgcatgctaaaggaggccgaggaaacctggccggaagtgcaggaggagatgacgcgctcactggccaccatgcgcgtagactacgatcagatgcaaatcaaggcgctggacaagtcgaacaacccgctgctgacgaagcgcaggaaaaagatcgaggagatggagttatacatggccaatgcgacgcgcaactagacaacgaggaatccagagcgactaacacggccaacccgggagtgagatgagatgagatgaggagagatgggcgtaggatgtaggatgggcgaaccatcggtttaacacttaagcggataacaatgttgtacaatgctttacaaaaacgataaatactactatactacgacggcggcaagatctgctattaactaatatactacgatgacagcaacctttgcaaaacaactactccatgttattgttacgttacgttttcttattcattttgtcccattatctatctatccatttccagtcaagggttcttagggtattttgtagtctgaaaagtgctcttttgtaaaagaaactataaagcgtaatgcgcaaataacgaacttaagtaaagccaagtgcaagcctagctagccagccagcccagccgaatattcaaaatgtctcggtatcgcgtgaaagtgtttcgtttttcgattccctttttttttttaaatattattttccaaaaacgtgtcatttgtaaccgaaccgttttttacgtgtacgtgactttgattataattatatatatatatgtatatgtataaccgtctgtgtatgtatggcatatgtgtggagaaacaattatacagccagttcacgttagcattaatctgcgcaagattcagtgttgtttataacttttatttgctgattctgcaagcgatataccattttaccgtatagcatatttgtagtccataaacaacaagatcatcccccaaattaataaaaacaaatcaagcttattttactatgattaaaacat

SEQ ID NO: 5664 - protein, 359 aa, DROSOPHILA
MLSLQNQRQPKTTPLTDDYVTSNTVLGYGINGKVVQCTHRRTQQNYALKVLLDSERARREVDLHWRVSGCRYIVNIIDVYENTFKDRKCLLVVMECMEGGELFQRIQDKADGAFTEREAAQIMHEICAAVDYLHSRDIAHRDLKPENLLYTTTQPNATLKLTDFGFAKETFTSYTLQTPCYTPYYVAPEVLGPEKYDKSCDIWSLGVVMYIIMCGFPPFYSNHGLAISPGMKNRIRTGQYDFPDPEWTNVSQAAKDLIKGMLNVDPSKRLRIQDVISNKWIAQYNAVPQTPLCTGRMLKEAEETWPEVQEEMTRSLATMRVDYDQMQIKALDKSNNPLLTKRRKKIEEMELYMANATRN

SEQ ID NO: 5665 - DNA, 3379 bp, DROSOPHILA
gtgcaaacatcccggatataatgccgaatcccaagccggagacataggccaggatgtgcttgttgtccgtcactcgcgtgtcctccgccacggcgtgcaatccctgctccgtgctgcgcagtatccggtagatgatgtaccggaaggcttcctggaagcacaccgagaagaccacgccaaatgccaggaactccttcagcggaatcagggcataccacagggaagagatcagcagggaaagcagccagaagaatgccgccgcaatcagaatgatgatccgcactggatcattggcgatggtgaagacgaacaaggcgaagggcggtccgaaggcgatgaaggtgcagccaaagaactcgggcaacgtcatcttgtctttgtattattactgttttttcttttgctctgtgggtgttttggtttacttgggaagaggaagcagagactcgcatagagttgccagacttttgcagtgccattcgggctgccacactgtacgttttagtagtgtacataccctacacagatgagtacattagcttgtgcgtcacgcaaaagtatacaaattatttaaactgcgagaattatccaaacaaatgggaatcttttaatcttaacttaattgcctaattacctatcctttgctttaatttgtatataaaaaccaaatccagcctttaaaagtaatatctactgaactacagaaagggtatattaggaccgcttttgaagatacatttttgaaagctgccagactgcagagcactaatgtcttcataccctactatataaagtctgttaattcaaaaataacttgttgctaaagtacacgatatgtattagagctcataaaaattgtagcctactaaatcattatacaatttatagaaatatttaatattattcaaaaatttagaatatagttattctaaatgttccctaagagccatacccgcgtagggtgttacagaggccgcctatgcgggattcacacgcacaaaacaaaggcctccgtcccacttgcaatgtttttgtttggggcggaattagtcactgtaaattgactcaacaactatgccaaccgcataatccgccgtaaaccagaagcgaattgcaagtgcccagctgcggatcgaaaacagcagcccagcgagaaatcacaaagagattcatagaacccgtatgcccagtgagcacagtgaaacctccaattagcagttcgtcgttcatttggtttcgttttttcttttaccccagttcacgccgtgatggccaagcgcctgcaccaccagcctaccttcgatggggatccacccggtccggatgagctggacagtccagccatcgaggcggcggccctcgacattccccctcccgaatccgataaggcgctccaaaaaggtttgtgtaaccattatctcacactcgcaaaatatgtaggtacagtggataatctctaaggcgaatattgtctgtatcttcttaggtgtctgggagcgagccacaagtgctgagtataagccgaccacggatgggagcaccgtgctccgctttgacatcttgctggcccacataatgccgcccgatggcgaggatgtgaagatcaagcggttcgtggtctatgagctcactgttaagcaggatggagccacggaggacactcagccggcaaagattgagcgccgatacaccgactttcgggagctttatctgggccttaagcggcagcatccggcggagatggccaacaagtacttcccagccaaggtcctgatgggtaacttcaagtccgagctgatcggcgaacggagtgcagccttcgaggcattcctcacgtatgtggcaagccaggcgatgctccgggactcggagtacttcctgcgcttcctgcagcacgacgaactgaccagggcgtgccagtttctggatgagcggcgtaacgaaatggccatacctattctggagaactgtttccgcttgctgaacaagatatacatgaatcgatcgaggccggtgcttttgatactctgccgtctagtggctgcctgcacctcatccccagtgcctcatcacgcggccgagaggtgggccctgctggcactgagtcgcttcgagacgttgtgcgatattgatctgctgccgctctacattcccctgcttcacacctgcgcccatctgtggtgagtccaatcgaatctttccgcattaagaaaaaggctaatctgaatatctcatcctttcaggtggcagcgcggccaggaccaaaagccaatcaccgaccgactgactgacatgtccaagcagggcatcaacacggcgaacaccgagagcctcatgcaggctatacacaagatcgatcctcgcactgaaacaatttgaatcgtgaatctccgctacaattttcatccattagtttaatattttgttctgtagtctttagctgtccggcgaaaagtgcaattagataatgtgtgcaattagttttaaggtgaaagaagtatttatcaacctttgaggtagagcccatatgtaccccctttgtcctccaaagtagtccgttcgtgcgaacaatgtgtcacaaagcataaccaatttaagacaacaattaaaaaaaaaaagtatgtacgtctcttcgtctaaatgtttaattcgttattttaaaactctgattttcaaattaaaatgttagatttttataactaaatcaaagattttcaaataatttaactaaaattggttcttattaatagcttacattaatattgcgactaaatgtaattcgaaacaaaaaggttctgttcgtaacgtactgctttggtaacttaaaggttagtctaagcatatttatgtttcatgttacgtattgtttgatatctcttcaatcgtctagtttgtagtttgtacccagtgggagttgtgattaagccgtgcaacgtacataattcacaaatccatcatcgaatgtccatgacgcagtgtctcaaaatccatgcccagaattccatatcagcctgcggaaatatcagacaagtcaaacgaacaacgcagctcccagacttttttgttttttttttcttccagcccaatgtcttgtgattgctttttcaataaataaatattatactcaagtgttttgcagaacaaatgtggtcaattatatctaaatggtatatatttaatggtttgccttatgcctatgcttgtttgtgagtcattttaggttttaaacttagagctaggagtgcacgctgatgtaaataacttactgctaaattctgtgaggatctcttgaccgcactcaaaatgtacaattcaaattatatataacttattacgtcaaacaatcgattcaactatattataaatagaggggtacgtg

SEQ ID NO: 5666 - DNA, 1088 bp, DROSOPHILA
aacaaaggcctccgtcccacttgcaatgtttttgtttggggcggaattagtcactgtaaattgactcaacaactatgccaaccgcataatccgccgtaaaccagaagcgaattgcaagtgcccagctgcggatcgaaaacagcagcccagcgagaaatcacaaagagattcatagaacccgtatgcccattcacgccgtgatggccaagcgcctgcaccaccagcctaccttcgatggggatccacccggtccggatgagctggacagtccagccatcgaggcggcggccctcgacattccccctcccgaatccgataaggcgctccaaaaaggtgtctgggagcgagccacaagtgctgagtataagccgaccacggatgggagcaccgtgctccgctttgacatcttgctggcccacataatgccgcccgatggcgaggatgtgaagatcaagcggttcgtggtctatgagctcactgttaagcaggatggagccacggaggacactcagccggcaaagattgagcgccgatacaccgactttcgggagctttatctgggccttaagcggcagcatccggcggagatggccaacaagtacttcccagccaaggtcctgatgggtaacttcaagtccgagctgatcggcgaacggagtgcagccttcgaggcattcctcacggcgtgccagtttctggatgagcggcgtaacgaaatggccatacctattctggagaactgtttccgcttgctgaacaagatatacatgaatcgatcgaggccggtgcttttgatactctgccgtctagtggctgcctgcacctcatccccagtgcctcatcacgcggccgagaggtgggccctgctggcactgagtcgcttcgagacgttgtgcgatattgatctgctgccgctctacattcccctgcttcacacctgcgcccatctgtggtggcagcgcggccaggaccaaaagccaatcaccgaccgactgactgacatgtccaagcagggcatcaacacggcgaacaccgagagcctcatgcaggctatacacaagatcgatcctcgcactgaaacaatttga

SEQ ID NO: 5667 - protein, 295 aa, DROSOPHILA
MAKRLHHQPTFDGDPPGPDELDSPAIEAAALDIPPPESDKALQKGVWERATSAEYKPTTDGSTVLRFDILLAHIMPPDGEDVKIKRFVVYELTVKQDGATEDTQPAKIERRYTDFRELYLGLKRQHPAEMANKYFPAKVLMGNFKSELIGERSAAFEAFLTACQFLDERRNEMAIPILENCFRLLNKIYMNRSRPVLLILCRLVAACTSSPVPHHAAERWALLALSRFETLCDIDLLPLYIPLLHTCAHLWWQRGQDQKPITDRLTDMSKQGINTANTESLMQAIHKIDPRTETI

SEQ ID NO: 5668 - DNA, 2950 bp, DROSOPHILA
ccaatcgagcacagctgattcatctgcgcgatggttggcaacgcggcagtggcttatcaaacagctgatcgacgcaggggcgtagtgtggaggggtttactataaccccatccaaaaataaaaattaaacgtacttaaatttcaaatagctagtttattttattcaaaacacatgcacactattgcaccagcaggctggactgcggatccggctcgtcgatgcttagggagactatgtgctggccgggaaccatgacgttgcccagcaggcgcggctcctggccctccaccaagtactcggcgcacatggacagcacgatgttggcgtcgcggtccgtgcagttgaagaatcccaccagcacgcgtccgtccgtaatcacgatccgaagaactcgacccagccacttctggagcttcctgcgtcccggcgtcaaactggcatcgttcatctggtgcggggcgttcgttgtgatgcggaagggctccggtggtgtgcatgcgggcgggggcatcacctgctggccagtgatgctcagttctgtcatggttatatcctctttgctcaatttaaacaaataaatgcaagaaattctcagctttttttgtgtttacactgcgcgtatgtgtgatatagtgtgcgtgtgtatgagtaatggccagggatgcaagcacgtgtaagtggttcggttcactggttcactttttgagctcataaattcgaaaatatacgaaacactcgtttgcttgtgtcaaagaaaatactttagatttaaaacacttaaaggaaatgattgcaaaatgaatgcacacaatgagccttctttttaacatcttcatacgaaaactagttctttttatatttgcatccctggtcgagctgagcttataaaggtaacgggcaccctagcccagtcagctgatttgcattttgcggcaaattttgtttcgcatttatccaaaaagctcgtaattcgtctcttgattttttcaaatatccaccatgtccggaaaggctttaaacattggcgatcagttcccaaacttcacggctgagaccagcgagggtcgaatcgatttctacgactggatgcaggacagctgggccattctgttctcccatccggcggattttacgccggtttgcaccacggaattgtcccgggtggcggcattgattccggaattccaaaagcgtggagtcaagccaattgcactgtcctgcgacaccgtggagtcgcacaagggttggatcgaggacatcaagagctttggcagtgggtttggtcactgatttctggacaggaatcgcttctaattggcgtttctgttcgcagagctgagctcctttgactatcccatcattgcggacgacaaaagggaactggcgctcaagtttaatatgctggacaaggacgagatcaatgccgagggcattcccctcacctgtcgcgccgttttcgtggtggacgacaagaagaagcttcgcctgtccatcctgtatcctgccaccactgggcgcaactttgagtgggtattccaatatctagcattcatcattatctataaagtaatgctgtaatgcactttagcaaacaatcgtgcacttaatcgcattagcagataattatttaatgaagtattattgctgaaaactaagtactaaccttgcatataataatggaagttaaataggaacgatttcaaggtcaattaatccgacaaattacatttaactatatcctttgcagtgaaatccttcgagtgatcgactcgctccagttgacccaaacaaagagtgtcgcgacgccggcggattggaaacagggcggcaagtgcatggtcttgcccaccgtcaaagccgaagatgttcctaagctctttcctgatggtatcgaaaccattgagctgccctccggaaagagttacctgcggatcactccacagccctaatggatgacaagcgtgcgctctcactttttttttgctttattacaaaaattataattaacaacaaataatgcacaataaagtatacgcttacaaccgtattttcagtagatcggcgctttcaggtggctaaaactcgccttctgctggacaaaattgccaaaacattcgacttacgaactaaatcagatggggaatgtgacaaaaaggtcgcgatttgtgtgtacgaaataaatatacattcaatatacatatatagacgtgtacaaaagggggtagagatattgcaactggataaccatgggggtaagtaaggtataaataaggccaactctgtacaataactgaagcgctttctaggatagaagaaagctaaagaccaagctcgtgcccgtaaccgaagataactgaaaggaaaatgtttacattggattaattttggtggcacaaacagtataaagttatttgtaatagtgaccattcatttaaactaataattggaaacacatgttactgataattagtttaaacagtggatgcttgagcactttcccttgcccaaatactcacaagatatattccacaatctgagttcgcatagagatcgttaccttgaatatgttaatgaaatgcaaatatgtacaaaataatgtatgatgtaaaagctttcgctacgaaacaggttccctatgctcttaaattctcttgactgcgggaatacgtctcaaatataaagtgggaatggtaacatatgcctttgtctagttgcgttgtacttacaatttaactaccacatgttccgccctccgcaagtatagctttcctgcgtcagtgcctgcgctgcggattggactgaagcatccgcgcgaaccgcctcaccaggaaaggccacaggatgaggacggcaaaccagagcggggagatgttcctgaagggccaccaggcgggcagtgatcgtggctgcgccaccgttcctttcgctgccttttggccgctgcgaagt

SEQ ID NO: 5669 - DNA, 669 bp, DROSOPHILA
atgtccggaaaggctttaaacattggcgatcagttcccaaacttcacggctgagaccagcgagggtcgaatcgatttctacgactggatgcaggacagctgggccattctgttctcccatccggcggattttacgccggtttgcaccacggaattgtcccgggtggcggcattgattccggaattccaaaagcgtggagtcaagccaattgcactgtcctgcgacaccgtggagtcgcacaagggttggatcgaggacatcaagagctttggcaagctgagctcctttgactatcccatcattgcggacgacaaaagggaactggcgctcaagtttaatatgctggacaaggacgagatcaatgccgagggcattcccctcacctgtcgcgccgttttcgtggtggacgacaagaagaagcttcgcctgtccatcctgtatcctgccaccactgggcgcaactttgatgaaatccttcgagtgatcgactcgctccagttgacccaaacaaagagtgtcgcgacgccggcggattggaaacagggcggcaagtgcatggtcttgcccaccgtcaaagccgaagatgttcctaagctctttcctgatggtatcgaaaccattgagctgccctccggaaagagttacctgcggatcactccacagccctaa

SEQ ID NO: 5670 - protein, 222 aa, DROSOPHILA
MSGKALNIGDQFPNFTAETSEGRIDFYDWMQDSWAILFSHPADFTPVCTTELSRVAALIPEFQKRGVKPIALSCDTVESHKGWIEDIKSFGKLSSFDYPIIADDKRELALKFNMLDKDEINAEGIPLTCRAVFVVDDKKKLRLSILYPATTGRNFDEILRVIDSLQLTQTKSVATPADWKQGGKCMVLPTVKAEDVPKLFPDGIETIELPSGKSYLRITPQP

SEQ ID NO: 5671 - DNA, 4361 bp, DROSOPHILA
ggggaaaagtcgcggattgcgacagctccaaaatgcggcgacaaaggtaaaaggatttttgtgtaagttagacgcggggatgatgggcgcacaaaaaaagaaaaaaaaacaaaataataaaaaacgaaataaattaaatggttgtgtcaacatcaacagactctagcaattgccgctgtgtgcatgtgtgtgtgtgtgtgtgtgcgaaccgggttagggattacatagtctgggatcatcgatcggttggactttacctgcatgaaagtctatgagtagctagatcttgtatacttcaatcaatcgcttttagttgcttcggcatctcgacccacatttttgggatccccagatggcgacactatgctacaagatctggctttatgcctttcttctgttcggtgtaacctactgggatatttgtggaccctatggccgatatcgaaatcgaggggatggagtggctggttcctgtgatgcgtgcggataacatgggatgagagacgcggaggccataaaccgcatagaactgccgaatcttttactatcggtggcattctcgttctttatgcgcacattaataatttcgcattggccccaataaaaagcttggcgcactgaacggattctgggctcaggattgtggaccacaaagcgaaacaaccaaaaatcaaggcatgctcaggtcattacagttaacgctggaccgggcacgggtctcggtttcctgggagagggaggggttcaacggcagggggatagtcgctgccaatacaattgaatccgtctctacgtctctctgtctctccatgtatatgtaccgccagccagccagccagccagccacttcctcctaatcaaccctttaagaacccctaaagcggaaaagggaaaaatgccgagcgaacagcggcaacgaactacaggcgaacaacaataaaatgtaaaatttagacgccacccatcgacggtccatcggaatcagattaagccattcgaaatgcagcgaagaccagtctataagactattaccgatcgatcggacggtgatcgattggcaaccattcctgcccttctgcccatccgctctcgattcctgcagctaccggaaaacttgcagcggaaaggtgagcgatgagaggagagcgggcagcggagtggcgggtaggggggcagcatccaccagccagcatcattaagggtagtttcgagcgtcgtaaaaaatatagagaaataaaattgaaaaaagcagcaacaacaataacaaggtcggaagacgaagtcgaagttggcggcagagccgcgacagcgccggcaactgcggcggcgactgaggcagcgacgcctggacgcacaactacaaggaaaagcagcagaaagcggcagcaggagcagaaggaggccggcatcggcggcaaggagcgcagaaacaaaaagcgaaataaataaaaagtatcgatatagatatagaaaatttttgaataaaactgcgctgcggcgcagctgctatccttgaatgagttcgcgaatggctttggggttgggcggcgttggtggaactacagtggtttagatggctccaccaccccaccgctccccgcagccgtaccaacaacactttaggggcgaagctatggaaacgcaaaggccaaatcaatgagcggcactctgagacagcgggtaggaagtagggagtaaggagtatggagtggggcagtgggaagtaggcagtaaggagacagtagttgggagcaggggcactctttattttagtgtcgcacaatgaaactttagactcccccccccccccaacccgtcttccgatgggccacgctgtttccatggatatatctgggtcagacaacatcgaaccgaccccattcgccgccgcagttagcgaattttaagaaatatgttccatttcatttgaatgcggtgctgtcgctggctgtatcgccgaaaacggcaaccacctcttgccaccccctttggagcgcccacgcagactcatctcctggttaggactccttccgctggcccacagccctatagccccatcgctctatagctccattgctgcgtcttcgacgcttcgtctccgtcgttcgtgagcgtctttcgccgcccaccccgccgcgctacaccttcacctttccagcagccattaagttttctcgctgtaataaaaaaatgttctctttttcgccgctcatcggtgttcgtctgtgtgtgtgtatgtgtttgtgtgtgtgtggatactaaattttctagttccttttatttccttttgctttgcctcagcattagtgtttatttattttttctgctctccctcattctttcttgcgtactttttttttttttttgaaaagaagatttatgtaaaatgcggctgggtgaggggctgcggcaggggcggtggcaggggcaggcagcgcagccggcgttggcagcgaaatagtcgcagatgctgttgctgtaagtttcacgcagcaaactgccgaaacccatccatccgcccacagcagcccttcccctccccgctcgctactgcctacctcaacttgtggctcaggcagcgccacaggacggctttcctttgacgcggcttcggtcgcgactgggacacggcagcggggtggctcaaggaatggctttccttggtggtagtgatggtggtgggggtggaggttgaaatggtggtggtggtggcgctggcaacgggcaaaagtttcggcaagttaaatgtttagatttctaagacgccatcggattttcaactataaaatattcttttcatttttccacaagcaccatccccgcacaactacccaccaccccacctcccacacccgccaaagccattaaaagcgaacgctgaattatagtacgcacagggtgagagggggggtggggaaatacccgggaggagttgaaagtggatggggactggccgttgttgcggtgcttagatgttagttgctagttccgtggtccttcgcttcgtccttggtcctcggcagctggcacccatttcgggcacagtggtcgcagggccagcttgcgctaggaaaatccaaggctgtgggttcatcgctcgccagatgcagttattgatagaagagtgtctggtgggctgtgcaaactgccataaaacagagcccgaacaattggcattgtgactcgcgcacattcaatatttgcacatgccacacttgtgtgtgccttctaccgctgccgttccgtaccgctcttgcttttccgtttctcgtttaccgccccccttgcccactatcacctaatccagctgaaaatgaaaagaaactttggcaaacaaaacgcgagtccggacaatcggggctgttggagcagctggtcgagccactttgcaagcgcaactccaatgacaatgatcctcgaattagccgccagccggagctgatgaccttagaccactgtgcgctggcgttgggcgaaggccacgtgcctcgggatagccaaggcagcgcggcggtggggcagagaggccgtcgaggttaggcgggaaaatctaacgaaatcgaagcgagcgaaaagcaaagttttcagcacacacacacaccccacgcactttgttgctgcttttctgctcgaaaggattttagaatttgccgcattttgtctctcaactatgtgcaataatataaaggaataccccactccactcaagtggcaaaggcagcgaagtgtggggcaatcagcggagaaggaaacacaagtcgcatagaaaaggaagtggcgagcgcacgaaaatgccgcaaaacgtgcctttaagttatttttcatttgccacgctcagcgccagatgaccctcctctcctctcagttccacccctcaatcccctaccaacatccctcccccccccacacaacgttcatccccacctaagtgagtaagagcatagtagttaggcgaaagtaactgctgatgaggggagcgggcggaaagcggcgaagggcagcccattttaagatttatgtcggtgattatttctaagtttttgtgcgctcaacgatggccatcgcagccaccgccgccccgcaccgccccgcccaaccatgctccaactcacgcagctctatcctctataaaaagaaggaaactctgaaaggaaaagaataaaagcagaaaaagcagcaggtatctaaaggagccgaagaagccctaatgctagacgaggtcctggccagataattccaacgcctggcctgcaaatggccagaggggggggcctcgtgggggtgcagagaagcgaagcacaacttttagaaaatgttagttttgtgaataatccgtgcggcgctaccatttccaccatttc

SEQ ID NO: 5672 - DNA, 513 bp, DROSOPHILA
atgcagcgaagaccagtctataagactattaccgatcgatcggacggtgatcgattggcaaccattcctgcccttctgcccatccgctctcgattcctgcagctaccggaaaacttgcagcggaaagcagcccttcccctccccgctcgctactgcctacctcaacttgtggctcaggcagcgccacaggacggctttcctttgacgcggcttcggtcgcgactgggacacggcagcggggtggctcaaggaatggctttccttggtggtagtgatggtgctgaaaatgaaaagaaactttggcaaacaaaacgcgagtccggacaatcggggctgttggagcagctggtcgagccactttgcaagcgcaactccaatgacaatgatcctcgaattagccgccagccggagctgatgaccttagaccactgtgcgctggcgttgggcgaaggccacgtgcctcgggatagccaaggcagcgcggcggtggggcagagaggccgtcgaggttag

SEQ ID NO: 5673 - protein, 170 aa, DROSOPHILA
MQRRPVYKTITDRSDGDRLATIPALLPIRSRFLQLPENLQRKAALPLPARYCLPQLVAQAAPQDGFPLTRLRSRLGHGSGVAQGMAFLGGSDGAENEKKLWQTKRESGQSGLLEQLVEPLCKRNSNDNDPRISRQPELMTLDHCALALGEGHVPRDSQGSAAVGQRGRRG

SEQ ID NO: 5674 - DNA, 6667 bp, DROSOPHILA
agatatgcgatccgtggatgaattgctgcaggaagcggagcgcctgatccaacagcagttgcgtctcggcggtattgttccaaaactggacgcttccgggccccctgctccgaccaaaaccctcggagaagaagctgccaccggtggtgatggctcttcctcatccccgcagtcctcgccgcatagcagcatacggctgaatacacgctatacccatcgcatcgagcattcgcctgctcccttggcgccaaaaaccgtcgcagtcaatggcagagtccggcccagatccggttccaaatcgtcggcctcgccaacatcggtgcagacgccgctagaaagcagcaatggatgcggctttgccgccttcgtggataacctgccatcggcgtcggtcatttccgaggagtccacgcccaaggacatggacatggagaaccatacggcggccatggcaaagctgcaactccagcagcttcaggataataccgatgacgacgaggatacggtgagtttcaaaattcgccttgcaggtttatattccacttattcttattggcttgtatttggtcatgttcttctgactgctagaatgaatttcgagttggttttccatcaaatatatactttttttttcgaaatatttccccaatttatggttaaaccacggtgtgttttgttaattgctgggacattctcagggaattgctgtgctattagtcagctataagctgatattccgatcaaataaattctccaatcgacgtgtagtaataaatagcgaggattcatttattgcccgccgtacaggattcaaaggatacagcagcccacccaaaacacacactcactctcagtcaccaaatcagacatccaaaccaacataaataatccttcatgcacacacagagttttcacattatacaaggtggagggggggtgtaaaaaaagcgacagagtttacaaattacaccgagactcggcggcgaagatggggcggcattcaaccggacgagctggggccaatagcctgcgccaccgtctcgaccactgtccagccctcgagagctgtgtccttgatgaaacgcggcggcaggacaaatccgtaggctccacgatccctcagctcgatggtgtacacatatttgacaccaagcgcggcgcggctccagtcatcggagccaccgcctgcgattcccaaaacttcatgggtgaccgctgccctgtacgaagtgcccgtcttctggaggattcgctccgcggccaaactgctcactcgctgcaggacactggcatccttgaccttgacggccttgtaggcccacggataaacaatcatctgtccgtagctgtggaaggtcaaatacgattccagattgtacttccgcttggccaaaaactcggccaccgctcgcgtttcccgctccgaagctggcgcggatccgcggtacgtatcactgcacggattcgtcgacgagccatagccattccagccgatgtcgaagttacggttgagatccacaccgctgcactgggcgcgacgcgatggcgagcgattcttgcgccacaggcgattcgttgttcgactgtactcgtagccatcgggattcatcactggcattatgtaccaggtgaggccgcgaatgtgcgccggctggttctcccagtcggacatcagctggtacaggatgaaggtcaccgtcgcggggctgatccattcgcgggcgtggatgccgccgtcgatccacaccttcttgttctcgcggggattctccgagattctatggcgatatattaagatttgcgttagattagaaataggataatgcctaaaactaggccacacatatttgtgtaaccagcatgaagtatatgaaatgatagcatacttctgggcagattgtggcagtgggcaattgttatgaagcaattatctttttttgaggaatctagccctaatatatgactagattatctagcacccacctaagcactttcagatcgcgtccctcggccgtttggccaatggtgtatagtcgcacgatgttggggaatttggtgcggatctcccgcataaagctatagatggtctccagatcgtgatagtccttccagtgcatgctgctcctggcggccttttctgtggattaaagattccattgagattccattcgatatggtgtatgtagcaatccacttactcgttctccttccgtgaccaaacgaactggactgaatgccttcgagaagctcctcgtcgatcatggattgaatgttgtgggagagaatctggggatccagacgatgggcggatagaaagctgcgggcggccttcagttgatccctggcaatggagatgtccagaaacttggagttctccttccagatattgccaccgaacttctgctccagcatttggcccacgggcacacgcttttgcatcgcctccgagatgttgtagatcctccagagctgcgcctcatcgtaccgttgcggtatctcgttggcatccagcagtgtgagattggagggcaactcgttggccaagctggctgctacggctgccacaaggagcagcaactgcagcaacatagttttttgcgtcattgtcgcgttgttgctatcagcagattgacctggaaaagtgattcggtaatcagtaaacagcgaaaagccatcagcacgatgttatcaaccgaaaacagcttcattaattaacttgcgatcagtagtgctaaaggaaaaactggccttggaaaaccccagttactggccaaatattagatagcttctaacgtgtctcaatacgaaaacaatgagtgtcacgattttcattttgttatttatggcgtctattaagccgctagttgctaccaacaaatggtaatgtccattgccagttgattgctaaactctaaaggttaaaatagtacacgcttgtttggtttgcaataaaatcacgctatttatgaccaaagtgctatagtcggggaataaacaaactgtgtgctaacttagtttcagcttcagctattccaaactttttcgtcgtattatcaatagaatttcaattcaaccttcgcaatggttaacataaaatgaaaccaatcgtacaaccaaatcgttcaggtagccagaactaaatgaaaaacgaaactgtgtgcaaactccagctggtatcggtgaaaataattgttacagcaaaagttcctctaattaccggcacaaaaaaaaaacaaaaaaaataatacaaaaatgtttccgtttcattgttagtggttagggttatctagatgtgtgaataactcgtaaccctgttttttgtttgtttttttttcgtctgtgcttgtcattgccaataagtaattaaaaatagtagacaacgttaataggtttgcaatcttttacaagggaaacacacgtgtgtttcaggatcttttgtatctgagtaaaattaaaagtaatttcagcgagatatacttatcaaatatttatcaatacttatattgtgatattatttgtatgtgtgagattttaagtatacaactcaatcactcaaccaatttgcattgttttacggattctgatggcatcgatcgatcgaacgatcgattgatcgtttgggtcgttcgatccgtgaatttccagacttctcaaagttccggggcgtgtttcggggtttatagtcatgttgactcaatccgagtttcgtgtttatgtacgttccctctgttttgtatgcacaatgatagatgagatgggatatgacaactgcgtcttagttgcttagttgtttagttgctggaccctaagaactagattatgggcctagaaacttttcctggtcgtcttacggatttcgaaactccatgtttaacgcttctgtgctaatttccctggcccgtttcgtttcgttttttttcttgtagtttttgttttcatttcggttttttttatggatgcgtatttgtattttcgtgtttattttctttttattgccaggcagaaagtggcacttgcacgttggaaggggtctgagtctcttggtctccgaaccccgagaactggttctcggatctcagatctccgatctcgggagtcgaatgtggagtacgaacacagtttcggattgggtttcgctttgtttcggtttcatttcgttgctgttcacctcgaccttcgtgcccccccacgttctcctttcattaagtagtgcgtttatgcatttcattccgaaaagtaaacagtttaagattcagaactcagtttctgagtcctgccagttaaagttcatattcaattttaaccgacaaatcgtatgtaaagccccaaaaacttcctaaaatcgtatctctgttaatataaacttcgttaagtctgaactttaagatacaacttcccttactacattcaaacattaagaaatatcctcttccgatcgaaaattctgaactataaaaaatgaattagattctcactaattgcctcttaattcgttaacaaaggggcgtataaaaaagaatatttcgcgtgaaattctcagattttaagactttcgacgaatgcgaaatacgtcaaaatttcaacttgttccgctaagtggccaaataattaaaaatcaaaaccagttttaaaatgaagcgggtgcattttgcacttcctcgttcgttacaacaacttttttgtttttttttttttacataatctggcttttcatttgtaaattaagcctttctttagtaattgctgaagtcttcaaaatacttgcaatgctaatttccctttaatatggcatatattcactgaaaacaccaaaactctttgcaaaggaatttattttgctggattcttctgaaatcttgccagttttcccctcttacaacccaactatcatttaccgggtatttctcgttatgcagtcttttagtaaaatctcgcctggcattcttcaacaatcttcaccctcattcatttacaattctcccttaattttacacagtcattccttttcttggctgctgtctttttacgtgtcttttttacaatcttcatccccgatgttttgcaattcttttttgtgtttgtaagctctaccccttttcttcggcagtcctccctctttcacatcaacccccagttcgtctgaagcttttgcacttcactttcttttgaattcttctcccctttcttcactcagtttcttctgcgttcttgccttaattttttcacttttgacaaattagtttagtttatagtatgtttgctgcattcttttacttttttttttagtttgttgttgcctattctacttactgttttttgttgattgcgaggctgcgcctgttcttcttcttcttcctgttgccggctcttcggaagagagtgcactttgcaaatatatatatgtgtgtgtgtgttttttttgtgtgcgtgtgtgggagagtgtgtcgctgggcaagctgcaaacttcgactaaatgctgattgtatgtgcttcaattttatattgccgctctgtcggcgcaagggatccgttattcaaaaaaaaaattatttaaaattaaaaaaaaataaaaaaaaacacaacaaacgaaaccgagaattacaaaacaacaacaaaaacaaagcccagagtgttgtaaatgtttgcgctgaccgacgaccgatcttttaagcgatcgtcgcgtaaatggaaattggaaatggaaacgacagcgacgccggcagcaaggcggctgcgcagcggcagaggcggcggcagagagagcagaggaagagtgcgagagggagaggaagagggagagggagaggagctccccaatgcaccacgcactcgcactatctctctcttgggcatctgcatcccacgaaaatgagggaggggagggggcgcgagaggcagagagaatgcatggcccacgcccacgccagcagctgtctcccttccacccgcgacgacattgacactttgactcagtcacacacattgagttgcactcgaatgcatttaacggattcgcaccggggactgtccacttgctaatacaccaatgtatgtcaactgaaacattcaaagggaccataattcatacattagtcacgggcttagtttggaatcaggaatttcctagaaaataatggtcaatggttgcaattatctggaaaatcctgcgataacacttccggtgtttaagaatattctcttttgagtcaccggcgaacacaggtgcacaagttcttttttgccgttaccagggatttccaaagatgataaatatcccacttcctactgctgagttctttttagtcggatttaatgcttacaccatccggtattgaggtttagaaaaatgtttattcaaaagtgcccagttttagtacaatatttattgacttgatcacacttatcgaggcattaatttttacaagtgtcttaaatgttttgattgattgcaaatggctttcagtggaaataccccgatcataaaaaggtagcgaaggtgcaaagttgtcaataccgacatttcaggcaatctcatcttcaatcattatcataaccaataatgatgattgctcattatgaaacatcgatcgcatgcaacggaaatgacaatataatattaaattcacatcaaactggcaagttcaagatatactcacatacatatata

SEQ ID NO: 5675 - DNA, 1708 bp, DROSOPHILA
aaagatcggtcgtcggtcagcgcaaacatttacaacactctgggctttgtttttgttgttgttttgtaattctcggtttcgtttgttgtgtttttttttatttttttttaattttaaataattttttttttgaataacggatcccttgcgccgacagagcggcaatataaaattgaagcacatacaatcagcatttagtcgaagtttgcagcttgcccagcgacacactctcccacacacgcacacaaaaaaaacacacacacacatatatatatttgcaaagtgcactctcttccgaagagccggcaacaggaagaagaagaagaacaggcgcagcctcgcaatcaacaaaaaacacaacaacgcgacaatgacgcaaaaaactatgttgctgcagttgctgctccttgtggcagccgtagcagccagcttggccaacgagttgccctccaatctcacactgctggatgccaacgagataccgcaacggtacgatgaggcgcagctctggaggatctacaacatctcggaggcgatgcaaaagcgtgtgcccgtgggccaaatgctggagcagaagttcggtggcaatatctggaaggagaactccaagtttctggacatctccattgccagggatcaactgaaggccgcccgcagctttctatccgcccatcgtctggatccccagattctctcccacaacattcaatccatgatcgacgaggagcttctcgaaggcattcagtccagttcgtttggtcacggaaggagaacgaaaaaggccgccaggagcagcatgcactggaaggactatcacgatctggagaccatctatagctttatgcgggagatccgcaccaaattccccaacatcgtgcgactatacaccattggccaaacggccgagggacgcgatctgaaagtgcttagaatctcggagaatccccgcgagaacaagaaggtgtggatcgacggcggcatccacgcccgcgaatggatcagccccgcgacggtgaccttcatcctgtaccagctgatgtccgactgggagaaccagccggcgcacattcgcggcctcacctggtacataatgccagtgatgaatcccgatggctacgagtacagtcgaacaacgaatcgcctgtggcgcaagaatcgctcgccatcgcgtcgcgcccagtgcagcggtgtggatctcaaccgtaacttcgacatcggctggaatggctatggctcgtcgacgaatccgtgcagtgatacgtaccgcggatccgcgccagcttcggagcgggaaacgcgagcggtggccgagtttttggccaagcggaagtacaatctggaatcgtatttgaccttccacagctacggacagatgattgtttatccgtgggcctacaaggccgtcaaggtcaaggatgccagtgtcctgcagcgagtgagcagtttggccgcggagcgaatcctccagaagacgggcacttcgtacagggcagcggtcacccatgaagttttgggaatcgcaggcggtggctccgatgactggagccgcgccgcgcttggtgtcaaatatgtgtacaccatcgagctgagggatcgtggagcctacggatttgtcctgccgccgcgtttcatcaaggacacagctctcgagggctggacagtggtcgagacggtggcgcaggctattggccccagctcgtccggttga

SEQ ID NO: 5676 - protein, 440 aa, DROSOPHILA
MLLQLLLLVAAVAASLANELPSNLTLLDANEIPQRYDEAQLWRIYNISEAMQKRVPVGQMLEQKFGGNIWKENSKFLDISIARDQLKAARSFLSAHRLDPQILSHNIQSMIDEELLEGIQSSSFGHGRRTKKAARSSMHWKDYHDLETIYSFMREIRTKFPNIVRLYTIGQTAEGRDLKVLRISENPRENKKVWIDGGIHAREWISPATVTFILYQLMSDWENQPAHIRGLTWYIMPVMNPDGYEYSRTTNRLWRKNRSPSRRAQCSGVDLNRNFDIGWNGYGSSTNPCSDTYRGSAPASERETRAVAEFLAKRKYNLESYLTFHSYGQMIVYPWAYKAVKVKDASVLQRVSSLAAERILQKTGTSYRAAVTHEVLGIAGGGSDDWSRAALGVKYVYTIELRDRGAYGFVLPPRFIKDTALEGWTVVETVAQAIGPSSSG

SEQ ID NO: 5677 - DNA, 3498 bp, DROSOPHILA
accaccacgtcctcctccgccgcgaccaccgcctccacggccgccgccaccgcgaccaccgccgccgccacgtcctccgaaggcaccacggccgccgccgccaccaccaccgcgaccacctcctccacggccaccaccgaatcctccacggccaccgcgatcgccgccgccaccgcgtccacggccgcctccaaatccaccgcctcctccgccgccgccgccaccacgcccacggaatccacctcctcctcctccgccgccgccgccaccaccgcgtggactgaatcctgcaatagaaaagatccgcatttgaatttcggttgactcagaggttaagttggagactatcaaaagcaaaggcgacgcctgcttcgatttgtatcgttagagcgtgattttacgcacctggtttgcccattttatgttgctgtacttgcactttttaatacaactttcgacgaaatgtgattgagtccgtcaacacgcggcaaccaaaacgcttgaaaagaaaaacacgtgtgtgccggagtgtggccgcagcagtgattttagtgataatatacagaagtacaaaggcgaaaataccaagagaatgatgttagtgtgtgtgttaggtgggaaacttggctgggactgtagctaagttcaacaccaggcggagaggcaattgtgcatagtggtacaaaggttgaaaaactgtacattttattcttggatatcttgcaaataatgtaattcttttttttttgtattcaattcaaaaattgattgatcaattaaattattgattgatttattaaattaatttaatttttatgagccactacattattatattttacttatttgatgcatgtaactatggaagtatatgattaataattacaatcccgtagtccttgacaatgaccccagtgccttggagatctagtgttcgttgaccaaacaaacagccacttgaaatcgatgtttgagaaaaacgttccattccgctttgagagttctagttgggagcacacactttctgaaattgttaacgcataaatcctgctgttttacctaaacttttgcaaacataatggccttccgctcggtggttacgatggagaagccgctccagcacatttcgctgacggactggtatgcccgtgtgaaccagatgcggaatgtggcggatgcccggaggtcggacgccttcgccatccgccactcatcccgatccttgaggaacgagacgcggatcgagggcgactgggccaactacgagacaaatgaggctctgaccgatcggtgagtgtccatatcttatattaagattaacagcacgattaataatctgtaatttatacatcagcatctccgagttgaatcgctggcgggatatcatttccaagtccttcgagaagatcgagcgcgagatattcatgctgcaggaggagaagaatgccacggaacgggagctggaggcgttggcaggtccgatttccgtgatagccgagtgcctgaccataagggacggtcgcctcggatcggagatcacctacgatgaggccgacaccgagatcaagaacgaactggtcgtgctggagaacaaccagcgcctgctggccgatcgatgccagaaggcgtgggagaagctcaatcgtctggaggaagtgcgcttcaagatcggcctggagatcgagttcaaggtggaggcggtgcagctggacaactcacagctggcgctcgatcgcaactcggccaatatctcatacaagccggatcccacgagaaatcccaagaagtaagtcacacatggaatgtcccagtagctcagtaggataactaaccaatcacttagctcctgttcctacgagtcctggctggagaacgtgaagaacataaagctgctggcggagaatgagctggccgacacgtacgccattcgggaggctttgttcgtgtgccgcgaaaaggcgcgcaacatgctgcagtcgcagcaggagcgggcggagcacaccatccgcaaacggatcttcgagacgcagcgggccagaaacgaactggagtggcagcagctcaagatgaaggaggagatggagaaggccatgtgcgagatccgcacctcggagaatgcgctgcgtgacaagacggatgcactgaagctggccgagacacgcctggagaatcgtgcccagaggtcgggcatggaactgtgcatggaccaggcgcacgacatgctctgcttggaggtggagaagctgcgagagatacgacgccgactgcaggtcaagatcgacgagagcaagaccaactttagtctgctggaggagcacggcaagcgaatcgacgtggatctggagaacaagcagcactcgctgatgacggacatcagggccctggacttgcgcatgcgtctccggggcggcgagttcggctccaaggtggccaacgcctcgcagacggacaggaacataacgctcactcgcatggagaacgagattcccaaagactagacttgggactatgccgcttgctcacttattcaattctatttgccctgacgttcgttgcacgttgtaatttgtccaaattattgtgaataaataaatggtataacgttaaagcttcttctggccaaagctgaaggtcagttcacccagcaggggcttgaaaaccgtgctccattctagatgcgtaatggcttctttgggtctccttggaaagtgcactccctgtctcacaaacatgtcccactttacgaactcgccgggcacgacaggttcactgggaccactgcttacaatggatctggggctattgtcctccaccaactgccagtccacccataaggccactccgttgcagattctggggctaaaaaaggaatgaggattgaatctatgcataacattactgccgaatcactcactgcttgagctcaatgctgcccttcaggctgtgctcttggccaaagttactaaaatccacactgagaacttcctggggttctgagagtgcgcgacagggatattcccacaggggctgcgcctccaccaaggacactgcctgctctgctgagcgctgtgaagaataataatcaacatttcaatggttaaatcgaaagttaataaggaattgcagacgtacctccaccatttcatcaaacaggcgcagatcaaatccctcgcagctgccaacgggcgctcgaatcttgtgcagatcgagaaactccacgggaagagcatagatgcgcgccgagcatggcgaaatctttacaccttccggcagcctgtccttgattttggtgagcagggtgccaaagtagaagttgtcccagggtagaatcgcattgaggaagtagggctcagcgaaaatgtgagtgagcgcagctagccgagagtcctccagttcctccaccttgtccaaaaactggacattcttaagctggttgtgcttaacaatcgactcgattaatctacgcgagaagcgatggggttcgtggagcagcacaga

SEQ ID NO: 5678 - DNA, 1377 bp, DROSOPHILA
gttctagttgggagcacacactttctgaaattgttaacgcataaatcctgctgttttacctaaacttttgcaaacataatggccttccgctcggtggttacgatggagaagccgctccagcacatttcgctgacggactggtatgcccgtgtgaaccagatgcggaatgtggcggatgcccggaggtcggacgccttcgccatccgccactcatcccgatccttgaggaacgagacgcggatcgagggcgactgggccaactacgagacaaatgaggctctgaccgatcgcatctccgagttgaatcgctggcgggatatcatttccaagtccttcgagaagatcgagcgcgagatattcatgctgcaggaggagaagaatgccacggaacgggagctggaggcgttggcaggtccgatttccgtgatagccgagtgcctgaccataagggacggtcgcctcggatcggagatcacctacgatgaggccgacaccgagatcaagaacgaactggtcgtgctggagaacaaccagcgcctgctggccgatcgatgccagaaggcgtgggagaagctcaatcgtctggaggaagtgcgcttcaagatcggcctggagatcgagttcaaggtggaggcggtgcagctggacaactcacagctggcgctcgatcgcaactcggccaatatctcatacaagccggatcccacgagaaatcccaagaactcctgttcctacgagtcctggctggagaacgtgaagaacataaagctgctggcggagaatgagctggccgacacgtacgccattcgggaggctttgttcgtgtgccgcgaaaaggcgcgcaacatgctgcagtcgcagcaggagcgggcggagcacaccatccgcaaacggatcttcgagacgcagcgggccagaaacgaactggagtggcagcagctcaagatgaaggaggagatggagaaggccatgtgcgagatccgcacctcggagaatgcgctgcgtgacaagacggatgcactgaagctggccgagacacgcctggagaatcgtgcccagaggtcgggcatggaactgtgcatggaccaggcgcacgacatgctctgcttggaggtggagaagctgcgagagatacgacgccgactgcaggtcaagatcgacgagagcaagaccaactttagtctgctggaggagcacggcaagcgaatcgacgtggatctggagaacaagcagcactcgctgatgacggacatcagggccctggacttgcgcatgcgtctccggggcggcgagttcggctccaaggtggccaacgcctcgcagacggacaggaacataacgctcactcgcatggagaacgagattcccaaagactag

SEQ ID NO: 5679 - protein, 432 aa, DROSOPHILA
MAFRSVVTMEKPLQHISLTDWYARVNQMRNVADARRSDAFAIRHSSRSLRNETRIEGDWANYETNEALTDRISELNRWRDIISKSFEKIEREIFMLQEEKNATERELEALAGPISVIAECLTIRDGRLGSEITYDEADTEIKNELVVLENNQRLLADRCQKAWEKLNRLEEVRFKIGLEIEFKVEAVQLDNSQLALDRNSANISYKPDPTRNPKNSCSYESWLENVKNIKLLAENELADTYAIREALFVCREKARNMLQSQQERAEHTIRKRIFETQRARNELEWQQLKMKEEMEKAMCEIRTSENALRDKTDALKLAETRLENRAQRSGMELCMDQAHDMLCLEVEKLREIRRRLQVKIDESKTNFSLLEEHGKRIDVDLENKQHSLMTDIRALDLRMRLRGGEFGSKVANASQTDRNITLTRMENEIPKD

SEQ ID NO: 5680 - DNA, 5788 bp, DROSOPHILA
ctgggctggtaggggccatttttgggcagaccctttatcacattgactgccgcctggaaacgctcctcaatcgccgccatacctgcaagattatcccgcgattagccagggcactcgatcgataagatacacaggtacgaaggctgccatatagaggcggtgccaagttcaccttgtccaggtgaacgtcgcttacaaattacctaattattgtgtgcaatccgcggtgttgcaaaccccactttcggctcccccttttgttgttgtcgttcgctattgattccgattccgaatccgagtccaaatccgctgctgggcattcatgaatttttgggtgcgacgttcgtggatgcgctgctgtggtgccaaagttcgagttctgaagtccaatcttctgagcttcgaatcgaatcgagtcggctggagctttttcttagtttggcccccgttcttatcgacctcgctgaggaattgttgtgtgctgcgccaaccgctgtcgttccaatcgagttgcaatcaaataaaactaaacaaaaacccgaaaactctctctgcaaatcgctgagcgcgtacgtgtgagtgtgtaggtgtgcatgtgtgcgggtggcgcagggctgcaacgaaagtatcgatacaggtgcagagtggagatgatatttttgtgagcgcgaatatcgcgatttaaacaaaaataagaagtttttattgtccataaataaaattataaattagtattttgcggaaaagcataggaccaatcaatgaatttataaagtaagattatttagttttatttatttccagccacatttaattataggtaaatataggtatagtagggtataataggtatagtataggtatagtataattataggtataggctttatcgaaagtcaactatcgcatgagcgcagacttccatcttccattgaatataccgctattcatggtattttccaacgttcgcgcatacggtcactcactttttcatttcgtaaaaatcagcaatcgaattaagtgcttaattatttgcattatttttagagctttccgaaagctgccaacgtaaagtccgcgaagcgccttcactggccgaatcggaaatagcaaaatcgaagcaccagagatcgaaagacagcgcattcgattcgatttcacaataactgcgaaccgagggcggagtgggagtgtctgccagcgcggagaaaagtgaacgcattgcaattaaacatgaaatttgctgcaacgtcgacgggagtacgacatttttgtattatcaacgccaagcagcagagccatcagaatcagcagactatatataagatacggccgcaaaaatcgcgatcggagttgaacaattgcaaacggcaaagacagtcgtgtagaattgccaaaaattggaagcaccaaagtttttgcataggtgcgtcctgatcggcaacgtttcgggttagaaagacaaagattaaaaaattgacagctcggctcaagaacgcaatttaatttcctaacctagagcatcaaaatcaataaatcggaaccaacacgtgcgtttcagtagttgccgccaaagcaacgaaagtgtagacattttcgccgttgtgtagacttcgacgcctgttctccaccttttgaggacccagaacaggaaaaggacactcggctacaaagcatctgttttttttgtgtttcgtaccttgtgtttgaaacagtaggctaaacaatagaaaccaaaacgtcgtcgtcgagttcaaacagcaaaatacctgaacgacgcaaaaacaacagcaacatgccgcgacgcaacaagaaatcagcagcaggcagaggtgagtcacaaagaaaagagagtgtgtgggtgtgcacagaaaaaaaatgcgaggttgaacgtatccaaatgcgtataatatatctattggatacgagtgtgaacttccagctgaaacaattgactttataggcttaaaattagttattttgcctttagtagcaacattttgggtttaattaccatcttaacctcatggttttcttgttttttacaaaataaacgaattaaatcgcacatctgaacaatagacttaatagtatatccccacaaaagccggcgagggtaggtgaattttcacagctgcttttcgtttgacctttgcattagtcatgcactgactaatgagtaccgtgcactgtttggtgtatttcgttggcttccaaacgaaggaagcttcgctgcctgcaacctgtttgtcaataccctcgaaatgaaataattattttcgttttgttgctgtgctggcaccaaaagcttcacgcgctcagctggctgcgcaacaacaagtaatcagcggttcactgaaaatatatatacatacgtatacatatgtaaatttatacagctttgcccaccaataataacaatataaccatagtaattttgacaaaaattccaaattatgtaatataaagttaaatagctgcatttcaccaaaggaggaggttttaagtttctgcgttgtttctatgttgagcacaactgtatataaatataaatatacttgttcgtggaaaaacatacgtacacatatgtatatgtatatgtgtacgctcaatgccagcttatcagaatcacgcctataaccgaatacctcagtgcagggtatcagtgggtatgttttcgtagggcgtatcaaattatgtattctatttaagtgctctattatgctaagttattattcaagctgtacctatttatatagttaaatatccgaattggtatttataggctcatcatacaatcatttacaaatattaaatttaaaaataaagaagcggaagttgtggctcttcggggaactttcctcgcatctaagtatatacctcatgggtgacctaaaaacttacgcaactttgtgttatgcattagtcgctctcaaaacacagatggtttactcgcccgaatctaatccaaacaactttcaagcaaaaccagctgttttccactgcttttgattcgtttttctagcccgcagttaccgcatgcttttgtgtttgtagtttgctcgcagcttttgtgaaaggcaaaacaaaaaaaaaaaaaacacaaaaaacgaggcggaaactaccttgccccaaatagaaagctgaaaacaggcactgggaaatcgccacaatgaaagttgtgctctacgacgggttttcttcgacgcagttggccagcaaacaaagtgaaacatcgaaagatggatagaaaacttgttgcacaacatttgcggctcccgagctgtttttcttgaaggtcattgctgtgtggcaaagcgtgtaattgaatttctaatttcagtacatatacatttccccatctaaatgagcacacaagcaattgaatgaaaagctgctcgaagacggcaaaacttgatgcctcttttcagctggtttgacagttactgaagggaaatgtgggcacttgcatgagggtggtcccaatattttactccatttaacaaggaatacaaatggggttctgaaaatagaataatcattacattggtattcactgagtttccatttgcaaaatgcttagcttacattccaatgggttcgttgaatgcctaaaatgtgcaattaagcatattgttcaaaacgatagctgttgaaaaaggctcacaggtcgcattagcataataaatatttatgaattatgcttgaaaaactcgctgagtatagcaaaatacttcaaaaaaaaaccttattaattacccaaatgatttctttttcaggccgcaccaatgactccaattctgaggacgagtcctttgacaatgtgagcgtttactctcatatgtccgaagtcgcatcctcggaggccaccgacgagctggccaatgagcgtttcgaggagaagttcgagaaggccctggaacaggccaccgagaagtcggcccagacacgtgtgcaggctctgcaagcgatttgcgaactgctcatgcaccgctacatgccggacttcgtggaggaccgcaagatgaccctgatggatttcgtggagaagagcatccgtcgaggcaagggccaggagcaggtgtggggcgcacgactcgcgcccctgctggtgctccaaatgggcggggatgaaggcatatccaaggcgatgaatcaattcctgttgaacaccgttcaggacaagtccgtgggcttcgatgcccgtgccaagtgctgcacagctgtgggattgttgagcttcctgggctgcgaggatgttggggagttggtacacctgatgcagagcttcgaggccatcttcgcaggcagttatttgcgtggcgatgacaagacaccggtatccgtcaccgccgaagctgggactttccatgcggaggccttgaacgcctgggggcttctactaacacttataccttcgggggattttgtttcgttgatgaccactggccaaaacatgtttccgtaagtttgaagagcaagttccatttaactttcaaacccattgctataattgtttaaactaaactttgcagatctattaagaagttcttgggtctcttgcaatctacacatttggacgtccgcatggccgctggcgagaccattgctttaattctggagtcgggacgtgctcacgaagaggatttcctagaagatgacatcgctgagttatcggaggccgtcaagcagctggccacggattcgcataagtaccgcgccaagcgcgatcgcaaggcccagcgtgccaccttccgtgatgtgctgcgatacctggaggtgagttgaagatttgcacgagtgctacgcttaaacaatagggattacatttatttatttgactcgagatgcactagtctttggacgattacttcatgtcagtgcaagtgaacttgagctcgtgcttgcagtacttggccaagcacttggagtgatcgtgcaacttgttgcgcatgatgacgcagccgttccggcttatcgagtccatgtactcgctgaaggtcggcaccttccggtatgtggtcggggcggagttccagtgcgaactgctgccggattcgatggtctgcgaggagtccgagaagctggtcttgaatggcttgtagttcttttggcactcgtcgctagacatctcgtagccagcggacgcctcccgctccagttcgttcatcacgttcgagcggaactcgttgcagggtccacgttcgctcatcagcttgttggcgttcttggactcgtcctccgtctttaggctctcataaataccctccgggtactcgttcatgttacagtaatcgatctgataggtggtgttcatacggttggtctccagcctgcggctcagctcctccttgggcatgaccttcaggcgttcatacagatccgggtagactgtacgtaagatcttgagaaagcggttgggttgcagcttaaagcaatctgtttccgcggagaaggccatcttgtccacctggtcctgagtcagctgggtgggtatgatacgcggatccaccagctttcccattggcgctatgcccgtccactcgacgccgccacagtccttagacgcgttcggcggcatcatgatcttggactcgtcgacgcattcgcactccttgacctgcggaccactgtgagcctcggcgcccctgggccgcgttagaaactcgtaccgtttggcactgggcgggacatagtcgtgctgataggttgatagcatcatcttgataacgaaatctacaaaactaattggccaaaacaattttttttagtagttttttttttttta

SEQ ID NO: 5681 - DNA, 1770 bp, DROSOPHILA
aaaatcagcaatcgaattaagtgcttaattatttgcattatttttagagctttccgaaagctgccaacgtaaagtccgcgaagcgccttcactggccgaatcggaaatagcaaaatcgaagcaccagagatcgaaagacagcgcattcgattcgatttcacaataactgcgaaccgagggcggagtgggagtgtctgccagcgcggagaaaagtgaacgcattgcaattaaacatgaaatttgctgcaacgtcgacgggagtacgacatttttgtattatcaacgccaagcagcagagccatcagaatcagcagactatatataagatacggccgcaaaaatcgcgatcggagttgaacaattgcaaacggcaaagacagtcgtgtagaattgccaaaaattggaagcaccaaagtttttgcataggtgcgtcctgatcggcaacgtttcgggttagaaagacaaagattaaaaaattgacagctcggctcaagaacgcaatttaatttcctaacctagagcatcaaaatcaataaatcggaaccaacacgtgcgtttcagtagttgccgccaaagcaacgaaagtgtagacattttcgccgttgtgtagacttcgacgcctgttctccaccttttgaggacccagaacaggaaaaggacactcggctacaaagcatctgttttttttgtgtttcgtaccttgtgtttgaaacagtaggctaaacaatagaaaccaaaacgtcgtcgtcgagttcaaacagcaaaatacctgaacgacgcaaaaacaacagcaacatgccgcgacgcaacaagaaatcagcagcaggcagaggccgcaccaatgactccaattctgaggacgagtcctttgacaatgtgagcgtttactctcatatgtccgaagtcgcatcctcggaggccaccgacgagctggccaatgagcgtttcgaggagaagttcgagaaggccctggaacaggccaccgagaagtcggcccagacacgtgtgcaggctctgcaagcgatttgcgaactgctcatgcaccgctacatgccggacttcgtggaggaccgcaagatgaccctgatggatttcgtggagaagagcatccgtcgaggcaagggccaggagcaggtgtggggcgcacgactcgcgcccctgctggtgctccaaatgggcggggatgaaggcatatccaaggcgatgaatcaattcctgttgaacaccgttcaggacaagtccgtgggcttcgatgcccgtgccaagtgctgcacagctgtgggattgttgagcttcctgggctgcgaggatgttggggagttggtacacctgatgcagagcttcgaggccatcttcgcaggcagttatttgcgtggcgatgacaagacaccggtatccgtcaccgccgaagctgggactttccatgcggaggccttgaacgcctgggggcttctactaacacttataccttcgggggattttgtttcgttgatgaccactggccaaaacatgtttccatctattaagaagttcttgggtctcttgcaatctacacatttggacgtccgcatggccgctggcgagaccattgctttaattctggagtcgggacgtgctcacgaagaggatttcctagaagatgacatcgctgagttatcggaggccgtcaagcagctggccacggattcgcataagtaccgcgccaagcgcgatcgcaaggcccagcgtgccaccttccgtgatgtgctgcgatacctggaggtgagttga

SEQ ID NO: 5682 - protein, 324 aa, DROSOPHILA
MPRRNKKSAAGRGRTNDSNSEDESFDNVSVYSHMSEVASSEATDELANERFEEKFEKALEQATEKSAQTRVQALQAICELLMHRYMPDFVEDRKMTLMDFVEKSIRRGKGQEQVWGARLAPLLVLQMGGDEGISKAMNQFLLNTVQDKSVGFDARAKCCTAVGLLSFLGCEDVGELVHLMQSFEAIFAGSYLRGDDKTPVSVTAEAGTFHAEALNAWGLLLTLIPSGDFVSLMTTGQNMFPSIKKFLGLLQSTHLDVRMAAGETIALILESGRAHEEDFLEDDIAELSEAVKQLATDSHKYRAKRDRKAQRATFRDVLRYLEVS

SEQ ID NO: 5683 - DNA, 8653 bp, DROSOPHILA
aatcgattcgtgctcattcaccaggcggctgaaaataagtggcactcgccagcaattactagcagcgcccaccgctacctttattaactttaaaactgcatccattggcaaggcgacccgggcggtgagaacataaatcatggatgaaagtgaaaattggttgcacctaccacgagcacgggttcccaggttcccaggtgggcgtcgaaaggtgccgcgtccgccgacccacgaccccgcccatttgcggcgtaattacgaaacaatacacgcgtcggaagagaaaccagcaggaggccagccaggaatgaagaggcagaggagccgccaggcgtccggaacatggagctcggagccatgagtcagagggccgcagtagcatagccccaatccccagagcttcgcgaaggtgttatctgcggggcccccaagtaagcactttaaaaaatgtatggtcacatatgtatacccccaaaaggatggaaccccaaatttaaccagaaaatagtttaagcaccattttgataggatctaccagcaaaatcctctcagtgcatcgccacctgtacgctgtgtagttttcctgttttgactgctgtgtttttgcaatttaaccgcaataaataatggagcagcttgttaaatttgagcgcccgcccaccaggaggcgctgcaaaaatgtaggttagacagcccaggataacgatagtgatgttggtggttatgatggcaatgatgacggggatgatgatggcgatgttatcagtggccatttcactggctgaccgaaacgagactcgtttggtgtggaaatgcgatttttacatatgtgatatagattttaattgcggggcattaaaatgcaagtggcggccaaaaatgcgcttaaaataattacatttattgccgcatcgccgatttggcagccgactaagcgaaaagcaaccgcaaatgtcgacacagcaacgccaagtatcaagtatttcatccatcggccgtgtatcactaaataattttgcatttattttatataatacagtacacattgcattaaactaaataaaatctatttaatatatatatatatatttaatatgtactcgtacacaatcaaccctatatacgccgcacctcctaatcatccgatttgtcttagtccgcacttttgtgtagcgtagttaatatacgaatcgcctttagttttgttaacaattattgctatttgaattcattattggtttaagtgtattctcgtgtttgtcgtttaaaatcctaacgtattttgtttgtttgtttgcggtgtttcaagttctcacttctcacgatgtctgcgtcgttagtgtggatatacatatttaaaatatagtttctatttaaagttctgtgtatgctcgataaacaattgaacagctaaaacagtttgccagtacaccaaactcagctcgtcaacaattcgaattcggtcgagtaaactatttacagtggagcgtatcaatataaattcaccaattgtggttaaaaacatgcaagccggggctcgttgtacaattgaactagaagcaatcagagtgcaatcttatggcgaaaacgtaacatttagttgcgattgctagacagtttgatgtgatccaaacggatggatgccctaagcaagcccaagttcaaatttgaatatattctgggaatggcggtgcttaagttcttaaaggcttagctgaagctaaacggtaggtggttttatttatcggcgtaaaacaaggatccaaagaaatgtatgacaattacatttgaagatagatggtcgtaagaaatatcaacagaagcgaatcaatcaaactttgtcttaaatttacacaggagagttatgcagtggataaattatgcctaacaaattataaatatctctaaaataggctctcaatacattcatacatagattgttctcaagtttcgtgcacttttaacaaatatctcgtgtgatatcggttgcgaacataggaatagacagacagaagtgtgtgtttcgtgtttacagtatacagtagtaatacatacgtatgtaataataataataacagtaactatttaacgcaacgtggtcgtcaaatggaaagggggaggggacggtaaagcaggcgcttaactggaattaaacattaatcaacaaaccgaccacaaatcgactgccactcattcctggcagaagccctcagtctcctcgatggcaaaggtcagcttctccaccagctgatcgtagctcttgtacggcggcaggtccaatcgattgaagcaggtgtgcgagcgcggcagccacgtctccttgcccaccttctcgatgcagaagcgctgcggcccgttggagcccatcagctcggcgaatcctccgaccggcacgcgacacgtgcccgtcacaaactgcagcaggcgagctcgcttctcgttatccgtctcgcgaacaaactgtggagccaattatccggattagcgaatggaaagggcacaaagaacacaaaggaacccacctgccagaaccagacaacttgcttggagttgcggttgtagtgcctgtagatggtgttgcgctgccagtcctccacgtccacgtcctgcatgccgcacagaataagctccagctcgcgctcgtcaaagtacttgagccattccaggggcaccacctcattgaagccttccaggaacgtctttgtctgctgctcaatgccactgcaataggaatcagttaataccgagtcaaaaatgacacccatattgacaacatattgtcgtttatcaagtaaaatgcataccgtgtcatccgccactccgtcatgagggtgatgtactcctccttgttctcctccgtgacgcgctccttttccccgttctccttcaactcatgatggattatctgaccgagcacttcgaagtccacgctaaaccagagctccaatccacactcatcgatgttgttatcttttacccagataagtgagttgtagaactccggatcgatcgtttcgatgtccttgatggtcaacttcttgttcagcatgcgcttgtaaaatggcattgtgaatccactgtagataaaccttccatgatacagggccatcgcaataaagcgaccgatgaacttgaagtactgcaggtgatcggggttcacgtacgaggcgggatttatctgcaggctgtagttgttcttgttcgcgtactcaaacaagcagtacatgggattcagaacctcgtgggagagcaagaagaaccactcgcgagatacaccaccataatccagtccctcctcgccgcggaatatgatatagagccgccttcgcagttcgtaggctggcagacgcatgatctggtggtatgaatcctcgaacagggtttgtcgcgtcaccgtgatcttgatgtgcgatggcaaagcgttgctctggcacaagtaccggaactgcgacagcttccagcggaagctgcgttcgtaggcgcgtggcactccgtacactcccttggcgcccttcggagcaccgggtcgaggatcttcgaaggtggttcgtctcgtgttgtgatctacgaagaagcgctcaccggcggctgtatagcggatttcccagccgggtggaagcgggccctcgttgatcaagctcacctcctggccctgcgtgcgtggatcctcccactgggtggttcggttcttgtggttaacaaagtacactctgttgtccgattggatctgcgtaaggattaagtaaataaaggaacgagttaaaataaatactttttctaatctagacaaacggctttaccttcttctcccagccatctggtagtggacccagtgcatcctcgtcgtcctgcgtcacctgggctgtcaccgccgttggttgctgctgctgctgggagtacaggtatcgctggttgccttgagacacgacgtgggcccgctgaccctgccagtgctggaagtgcatcagacgctcactgttcggccgctgccaggtagtttttcttgtgttgtggtctacgtagtaaactcgaccgcgcccatccttcctgatctcccagcccgggggcagcggtgtcggtttctcccagtatgtggatcgtgtattgtgatctacgtagtatctgcgaccgtactggtccagacggatttcccaccctgcaggcagcggctcatcatccgctggttgtgtctgcagttgcggatctgtgctttggctcacgggcagtccaactcctggctgttcaattggtgggcctgctactccaggtggtcctactgctgctcctcctccagctggcaaataaacagcagctggttgtgtattctctggcagcgctccgtacacttgggttagaggacgagctagtgcgggagctggtggctgctgaggatacggagctgtctgcggcacggccgccccactgccattgaccattctcaggggctgctgttgattctgggattgctgctgttgctgttcccacaccgggggcgcctgcgtagatctcctgtgatctccacctccattcggcagaggagagcgggtctctccgccgttgctatttccactgctcgagcgtagtcgcatccgtgcccgtactccaccgtaaatcatgcaacttcgtccggcggccgcatcactgaccaccgacggattgaccgcctggacgggtggattgccattctgttggccagccactggctgaatctgcagcttgctcatatcgagtttgaggccattgaggatggccactagttcgccgctcttcgtctggcgattgtccgacttgctggtgacgaacaggtcgatggtcagctcaaggaactcgcaccgcccattgtagtgctgcagaatgtgcgccaggttgatgatccgctctccaagcatggcatctttacggaaactggagtgatccagcactttgaagtgcagcgttgaattgggtgtaatctagagacgatagatcccgtggatattacaaataattgacttttattactgtttctactcaccagcactgtgaactcctcgttccacttgggcaaatagctgttcttcaccaggtccgttttccgcttgcttttgctgtcaatcaagagctccacgtagggatttggcttgaggaagccattgttgcgcagcgaagcctcctcgactgaaaggatttggggccattattgattgaacagaatgtttcactttcttttgtttgctcacttgtcacgcttaattgatgatatccttgattggcactcccactggcccccgcccccgagctggaggtgggcgtggggctggcggatcccgctccattcactgtctgcccggcttccatgccgccggaagctgcacccgctggcagcccatttccatcggccatttagtggctgagtgtgtgagtgctcctggtgctccgcctcctcctccgccttatattcctccctttgagtgaagagaaagccagtattgagcacgctgctattgaatattggtggtggaaagtatcgaatggggggaaattgcgtgttctggactgataagataagtccggaacacggtctacatacgtaaatggtttatcaatacccaaaaatgtacaatgctgttgaacaggaagcttttatagagtggaaataactatccgaataaaagtgttgtacacacttttgctaggtttacagattaccaacaggcctttatgggaaccctgagtgatttactaagcactttttaggtgttatgcagttttccttagtcgctttaagctctcgactacttatacacctgatcttagaaggcagataatgccagctctatatcattatgaaagcgactatccgcagataagatatggcctgtatagctttgtgtattatatagtgtgtaaacgacagtatggcaacaaaactgtttgcgaataggccttcacttttttggtgaaataaactgctcgaacaaattgtgagctgtaaaatcggcgctaatgtatgtacagtgcaactcggtcatatatgaaagataaaaattatgctatttcaagcgaaattaatcatgaccaaactgggtaaacagtttattaaaaaactgagtaatgtttctgatcccaaaatatattctttgactaagtgaggctagagttctaaattattgaaagaaacttgtattactatagaaattcccccaaataaatatataaatgcactgataagtgcacttgatttcgtggactttaaactactgggaagcaccgtattatcgcctattaattttctccataatttgcgactgccacggctgtgtgcgtgtgtgtttccctgtactttttcgtacacactcagcaccgattgctggtcatccataactttgatagcaaacaccccgctacacaatagattgtataataatgttgccatgtgagtcatcggctcaacgcgaaaaagaaaacggcaagtgaattcggtttcaattgttgaatggctattgcatattgattgtgtgcaggaagcaacatggccgatatggcgatacacaagcccacaaataagttattttgttatatatcgtcagaactgaaatctcaatgctttaatgacttcttcgctttgcttatcggcatgctgataactaccatgattttctcgctgtgtaccgttcgcgatttctcttttgctagcgttttcactacattaattaaccgagaacacgtgagcaagtgcagcttgttgtttaccattagtgtctactcatcagattctgtgaccggattgaaatcgatttggaagggctttgcatggatctgaatgggacacagttctccgatcaattagcacgcactttccggctcatttcgcctatcattcgagcgcttatcagtgggccgatgaacaaagggaagctatctggtggggcagccggagcgcgagccaagcgaagtaatcagcaacagctgtcaataagcctagaatgcacttctcgctcgatggatggggaggggtggtggagggaggggaacttgaacttccttgaattatcgaccgcagggcttagtcacccacacagcgccactatgctacagtacacacatatatatgtgtagatatatatttattcgtggtcatgtaacgcacgccagaaagaaggtaactacctctcccactcccactccttctgtgggtgggcgtgtgtgtgtttgtgtgtgtgcgcttgtaattgaggcaaaggtcgcgacttccgtcccgctcgcactcgctgccgccgctctaccgctggcgaattccaatgcaagaggcgttcctttttgtttttagcaatttctgggggtttctcctcctccgttttcctttcctttctacctgtgtcttaccttctgctgcttcttcttctgcctctggtgctcctacaacttgcgcctgtgtgtgtggttgttgtctcctgtgtgcggctgcatgtgcgagtgtgtgtgcgggattcttaactgggtttcccgggccccaaaattgatggctggattattgcactagttggcgctgccgccctcgctttggtccacgtaatcgcgagcagttgatatcgctgcactaattgtttatttgttattttgcttcgcttgcaagcagcaatttctagagctgcaactttggacgatgtttttcgatacaactgatgtggccactcagtgcgcgaatcgataggttgaattcaattggcgaggcttgttatgcacgctagactgggttggcgtactcgctatattgccaacttacatgttcaaccagagttgccgtacaagctcaaaatggagtagccaaccagatttgaaaatgaccgcgaataggaattaggaataaaaataagaacgtattgcccgtagtcacaacaaaacaaaggtaaataattagccaaaaagttatgcaccagctagtacttctggcccctctgattttattggaatctaagcttattactccatataaattagaagccccctgaatattcattactcagttgcgttgctcattgaatttctttaaatgttatttaattttgtggtgctattgaataaatataaaagcgcggattcagttcatcgaataacatagtgtttggcagtaaaaagtgcttacaatgctaaaatccgcaagtgctttgctatgtggtcttcttgctttaaatttgtatggagcttgggcagaatccgatgtgatttgtcctttaaaggaccctcctagtcaatgtggaggattctgtctgggtgtacttacgcccgtgttaaatcacctgaccatttcccaaaatctggcgaattccaataattcaagcaaggctaacgaggtcctggtgagacagtacacgatggaaggccaactgactgctctgcagaataagcaactaagcattgaagtcgcactggatgcccaaggcagaaaactgaatgttaacgaacagaactttactgaacgactgaattgcatggaaggcatactgtcggccctggagaaaacagtccttgaagtaaaaaccaaaataaaatacctcggattcgagcaaatcggctcaaagtactattacatagagaaagtatccgagaagaactggtccactgcttcaaaaacttgtcgcaatatgggagggcacctggccgacattaagga

SEQ ID NO: 5684 - DNA, 4390 bp, DROSOPHILA
aaaaacatcgtccaaagttgcagctctagaaattgctgcttgcaagcgaagcaaaataacaaataaacaattagtgcagcgatatcaactgctcgcgattacgtggaccaaagcgagggcggcagcgccaactagtgcaataatccagccatcaattttggggcccgggaaacccagttaagaatcccgcacacacactcgcacatgcagccgcacacaggagacaacaaccacacacacaggcgcaagttgtaggagcaccagaggcagaagaagaagcagcagaagggaggaatataaggcggaggaggaggcggagcaccaggagcactcacacactcagccactaaatggccgatggaaatgggctgccagcgggtgcagcttccggcggcatggaagccgggcagacagtgaatggagcgggatccgccagccccacgcccacctccagctcgggggcgggggccagtgggagtgccaatcaaggatatcatcaattaagcgtgacaatcgaggaggcttcgctgcgcaacaatggcttcctcaagccaaatccctacgtggagctcttgattgacagcaaaagcaagcggaaaacggacctggtgaagaacagctatttgcccaagtggaacgaggagttcacagtgctgattacacccaattcaacgctgcacttcaaagtgctggatcactccagtttccgtaaagatgccatgcttggagagcggatcatcaacctggcgcacattctgcagcactacaatgggcggtgcgagttccttgagctgaccatcgacctgttcgtcaccagcaagtcggacaatcgccagacgaagagcggcgaactagtggccatcctcaatggcctcaaactcgatatgagcaagctgcagattcagccagtggctggccaacagaatggcaatccacccgtccaggcggtcaatccgtcggtggtcagtgatgcggccgccggacgaagttgcatgatttacggtggagtacgggcacggatgcgactacgctcgagcagtggaaatagcaacggcggagagacccgctctcctctgccgaatggaggtggagatcacaggagatctacgcaggcgcccccggtgtgggaacagcaacagcagcaatcccagaatcaacagcagcccctgagaatggtcaatggcagtggggcggccgtgccgcagacagctccgtatcctcagcagccaccagctcccgcactagctcgtcctctaacccaagtgtacggagcgctgccagagaatacacaaccagctgctgtttatttgccagctggaggaggagcagcagtaggaccacctggagtagcaggcccaccaattgaacagccaggagttggactgcccgtgagccaaagcacagatccgcaactgcagacacaaccagcggatgatgagccgctgcctgcagggtgggaaatccgtctggaccagtacggtcgcagatactacgtagatcacaatacacgatccacatactgggagaaaccgacaccgctgcccccgggctgggagatcaggaaggatgggcgcggtcgagtttactacgtagaccacaacacaagaaaaactacctggcagcggccgaacagtgagcgtctgatgcacttccagcactggcagggtcagcgggcccacgtcgtgtctcaaggcaaccagcgatacctgtactcccagcagcagcagcaaccaacggcggtgacagcccaggtgacgcaggacgacgaggatgcactgggtccactaccagatggctgggagaagaagatccaatcggacaacagagtgtactttgttaaccacaagaaccgaaccacccagtgggaggatccacgcacgcagggccaggaggtgagcttgatcaacgagggcccgcttccacccggctgggaaatccgctatacagccgccggtgagcgcttcttcgtagatcacaacacgagacgaaccaccttcgaagatcctcgacccggtgctccgaagggcgccaagggagtgtacggagtgccacgcgcctacgaacgcagcttccgctggaagctgtcgcagttccggtacttgtgccagagcaacgctttgccatcgcacatcaagatcacggtgacgcgacaaaccctgttcgaggattcataccaccagatcatgcgtctgccagcctacgaactgcgaaggcggctctatatcatattccgcggcgaggagggactggattatggtggtgtatctcgcgagtggttcttcttgctctcccacgaggttctgaatcccatgtactgcttgtttgagtacgcgaacaagaacaactacagcctgcagataaatcccgcctcgtacgtgaaccccgatcacctgcagtacttcaagttcatcggtcgctttattgcgatggccctgtatcatggaaggtttatctacagtggattcacaatgccattttacaagcgcatgctgaacaagaagttgaccatcaaggacatcgaaacgatcgatccggagttctacaactcacttatctgggtaaaagataacaacatcgatgagtgtggattggagctctggtttagcgtggacttcgaagtgctcggtcagataatccatcatgagttgaaggagaacggggaaaaggagcgcgtcacggaggagaacaaggaggagtacatcaccctcatgacggagtggcggatgacacgtggcattgagcagcagacaaagacgttcctggaaggcttcaatgaggtggtgcccctggaatggctcaagtactttgacgagcgcgagctggagcttattctgtgcggcatgcaggacgtggacgtggaggactggcagcgcaacaccatctacaggcactacaaccgcaactccaagcaagttgtctggttctggcagtttgttcgcgagacggataacgagaagcgagctcgcctgctgcagtttgtgacgggcacgtgtcgcgtgccggtcggaggattcgccgagctgatgggctccaacgggccgcagcgcttctgcatcgagaaggtgggcaaggagacgtggctgccgcgctcgcacacctgcttcaatcgattggacctgccgccgtacaagagctacgatcagctggtggagaagctgacctttgccatcgaggagactgagggcttctgccaggaatgagtggcagtcgatttgtggtcggtttgttgattaatgtttaattccagttaagcgcctgctttaccgtcccctccccctttccatttgacgaccacgttgcgttaaatagttactgttattattattattacatacgtatgtattactactgtatactgtaaacacgaaacacacacttctgtctgtctattcctatgttcgcaaccgatatcacacgagatatttgttaaaagtgcacgaaacttgagaacaatctatgtatgaatgtattgagagcctattttagagatatttataatttgttaggcataatttatccactgcataactctcctgtgtaaatttaagacaaagtttgattgattcgcttctgttgatatttcttacgaccatctatcttcaaatgtaattgtcatacatttctttggatccttgttttacgccgataaataaaaccacctaccgtttagcttcagctaagcctttaagaacttaagcaccgccattcccagaatatattcaaatttgaacttgggcttgcttagggcatccatccgtttggatcacatcaaactgtctagcaatcgcaactaaatgttacgttttcgccataagattgcactctgattgcttctagttcaattgtacaacgagccccggcttgcatgtttttaaccacaattggtgaatttatattgatacgctccactgtaaatagtttactcgaccgaattcgaattgttgacgagctgagtttggtgtactggcaaactgttttagctgttcaattgtttatcgagcatacacagaactttaaatagaaactatattttaaatatgtatatccacactaacgacgcagacatcgtgagaagtgagaacttgaaacaccgcaaacaaacaaacaaaatacgttaggattttaaacgacaaacacgagaatacacttaaaccaataatgaattcaaatagcaataattgttaacaaaactaaaggcgattcgtatattaactacgctacacaaaagtgcggactaagacaaatcggatgattaggaggtgcggcgtatatagggttgattgtgtacgagtacatattaaatatatatatatatattaaatagattttatttagtttaatgcaatgtgtactgtattatataaaataaatgcaaaattatttagtgata

SEQ ID NO: 5685 - protein, 949 aa, DROSOPHILA
MADGNGLPAGAASGGMEAGQTVNGAGSASPTPTSSSGAGASGSANQGYHQLSVTIEEASLRNNGFLKPNPYVELLIDSKSKRKTDLVKNSYLPKWNEEFTVLITPNSTLHFKVLDHSSFRKDAMLGERIINLAHILQHYNGRCEFLELTIDLFVTSKSDNRQTKSGELVAILNGLKLDMSKLQIQPVAGQQNGNPPVQAVNPSVVSDAAAGRSCMIYGGVRARMRLRSSSGNSNGGETRSPLPNGGGDHRRSTQAPPVWEQQQQQSQNQQQPLRMVNGSGAAVPQTAPYPQQPPAPALARPLTQVYGALPENTQPAAVYLPAGGGAAVGPPGVAGPPIEQPGVGLPVSQSTDPQLQTQPADDEPLPAGWEIRLDQYGRRYYVDHNTRSTYWEKPTPLPPGWEIRKDGRGRVYYVDHNTRKTTWQRPNSERLMHFQHWQGQRAHVVSQGNQRYLYSQQQQQPTAVTAQVTQDDEDALGPLPDGWEKKIQSDNRVYFVNHKNRTTQWEDPRTQGQEVSLINEGPLPPGWEIRYTAAGERFFVDHNTRRTTFEDPRPGAPKGAKGVYGVPRAYERSFRWKLSQFRYLCQSNALPSHIKITVTRQTLFEDSYHQIMRLPAYELRRRLYIIFRGEEGLDYGGVSREWFFLLSHEVLNPMYCLFEYANKNNYSLQINPASYVNPDHLQYFKFIGRFIAMALYHGRFIYSGFTMPFYKRMLNKKLTIKDIETIDPEFYNSLIWVKDNNIDECGLELWFSVDFEVLGQIIHHELKENGEKERVTEENKEEYITLMTEWRMTRGIEQQTKTFLEGFNEVVPLEWLKYFDERELELILCGMQDVDVEDWQRNTIYRHYNRNSKQVVWFWQFVRETDNEKRARLLQFVTGTCRVPVGGFAELMGSNGPQRFCIEKVGKETWLPRSHTCFNRLDLPPYKSYDQLVEKLTFAIEETEGFCQE

SEQ ID NO: 5686 - DNA, 2815 bp, DROSOPHILA
aagctggtggagtgcttacaaggatggattttggtcatgaactccctttggctgcagcctgcattctcctgattgttccggatgatctcacgggcaaaacgggccaataacttctgtttgtggtgacgcttgctgagtggtccatgggcacagttctctcggatccagcgacgagcctcccgacatcctagatatatactctggttgctaaacgtctttgtatccaacatgaagccacgattgcccagcagtccgaagcccagatcgaaaatattgcgacccaggttgagcggatttggtccgtccttggactggaacttattcggaccgacggcatccataggctccttggtttcctggtagaatcggcgatcctccggcgtgcaatacgtccagggtttgaaactcatcgtgtaatgatccttcatctcaaagtcgacgggcagactatcattgaagttaacctgatcgatcgagaccagtctgccattgtgatgggttacttgataggtaacgcccaaggaatcaggaatttgtatggtgccttttccgtggaaacgattgttgagaaactctcccgtgtagcatgtcccatccggataaatgtagacacccatctcctgcatgcccaactcatcactgggaccaacgtatctggatccagtcaacagaatatcaacctgggtaatgcttgaagattttgttgtcttctgctccatgatttttagaaagcttatttacactgtataccaaaaataacaattttaaagttgagtaaatgttcgttgaaatgggtgttcaaataatttactatatattatttgagataacaagttttgccgaactaatatgatgccactaatggcaatttacttaaataattataacttaaatgagtaacgcccctcaagataatcaaagaaatttcactaatgttcgctaattacccagtgaatatctatataaactcgtcagtttaactaggcagtaacaaccttcgcttgaaatcatgaagctattggtagttttcttgggtctcactctcgtcgcagcaggaagtgctaagaaggattccgaggatcctgatcacattataaccaatggaagccccgcttatgaaggtcaggcaccctatgtggtgggcatggcctttggacagagcaacatctggtgcagtggcactattataggcgacacctggatccttacatccgctcagtgtctaacgggcagttccggagtgaccatctactttggagccacccggctgagtcaggcccagtttacggtgacagtgggaactagtgagtacgttacgggtaatcaacatctcgccctggttcgagttcctcgagtcggattcagcaaccgggtcaaccgggtggcccttccatcactgagaaatcgatcccagcgctacgagaactggtgggcaaatgtctgtggatggggagtgaccaccttcagcaatggactcaccgatgcgctgcaatgcgtcgaccttcagataatgtccaataacgagtgtatcgccttctacggatccaccaccgtctccgatcagatcctgtgcacccgtacgcccagcggcagatccacttgctttggcgatgccggcagccccctgatcaccaaacaggattccaccgtggtgggcatttccgcatttgtggcctccaacgggtgcaccttgggattgcccgctggatttgctaggatcaccagcgcactggattggatccatcaaaggactggaatcgcctactaatgggtcaaatagtagcaacatttaataaaaaatgtccaatacctgcatagatattttattgcttataaggtcttttctactttaaaaaaaaattggctaatatacagcaaagtccggtgggttgtactgaatactaatgcaaaatatacttaaaatgaatatgatcctactgaccattaaactattaacaaatactacgagtattctaagaaactttaaaaacgttgaattttatttttcagattacaaagtaattgcattcattttctctccgagctcttaagcttaaattttaaattgaaaaaaacatatataaagacattgatcggcggatctacaactcgaatatggaccgggtcatgtccatgtagctattgcggcgtattagattagattgcaccacatttatgttatccgccgtccgtttcctcatcatgttgttggccgagcggtatgattcctcaaagtttaggaccagttcatcctcgccaaagctgtccgtctggcagctggagggtccacccgactgcggattgcgtacatctgaggtgctcgaccatcggcgtggtctcttcaccgtctccattttggcgcaaggatgcacgcgcttgaactccatttgatccttctgctgtttatccaacatcccagcataggcacgcacacacatctccgtctcccaggcgggatcgtcgacgggcatgggacgccttggaatgttctccagcggctcattcggctgtccacgttttttggtcaacttgtggaagtatcgctcccgatccacttgtccattgggtgcatatatggccgtgcttcgcaactgtgctcgttccgttgccaaattgttggctataatgcggcgacagaagtcggatggtggctcaattatacgcgatgttctcgccttcctgcaattcttcttaatccaatccttatcttgcgggcagctcacgtacatgaattgatggagcggactcggacggtccgtcaaccagcaggtcttactattgaacagaccctcctccacatcatagcaatgttcgg

SEQ ID NO: 5687 - DNA, 815 bp, DROSOPHILA
cttgaaatcatgaagctattggtagttttcttgggtctcactctcgtcgcagcaggaagtgctaagaaggattccgaggatcctgatcacattataaccaatggaagccccgcttatgaaggtcaggcaccctatgtggtgggcatggcctttggacagagcaacatctggtgcagtggcactattataggcgacacctggatccttacatccgctcagtgtctaacgggcagttccggagtgaccatctactttggagccacccggctgagtcaggcccagtttacggtgacagtgggaactagtgagtacgttacgggtaatcaacatctcgccctggttcgagttcctcgagtcggattcagcaaccgggtcaaccgggtggcccttccatcactgagaaatcgatcccagcgctacgagaactggtgggcaaatgtctgtggatggggagtgaccaccttcagcaatggactcaccgatgcgctgcaatgcgtcgaccttcagataatgtccaataacgagtgtatcgccttctacggatccaccaccgtctccgatcagatcctgtgcacccgtacgcccagcggcagatccacttgctttggcgatgccggcagccccctgatcaccaaacaggattccaccgtggtgggcatttccgcatttgtggcctccaacgggtgcaccttgggattgcccgctggatttgctaggatcaccagcgcactggattggatccatcaaaggactggaatcgcctactaatgggtcaaatagtagcaacatttaataaaaaatgtccaatacctgca

SEQ ID NO: 5688 - protein, 252 aa, DROSOPHILA
MKLLVVFLGLTLVAAGSAKKDSEDPDHIITNGSPAYEGQAPYVVGMAFGQSNIWCSGTIIGDTWILTSAQCLTGSSGVTIYFGATRLSQAQFTVTVGTSEYVTGNQHLALVRVPRVGFSNRVNRVALPSLRNRSQRYENWWANVCGWGVTTFSNGLTDALQCVDLQIMSNNECIAFYGSTTVSDQILCTRTPSGRSTCFGDAGSPLITKQDSTVVGISAFVASNGCTLGLPAGFARITSALDWIHQRTGIAY

SEQ ID NO: 5689 - DNA, 3109 bp, DROSOPHILA
agctggcgagcatgggaagtggggagtccagggagtgggttagtactttgtatgcttcaagtctgcccgcttacctttttctatgcggaaggcatacgagaaaccattggccattggccagccataaaatgttcgtttgaaatggcgaatttagtgggtacttaaaattaaacaatagctattgagcaagttgtttcaaatgttctatttgctgcaaaagaacaagttacaatgtaagattaaagtttcattcctacgtaagtagcaatatttttaatcggctgttcagtgaattcgcggcgcccagcgatttaactactgtttaattctccattaaatacgtttacacataattaaattcgacgcgccatttaaatacgcatcatcttccagccgagcgcaacaattgcattgaaagcttttcacttctttcccatatttattgttaatttttatgtcatttgcgtgcgacccgagggggcacagtggtttccccatctccgcaagcgtcgtggaaatccttgaccgtggaaatccctgaccaagggccacttgccgccggaggaaaaccaaaagaagaagcccacacggccctcacgcacctctctgcacataatttatgtatcggcggaataatgctttacgatcttggcctgtcattttggccctgtgctacctgggatccaaagattggcgtgggacgcttcggctcagtagagtagatttccacatgaaccgcatctaaattcgagtgaaatatgggggaaatgaatatacagtatcgaaaagagatgtgaattagaaacgggcactgatagataaataatctatattgtgtgtttgtagctgcatcttcaaatgctactctaaagagcgaaatatttctggtactggtactgttttttgcctattaaatgtagtgtgctttcgaattccgttgctgtcagttactcttgctgaattgctcaaaattaggagtctcacaaaaacacaactacctttctccagggcacagacgaccaggttcgagacaaaaatgcaaagtggcccactctaggagtcgcgatgctatcaaaaattctacgtaaatatggtacacagaacatattcggcaatcaccatccgcataacacccatacgcgcaatccgagctgcccttggaagtcggagtgcggatgcgggcacggatgcgtttgtggcgacgtccccggcgattcgcaggtgatctgccgcggaatacacgactgggatcggcgcagtgcggcacaccacgagcgccgtaagatcattccgaaactggtgtatttgcacaatccgtggaagtacctggtgaccaagttcaatctgtggaagcttaagtggctctgggatcgggagtttagcgagcctgacttcttggagggcgccaagcaggcggccatcgtgatgacggacatcatccgtcagcagagtgccgataagattagcgagtatacgacaccggtgggcttccagcagatcacccgggacatgctgctatcccgcaacgacacgcgcctccagctggtcaggttcgagcgggagcacctgcgccgcgcgattcccatgaaggtggccacgcgccagaattttggccggaaatacgcctttatagacatgctgtttgtgggcctgcgaaataccaaggactttgatacggccaccgaggtggtggaggtcagtgagatcatccgccggatggacaacgagcttaagacaccgccagaggtcgtagctgttccgcatcgaattgttttcgccgagatcttcatccgctttagaagggactacacggctgatgccagaaagggggtcaatctgaatagctatccttcattcagtgctaccacaagggcagatgcagttggcagtgcaaagcctctgcagacaccattcattcagtccgctctggatcccatgaaatccgctcagaatccgtctacgtcggctcttccgcaaacgggaaggatcctgcaccgcatggacgacgtgggctggtcggtgtccttctacaagatcctaaccttcgacgtcctcaactatgatccgcagaacaagagacaccagcacccgtccgacgataagccttagtgttagtgatcagttaaaactctttggttatgcaatgattgggaaaatgtatgataaattccagctggcaataaattaaactatgcaacttattcagcattttcaataatatttgtactaaacaagtttttagatgaatagcaagtcccaagataagtagctattattcaatcactgcagagtaaacttccataccgtttataatcgaattcatccgatgatttggttcccataactaatgccatcatttaagcccatttttgcgtgaactctttaagctcactgaaaacccacaagttcacacctttttttttttttttgggccacacacgaaaatgtgtgtacaaaacgatgttgtaatgagccacattacacgatttgatcttgttagctgatgttgtgatgttatttttgtcgttattgttgtttcggctctaattggttttccaacattagcttttgggcttggagtcattcggctgtggggcttggccttggcgtgacccaatcaatttaaatatgccgaatgattgaaggaaataacataaataaattgactaatgtatatgtacataccacgagctcgtgtcatttggcgtttttacatcgtgcctaacatatttttgcataattcgaacatgttaaatggttttttggaaatttactttggaggtggtcccattgggagcccaaatccaaatttaattcgagggcaatgggatgctaaatatgttatgctggttagttatgggggaaagctcaacccaaaaacaaggaaattccatatagatgactatgagtagttcaagctcaaccattcgttatccatttccaccttaatgcgacagacatttatttagttaagcccatgatccttgcgcccgtcaatcgaaacaagttgttttgactgcagttttaaaggacatttttcaaagtgacgtggtaccacttcgctttcatcccgcccaattccaattagttgcccacgggaaaagctatt

SEQ ID NO: 5690 - DNA, 1109 bp, DROSOPHILA
ttctccagggcacagacgaccaggttcgagacaaaaatgcaaagtggcccactctaggagtcgcgatgctatcaaaaattctacgtaaatatggtacacagaacatattcggcaatcaccatccgcataacacccatacgcgcaatccgagctgcccttggaagtcggagtgcggatgcgggcacggatgcgtttgtggcgacgtccccggcgattcgcaggtgatctgccgcggaatacacgactgggatcggcgcagtgcggcacaccacgagcgccgtaagatcattccgaaactggtgtatttgcacaatccgtggaagtacctggtgaccaagttcaatctgtggaagcttaagtggctctgggatcgggagtttagcgagcctgacttcttggagggcgccaagcaggcggccatcgtgatgacggacatcatccgtcagcagagtgccgataagattagcgagtatacgacaccggtgggcttccagcagatcacccgggacatgctgctatcccgcaacgacacgcgcctccagctggtcaggttcgagcgggagcacctgcgccgcgcgattcccatgaaggtggccacgcgccagaattttggccggaaatacgcctttatagacatgctgtttgtgggcctgcgaaataccaaggactttgatacggccaccgaggtggtggaggtcagtgagatcatccgccggatggacaacgagcttaagacaccgccagaggtcgtagctgttccgcatcgaattgttttcgccgagatcttcatccgctttagaagggactacacggctgatgccagaaagggggtcaatctgaatagctatccttcattcagtgctaccacaagggcagatgcagttggcagtgcaaagcctctgcagacaccattcattcagtccgctctggatcccatgaaatccgctcagaatccgtctacgtcggctcttccgcaaacgggaaggatcctgcaccgcatggacgacgtgggctggtcggtgtccttctacaagatcctaaccttcgacgtcctcaactatgatccgcagaacaagagacaccagcacccgtccgacgataagccttag

SEQ ID NO: 5691 - protein, 347 aa, DROSOPHILA
MLSKILRKYGTQNIFGNHHPHNTHTRNPSCPWKSECGCGHGCVCGDVPGDSQVICRGIHDWDRRSAAHHERRKIIPKLVYLHNPWKYLVTKFNLWKLKWLWDREFSEPDFLEGAKQAAIVMTDIIRQQSADKISEYTTPVGFQQITRDMLLSRNDTRLQLVRFEREHLRRAIPMKVATRQNFGRKYAFIDMLFVGLRNTKDFDTATEVVEVSEIIRRMDNELKTPPEVVAVPHRIVFAEIFIRFRRDYTADARKGVNLNSYPSFSATTRADAVGSAKPLQTPFIQSALDPMKSAQNPSTSALPQTGRILHRMDDVGWSVSFYKILTFDVLNYDPQNKRHQHPSDDKP

SEQ ID NO: 5692 - DNA, 5415 bp, DROSOPHILA
aaatacgatacgatgtatatgcggttgcatttttccaaactttcggctatacatacatacatacatactcacatgcatattttactgagcatcggcgcactctcggatgcccaagtgaccgagagagattccgatcccaattcggatgcagatcgagatgcagatatagatacacttgacacgcttgatacacgctgacatgtccttcaccgatacaaatcagagcacaatatatgcagataagttgtactcgatggaaacctgaaagaacattaaaagtaaaaataatattactataactattttttttttttttgtaggatttactagaaataatatatatatgtaatttcgaacacttttaaagtccgaatttattgacaaaacaaaattaggaaagaaagcagatgaataattatcataaagtcagcaaagaattacacgttagtaaataaaaaaaaggcacaaataacaagaaactcatttcatgcatacaaacatacatgtatacaaactaattgtacattttctattactaaccctaatgaaaatcaaacctcatcccctgtcagcattattcacgcaacgcaaaacggggatgcagtgaagatcgaaaacgcataaaatatataaatcgagtcagagaggtgtaaaagatgtttatcatgacggattgcattctgcatgctcaagtgcactggcacagtttaaatgtgggcacacgtttaacgacggcaggaaagcacgcatccaacataaatatatataaataaaataattacatgtatacaaggaaaacactaattattaataaaaaccaaaacaaaaaaggttacttgattgctttgtgggcgtgggaggcgaattggggtgattttagcatggcaaaacaggaattcgatgcacacaagaaagtaacgaatgctaattcaaattccgataacgataacaagctcctacccgtgcttgccgataattctcttggcgactggctatcgatactgctagtgccatcacttctcagattggggcgttttggtagaactaattgtaaacagcggaggaaaaggcagcagaatggacacgtctatgcctaaccagcccaagttcctgccccgcattgagcataattcctcgggcgctaccgccaactcctacgtggccaccgcctccggcaatcccttcgaaacggacgatgaggatgaaatcttcagcaggcacaagatggtgctccgggtgcccagcaactgcaccggcgacctgatgcacctggccgtctcgcggaattggctcgtctgcctgttgggcacgccggagcggacaactctgctgcgcttcttcctgcctcgcgcgattccaccgggaggtatgttcgggaggtttgctcttgacttgctgtagctccttctacttctcctgtccttgcagaagcggtgctggaaaagtacctctctggctccggctataaaataacacgcatgttcctggaccccacgggccatcacatcattatcgcactggtgccaaagtccgctaccgctggtgtctctccggactttctgtacatccactgcctcgagtcgccccaggcgcaacagctgaaggtgcggcgcatcgagaagttcaaggaccacgagataacggccgtcgctttcaatccgtaccacggcaacgagtcctccacggggcccatcctgcttggcacaagtcggggcctcatattcgagaccgagctgaatcccgcagccgacggtcatgtccagcgcaagcagctttatgacctgggtctgggccgtcccaagtacccaatcacgggcctcaagctgctgcgggtgcccaacagcagtcggtacataatcgtggtcaccagtcccgagtgcatctacacattccaggagacgcttaaggcagaggagcgctcgctgcaggcaatattcgcgggctacgtgagcggagtgcaggagccgcactgcgaggagcgcaagactgatctgactttctcgcagctccgctttttcgctccgccgaacagcaagtatccgaagcagtgggcgtggctgtgtggcgagggcatccgtgtgggcgaggtgagtggctgcttttattgtacgtcgtctttcgctaacagttttgcgatctagctatccatcgaggcaaacagtgccgccaccctgataggaaacactctaataaacctggacttcgagaagacaatgcatctgtcgtacggcgagcggcgtctcaacactcccaaagcgttcgtgctgaccgagtaccacgccgtgctgctgtacgcggatcatgtgcgggccatctgcctgctgaaccaagagcaggtctaccaggaagcattcgacgaggcccgagtgggcaaaccgcttagcatcgaacgggacgagcttaccggctcaatatacgtttataccgtgaaaaccgtgtttaacctcagggtgacgcgagaggagcgaaacgtgtggcgcatttacctcgacaagggtcagtacgagctagcaacggcacacgcagccgaggatcctgaacaccttcagcttgtgctctgccagcgggcggatgccgcattcgcggacggatcctatcaggtggcagccgattattacgctgagacggacaagtcctttgaagaggtgtgcttgaagttcatggtgctgccggacaagcgaccgattatcaactacgttaagaaacgccttagccgagtgaccactaagccaatggaaaccgatgagctggacgaggacaaaatgaacatcatcaaggcgttggtcatctggctaattgacctctacctcatccagatcaacatgcccgacaaggacgaggagtggcgcagctcgtggcagacggagtacgacgagttcatgatggaggcccatgttctgtcatgcacgcgtcaaaatcgcgaaactgtacggcagctgatagccgagcacgctgacccgcgcaacatggctcaattcgccatcgccattggcgactatgatgaagtggtggcgcaacagcttaaggccgagtgttatgccgaggcactgcaaacgctgattaaccaaaggaatccagaactgttctacaagtacgcgcctgaactgataactaggctgccaaagcccacggttgacgccctaatggcccagggatctcgactggaggtggagaagctggtccccacgctcataatcatggaaaatcgcgagcagcgggaacagacccaacgataccttgagttcgccatttacaaactaaacacgaccaatgacgccatccacaattttttgctgcatttgtacgcggagcacgagcccaagctgctgatgaagtacctcgagatccagggccgcgacgagagcctcgtccactatgatatatattacgcccacaaagtgtgcaccgacttggacgtgaaggaagctcgcgtgtttctcgaatgcatgctgcgcaagtggatctctgcagtggatctggccctcacgttcgacatgaagctggccaaggaaaccgcctccaggccgtcggacagcaagatccggcggaagctctggcttcgcataggtttgttgactcagagctctgccctcgtatcgttcatttatcggcccttgtctgcttgcagcttatcacgacataaagggaaccaacgacgtcaaaaaggcattgaatcttttgaaggagtgcgatctcttacgcatcgaggacctactgcccttctttgcagactttgaaaaaatcgacaacttcaaggaggcaatctgtgatgctctgagggtatgcgcaatccaaaataaatataggttattccattaccattcggttccattgctcggcaggattacaatcagcgcatccaggagctgcagcgtgaaatggccgagactacggagcaaaccgatcgcgtcaccgccgagttgcagcaattgcgccagcacagcctcaccgttgagtctcaggatacttgcgaaatttgcgagatgatgctgctggttaagccctttttcatcttcatctgcggccacaagttccacagcgattgcctggagaagcacgttgtgcccttgctcaccaaggagcaatgtcggcgcctcggcactctaaagcagcaactggaggcggaggtgcaaacgcaggcgcaaccgcagtcaggtgccctgagcaaacagcaggcgatggagctgcagcggaagagggcggcactgaaaaccgagatcgaggatattcttgctgcggattgcctattctgcgggctgctaatcagcaccatcgaccagccgttcgttgacgactgggagcaggtgaatgtcgagtgggagtagttcgctaccaccgtcgttcagacccaaatatttatgtacatataaagtatttattattataaataaacctacactgatcacaaaggtttcgactgagatagccgtccaaattctacagttacctggccatcgcccacttgcccgcagagcaggtcagtccacaatctgcatgcgcaactcgttggtcacgaatgacatgacagtgttaagcacagcctgctgaatggaggcgttctggacaatcagcggcagcagcatcaccacgtcggtgggatgtatgtcggccacggccatggttacgtgctgcaccagctgctctcgctgtgcgtccgtcaggtcgtttaggatgacttcgcccagcggacggaatgtgcctgttcgggaggagggaagtggaaatgtagtgagactgagtacgggagttctcctccgcttaccgcttgtcatcttgtaggcggcgattccgccggcggccccgccaaccgccagcccaacggggcccaggagcatgccacccgcaaaggagcaggcggcgcagattgccgctcccttgccggactgcttgacggcgacgcggacgttgcgctcgtccgctacgatggctatcgcctccatcaactcgcgcgtatctatgggcatatttaggctacgtggagttggcccgaatttcgcaacgctatgctagtatttcctgtttagactttgttccgtgcggcagtatgacgtttccgattacgccacccgttccgtttgtatcctgccttttagtgttggtcttgaattctccaacttgctactcgacaacataaacaatttcacggaatccgcttgaagggaactattaaaaagcttatatttgacttaaaaaacagcaacttgattaaacttgtgagcgccagattcagagatgcgcaaacggcggtcacaatcgacgtttatatcgatatatggccttaacccttatgtgttaacccattcctgttatgggtcatacattaaatttcttatattaatcctataggttattactgtcctgttgctaagttaaagatgaacaataaattaaatatatatgtgtttattatataaa

SEQ ID NO: 5693 - DNA, 3176 bp, DROSOPHILA
actgctagtgccatcacttctcagattggggcgttttggtagaactaattgtaaacagcggaggaaaaggcagcagaatggacacgtctatgcctaaccagcccaagttcctgccccgcattgagcataattcctcgggcgctaccgccaactcctacgtggccaccgcctccggcaatcccttcgaaacggacgatgaggatgaaatcttcagcaggcacaagatggtgctccgggtgcccagcaactgcaccggcgacctgatgcacctggccgtctcgcggaattggctcgtctgcctgttgggcacgccggagcggacaactctgctgcgcttcttcctgcctcgcgcgattccaccgggagaagcggtgctggaaaagtacctctctggctccggctataaaataacacgcatgttcctggaccccacgggccatcacatcattatcgcactggtgccaaagtccgctaccgctggtgtctctccggactttctgtacatccactgcctcgagtcgccccaggcgcaacagctgaaggtgcggcgcatcgagaagttcaaggaccacgagataacggccgtcgctttcaatccgtaccacggcaacgagtcctccacggggcccatcctgcttggcacaagtcggggcctcatattcgagaccgagctgaatcccgcagccgacggtcatgtccagcgcaagcagctttatgacctgggtctgggccgtcccaagtacccaatcacgggcctcaagctgctgcgggtgcccaacagcagtcggtacataatcgtggtcaccagtcccgagtgcatctacacattccaggagacgcttaaggcagaggagcgctcgctgcaggcaatattcgcgggctacgtgagcggagtgcaggagccgcactgcgaggagcgcaagactgatctgactttctcgcagctccgctttttcgctccgccgaacagcaagtatccgaagcagtgggcgtggctgtgtggcgagggcatccgtgtgggcgagctatccatcgaggcaaacagtgccgccaccctgataggaaacactctaataaacctggacttcgagaagacaatgcatctgtcgtacggcgagcggcgtctcaacactcccaaagcgttcgtgctgaccgagtaccacgccgtgctgctgtacgcggatcatgtgcgggccatctgcctgctgaaccaagagcaggtctaccaggaagcattcgacgaggcccgagtgggcaaaccgcttagcatcgaacgggacgagcttaccggctcaatatacgtttataccgtgaaaaccgtgtttaacctcagggtgacgcgagaggagcgaaacgtgtggcgcatttacctcgacaagggtcagtacgagctagcaacggcacacgcagccgaggatcctgaacaccttcagcttgtgctctgccagcgggcggatgccgcattcgcggacggatcctatcaggtggcagccgattattacgctgagacggacaagtcctttgaagaggtgtgcttgaagttcatggtgctgccggacaagcgaccgattatcaactacgttaagaaacgccttagccgagtgaccactaagccaatggaaaccgatgagctggacgaggacaaaatgaacatcatcaaggcgttggtcatctggctaattgacctctacctcatccagatcaacatgcccgacaaggacgaggagtggcgcagctcgtggcagacggagtacgacgagttcatgatggaggcccatgttctgtcatgcacgcgtcaaaatcgcgaaactgtacggcagctgatagccgagcacgctgacccgcgcaacatggctcaattcgccatcgccattggcgactatgatgaagtggtggcgcaacagcttaaggccgagtgttatgccgaggcactgcaaacgctgattaaccaaaggaatccagaactgttctacaagtacgcgcctgaactgataactaggctgccaaagcccacggttgacgccctaatggcccagggatctcgactggaggtggagaagctggtccccacgctcataatcatggaaaatcgcgagcagcgggaacagacccaacgataccttgagttcgccatttacaaactaaacacgaccaatgacgccatccacaattttttgctgcatttgtacgcggagcacgagcccaagctgctgatgaagtacctcgagatccagggccgcgacgagagcctcgtccactatgatatatattacgcccacaaagtgtgcaccgacttggacgtgaaggaagctcgcgtgtttctcgaatgcatgctgcgcaagtggatctctgcagtggatctggccctcacgttcgacatgaagctggccaaggaaaccgcctccaggccgtcggacagcaagatccggcggaagctctggcttcgcatagcttatcacgacataaagggaaccaacgacgtcaaaaaggcattgaatcttttgaaggagtgcgatctcttacgcatcgaggacctactgcccttctttgcagactttgaaaaaatcgacaacttcaaggaggcaatctgtgatgctctgagggattacaatcagcgcatccaggagctgcagcgtgaaatggccgagactacggagcaaaccgatcgcgtcaccgccgagttgcagcaattgcgccagcacagcctcaccgttgagtctcaggatacttgcgaaatttgcgagatgatgctgctggttaagccctttttcatcttcatctgcggccacaagttccacagcgattgcctggagaagcacgttgtgcccttgctcaccaaggagcaatgtcggcgcctcggcactctaaagcagcaactggaggcggaggtgcaaacgcaggcgcaaccgcagtcaggtgccctgagcaaacagcaggcgatggagctgcagcggaagagggcggcactgaaaaccgagatcgaggatattcttgctgcggattgcctattctgcgggctgctaatcagcaccatcgaccagccgttcgttgacgactgggagcaggtgaatgtcgagtgggagtagttcgctaccaccgtcgttcagacccaaatatttatgtacatataaagtatttattattataaataaacctacactgatcacaaaggtttc

SEQ ID NO: 5694 - protein, 1002 aa, DROSOPHILA
MDTSMPNQPKFLPRIEHNSSGATANSYVATASGNPFETDDEDEIFSRHKMVLRVPSNCTGDLMHLAVSRNWLVCLLGTPERTTLLRFFLPRAIPPGEAVLEKYLSGSGYKITRMFLDPTGHHIIIALVPKSATAGVSPDFLYIHCLESPQAQQLKVRRIEKFKDHEITAVAFNPYHGNESSTGPILLGTSRGLIFETELNPAADGHVQRKQLYDLGLGRPKYPITGLKLLRVPNSSRYIIVVTSPECIYTFQETLKAEERSLQAIFAGYVSGVQEPHCEERKTDLTFSQLRFFAPPNSKYPKQWAWLCGEGIRVGELSIEANSAATLIGNTLINLDFEKTMHLSYGERRLNTPKAFVLTEYHAVLLYADHVRAICLLNQEQVYQEAFDEARVGKPLSIERDELTGSIYVYTVKTVFNLRVTREERNVWRIYLDKGQYELATAHAAEDPEHLQLVLCQRADAAFADGSYQVAADYYAETDKSFEEVCLKFMVLPDKRPIINYVKKRLSRVTTKPMETDELDEDKMNIIKALVIWLIDLYLIQINMPDKDEEWRSSWQTEYDEFMMEAHVLSCTRQNRETVRQLIAEHADPRNMAQFAIAIGDYDEVVAQQLKAECYAEALQTLINQRNPELFYKYAPELITRLPKPTVDALMAQGSRLEVEKLVPTLIIMENREQREQTQRYLEFAIYKLNTTNDAIHNFLLHLYAEHEPKLLMKYLEIQGRDESLVHYDIYYAHKVCTDLDVKEARVFLECMLRKWISAVDLALTFDMKLAKETASRPSDSKIRRKLWLRIAYHDIKGTNDVKKALNLLKECDLLRIEDLLPFFADFEKIDNFKEAICDALRDYNQRIQELQREMAETTEQTDRVTAELQQLRQHSLTVESQDTCEICEMMLLVKPFFIFICGHKFHSDCLEKHVVPLLTKEQCRRLGTLKQQLEAEVQTQAQPQSGALSKQQAMELQRKRAALKTEIEDILAADCLFCGLLISTIDQPFVDDWEQVNVEWE

SEQ ID NO: 5695 - DNA, 4904 bp, DROSOPHILA
tcccgcatttgttttgtttgtttatagcaattatggatccttcaattattgaatttattggcgaaaaatgcatgatcagcataataccgaacttcagcaacgagcctctgcacctgatatacggacctgtgggccctttccgagccggttttcccgtcttcgtgcccctgtggatggccacgcatctgcgcaagcaacaaaagtgccgaattgtacctccagaatggatggacatggatatattggaggaaatcaaggaggaggaaaagcgctcaaagtatgtatgatgtgggtatgcccgtggaaagcaaatcttattctccgcctgcccataggttctttaccaaaatgccctgtgagcattacatggtagtggcccagttggtcatgagcacggctccggatgacgttccgcgttgcgaggagctgcgcactgtgatcaaggacatcttcgacatacgcgagtccaagctgcgcacttcgatcgacgcctttatcaagggagagggcacatatgcaaagctagacaacctcacgcttctggagatccacagcgtgagacccattctgccctattccctggaccacatagcacggtaccagcgcacggccactgcgtctcaaagggacacctccatgctaagtgcatccatggcaggctccagttcgggtccgaacagtaactctctgttttctcagtgattattccagtcaaacaacattgttgggaacatttaagataatagatttagttattagcaggagcttatgtagcctgtagtcattaaacctctcaaaagttcaaaaatatttgtatgcttaaaattaaatataaatgctttcagaaaattaaaaaaagtaattagaattagaagtttttgataaggcatttcaaattccgataaatttctttatcgatatgcgcttatctaacaggactgcgccttacagcacgacagcaatttaacagcagctgctatcatataattgcactgtatccctggttttccacgaagagaataacaataacttttttatacaaataaataaggataaagcgagatgagcgagtctgcggtagcggtggagccggaagaaaggatggttgctaacaacaaaatccatttctccaaggaggtgaagcaggtcatcgacaaggtgagtcagtggaacatatgttggtagcaattaccaacccaattcgaatgtccataaaaggttctcaaaacggacgatccgatggatgcgccggacttcaacactgtggactacatcaaccagctcttccccaacgagcaatcgctggccggtattgatgagaccatccaaaagatgcagtgcgaggtgtccctgattgatgacaacatccgatccgtggttcgtggccaaacgaacaccggccaggatggacaactggcactgtgcgaggctcaaaaggttatcagctccctgttcagccacatcatcgacgtgaagacccgggcggagcgcaccgaggaaatggtcaaggagataacccgggatatcaagcagctggactgcgccaaacgcaatctaaccgctgccatcacaacgctgaatcacctgcacatgctggtcggtggaattgaaagtctgaacaaattgatcgagcggcgatcctatggtgaaatccttaatcccctccaggcgattaccgaagttaaccagcacttccagcagttctccgacatcgaggaaatcaaggttggtttggattgtatatgagatcatttactcaaatgtcgatttttctcctttagaatctctcacaaagcgtagataagatacaggttacactggcccagcaaatcacagaggatttcaaggaggcgttttcagcaaagccatcgtcacagaaccaacaccgtttgggtcttaaccagttggccgatgcttgtaaagtgatgtccgtgctggatcccaaagtgaagaaggagctgctcaagtggtttattgcacaacaactggaggagtacacgcacttgtttcacgagaatcaggatattgcctggctggacaagattgataagcgttatgcctggcttaagaggcatctgctagacttcgaggacaagtatggaccggtgtttccactggactgggaggtctccgagcgaattactgtggagttttgtcgacagacacgcgaacagctggcacaaatcatggccaaacgcaccaacgaaatcgatgtgagactacttttgttcgccatcaacaagacgcaggcttttgaacagctgctttccaagcgattcacgggcgttacactgggtgcacagccgacggataaagcgagagtacttgctgaaccaacgacgacggacggtgctgtgggcttaaccgttttccacgaccaaatcggacaatgctttaagccgcacttggacatctacatacgcagcatcgaccgcaatctttcggagctgatggacaagttcgtagagatgtctcgggaaccatacaagttcgccgaggccaagaccaccgtgtaccccagctctggtgatctattcgtcttttacaagaagtgcatggtgcagtgcaaccagctaagcaacgaacaaccaatgtacgatctggctttggtgtttaaaaaatatctacgggagtacgcctccaaagtgctcgagggcagcacacccaagcttgtgccagccaccactagcagctcgatcggtaaaagtgtttcgttactcacgcgcgatatgcagaatctatcaacggccgctggtcaggtgtttcacaatttcctcaaagagggcgatacgcagcgatttgcaagagatgatctggtgcgcatttgttgcgttctgaccacgggtgagtactgtttggagacggtccaacagctggaggataaactgaaggaaaaggtgacttctgcatatgtcagcaagattgacatgagcgaggaaaaggatgtctttcataggtgagtaaaaatttttgctatcaaataatcaaatagtttattaatatttgtaacttttctagaatcatttccaactgcatccaacttttggtccaagatctagaggctggctgcgaagcttcgctgcaggcgatggccaaggtgcagtggcaacacattaacaacgtgggcgaccagagcgccttcatcagcagcctgtgcggtaactttaagcagacagtgcctaccatcagggacacgctagccagttcgcggaagtatttcacccagttctgccatcgcttcgtcgccgccttcataccgaagttcatcaatgtgctctatcgctgcaaactaaccctctcggatggttccaacaatgttctgggctgcgagcaactcttgttggacacccattcgctaaagacggctttattagagctaccttccgtgggatcgagtgtgaaccgcaaggcgcccaccagttacaccaaagttgtggtcaaggacatgactcgggccgagatgatcatcaaggtggtgatgacgccggtacagccgccggcgcacttcactcagcaagtgcttaagctgctgccagacattaccattgcggagtaccaaaagattctggatatgaaggcggtcaaacgtgtggatcaactgcaactgattgatcttttcaagcacacggcatctgcagcggctgtgagtggcttaatagagccaactactggagaggaggagacccaaggtgcagaaacagtagtcgcaacttcggggaccacagacgatgctgaaacctcagcagtaccaactgaaacaacaacggcaacttcctcaacccccaaacgagcctttatcttcagcgtgggcagctttacgggaagcgcagataaaaatgccgatggaagttcccagacgggcatcagaaagctggaaaacctactgaaaaagcgcttcccctagttaatatacggctacatcttgagaaatcattccactaagttagctttagtttgacaatatcggttaatgattagttgcttaatttattaggtctatccggtttatatggttggtatgttttaagacagctatggaacattcgattttgtattattcgcaatccatccgcctattttaaatattttttattaaatgtctggcttctgttaaacaaaatggaaaacgtttgtttttgtttgctatggaaagcacctggtatttattgcaaagataaagtaaatacgtacatacatgaatttgtaaaatttgtttcgtaaagggtatattttagttataacagtcgattacagcgtttgatatcgataagcgctcgataacaatacgctgaaaacagggttgcccgttgttgatagccctgaaaattgtaaacaaacgactaggtaagccacaaaaatcattttaaccaacgttttatacgattaaatgattccagggcgatggagaacgtgtgtcagtgctgcaaggtacgaccgggcttgtcggtcaaacgcggtggctcgcttccgaaaaccctttgcctgcagtgcctgcatatggacacatttggcaccaagcataagggaccaaggcccgaaacccaaattaacgacaaggttcacttagaaatgtccataaacggcgaagacggcctgccggagcatcctttatatccagaagtgcaactggtagttaaggaggaggacgctctaattaagaagaaggttatcgaggaaaaccacatacataatgaggagatcataggagcgagcaacatagtagacgtagaggttcatgagaatcatcgcgcaaataacgacgtgatcctcatacaggattccttcgctgaggaggtaattcttgaggatcatcccgcaaataacgacgtgatcatcatacaggattccgtcgctgaggaggagctccccgtaattaaggaggaggctattgaaggggaggactt

SEQ ID NO: 5696 - DNA, 2669 bp, DROSOPHILA
ctggttttccacgaagagaataacaataacttttttatacaaataaataaggataaagcgagatgagcgagtctgcggtagcggtggagccggaagaaaggatggttgctaacaacaaaatccatttctccaaggaggtgaagcaggtcatcgacaaggttctcaaaacggacgatccgatggatgcgccggacttcaacactgtggactacatcaaccagctcttccccaacgagcaatcgctggccggtattgatgagaccatccaaaagatgcagtgcgaggtgtccctgattgatgacaacatccgatccgtggttcgtggccaaacgaacaccggccaggatggacaactggcactgtgcgaggctcaaaaggttatcagctccctgttcagccacatcatcgacgtgaagacccgggcggagcgcaccgaggaaatggtcaaggagataacccgggatatcaagcagctggactgcgccaaacgcaatctaaccgctgccatcacaacgctgaatcacctgcacatgctggtcggtggaattgaaagtctgaacaaattgatcgagcggcgatcctatggtgaaatccttaatcccctccaggcgattaccgaagttaaccagcacttccagcagttctccgacatcgaggaaatcaagaatctctcacaaagcgtagataagatacaggttacactggcccagcaaatcacagaggatttcaaggaggcgttttcagcaaagccatcgtcacagaaccaacaccgtttgggtcttaaccagttggccgatgcttgtaaagtgatgtccgtgctggatcccaaagtgaagaaggagctgctcaagtggtttattgcacaacaactggaggagtacacgcacttgtttcacgagaatcaggatattgcctggctggacaagattgataagcgttatgcctggcttaagaggcatctgctagacttcgaggacaagtatggaccggtgtttccactggactgggaggtctccgagcgaattactgtggagttttgtcgacagacacgcgaacagctggcacaaatcatggccaaacgcaccaacgaaatcgatgtgagactacttttgttcgccatcaacaagacgcaggcttttgaacagctgctttccaagcgattcacgggcgttacactgggtgcacagccgacggataaagcgagagtacttgctgaaccaacgacgacggacggtgctgtgggcttaaccgttttccacgaccaaatcggacaatgctttaagccgcacttggacatctacatacgcagcatcgaccgcaatctttcggagctgatggacaagttcgtagagatgtctcgggaaccatacaagttcgccgaggccaagaccaccgtgtaccccagctctggtgatctattcgtcttttacaagaagtgcatggtgcagtgcaaccagctaagcaacgaacaaccaatgtacgatctggctttggtgtttaaaaaatatctacgggagtacgcctccaaagtgctcgagggcagcacacccaagcttgtgccagccaccactagcagctcgatcggtaaaagtgtttcgttactcacgcgcgatatgcagaatctatcaacggccgctggtcaggtgtttcacaatttcctcaaagagggcgatacgcagcgatttgcaagagatgatctggtgcgcatttgttgcgttctgaccacgggtgagtactgtttggagacggtccaacagctggaggataaactgaaggaaaaggtgacttctgcatatgtcagcaagattgacatgagcgaggaaaaggatgtctttcatagaatcatttccaactgcatccaacttttggtccaagatctagaggctggctgcgaagcttcgctgcaggcgatggccaaggtgcagtggcaacacattaacaacgtgggcgaccagagcgccttcatcagcagcctgtgcggtaactttaagcagacagtgcctaccatcagggacacgctagccagttcgcggaagtatttcacccagttctgccatcgcttcgtcgccgccttcataccgaagttcatcaatgtgctctatcgctgcaaactaaccctctcggatggttccaacaatgttctgggctgcgagcaactcttgttggacacccattcgctaaagacggctttattagagctaccttccgtgggatcgagtgtgaaccgcaaggcgcccaccagttacaccaaagttgtggtcaaggacatgactcgggccgagatgatcatcaaggtggtgatgacgccggtacagccgccggcgcacttcactcagcaagtgcttaagctgctgccagacattaccattgcggagtaccaaaagattctggatatgaaggcggtcaaacgtgtggatcaactgcaactgattgatcttttcaagcacacggcatctgcagcggctgtgagtggcttaatagagccaactactggagaggaggagacccaagtaccaactgaaacaacaacggcaacttcctcaacccccaaacgagcctttatcttcagcgtgggcagctttacgggaagcgcagataaaaatgccgatggaagttcccagacgggcatcagaaagctggaaaacctactgaaaaagcgcttcccctag

SEQ ID NO: 5697 - protein, 868 aa, DROSOPHILA
MSESAVAVEPEERMVANNKIHFSKEVKQVIDKVLKTDDPMDAPDFNTVDYINQLFPNEQSLAGIDETIQKMQCEVSLIDDNIRSVVRGQTNTGQDGQLALCEAQKVISSLFSHIIDVKTRAERTEEMVKEITRDIKQLDCAKRNLTAAITTLNHLHMLVGGIESLNKLIERRSYGEILNPLQAITEVNQHFQQFSDIEEIKNLSQSVDKIQVTLAQQITEDFKEAFSAKPSSQNQHRLGLNQLADACKVMSVLDPKVKKELLKWFIAQQLEEYTHLFHENQDIAWLDKIDKRYAWLKRHLLDFEDKYGPVFPLDWEVSERITVEFCRQTREQLAQIMAKRTNEIDVRLLLFAINKTQAFEQLLSKRFTGVTLGAQPTDKARVLAEPTTTDGAVGLTVFHDQIGQCFKPHLDIYIRSIDRNLSELMDKFVEMSREPYKFAEAKTTVYPSSGDLFVFYKKCMVQCNQLSNEQPMYDLALVFKKYLREYASKVLEGSTPKLVPATTSSSIGKSVSLLTRDMQNLSTAAGQVFHNFLKEGDTQRFARDDLVRICCVLTTGEYCLETVQQLEDKLKEKVTSAYVSKIDMSEEKDVFHRIISNCIQLLVQDLEAGCEASLQAMAKVQWQHINNVGDQSAFISSLCGNFKQTVPTIRDTLASSRKYFTQFCHRFVAAFIPKFINVLYRCKLTLSDGSNNVLGCEQLLLDTHSLKTALLELPSVGSSVNRKAPTSYTKVVVKDMTRAEMIIKVVMTPVQPPAHFTQQVLKLLPDITIAEYQKILDMKAVKRVDQLQLIDLFKHTASAAAVSGLIEPTTGEEETQVPTETTTATSSTPKRAFIFSVGSFTGSADKNADGSSQTGIRKLENLLKKRFP

SEQ ID NO: 5698 - DNA, 5166 bp, DROSOPHILA
attcaaatgggagtatggccttcagtgggccgtttgccctttttcgccaccctcgtaaaaacaaattcgtatctacggcgcaggttcgagaagtgcaatctacaggtttcggtttcagggccttacatgtgggtggcgaattgtgtgtattcgggtacaactgaacatatggaaaaatttgcacagtactcttatgggttttccccgcgcggaagatacgggaaaaaccagagcctatatcgaggacttttctaatctgattggaattgtatgcgcacagctgcagctgggcgaatctgttcatccatatggagcgaactccatgatgtatatgtatggcgtttttcaggaacctggacttacggtctggggcgaaacgttgggcatcaggaatggaaacgaagccgttgcgcctgttgcggagttcgactcgagattctgttgataaagggagttttggtaatccccctctttcacaaggccatccacactgatcactccgataagcaggagcagccccacggaagcggctatttcggatatgcgtggcattttcaccgtattcgaactatattcgagtgtgcactgcactgaatactttgtggaaaacgaaaaaaaaccttcctgtttggaagaacaatacgttttgtattgctctctccgatatttttccacacgtagctaggcccagtttatatgtaagtaagtgcgttctaggcagcaatcgatacccagagccattatatcgatgacggcgccagggctgcaggctaagggttagcgggacattcaaatatatataacttgttcgcattaaagtacataaaaccaagtgtaattttcaacctttcgaatacagtgatttaaagacacctcaacgcaaaaggaaaccccacaaaagccagcccaattcaacgtgtctgcgttccgttcgacccactggggaattccccttttcgcatgcgccattcaattgattttctacgagcagagttcccaatgtttacggtgcgctcatttggttgtagctgtaggcctcgagttggaaccgctgggacttggaaaacatacgacgcttaaatggaggatcagggcgacgtgacagaccaagccgctggtaagctgagtagttcgaatgcccagtgctccagaaaccgatgtgctaatggtaaagctatatagatgtacactcaagagcggtactaaattatttacaaaaaatcgtgtaattcccagatgaccccattatgggcagccacagtcagagtcgccagaactcgtccggcatgctgaacatgatggacgccagctccttcagcatgcccccccccaatctgcactcctcaaaggtgatcaacccgaacaaggcgatattcacaatcgacgcgaacacagggcaaatttttatagtgaacaacaaggcctgccagctgctgggctacacgtcgcaggagttgaggaacaagggattcttcgacctgcttaacggcaagacagagagccacatctcctccctggcggagatgcagatcgaaggcgatgagggccgggtcgtcctgctaagtggaaaggtcatcgagatgaagaccaagtcgggcggcaagatcctggtctctctctggatccggcagatcagcagcgatggccgacacatagccgtcgcggagcctgtggagaggcatatttgccacatcagcaccgatagatccggagtgataacatccgttgactccaccacggccaccatattcttttatgaatccgtcgaaagcgtggtgggtgtcagcattgtcacccttatcccgtttataaagctgcccgatccggatagccgtgagatccccaagagcctgcggaagcagagagctactggtcgaactacggataacgtaaagtttcccctgtgcttgctaatagccctggacgaggatgcttctgcggggtattcccattcgggaaaaaccggtctaaatatcaccgtctgggtgttccagaatcttagtggcctgattgtggtagatgacataggcaacatactgatgtgcaaccagcctttctcgctgctaatgttcggatatggtcaggacaagataatgaacatgcatatatcggcgatcctacccaatttcggcaaggactctcgcgaggagaagagtccgaatgtttcgaacacctcgataaccagtaacgactgggagccggacacggatcccctcgtcgtggacaacgactcctcgctgcaatcctgcaagaagagctcgactaacaggacggcgcccaacaacgaacagtcttcggtgggcgatgcccacctaagctgcaatctggagaacagcagtggtctattctgcgacctccgccagccagatgattgtacaatagatgacattctaacacctgtaaatgcctcaaacagtttccccgctgacgagtttgaggtaggatcgcagtcgcaggtgaatgagtcgtcccttgacaaggcgaagtccgcgtccacggagacctgtgatgcctccggcagcaatcccgccaccagactgcttagttccatcaacggaagctttgtgggggaggccattcacgccgatggctccgtcatagaggtagtctactccgtgctcctccagatactgccctgctccaaccgggtgtactgcatctgggtgtgccgcaaccccagcactcggctggacggtgagaagtacaactatgcaaacctaacgtccacattcaacagcatggccagcactgttgagcagtcgctgggccaggtgataaagaccaccgctgcccagaactccagcagacccaattctctgtccttggtgtccaagtacgaggacgaattgtacctgggcgactacagcaaatactacacgtccatccgccagatcggaagaggagcctatgggtatgtgaatatggctttccggaacagcgaccgcctgctggtgatcaccaagtttattctcaaggagaagctctgctctcagtttatggttaagagccgcgactgcaaggaagttcctatcgagatccacctgctgcagaccctgaaccacaagaacattgtgtccgttctcgatgttttcgaaaatgatctattctaccagctggtcatggagaagcacggatccggaatggatctatggacgttcatagagcggcggcccctgatggacgaaaagctgggaagctacatttttcgtcaggtggccgatgccgtcaactatctgcacgaacagaagatactgcatcgggacatcaaggacgagaacattataattgaccagaacttcaccataaagctgattgacttcggatcggcgaccttcatggaggagggaaaattcttctccacgttctacggcacgacggagtactgcagtccggaggttctggccggaaacagatacgtgggtcccgagctggagatttgggcccttggtgtgacgctttacgttctgatgtttttcgaaaatccattcatcgatgtggaggagacattgaaggccgagattcaaataccgaaagctgtgtccgagcaattgagccgtctgttgagctccatgctgaataaggatcccaagtaccggtgcaccatgcaccagttaatcacagatccatggctcacccaggaggtgaatccctctactttcagtttctcgtggatagtgccgtgcaaggcccacgaggccaatccgaatctgtatttttccggctacctatactccagtacttcggtgctgtccactatttcaccgcaggagagcttctcccacatcgaggagtcctcgattgggggcagcgatgacgccagattagcatcccacagaaccggacacaagttgtgcgttaatgaaggtacaatacttcttcgtctgctgcgtattttagttgtaaagcatccctttgtcattctagccaagcacaacaaaatggacactctttacgcgaaacagttccagctaaacacctcagtgagtaaccacgagctgagggtctcgttacctgactcaagccacacagaaatcggcggttcaatatgctcctcgaaatccgagaacgatatattcaagaacaagcttcagccctgcgtctccacttataacgtagttagtctgcacgacgtgagcacgaaacccaagaagcttgatctgaaatgaagttcgaaatccgttgtgtacatgtgtaaatcgaatctgagcatactgtcatatgtaaatagcaacatttgtgaaaggacaattaagtattggggcggaaaagcatgtagatgaataaatcaatttaattgttactctacagcgttttgatggaggcgttcttacctttgatcggtcgaagcccaaataaataaactacactccgctctagcgcaacaaataactgaataacactttaatagcttcgtatggaatcgtcacgatttaacaactttctatacacatacatagagactacgaaaagtaagcgtttaactaaatatcattatggattcttgtgcgacttgattgactgaggtcaacagccccaccagatcgtacaatcacgtggtcatatatgaacgtgacggtatcaaacggcgggatttggaatgctttgcctgctaaccattacaattatccaggttttaatgggttcctaagtttaaacagctcgcaaactttttacaaatgtatatatatatactgtaagcgtaagcccgctacaaaatggttctaaaatatcgtatcggtgttgtcgtatttgcggtcccaatatcccccgctgtataaccaatcgtcgatctttgtatgtgggttagttgcgtatttaaaccacctgcaatgggtataagcgcaatgagcaatccaccggttgaatgcaatcagacttttttacctgggggaccagtcatcgctattggtggacttcctttgttttcgtgtgtgcctttgtttctcctcgagacgggtcttctccttggaggcaccatccaagttaccttcctctaggtgtaatatatcaggtcgcaatcgcgaatcggtagggcatagtgtcagcggtggtttcatgttgctatccatggcgttaagctgcagcgcaaaatgcgtaaactggtagtactgcaatgtagaagttagactggagattaaactggactgcgattcagggtttctggga

SEQ ID NO: 5699 - DNA, 3098 bp, DROSOPHILA
tgtttacggtgcgctcatttggttgtagctgtaggcctcgagttggaaccgctgggacttggaaaacatacgacgcttaaatggaggatcagggcgacgtgacagaccaagccgctggtaagctgagtagttcgaatgcccagtgctccagaaaccgatgtgctaatgatgaccccattatgggcagccacagtcagagtcgccagaactcgtccggcatgctgaacatgatggacgccagctccttcagcatgcccccccccaatctgcactcctcaaaggtgatcaacccgaacaaggcgatattcacaatcgacgcgaacacagggcaaatttttatagtgaacaacaaggcctgccagctgctgggctacacgtcgcaggagttgaggaacaagggattcttcgacctgcttaacggcaagacagagagccacatctcctccctggcggagatgcagatcgaaggcgatgagggccgggtcgtcctgctaagtggaaaggtcatcgagatgaagaccaagtcgggcggcaagatcctggtctctctctggatccggcagatcagcagcgatggccgacacatagccgtcgcggagcctgtggagaggcatatttgccacatcagcaccgatagatccggagtgataacatccgttgactccaccacggccaccatattcttttatgaatccgtcgaaagcgtggtgggtgtcagcattgtcacccttatcccgtttataaagctgcccgatccggatagccgtgagatccccaagagcctgcggaagcagagagctactggtcgaactacggataacgtaaagtttcccctgtgcttgctaatagccctggacgaggatgcttctgcggggtattcccattcgggaaaaaccggtctaaatatcaccgtctgggtgttccagaatcttagtggcctgattgtggtagatgacataggcaacatactgatgtgcaaccagcctttctcgctgctaatgttcggatatggtcaggacaagataatgaacatgcatatatcggcgatcctacccaatttcggcaaggactctcgcgaggagaagagtccgaatgtttcgaacacctcgataaccagtaacgactgggagccggacacggatcccctcgtcgtggacaacgactcctcgctgcaatcctgcaagaagagctcgactaacaggacggcgcccaacaacgaacagtcttcggtgggcgatgcccacctaagctgcaatctggagaacagcagtggtctattctgcgacctccgccagccagatgattgtacaatagatgacattctaacacctgtaaatgcctcaaacagtttccccgctgacgagtttgaggtaggatcgcagtcgcaggtgaatgagtcgtcccttgacaaggcgaagtccgcgtccacggagacctgtgatgcctccggcagcaatcccgccaccagactgcttagttccatcaacggaagctttgtgggggaggccattcacgccgatggctccgtcatagaggtagtctactccgtgctcctccagatactgccctgctccaaccgggtgtactgcatctgggtgtgccgcaaccccagcactcggctggacggtgagaagtacaactatgcaaacctaacgtccacattcaacagcatggccagcactgttgagcagtcgctgggccaggtgataaagaccaccgctgcccagaactccagcagacccaattctctgtccttggtgtccaagtacgaggacgaattgtacctgggcgactacagcaaatactacacgtccatccgccagatcggaagaggagcctatgggtatgtgaatatggctttccggaacagcgaccgcctgctggtgatcaccaagtttattctcaaggagaagctctgctctcagtttatggttaagagccgcgactgcaaggaagttcctatcgagatccacctgctgcagaccctgaaccacaagaacattgtgtccgttctcgatgttttcgaaaatgatctattctaccagctggtcatggagaagcacggatccggaatggatctatggacgttcatagagcggcggcccctgatggacgaaaagctgggaagctacatttttcgtcaggtggccgatgccgtcaactatctgcacgaacagaagatactgcatcgggacatcaaggacgagaacattataattgaccagaacttcaccataaagctgattgacttcggatcggcgaccttcatggaggagggaaaattcttctccacgttctacggcacgacggagtactgcagtccggaggttctggccggaaacagatacgtgggtcccgagctggagatttgggcccttggtgtgacgctttacgttctgatgtttttcgaaaatccattcatcgatgtggaggagacattgaaggccgagattcaaataccgaaagctgtgtccgagcaattgagccgtctgttgagctccatgctgaataaggatcccaagtaccggtgcaccatgcaccagttaatcacagatccatggctcacccaggaggtgaatccctctactttcagtttctcgtggatagtgccgtgcaaggcccacgaggccaatccgaatctgtatttttccggctacctatactccagtacttcggtgctgtccactatttcaccgcaggagagcttctcccacatcgaggagtcctcgattgggggcagcgatgacgccagattagcatcccacagaaccggacacaagttgtgcgttaatgaaggtacaatacttcttcgtctgctgcgtattttagttgtaaagcatccctttgtcattctagccaagcacaacaaaatggacactctttacgcgaaacagttccagctaaacacctcagtgagtaaccacgagctgagggtctcgttacctgactcaagccacacagaaatcggcggttcaatatgctcctcgaaatccgagaacgatatattcaagaacaagcttcagccctgcgtctccacttataacgtagttagtctgcacgacgtgagcacgaaacccaagaagcttgatctgaaatga

SEQ ID NO: 5700 - protein, 1005 aa, DROSOPHILA
MEDQGDVTDQAAGKLSSSNAQCSRNRCANDDPIMGSHSQSRQNSSGMLNMMDASSFSMPPPNLHSSKVINPNKAIFTIDANTGQIFIVNNKACQLLGYTSQELRNKGFFDLLNGKTESHISSLAEMQIEGDEGRVVLLSGKVIEMKTKSGGKILVSLWIRQISSDGRHIAVAEPVERHICHISTDRSGVITSVDSTTATIFFYESVESVVGVSIVTLIPFIKLPDPDSREIPKSLRKQRATGRTTDNVKFPLCLLIALDEDASAGYSHSGKTGLNITVWVFQNLSGLIVVDDIGNILMCNQPFSLLMFGYGQDKIMNMHISAILPNFGKDSREEKSPNVSNTSITSNDWEPDTDPLVVDNDSSLQSCKKSSTNRTAPNNEQSSVGDAHLSCNLENSSGLFCDLRQPDDCTIDDILTPVNASNSFPADEFEVGSQSQVNESSLDKAKSASTETCDASGSNPATRLLSSINGSFVGEAIHADGSVIEVVYSVLLQILPCSNRVYCIWVCRNPSTRLDGEKYNYANLTSTFNSMASTVEQSLGQVIKTTAAQNSSRPNSLSLVSKYEDELYLGDYSKYYTSIRQIGRGAYGYVNMAFRNSDRLLVITKFILKEKLCSQFMVKSRDCKEVPIEIHLLQTLNHKNIVSVLDVFENDLFYQLVMEKHGSGMDLWTFIERRPLMDEKLGSYIFRQVADAVNYLHEQKILHRDIKDENIIIDQNFTIKLIDFGSATFMEEGKFFSTFYGTTEYCSPEVLAGNRYVGPELEIWALGVTLYVLMFFENPFIDVEETLKAEIQIPKAVSEQLSRLLSSMLNKDPKYRCTMHQLITDPWLTQEVNPSTFSFSWIVPCKAHEANPNLYFSGYLYSSTSVLSTISPQESFSHIEESSIGGSDDARLASHRTGHKLCVNEGTILLRLLRILVVKHPFVILAKHNKMDTLYAKQFQLNTSVSNHELRVSLPDSSHTEIGGSICSSKSENDIFKNKLQPCVSTYNVVSLHDVSTKPKKLDLK

SEQ ID NO: 5701 - DNA, 4025 bp, DROSOPHILA
agcctgcagaaccgcccagaaagtagctcctctccgctgggactgggatgtgcgcaaagcatttaaattgtgaacacttccgtatgattgcgattcctcggatgtggatgaccgctccgttcccgcgccacctagtcgaggagtaaacctgccagggagcacctagtggaattcatttcggaggcgacatgctcgcgtacacccacgtaagtccaatgcgcatgcagctctgctagtgtatgggtgtacctgtagcaggaggggtaggggtatggacatgggcatgccgatactgatattgtgtttataatctcgaaagcactctaaattgctccgagggaggggtgctgctagtgaggttatactacccatggctctatattttataccacacccagttattatactcatacagcataggtatttctcatattgtagttgtgaaaagaagcgcatttgccttgaaatcagaggccatctttagttaatcctcgtatcctcacacgctatggaacatttaagccaaaaaggaaatgttttccataccaaacctattattggcctatggtaataccaaactgttatgctgttttgaccagccaaagatctggaaatagcccccttccacttccactccatgccgaagccgacaatttgccaccaaccgacaccgacccgcccacaattgctgcctaacacaattaatctttttattgcccttttatcacatacgattcgttaattaattgccgaattagcatggcagtgttgttggcagttggcccgcaagacgctaaatcgagtgggcaaacaattagaaaccagttggataccgaagaccctcccgactcccagagccgcaggcccagcaacttatgcgtacagggtgtgcctcacttaccctaattacggcaattggaggacgagccaggccaagccctcgtcggtctaattcgatttgcaaacaaacgcgtctggtgtagcaaatatttgcatatgtatgtccaacgtgcgacacggcgtttttcccatttccccactcgattcgctttaacgcgccctttgattgtcgttgtcgttgcagggcacatggctcctgctcctgctgctccttgtagcaggcgcatgcgcgcggccagaaatagcacacacaccggatccggctgcactaggcgaggagtctactccacatgcacacgcacatccacaggctcgccatcatcaccatgcccatccccatgcgccgctgaaggaagatgagcagggaacagcaatacctgctcccatcctaacaactgataacgtgggcattggggaaaccacgacggcatcaagtttggccgagacgcaaagcatgtccgatccgggatctgtgacagacacaacatccacaagcacatcgcactccacctcgaccacgtcgaccacttcgcccgcaccccttccgccggctgctcccgaacagcccgagtatctgaagcactgcttctatgcagaagagcagctgtgtggccacacctttgacggacgagccgaaacctccgagggccagggctcgacagtcgcgcagtcggaagcccagaaccgaggaggacaggggaacagccagtgccagtgcagggagcacccgacgcggccaaactcctggtactgctgcaacatatcgcagctgacgatgatctcaagctgcagcaacatatccaagtggaccaacctgcacgtgcgcaacatgactgtggaggacatggacctctccaatccaatattccgatccctgcagtcgcttgccgtgacggacggcaatatcactcgactggtgaacgcctttccgcggctctcggctcttaagtgcctaaacatatcaaacaacaacatctcggagatccactcgagggcggtgaaggacgtgccccatctggagttcttcggcatgtcgaacaacaatctctcgctggtgcctcaccgaaaccagaacaagaacattacgctggatatcaggtgagtaaggccatatgtttagaaaaggaagaggcctaaccaaacgattcttttcagtggcaacatgcgcatgctgtgcactccgctaaacgagataatatacaccgaatctattaatttcctgaacccgaagcactcctactgtcagtataacgccacacacacctggtttcagtccacggacaaggtgtccgtggagcagctggagaacagaaagcggtgtgtgactaattgtccggttattccgaactacggcagctgcaattgtacgctggagaatattatgatcatacaggacaaccagtcgaagccccagtgccacgtagactgttccaatcttggcctggtggagctaccccaaagactgccggacaacacatttatgctcaatatcacaaacaacaagataaccagcctgggcgattacttccataccaatcccacctaccacaatattaaccgtctcttggccgataacaaccagatatcctccatctatgagttcgagggtaccaagttcatcgaaacctttcagcgcatctacatgcgaaacaattcgctgagcaaggtgagtgctctgacctactaatgtaccaatccctaaaacaaactgtatctttctacaacgatatagattccggagtactttctcaacaatgccctgatggactctggcctgggccgtcgtatttacctggcaggcaacaagctgcagtgcgactgcaactcggcaaagacgctgcaaaattggcttaaggagcgtagctccgatatacccgactatatggagatacgctgtcgcaacatgccccagagagtcatcgaactgcaggaggccaaactatgccagtccccaccagactggaccgattacatatactatttaatagccgccgaggtcctgctgctgctcgcccttattaccaaggtgtcctacgactattgggtcttcaagacggctggctatctgccctggccggccagtaaaatgcccaagttgccatgcgattggctgtgcgaatcgtagagccagagtggagagtaagatggccagttggtcaaacagacggccagactgtgacacaatcacatgacagagcgtattctcatacgtgtcctacctttatatgtatccgactgtatctgcggaaccgtgtgccttctatattcatacatatgtgaacgatttttgtggtgtgtagccttaagaacagtgtgcatgcacttgacgatttgtagtgggtgcggtggatctggaagtataaaatggaggagtaacgttgatcagcaccattgcttagggtcgtgagcttagtcagcctacttacatgtggcaataaatcaatagagaaactcgtgttcggagttcattttacgaatgatatttattgttgtggtttgttgtgatttaaatagaataattattattaagaaaaaaatacgcacttccaactcttccgatgcagctgcaatttgaattgagctctgcatctcccttctcccagtggggcgagggttttggtttggttttagatcgccattagatcgttattagatcgtgatcgtgatcgcgatgctaaatacctgtgtaggcgtgtgagtgtgtatgtgtgtggtgtgtagtgtagtgtgattcggtgtattgtgccttttgggaatataagtggggtcacgatgccttcgatttggccacgtgccctggtttaactttatacttaaatatgttgacttggtattattaggggactctttaacactgcctttcgcataggttgttatttattatcgtcgtatttcatcgtattcatcatcgtaggcatgtatatatgttcttttaaatgtgtattcgttgcgtggttttgcatgtaaatatatatgttatacatattcgtcgaatggcgctaaataaacaatacaaatcttctaacttaggtaaatatctgtctttgtgtatatatgccatgtatataaatgtctcgagcgcgcacctaagttacatacataagtgttttggcgtatagtcctga

SEQ ID NO: 5702 - DNA, 1827 bp, DROSOPHILA
atgtccaacggcacatggctcctgctcctgctgctccttgtagcaggcgcatgcgcgcggccagaaatagcacacacaccggatccggctgcactaggcgaggagtctactccacatgcacacgcacatccacaggctcgccatcatcaccatgcccatccccatgcgccgctgaaggaagatgagcagggaacagcaatacctgctcccatcctaacaactgataacgtgggcattggggaaaccacgacggcatcaagtttggccgagacgcaaagcatgtccgatccgggatctgtgacagacacaacatccacaagcacatcgcactccacctcgaccacgtcgaccacttcgcccgcaccccttccgccggctgctcccgaacagcccgagtatctgaagcactgcttctatgcagaagagcagctgtgtggccacacctttgacggacgagccgaaacctccgagggccagggctcgacagtcgcgcagtcggaagcccagaaccgaggaggacaggggaacagccagtgccagtgcagggagcacccgacgcggccaaactcctggtactgctgcaacatatcgcagctgacgatgatctcaagctgcagcaacatatccaagtggaccaacctgcacgtgcgcaacatgactgtggaggacatggacctctccaatccaatattccgatccctgcagtcgcttgccgtgacggacggcaatatcactcgactggtgaacgcctttccgcggctctcggctcttaagtgcctaaacatatcaaacaacaacatctcggagatccactcgagggcggtgaaggacgtgccccatctggagttcttcggcatgtcgaacaacaatctctcgctggtgcctcaccgaaaccagaacaagaacattacgctggatatcagtggcaacatgcgcatgctgtgcactccgctaaacgagataatatacaccgaatctattaatttcctgaacccgaagcactcctactgtcagtataacgccacacacacctggtttcagtccacggacaaggtgtccgtggagcagctggagaacagaaagcggtgtgtgactaattgtccggttattccgaactacggcagctgcaattgtacgctggagaatattatgatcatacaggacaaccagtcgaagccccagtgccacgtagactgttccaatcttggcctggtggagctaccccaaagactgccggacaacacatttatgctcaatatcacaaacaacaagataaccagcctgggcgattacttccataccaatcccacctaccacaatattaaccgtctcttggccgataacaaccagatatcctccatctatgagttcgagggtaccaagttcatcgaaacctttcagcgcatctacatgcgaaacaattcgctgagcaagattccggagtactttctcaacaatgccctgatggactctggcctgggccgtcgtatttacctggcaggcaacaagctgcagtgcgactgcaactcggcaaagacgctgcaaaattggcttaaggagcgtagctccgatatacccgactatatggagatacgctgtcgcaacatgccccagagagtcatcgaactgcaggaggccaaactatgccagtccccaccagactggaccgattacatatactatttaatagccgccgaggtcctgctgctgctcgcccttattaccaaggtgtcctacgactattgggtcttcaagacggctggctatctgccctggccggccagtaaaatgcccaagttgccatgcgattggctgtgcgaatcgtag

SEQ ID NO: 5703 - protein, 608 aa, DROSOPHILA
MSNGTWLLLLLLLVAGACARPEIAHTPDPAALGEESTPHAHAHPQARHHHHAHPHAPLKEDEQGTAIPAPILTTDNVGIGETTTASSLAETQSMSDPGSVTDTTSTSTSHSTSTTSTTSPAPLPPAAPEQPEYLKHCFYAEEQLCGHTFDGRAETSEGQGSTVAQSEAQNRGGQGNSQCQCREHPTRPNSWYCCNISQLTMISSCSNISKWTNLHVRNMTVEDMDLSNPIFRSLQSLAVTDGNITRLVNAFPRLSALKCLNISNNNISEIHSRAVKDVPHLEFFGMSNNNLSLVPHRNQNKNITLDISGNMRMLCTPLNEIIYTESINFLNPKHSYCQYNATHTWFQSTDKVSVEQLENRKRCVTNCPVIPNYGSCNCTLENIMIIQDNQSKPQCHVDCSNLGLVELPQRLPDNTFMLNITNNKITSLGDYFHTNPTYHNINRLLADNNQISSIYEFEGTKFIETFQRIYMRNNSLSKIPEYFLNNALMDSGLGRRIYLAGNKLQCDCNSAKTLQNWLKERSSDIPDYMEIRCRNMPQRVIELQEAKLCQSPPDWTDYIYYLIAAEVLLLLALITKVSYDYWVFKTAGYLPWPASKMPKLPCDWLCES

SEQ ID NO: 5704 - DNA, 11613 bp, DROSOPHILA
aattattaaatttttgaaattttttgaaaaatataatcagttttcttttggatagcaacaaagagagttgaacaatattagaatgccatgccccactaaactcaaaattaaatttcccatttaactatatttaaacatggaaacggtaattttatcgaaaatttcgatgacttacacccttatcgaaaatgcgaacatttttatttcgaatttaaatagtcatatgtgtttattggccgtacaataaggaaaaatcctatttcgacaattgtttttatttcaatgacttctggaaagcaacgtagcccatgttccttttccccaataaaaatgcgttttgcagataaaggaaaaatacattgattgtggtagctattttcattcttatgaatacacacataacatttaaatacaaatacatttacaattgaaaattttctctacatatacaaaatatttaatttaaaaataggtgaaaaaaaaaaacaagaataaattgttgtccctaggttcgttagcttagtaaacacaattgatgcgccagcggcagcggaagcagcagcaaaaagaagatcgaattcactcaacacaaattaaaaaaaaaaattgacttttctttttgtttattaaaatggctatggtgatcgggaattaaattcttcaagtaagcagcctttttttctgtttcccatttctaaataagaagacattattctcagacgagacagagtattgcttagtaaaaacaacttgaggtcgatttcattcagttttaactctgctttcagatttcttctcatgattaatatttttacacgcaatatcaataaatttattcctcacagaattgaaaggagaagtcaaagcgttatttagaactattattacatgcccataaatatttttaatgttagtcgtacatttaaaagcaaattgaatttagttaatctcttccacaggttcctcgccttttttgtttttttttttttttttggattttttgtattttgttttgttttgtaactttaaaagtttcttcaattaattgagtcgcaaaatgaatttttgattgatttcattgattgattgatttgatcgatagataccgccttctgttttctgtttcgtgcactctgaaatctctgattttgattttgagttcaatttcaatttgaataacttctaacacacatacacacacacgggtatttaatattggttgtttggagagagaattgcatataacgcgctttgtgctagggttcgcttggtgttctgctcgtggattgcatcgatttatagtccgagatatcgctacatatatcgtcgaatatagtttgtcggttggcctctacgttcacgtagcttgctttcaaaattcgttgtgttcttgtgtaaaaaagagatctcaaaacaaaagcgaaaattgctgatttcttgattggttgtctctggtggtaagtaagttagttagttagtttggtgttctagtgctggcaaaagtccgggaaaaagtttttgggactcgcagacagggattcggattcgaatattggtggggagttagctgaggttaggtccatcgacccaatgactcatagagcttaatagttaaactacagatcggctcgttatttgtacgcggctacatgtatccgtatccgtatctgaatcgctacatcttaagtaagtatgtatatgtatttccgattcggcatcggctggtaattacagctaaatatcttgtataattgtatatatatagacagagaatagcgaacattattgctcagacccattagaatagttgttggctgctcccgatgctgatcctcctcctagacgtggcaaccgttttgaactgtttaattaatacggtgtatatactttatcatatataatattggtgttttgctgttgctgcttgaagactaatagttaacggggcggcgtccacgcggcttgatcttctccgatatctgccacatctcctcctcgcccataaagtccttgaagttatcaaagaagcgtataatgcgctcgttgcgtcgaaatggataggcactgcagcagaaaaagaaaattgcgtgaagtgaagtgaaagaagtgattataattgaatgaaaattgataattaccatttcttaaaacgtttcatgttgtcaattatgttgtactgctgccagcgcttggagaagtttatgacgcccttggacaagtagtcctggttgcccacatgcacaaacgttagatcctgcagaattaggccgctggaacgaacgaattgataattagctttggctttcgtgattctaacaaaaaaagaaacatcagatcagatccttacatgtagggtatgcagggcggattagtttcggccagcgcctgtcgataggcgcgaaaactggagctggaatcgatgagggcgcagaatgatcgcacctcctcggtgatgcctttttgccactccaatctgcaggacatggtatatcaacatatcaatggtatatcaatagcttcagtgggccagtagaacctaccttcttatgggacccgaatcgagggccgacaacaacgccagatacgagttgtagttgttcatcttgcgtagatgcttcatgattttgataaacttgttcacatgcttctcccgctccttggcatcctgcaggcgcaggattttggagcgcgcccagtaggacatcttgttgaagtgctcggtgaacttgtttaggttgggcgacttctcctcgcactgatctttggcaaatagtaatacttcgggtatctcgatcttcgtgaacagctccgcatccagcagcgtcatctgttcggcaatctccagcgacttgaggtcgagcagactaggctggtttccaccaccagctgtaccactgcatccaccactgccggcgattcctgctccgccgacactaccggctccgcccaactccccaacaaagccgtacaccttgggctccttgtacagcgtcaccttctccacgaacttgttgcgcagcaacttggccaagtacaattgcccagagcaaaccaactgatagacgaactccaccagcaggctcaacagctggctggttagatccgtcgacctgcatggtgaacaatgaatgataagcgggtatgtaccaacttagtttattccaaaaatggtggttaggcaactcacgttagatcgttgacgactcggaccagcagcgcaaaggtctccttagcggccttctgcttgttgtcctgcacttgacagaagaagtatgtgtagcgatgggtcagcttctcgatcacgtcgatcggctggatgaaggtgcgaaaggtggtgatgaaggcctcgcagaatgctgcacgaacggaatgaaaatggacagagacaacagaggagttgggtaaatgaccatgcgaacgatatttggtatgtttttgctgcttctgcttgcgctgcgaatgcctaccattgtcggcgaccttttggacacggctggcgtgcacgatgagggcatcgatgtagccgcccttcacctcgggcccgtcctcctctctcttcttgagtatcaggtaccgtgtgatgttgacctcttccagcatgttgatcagcatatccgctcgctccgcctcctcatcctcgtcgacgttcgctggcttaaccgactcgtgcacagcgaccagtggtcgggactccgccgttggctcctcctgctcctcgagcacttggggcgtggttattggctggttgtcggcactgctcgcatcctcgctcatctccatttcggcggcgggcaactgatgtgagtgacagtagaaagtctgtccatcatcgacggcgctcacattctcattgctgtccagcacgggcgaacggggctccggcatcgcatcctcgctggccactgcatcgttcagctcctcgcatacggtggccatccggctgtccggcctgcccgtcgacccattctcgcccagcgtcggcttcggactcggcggtggcgtggtcacaatgacgggctgcagcgtgggtgatgctaccatgcttgtcgccttgcgctgcttgtagttctttggcggcagggcaggtggcatctcgagctccggcgacagttccttgctcatgggcataatgctgtaaaggtaacaaaaaaataaggttagtaccgcctagtaactactagctacacacaactttactcacttcatggtctggctgtgcgagatgttgcgacttatgttgcaggcgtgcattgtgtgacgatgctgctcaatggatcgcgtggacgccgaacagatttccatgtacgccagaactgtgtgcggtagggtagggaagatgaaatcgttagcaactcttacgcttcagtggcgggggacagaaacgaaaactaagccgatcgatcgatccttggacccacatcccgaaggtctttgtctgttcaccagatctacaggaatcgcaacatacaacacagcacaacgagtaacaggactggatagtaacacagagcaggagctttcggggctttggactggagatactagctctggacggacacagcgggttaggcggagcgaaatggaagccacagaactgttgctcagtccatgtacttgggactagaaacggaaactgcaaacaggtggctgttcgggcgtcaagtcaatacgaatgcggcgcagcagcaaagttattagcagagcaagaagccaatagcgaactcgaaatgctctttccatcatggttattaactggatagcaaagggtattcaccttatgtaaagtattataaaaacgaaagaggatagtttaatagctatctttgtgtttacacactagattcccattcggttggaccatggaaatctctgctcaatggtgaaatgaagccaaatttaatcgaaaggagtgtcattcagtactgaggtagggaatagagcattgcgagctttccaagggcgccgtgcaaaaaaagtttgtttcgtgggtgattttgttttatttcgtttttgtttggcatttggcagcaaaagttggcttagtgtttttgtttcgtgttggtcctctagtaacacacacagacttacccgaaaaggccacactttgaaacactagatgttggttggaacgataatttagatgggttagactcttgcgtacaacaatttggcaaactttcttgtcgccagcatttctaaggggtttgcgataatgcgggtatgtgctataaataaaatggtcttaaagaaacaaacaaatctcgaaaaacggactgctctgcctggctacccatataaaaggtgatgactgattgactgattgcctggttgactgattgatttgtttaactaactaattggaggtctgattgttgtggtgtttctgtttcgtctgatttttgtttgggtttaacaatggagtagcctatcaaatggatctgatggaatggatactgctgcaacaggaggacagtgatgcaggaaaccctgaaaatgcgctcaacaaaacacccattgactcaccgctcggcctggcctgggcggttccgaaaatgacaaaaaaaaaaaaaatgatataaaagtaatttacacaatatacacaacaacaaaaaacacacacacggtacgagatgcagaaccaaaccaaatcgaaaaaaaaacggaaaaaaataagaaagaaaaataggaagaatcgatgtaaataaagtgtgcatcgtgggcaaactgacttactgtgcttcttttttattggcagcggcggtggctcctgatccaagtgtcgctgatcgaacgcactgcagctgccactccccgccagctggaggcggggtccctcgatcaggctgtggtgcttggagtgccactgctgcagttgaccggcggacgcagtatgcggatggtgattgaggtgatggagcggcgacagctgacgcagctcggccacctccgactggctgctccgatggctggcccagccggaggaggactgcacctcgtccagctcatcgccaactccgggcgagtcgtggcgggttaggctgctccgttggatgctctttggcggcaaggcgggcgccagatcggccggcgtcgtcgtcgtctgctgctgctgctgctgctgcagctgctccacttcgctgctgccatagccggtggttgtgctgctgctggtggtcgtggtggtgcagctgctactgctcgaggatatatgacgctggctgtgcgacaccaactggctaatctgctggtactcgctactgctgccgaccgccgtcgactcactgatgctgaacgcaatctccgaattgctgctggacgacttcgtggaggactggacactgtagtccgtcgtctgtgtggaagtgcgaaactcacgcatcgacacgaaacctggcgatggaaggagagtggtgttagaaatggtcaaaaatgcagttctcgttgtggggaacgggtagccaaaaccaagcggaaattatataataagccggaggaaatctgtggaaaggatcattacggaggcgggagaataaagccaactatttacagcatctaggacaaacatgtatacaatacgcctaacgaaaaatttggaagggaattcattgggcgcgtgcaacagatacaaaataataagcgggattttaagtacgatgatagatgttctgggtacccgattcgtttgagtggcgattgctgttagtttccccgtcaccagacgctgcagcagctacaccttcgcctgctcctccagttccaccagcaacaccagctataccaccaccagtcgaaagtggtgtctgcgttttgtcgtcgattgcggcgcctgcgtaaccggtggattctgtacgggattcgttgattgggggggccaccactcgagttgagctgagtgaggggagtggcgaagccttgcggcaatactcactgtagctgaccatcttgtccatgtcttcgtccatcatcgcagccaactttggaaatgacctcagatgctgatgttgctgttgctggtcctcctcctcgcgtgagtgattcaacgccgagtcaaaggagcactgactattctcatccggtgaccgtgaacgcacggataggctgtggaatgtgggtgcaccaattattgtagtgattgctagtgattgctttaatctgcaagccacttaccgatccacgccataattcagcagcgagatattggaactgcagtccaggtccgagttcagactaatattatgggactgggcgtagggcagtggactggcctgattggaggtggatgtcgacgatgagcagcctacgcccactgtaccagctgatgcgctcggctggctgcgtcgctttggtggcaacggcggcggattactggccctattgggtagcggtggcttcggcggtggactcgtgtcgcgcaggatactttcggtgctgtgggagccgcgcatcgggttcacattgtgctgctccagtatgtcgcgctccttgggcgtgagcgctatgtccggcaacgaagtacgctgggcagctgattcggcggccgaaacgcgcatgactccagtaccgggaacactcgctcccggcgaggcggtgaccgcacccatgatctccgccgccgctccaatgccgcccaagccagatccactgtagcgaaaggcgcactgatcctgctccttcagcttgccctgcgccagcgtaacgagattctgtgcacgatcatgaaacatcatcgtatttattatagcaatacactgtgtactaggttagtgttaattggacttacccgcacagcatcctcgagaagatcaatgacttcccgcacattctcgttgctcagggaggcgcactcgccgctgtcctcggagagcatcacctcgtcgcagagcttgatgagcttgcccaggctctggtaaacctgcagcgtggcgctgctcatgatggcactgttttcattcagggtataggtttggatcactgcggcagcaaaggaaagcaactggattaattacaaaacgaggaaattggggtagtagatactcaccggagtacatgctggctatggtttccagaatgaccgttccgttgcccggcaacacctccagcttcttcttgagtataacatcccggaagtgcttcagggcattcgaaatgtccttgacgtgcgtctccagggtttgggtggaccgtagcacctcctcggtggtgggcggtgcctttgtgccgtgcttggtgcgcggactgtgcggcgagtgggagcgacccagtgtattgttggtggttcgcatcagggaaatcttctcgatgaggtcgtccttaaaggaacgcgcccggcgcgctagcttggtgcccttgagactgttcttgtggcccgaggatccggcactgggtggtgccggtggtacaccaccacctccgcctgctcctgctccccctacccgactagatcctcccggcgtgccctgcagctgctggtgctgcgagtgatgctgatgcgtgggtggtggcggagtgcaggcggtggagtagctgccgctgttgatgctattgttgctgctgctgctgcagccgccaccgcccactccgatgccactggaacaggtgccgggcgtggatggagaactgatgctgccgtctgcaaaaagagcaagaaatcggggattattaatctaaggtaggtacacttaatcaattcataggcattagataacaatatacgtttttgggtaacaataataagagactaagactggaatctagatcctatatatatacacatatcatgggcttagagtctttcctgttcgagccgcattcttgaatgccaatttgaaaatcaaaagttgctccatataaaaccacaatcttttgcaatatatggcaatgttggtatcgtttcgtttcttacttttcttcatttggttaggtaagatgaatatcttaaggtcatcgtatacatcattctaaagtggctaagccagcagcgaaaatgaaaatctttcagagttagccaaacagcttgaggaatcttgaaaagattcatcattaccccttcacaacacaatatatgtacatatgtactcattcgaatcttgaaacgtgtctacttaaatgtgaaataattgcaattgaaatcaacatatgtaatacggaattcctagcattccccatttcgggaatcgttcatgcgagcccaaacattttagtttcggaacttttttaaagatccaaaacagcgagaaaccgatgagcaccacccaccaagcgaaaagaccggcgagtagctttcacttacggcacaccgcattcttgagcggcacaggtgtgtccatctccatatcgaactccctatccacggtcacattcacatcgacatccacatccatctgcagtggaatcgctggcgttgatagcgccaatcgtgccagctttttgtatttgcgacgtctgtggaatttgatgctatgcaacgtgttgccggtggcactgatgctgttgcaggtgttactgctgttgcagttgcagttgttgcttgtgaggctatgattgttgttggtgtcgcgcggcgaccacgactgccgctgagtcttccaaagacgatgatgattgtgatggtgctgttgatgatgatgatgatggagttggtgctgatggtcatcgtggctggcaccgctgggatacggattccgattccgattcggtttcggactcggatgtggcggcaattgcttgaccgtgtacgaatagaaatgccagcggtcggcgagcgcacagtcgctcaaaaaagattcatcaaactgcggcataatgttgcataatgacagcagcagcagcagcagcaataacaacagcagcaacagcgacagcaacacgcataacaacaatttgttgtggcttaaatatgcttggccaaaagacacacacgttggcctaactgatttctccaaatagcgataagcgatagcagcaacatcgttttcgtataagattgttgatttaagcgattgccgtcgcgattacaacatcaattcatttttctgtttcggcatgttttacattgattatttcactttcagttttcggttgtttcagtgttttcggaaaaagttttaagcactgataaaagctatatccgatgtgctctgccagcaggaagtagatttcaattgctttctcatcatgttcgttcacttttgcaattcgttcgatagtccgataggcaattcaagcgattaccgattcaagcttcctgtggcaaccgcaagaattgttctggacactctttgtttgactgaaatacaagtatgccagcttagagatcacttcaattggccatagtgatttccgtatattattttctttaatgtttaaaagccatcaagccctaatttccgtttcttactgcctgcccgattgtggtaaattgaaggtaatcaactccaaagccacttgtcttttgctttacttatatttcaagtgcgatttccgcaattttccccaatagctttccattcgccgcacagtcacttttgcatttctgaacttgaaatttcaacaggcttcggctgattgattcaatcgccgataagcgataagctaacacttttggcctgccactctcagtgcaatttctttcacttttcaagtgcaatttggcgctcttttctttgatttttcatcatccatccatccatccatctcgttggcgcaccgcccccgcagtgggctatctatctggttggcctctgggtgaggagatgttgattaaataaatcacaaataaagatgattatatttagacactggcgctctgctgctgctgctgcggcggctgtcgtcgtagtccgttcgcgatgttgtcgttgtcgactggaaagcgcactgaactatgaaaatccgcaaaacgggcaaagccaaagacgaccgaccgactgaaagaccgaccaggcggcaaaagcgagtgtccgagtcttggagacccgctaaccggccaacggcaatggcaacacattagcaatatagcaatacagcaatagcagcaacaacagacgcagcagcagcagcagcagcaacacgagagccgccgagggggcaaaaaaaaaaaagagccccaaatggcacttgcccacctggcaatcgccctctcaccatctctcctgatctctcctgctgctctcgccacatcgctctttctctttccgagattcatcaaacaaatcatacatgttcacatcactgatggaccaaacgggtgctacaaacgtatccattcaatgtggctcggaaatcgtgcaaatattcagtatatatttacgataatatttctattttaaaatgacaagttactttactgtttatacttgcaggtacacccccctttctcgcagtgcagtccgcggtttgcggctcttttcacccgggaggctgctctccaaccgtcggcctctccgcccaattatcaatcagctggcgcacctgagaaagagcccgtggcgaagggtgagggggcggtaattgggggcgacaagggagtggtaaaggggggggggtgaggtggatgcggggcaagagacaagaagacgccgggcggatttcttcaatttgcaagtgccgctcgtg

SEQ ID NO: 5705 - DNA, 6307 bp, DROSOPHILA
gagtggcaggccaaaagtgttagcttatcgcttatcggcgattgaatcaatcagccgaagcctgttgaaatttcaagttcagaaatgcaaaagtgactgtgcggcgaatggaaagctattggggaaaattgcggaaatcgcacttgaaatataagtaaagcaaaagacaagtggctttggagttgattaccttcaatttaccacaatcgggcaggcagtaagaaacggaaattagggcttgatggcttttaaacattaaagaaaataatatacggaaatcactatggccaattgaagtgatctctaagctggcatacttgtatttcagtcaaacaaagagtgtccagaacaattcttgcggttgccacaggaagcttgaatcggtaatcgcttgaattgcctatcggactatcgaacgaattgcaaaagtgaacgaacatgatgagaaagcaattgaaatctacttcctgctggcagagcacatcggatatagcttttatcagtgcttaaaactttttccgaaaacactgaaacaaccgaaaactgaaagtgaaataatcaatgtaaaacatgccgaaacagaaaaatgaattgatgttgtaatcgcgacggcaatcgcttaaatcaacaatcttatacgaaaacgatgttgctgctatcgcttatcgctatttggagaaatcagttaggccaacgtgtgtgtcttttggccaagcatatttaagccacaacaaattgttgttatgcgtgttgctgtcgctgttgctgctgttgttattgctgctgctgctgctgctgtcattatgcaacattatgccgcagtttgatgaatcttttttgagcgactgtgcgctcgccgaccgctggcatttctattcgtacacggtcaagcaattgccgccacatccgagtccgaaaccgaatcggaatcggaatccgtatcccagcggtgccagccacgatgaccatcagcaccaactccatcatcatcatcatcaacagcaccatcacaatcatcatcgtctttggaagactcagcggcagtcgtggtcgccgcgcgacaccaacaacaatcatagcctcacaagcaacaactgcaactgcaacagcagtaacacctgcaacagcatcagtgccaccggcaacacgttgcatagcatcaaattccacagacgtcgcaaatacaaaaagctggcacgattggcgctatcaacgccagcgattccactgcagatggatgtggatgtcgatgtgaatgtgaccgtggatagggagttcgatatggagatggacacacctgtgccgctcaagaatgcggtgtgccacggcagcatcagttctccatccacgcccggcacctgttccagtggcatcggagtgggcggtggcggctgcagcagcagcagcaacaatagcatcaacagcggcagctactccaccgcctgcactccgccaccacccacgcatcagcatcactcgcagcaccagcagctgcagggcacgccgggaggatctagtcgggtagggggagcaggagcaggcggaggtggtggtgtaccaccggcaccacccagtgccggatcctcgggccacaagaacagtctcaagggcaccaagctagcgcgccgggcgcgttcctttaaggacgacctcatcgagaagatttccctgatgcgaaccaccaacaatacactgggtcgctcccactcgccgcacagtccgcgcaccaagcacggcacaaaggcaccgcccaccaccgaggaggtgctacggtccacccaaaccctggagacgcacgtcaaggacatttcgaatgccctgaagcacttccgggatgttatactcaagaagaagctggaggtgttgccgggcaacggaacggtcattctggaaaccatagccagcatgtactccgtgatccaaacctataccctgaatgaaaacagtgccatcatgagcagcgccacgctgcaggtttaccagagcctgggcaagctcatcaagctctgcgacgaggtgatgctctccgaggacagcggcgagtgcgcctccctgagcaacgagaatgtgcgggaagtcattgatcttctcgaggatgctgtgcggaatctcgttacgctggcgcagggcaagctgaaggagcaggatcagtgcgcctttcgctacagtggatctggcttgggcggcattggagcggcggcggagatcatgggtgcggtcaccgcctcgccgggagcgagtgttcccggtactggagtcatgcgcgtttcggccgccgaatcagctgcccagcgtacttcgttgccggacatagcgctcacgcccaaggagcgcgacatactggagcagcacaatgtgaacccgatgcgcggctcccacagcaccgaaagtatcctgcgcgacacgagtccaccgccgaagccaccgctacccaatagggccagtaatccgccgccgttgccaccaaagcgacgcagccagccgagcgcatcagctggtacagtgggcgtaggctgctcatcgtcgacatccacctccaatcaggccagtccactgccctacgcccagtcccataatattagtctgaactcggacctggactgcagttccaatatctcgctgctgaattatggcgtggatcgcctatccgtgcgttcacggtcaccggatgagaatagtcagtgctcctttgactcggcgttgaatcactcacgcgaggaggaggaccagcaacagcaacatcagcatctgaggtcatttccaaagttggctgcgatgatggacgaagacatggacaagatggtcagctacagtttcgtgtcgatgcgtgagtttcgcacttccacacagacgacggactacagtgtccagtcctccacgaagtcgtccagcagcaattcggagattgcgttcagcatcagtgagtcgacggcggtcggcagcagtagcgagtaccagcagattagccagttggtgtcgcacagccagcgtcatatatcctcgagcagtagcagctgcaccaccacgaccaccagcagcagcacaaccaccggctatggcagcagcgaagtggagcagctgcagcagcagcagcagcagcagacgacgacgacgccggccgatctggcgcccgccttgccgccaaagagcatccaacggagcagcctaacccgccacgactcgcccggagttggcgatgagctggacgaggtgcagtcctcctccggctgggccagccatcggagcagccagtcggaggtggccgagctgcgtcagctgtcgccgctccatcacctcaatcaccatccgcatactgcgtccgccggtcaactgcagcagtggcactccaagcaccacagcctgatcgagggaccccgcctccagctggcggggagtggcagctgcagtgcgttcgatcagcgacacttggatcaggagccaccgccgctgccaataaaaaagaagcacattctggcgtacatggaaatctgttcggcgtccacgcgatccattgagcagcatcgtcacacaatgcacgcctgcaacataagtcgcaacatctcgcacagccagaccatgaacattatgcccatgagcaaggaactgtcgccggagctcgagatgccacctgccctgccgccaaagaactacaagcagcgcaaggcgacaagcatggtagcatcacccacgctgcagcccgtcattgtgaccacgccaccgccgagtccgaagccgacgctgggcgagaatgggtcgacgggcaggccggacagccggatggccaccgtatgcgaggagctgaacgatgcagtggccagcgaggatgcgatgccggagccccgttcgcccgtgctggacagcaatgagaatgtgagcgccgtcgatgatggacagactttctactgtcactcacatcagttgcccgccgccgaaatggagatgagcgaggatgcgagcagtgccgacaaccagccaataaccacgccccaagtgctcgaggagcaggaggagccaacggcggagtcccgaccactggtcgctgtgcacgagtcggttaagccagcgaacgtcgacgaggatgaggaggcggagcgagcggatatgctgatcaacatgctggaagaggtcaacatcacacggtacctgatactcaagaagagagaggaggacgggcccgaggtgaagggcggctacatcgatgccctcatcgtgcacgccagccgtgtccaaaaggtcgccgacaatgcattctgcgaggccttcatcaccacctttcgcaccttcatccagccgatcgacgtgatcgagaagctgacccatcgctacacatacttcttctgtcaagtgcaggacaacaagcagaaggccgctaaggagacctttgcgctgctggtccgagtcgtcaacgatctaacgtcgacggatctaaccagccagctgttgagcctgctggtggagttcgtctatcagttggtttgctctgggcaattgtacttggccaagttgctgcgcaacaagttcgtggagaaggtgacgctgtacaaggagcccaaggtgtacggctttgttggggagttgggcggagccggtagtgtcggcggagcaggaatcgccggcagtggtggatgcagtggtacagctggtggtggaaaccagcctagtctgctcgacctcaagtcgctggagattgccgaacagatgacgctgctggatgcggagctgttcacgaagatcgagatacccgaagtattactatttgccaaagatcagtgcgaggagaagtcgcccaacctaaacaagttcaccgagcacttcaacaagatgtcctactgggcgcgctccaaaatcctgcgcctgcaggatgccaaggagcgggagaagcatgtgaacaagtttatcaaaatcatgaagcatctacgcaagatgaacaactacaactcgtatctggcgttgttgtcggccctcgattcgggtcccataagaagattggagtggcaaaaaggcatcaccgaggaggtgcgatcattctgcgccctcatcgattccagctccagttttcgcgcctatcgacaggcgctggccgaaactaatccgccctgcataccctacatcggcctaattctgcaggatctaacgtttgtgcatgtgggcaaccaggactacttgtccaagggcgtcataaacttctccaagcgctggcagcagtacaacataattgacaacatgaaacgttttaagaaatgtgcctatccatttcgacgcaacgagcgcattatacgcttctttgataacttcaaggactttatgggcgaggaggagatgtggcagatatcggagaagatcaagccgcgtggacgccgccccgttaactattagtcttcaagcagcaacagcaaaacaccaatattatatatgataaagtatatacaccgtattaattaaacagttcaaaacggttgccacgtctaggaggaggatcagcatcgggagcagccaacaactattctaatgggtctgagcaataatgttcgctattctctgtctatatatatacaattatacaagatatttagctgtaattaccagccgatgccgaatcggaaatacatatacatacttacttaagatgtagcgattcagatacggatacggatacatgtagccgcgtacaaataacgagccgatctgtagtttaactattaagctctatgagtcattgggtcgatggacctaacctcagctaactccccaccaatattcgaatccgaatccctgtctgcgagtcccaaaaactttttcccggacttttgccagcactagaacaccaaactaactaactaacttacttaccaccagagacaaccaatcaagaaatcagcaattttcgcttttgttttgagatctcttttttacacaagaacacaacgaattttgaaagcaagctacgtgaacgtagaggccaaccgacaaactatattcgacgatatatgtagcgatatctcggactataaatcgatgcaatccacgagcagaacaccaagcgaaccctagcacaaagcgcgttatatgcaattctctctccaaacaaccaatattaaatacccgtgtgtgtgtatgtgtgttagaagttattcaaattgaaattgaactcaaaatcaaaatcagagatttcagagtgcacgaaacagaaaacagaaggcggtatctatcgatcaaatcaatcaatcaatgaaatcaatcaaaaattcattttgcgactcaattaattgaagaaacttttaaagttacaaaacaaaacaaaatacaa

SEQ ID NO: 5706 - protein, 1380 aa, DROSOPHILA
MDVDVDVNVTVDREFDMEMDTPVPLKNAVCHGSISSPSTPGTCSSGIGVGGGGCSSSSNNSINSGSYSTACTPPPPTHQHHSQHQQLQGTPGGSSRVGGAGAGGGGGVPPAPPSAGSSGHKNSLKGTKLARRARSFKDDLIEKISLMRTTNNTLGRSHSPHSPRTKHGTKAPPTTEEVLRSTQTLETHVKDISNALKHFRDVILKKKLEVLPGNGTVILETIASMYSVIQTYTLNENSAIMSSATLQVYQSLGKLIKLCDEVMLSEDSGECASLSNENVREVIDLLEDAVRNLVTLAQGKLKEQDQCAFRYSGSGLGGIGAAAEIMGAVTASPGASVPGTGVMRVSAAESAAQRTSLPDIALTPKERDILEQHNVNPMRGSHSTESILRDTSPPPKPPLPNRASNPPPLPPKRRSQPSASAGTVGVGCSSSTSTSNQASPLPYAQSHNISLNSDLDCSSNISLLNYGVDRLSVRSRSPDENSQCSFDSALNHSREEEDQQQQHQHLRSFPKLAAMMDEDMDKMVSYSFVSMREFRTSTQTTDYSVQSSTKSSSSNSEIAFSISESTAVGSSSEYQQISQLVSHSQRHISSSSSSCTTTTTSSSTTTGYGSSEVEQLQQQQQQQTTTTPADLAPALPPKSIQRSSLTRHDSPGVGDELDEVQSSSGWASHRSSQSEVAELRQLSPLHHLNHHPHTASAGQLQQWHSKHHSLIEGPRLQLAGSGSCSAFDQRHLDQEPPPLPIKKKHILAYMEICSASTRSIEQHRHTMHACNISRNISHSQTMNIMPMSKELSPELEMPPALPPKNYKQRKATSMVASPTLQPVIVTTPPPSPKPTLGENGSTGRPDSRMATVCEELNDAVASEDAMPEPRSPVLDSNENVSAVDDGQTFYCHSHQLPAAEMEMSEDASSADNQPITTPQVLEEQEEPTAESRPLVAVHESVKPANVDEDEEAERADMLINMLEEVNITRYLILKKREEDGPEVKGGYIDALIVHASRVQKVADNAFCEAFITTFRTFIQPIDVIEKLTHRYTYFFCQVQDNKQKAAKETFALLVRVVNDLTSTDLTSQLLSLLVEFVYQLVCSGQLYLAKLLRNKFVEKVTLYKEPKVYGFVGELGGAGSVGGAGIAGSGGCSGTAGGGNQPSLLDLKSLEIAEQMTLLDAELFTKIEIPEVLLFAKDQCEEKSPNLNKFTEHFNKMSYWARSKILRLQDAKEREKHVNKFIKIMKHLRKMNNYNSYLALLSALDSGPIRRLEWQKGITEEVRSFCALIDSSSSFRAYRQALAETNPPCIPYIGLILQDLTFVHVGNQDYLSKGVINFSKRWQQYNIIDNMKRFKKCAYPFRRNERIIRFFDNFKDFMGEEEMWQISEKIKPRGRRPVNY

SEQ ID NO: 5707 - DNA, 3437 bp, DROSOPHILA
cgccccacagtatgtacagtctttaataccatgcgcccctgtctatagccagtctttggcaggaaaccttcttggcgacgctacgcacgtgagaacgccccgcggccttctaccaaagagacttctacgtccggcgatgggcaacggcaatgactcagacatcctgctcacggacaagggctcccgcatcggcattatatacgtgcccactgtgcaaagcgactcgaagggcgagctgcactttatcatcaacggggtggatcgtggccccgtttcccgagacattccgctcaacagagcgcctctgttcgtagtgatcgatgtgtatggcaccaccaaacagattcgaattatccagctagagggcagtaagtgaaatagatcgggatgtgagatggacttctttttatttaatccatcccccctttctgcagttttgtccctgcagagcgcttgtcgcaacgttatcctggagagctttgcggaggacgcgatcagcgagctgccactaccggagagcatcaagcgatttctgctgcgccgcgactagggctctggaccatgagctctatgaaatagggcccagtgagtgtgaatgagaaatgcgtgtttggggaagtgtgcatgagcttgggtcgtgatagtctgtttacccatatatatattgtatacgcctgcagcgctagtgaagggccctttcattgacgcccgactccggaccctaacagatctacggatctggccgatctccgctagagggcgcttatatttgtaatttctgtagatatattttatactttggttctagttaccaatacactctttacctggacgacctatgttgtagatcataatcctcgccatcgtttgtgtatgtgtggatcaccaacaccagcggaggtctcctgggcgccccgacttttagcgtttcggtccccaaggcgatgcccgtttccattaccgcctaagcgtattgttgctatatgtaagttaagtccacttaataaaggatcgatcaaagtcgctgtaactgctaaaatcttactttgatctaatccgtttattcaaaagtggatatgcatatagaatgtgtggatataaaacaaaacataatagagccgccgcctacttgccacggttttctgccagcttggccttgaagatgctcttaagctcgtcagcgccgtcgccgtttacctcctggtagtagggtagctctgccagacgcttcagccaggcgtgcatcttgggaaacttaaattcatcgatgggagcggtgtcgttcaccgaggttacggtggccacggcgcaaaagtctgcgatggttagatcagaaccacacaaatacggctgatccttgaggaatccctctaggatctcccagcacttctggatgtatgcgatcttgtcgatggagcagtccgtcgatccataatacaggatgggctcgtaaaggaagcgcaggcgcgcgaagaggtggccggagtccagatggagccgagcatccacgttggcgcgctgcaccaattccttcggatagagctgctgctccttctggccatacttctccaccaggtaggcgcagatggcgtgcgagtcaatgatagtggcctcgccgtcgatcagggtcgggatggtgtgctgggggttcagcttgaggaattccggagtcagatgctctcccttcagcaggttaattggcctgcattcgggcgaaaactctgttaattgagttaagtggcacggtgtgggaacctaccgtagttcaaggtcgagtccgatcgccttagccgtgaggaggacggcgcgcgatgggggacttagggtggcataatacagagctggctttgacatggttgaatctggggaatattccaatatttatacctagagtaacgactgtctatctatagatagctttaccccaccctcgcgatgcggacggctggtctagcagcgatagcattccagattactgaaaaccgcactcacaccactaccatttcagtaccctcgtgtatcagcaacgaatccgtgtcgcacccacagcaatatcagataaccccggatctctagcccccatctctggcgacttatcagagcagttaacatggcgaccacacggcgtaggaaagatactgaaactacatatatcgcttgcgccccgcccccacttcaacccccttttggcggcttggaaattaagtttacaaaataaatgtaattagcggcacatacacatgcagaaggcgcccccggtttgagtgtgtgcgcctgcaatcgccggcaaattgtttttataatgcctatgcagcctgtgtgtgtgtttgtttttatggggggctgacgcacacacacaagcgcactccactcgcaactcacatttctctgtgaccacaaaagtaaatacagaactgccgcacgaacgtcttctccggagtgcaaacgcgatctgaatcgcgaacatgaaattcatagcggcccactagctctgccggcggctctgctgagaacccaccatcagtggtgttggtgtgggcgagagtggagcctcgctctctgctctctctctctctctttggccctctccgtagcggtgatgttatttcgtacgtttattcatagggttttggtacatgttaaaaatcgcaacatgattaggctctacgagtatgtggttacgcgaaattatatatatgtagttgtatatagcatgaagcatttaataccagctgcggctttgttggacttctctattcgcccggatccttgagcacgaggagtactgagtaaataccatggaagctacatatgtacgtgtgtgcctccaggatgtcttgatcgaagcggaaagaaagcactaacactaaagaacggattgggtgcgaatagagaagccattgcatgtgccactgcaacttctcatgggtcaatcacatccaacccaccaaggttttcatataatctagttgtccagtacgctgcgcttcagcgcctcctccaggtccgcgtcgaagctctccggcttggaatagtctgcagcaaacttgtccttgaccggctccttgctctgaaacttcttgtccacctgcccgttctgcttctccttgcccgtcgttccgaaggaggcgtttccgaagtcactcgagaagttgtgtgcctcgaagccatcgaacttggcgaagttggcgttggggcttgtcttgaattggtcctcgaaattgtcgttgaaggcgtcaaatgcctttgccctttgatcgttgggcctgaccacgccagtgggtactgatgagctctggatcacactgaagttgtcgttaaatgcatcaaaaaaggaattgttgagtttcgtattgccagtggttgtggccgtggttgcagccccagatccaccagtggttgccagcgtagctgcgaagtcgtcgaagtcagcgaat

SEQ ID NO: 5708 - DNA, 860 bp, DROSOPHILA
cggagaagacgttcgtgcggcagttctgtatttacttttgtggtcacagagaaatattcaaccatgtcaaagccagctctgtattatgccaccctaagtcccccatcgcgcgccgtcctcctcacggctaaggcgatcggactcgaccttgaactacggccaattaacctgctgaagggagagcatctgactccggaattcctcaagctgaacccccagcacaccatcccgaccctgatcgacggcgaggccactatcattgactcgcacgccatctgcgcctacctggtggagaagtatggccagaaggagcagcagctctatccgaaggaattggtgcagcgcgccaacgtggatgctcggctccatctggactccggccacctcttcgcgcgcctgcgcttcctttacgagcccatcctgtattatggatcgacggactgctccatcgacaagatcgcatacatccagaagtgctgggagatcctagagggattcctcaaggatcagccgtatttgtgtggttctgatctaaccatcgcagacttttgcgccgtggccaccgtaacctcggtgaacgacaccgctcccatcgatgaatttaagtttcccaagatgcacgcctggctgaagcgtctggcagagctaccctactaccaggaggtaaacggcgacggcgctgacgagcttaagagcatcttcaaggccaagctggcagaaaaccgtggcaagtaggcggcggctctattatgttttgttttatatccacacattctatatgcatatccacttttgaataaacggattagatcaaagtaagattttagcagttacagcgactttgatcgatcctttattaa

SEQ ID NO: 5709 - protein, 223 aa, DROSOPHILA
MSKPALYYATLSPPSRAVLLTAKAIGLDLELRPINLLKGEHLTPEFLKLNPQHTIPTLIDGEATIIDSHAICAYLVEKYGQKEQQLYPKELVQRANVDARLHLDSGHLFARLRFLYEPILYYGSTDCSIDKIAYIQKCWEILEGFLKDQPYLCGSDLTIADFCAVATVTSVNDTAPIDEFKFPKMHAWLKRLAELPYYQEVNGDGADELKSIFKAKLAENRGK

SEQ ID NO: 5710 - DNA, 5553 bp, DROSOPHILA
atctcgactgttttacgcacccatcgacaccttgttccgttctgaagagtacatgcctcgcggcagtgtctgcgatgagcccacgtagtagggcgccggttgtttgccaatctgaaagatggatagataaacggtgttggattagttcaatgattggatcgccggaggccagtggcaggggcacgagtactttgattaacactgccaattggccttcgttcaagaagtgaaatgaaatgtccaatatggtttctccgctctttaatagctataatgttttgcagcccatcccaaatcattgcggacggacacgtacgcgctggcacactgagagaaatgcaagcgtagtagatgaaaactaattaaaactattgtaagacatcctctcatggcttcgtttcgaaagatacagctaatcttctacgcatttgttttttgtggccaacagcaatgcttcgcacagtgagtgcttttgattgggagtcaaacgcgagctcacggccgtggcaagatgaataccagttaattggcatatgtaccataatccacccaccactcctctacccgaaccagccaccttcactgccaaatcggctaaattcgcggaactcaacgcgttttcctatattcgtctagcactgagtggcagtattggcgatcattgggtcaaggaggtggatatgctccacggtaagttctgggcgcacgatatgttcgtaagcaaggtgcattggattatcaagccctggagtgcagcaagtgcaagtggttggctcattcaccgcccgccacggcacactgcaggccaactcagcccacaaacctcaaccagtttctgattcagtttcgatttcaatacaaccattttacaatttgttacaaccgagcaagaccgacggccagctgagcagagctcggcggcaaagctgctgtttttgttacggcagcggctgggattttggcgcaactcaacctggctgtggcgtatgcgtggatgattagtgaagtgcgagacatcgcggcaatcggacgttacagacgcgtggaagattgaatcttcaagacccggtcccaggcccagacccagacccagaccgagactaggatcacagccaaaatcaattggagtgacagtaacccaataaacgaaatggcgcagcggcttcatctagcgctggtcggtgtggtgctcctaaacgcgaccgcctccttcgcctggaagcccatcgttggcggcggcagcgggattagcggcggcactgccgcctacagcctcaagcaatcgcatccaggggcggcgagcagtagccatgaaatatccaccagcttctcgcagttcggcggcgacaaggagaccaccgaagtcgaggacgagctcttgctgggtcgcgctgccattgtgaacggcgtcgattccagtgcagcggtgtcccatccaatcagctttgctgaccacttggaggaccagtacgagtcgtacagcatcgaggacgaggcgcccaaagagccgctggccttcccgcggtctccagtgtacggctccgatcgctgcagcgtcaagaagttcgccttcaatcaggacggcgaggtggagtacggcaatccgatgccggaactggaccagtttactatctgcttttggatgcgattcactaaccacagcggcgaccacgtcctcttgacctacgagggtaagtgagtgggcttgggtgggctgtgggtagtgggtattgggtagtggttgggatcagcctctcaccgtgacttgcttcagcggcaagcgagacaaaggctgcacaatggtcactgggcgaatgctattgcataagcggacaacgggagacgggtgacggacgtcgatcttttgatgggccaccgcttcagcgagagaccttcgcttgtgggcaatgaaattttatttgtgaatttgtgggccacgctccggcaatcgcacctggctgcgactgagtggctacgaaagtgaaaggaagcccacttcctgatgcaagtcggcagcacccagtttgatggtcagctatgatgctggtgaagattatgacgatggtgctgctgatgtgggacgagaagtgctgctgctgcataatgccgccctcaagattcgttttgttttcaaacgtcttgaatatgtttggatattttcaactgccccaggtcgtcgatgccaccgctgctcttggcgtcgtcgctgctgttgttgatgctgttgctgttgttgttgatgctgttgatgttgttgtctgcgttgttgtcgctgcggtcgcattacataagcgataatttacctgtttccagttggatgtcgtcggcattgttggtgtcgcactctcagctgtgggtagcagcttaagccaatgctgaagctaacacgcttaaaccgaagctgaagttcaagcggcgggccttagcatttgacataattccagagcgtcaactcaagtagtagtgatcagcagccaagcttccggataggaagtgctttactcacagccggtggtgatttggtgattcatatttaaatgtatgcatatcacatgttgccagcgtaacaggatttgccgcatgccggttgtataaccaaccgcctggctcaccgcttgggcgggtttcctgatcgcatctgatcaccgatggggggattcctcgtggctcgtgagatgactagttgcctagcgaaacgttctggccattgagccatcgagttgttggtagtagttgggaacgctgctccactcagtttcgcaatctgagccgccgttaccattattggcatgaaagcgagtctcaaagccaatctgatccacttatgcatccacatccacattcacacttgcagctggaaaggaaccacgcgaggtgcaaatctgggtcgcaaatgcgcagaattccagtttcctttcgatggccataaaaggtcagcaaatgtacaggtaagtctagacgcaaccatccatcgatcaatccggcgtcaatccgtcgaatctttatcgtttttctgctcaagattgaactacccgttgaaaatgcgccagtggcatcacatgtgcagctcgtggaatggcaagacgggcgagtggcaggcctggctgaaggcagaacgcattgggcgtggtttccacaactcggtgagtttgactccatttgactccaattacgcatattgcaaaatgccttgttcgcgttttcactttcggcgtgcgaatgtcagctgctataatctcaaatctccgtctccacttaattcttaattgcttcagttggtgggacataaaatcccagcgaatggcaagctgcgctccggcggcagttcggtcaccggcgaggtgagccacggcctccacttcgagatgacgctcgtccaggtctatcgggtggcgctcagtgcaggcaaggcgcatcgcgaccacaagcaccaccatgtccaccactttgatcacgagggccaggaggtctccagcaccactcgtgccccaccctcggtaagttcgtaaccagtgcccacggagacaatataacacgccagacctccattcagattaatcgtcctcaacccatgcacacgctgctcgccagtggccagatcccgacccgggtgcgcatcaacttggccaatccgccgccgactgcaagtggtgctcccgctcctggcgcggccggagctccgaccgattccgcccagcaggccatcaccatcaacacaaattttgtgaacggacagataaacgcgggatcgcgactggtggcccagcaactccttggcctctcgccgccgagcggattgcagcctagtggcggtggcaaacgcttccaaatgctaagtaactcagccaacgtgcagttcatcgacgaaacggagacccacatccagttcaagaggaacaccgacgccactaagaaggttcagaagcgcggcctggtgctgctggacgatggatctgtggtggacgacggtgtcggttccggaacggatgggagcttgatttacaacggtctcgccgactttggcggacagcaatttaagcaggatcttacgctcaagatgagcctggaggaggagatcagcacgcacgaccgagagcccgccgaggaggaggtaagggccgtgatggccatctgtagcagctgccacacggagcctttccagggtgccatcgtgttttcgtggaaggatgtgcgcgagcacatgaacaacgccctcaagggcctcagtgtgggtccatgtggtaacttctagttgttcccaaagttcggataacattctagtgtcctaggaccccagcttaagctttcccagccccaccccattatttccatatcttttttttttctatatatgtacgaataagtattcgattggttgggcatcttgtgccacaattgtccatgtgggagtcaacgctttactgttgccacccatttggccaccaaacaatccttgactcgctcatggacaccaatccatcctgcttccctaagccctacatcctcaccctagcaattacgcggtgatattgaataaaggactatttaactgataccatctagcagcacttacctttgatttgtggatatgctggtgcttgtagtccgagtcgaactccggctcgctgaagtagctctgatcctgatcccaattggcctgcgcctgcggcaggggttggggtattccagggccgccgggcagaatctggggcggggctgccacctcagtggactcaaagagacgcagcacggagcgatccctgatctcgcgcagatgcgagcgcacgtcctccagctcgtagaacatatccttgctggcatcgtgaatgtaaatcttcacattgggcccctccagatatgacatggtcaactggcgcggaaacgagcgtacgaacagggcgcgcaccgtatcaatcgaagtgatctcgttgggcagcagggcgcgcttcgtctccgagcggtactgcagaaagaccaggcccagcggtcgttccagagttttcgagggcgtgcgtaccacggggagcgaggagcgctgcttgccgcccctccggaatccggtgctggccgtttccacctccgacatgatgccgggatcgtcgtcgaacagcggtccctggttaacaggcgcataaccgcgcatcggctggttctttttgttcttctgcgcgcgcgtactcatctaagaagggacaagaatcagaaactgatggtagaaacgagttgagatgggagatggagctcacctccagatccatggcccgctgttgctggggcgccatctgatgggcgtgtggatgctgcgagccgtagaccagcatatcgccgccgagcgtatgtcgtcgtggatcgtcgcgtcgcatggctcgtcgtctttcgtcgccacctggggaaacacatagacactgaggatggggctacagatccgtggacgtctttggtccttaacataccctgttcattcgacggaagccgtcccgactttgcctcattctgccagtcttcttctgaaagagagggagctggagttaggctcatttcatttcgcttcct

SEQ ID NO: 5711 - DNA, 2128 bp, DROSOPHILA
agtgaagtgcgagacatcgcggcaatcggacgttacagacgcgtggaagattgaatcttcaagacccggtcccaggcccagacccagacccagaccgagactaggatcacagccaaaatcaattggagtgacagtaacccaataaacgaaatggcgcagcggcttcatctagcgctggtcggtgtggtgctcctaaacgcgaccgcctccttcgcctggaagcccatcgttggcggcggcagcgggattagcggcggcactgccgcctacagcctcaagcaatcgcatccaggggcggcgagcagtagccatgaaatatccaccagcttctcgcagttcggcggcgacaaggagaccaccgaagtcgaggacgagctcttgctgggtcgcgctgccattgtgaacggcgtcgattccagtgcagcggtgtcccatccaatcagctttgctgaccacttggaggaccagtacgagtcgtacagcatcgaggacgaggcgcccaaagagccgctggccttcccgcggtctccagtgtacggctccgatcgctgcagcgtcaagaagttcgccttcaatcaggacggcgaggtggagtacggcaatccgatgccggaactggaccagtttactatctgcttttggatgcgattcactaaccacagcggcgaccacgtcctcttgacctacgaggctggaaaggaaccacgcgaggtgcaaatctgggtcgcaaatgcgcagaattccagtttcctttcgatggccataaaaggtcagcaaatgtacagattgaactacccgttgaaaatgcgccagtggcatcacatgtgcagctcgtggaatggcaagacgggcgagtggcaggcctggctgaaggcagaacgcattgggcgtggtttccacaactcgttggtgggacataaaatcccagcgaatggcaagctgcgctccggcggcagttcggtcaccggcgaggtgagccacggcctccacttcgagatgacgctcgtccaggtctatcgggtggcgctcagtgcaggcaaggcgcatcgcgaccacaagcaccaccatgtccaccactttgatcacgagggccaggaggtctccagcaccactcgtgccccaccctcgattaatcgtcctcaacccatgcacacgctgctcgccagtggccagatcccgacccgggtgcgcatcaacttggccaatccgccgccgactgcaagtggtgctcccgctcctggcgcggccggagctccgaccgattccgcccagcaggccatcaccatcaacacaaattttgtgaacggacagataaacgcgggatcgcgactggtggcccagcaactccttggcctctcgccgccgagcggattgcagcctagtggcggtggcaaacgcttccaaatgctaagtaactcagccaacgtgcagttcatcgacgaaacggagacccacatccagttcaagaggaacaccgacgccactaagaaggttcagaagcgcggcctggtgctgctggacgatggatctgtggtggacgacggtgtcggttccggaacggatgggagcttgatttacaacggtctcgccgactttggcggacagcaatttaagcaggatcttacgctcaagatgagcctggaggaggagatcagcacgcacgaccgagagcccgccgaggaggaggtaagggccgtgatggccatctgtagcagctgccacacggagcctttccagggtgccatcgtgttttcgtggaaggatgtgcgcgagcacatgaacaacgccctcaagggcctcagtgtgggtccatgtggtaacttctagttgttcccaaagttcggataacattctagtgtcctaggaccccagcttaagctttcccagccccaccccattatttccatatcttttttttttctatatatgtacgaataagtattcgattggttgggcatcttgtgccacaattgtccatgtgggagtcaacgctttactgttgccacccatttggccaccaaacaatccttgactcgctcatggacaccaatccatcctgcttccctaagccctacatcctcaccctagcaattacgcggtgatattgaataaaggactatttaactga

SEQ ID NO: 5712 - protein, 558 aa, DROSOPHILA
MAQRLHLALVGVVLLNATASFAWKPIVGGGSGISGGTAAYSLKQSHPGAASSSHEISTSFSQFGGDKETTEVEDELLLGRAAIVNGVDSSAAVSHPISFADHLEDQYESYSIEDEAPKEPLAFPRSPVYGSDRCSVKKFAFNQDGEVEYGNPMPELDQFTICFWMRFTNHSGDHVLLTYEAGKEPREVQIWVANAQNSSFLSMAIKGQQMYRLNYPLKMRQWHHMCSSWNGKTGEWQAWLKAERIGRGFHNSLVGHKIPANGKLRSGGSSVTGEVSHGLHFEMTLVQVYRVALSAGKAHRDHKHHHVHHFDHEGQEVSSTTRAPPSINRPQPMHTLLASGQIPTRVRINLANPPPTASGAPAPGAAGAPTDSAQQAITINTNFVNGQINAGSRLVAQQLLGLSPPSGLQPSGGGKRFQMLSNSANVQFIDETETHIQFKRNTDATKKVQKRGLVLLDDGSVVDDGVGSGTDGSLIYNGLADFGGQQFKQDLTLKMSLEEEISTHDREPAEEEVRAVMAICSSCHTEPFQGAIVFSWKDVREHMNNALKGLSVGPCGNF

SEQ ID NO: 5713 - DNA, 8018 bp, DROSOPHILA
ccattgtttatgccagaagtaaataaaacaatttcgaacgttatacgttaaattacaaagggaaatcgctttattaccaaatcaaaatctagctatgggtacgccacgcttagaagttcctgcaaggcgaaaaatgcgcgattagtggatgtccatcccggggattctagcacaaactcacttggtaatgatgccgtccttcttggccagacgcacgatgcagtcgtcggactcgcccatgcgacggatctcgccgcagatggcgtaggtcttggaaccgtcggtctggcgaccggtctcggggtccacatccacgatgctcagctgcacggaggcgtgatccttggcgtggatgatcctgttggacgccgagctgcagggaagggtatcggctggtcagtaatccattcggcaaattgtgcggggaacacgtgtttcacttaccatttgcggggcacgtacagatcaacattctcaccggcgtcgttctccattttattgggctgaaaggtaagggacacaattagcttgctttttattcagttttagtggcggccactgctggtttactcacttttttgtagaaatttacaaatctagcgaccgcaactcgtcggtgaaggcgaaaaagagaaagaaatgacagctggacgtgaagttggctgcgctgcgcgtggcgccccctgtcggaagttttgcgtaccagctggttttggggtgaccagctggcaaaggttttggtatttatttaattgtacatttttgcaagatatttccattcccctttaatgaataggcatgtttcaattttggttatgcaccaaaatgtattttaaaattaaatgataattaaaaaaaaatttcacttggttttgtaagtaaatatcaatagatttaaatatatattttcccgcattagtggaaaataccaaaatctaatgaatgacatattagatacatgttccagcagcgactggtcacactttcgaaggcctgagcgaaggctgcagatttcgcgtcgggaaaattctattgcatatttaggggcgcatcaagtaaatggctcccattagagtggctcaatatatattattcgcaagctcccaactgcacggacttacttatttagcatgtgagtattgattttgcaacagccagtcagtcagtctgtgattttgttttcgctggatgggcgttcagcgcgactgccctttgacctcgctcgatgtcagcagcgattttcgtcaatggatgcggacccccactttttattgccacttcgcgtgtgtttgtgcggctgttggggcgccccaagtgggcggcattgttttcatcgcgcgccatgtcgcggaattcgcagtccacgttgcctatttataggcgtcgctcactcaatgaactctctgatcgcatttcattgtgagttcggacttagctttttcagttggacgccaactttggaagcaatcggttcgcttcgcgtcgctcgatttcaaaaatcccaaacggcgtgacttttgccttattgttgttagttgtgttttttcgactgaaacttcttgaggtgagatttcacaagtggttatgctgcttgttgaccttttgtgtgtgcaaattatgatatttttgcataatatgtttgccaccagcccagtacagccgagagcaaaaagataaaatgaaataaaatgagatcatgataacgtgagatgctatttataagcacctaaacaagaaagcaaagatcccgagacccgtaataaagtggcaatatagtaaatgaaacgaaatgaaagtgaaactaatcatggtgcttacaaaatacattagataaattatgttaaagtccacccaaagtgaccagacttcaaaaaagctattgatcattaaaatcaaacaaaataacaagtggctgccaaaacaatctaatcagtagatataaccgtgtaccataagaggtatcgcatattacggatattttatcagtttgctggcttatctgtaacaaacttagcgtacaaagttggtaagaaaattactacagatattataagctctaaaggtgctaaaatgtttcggaactataccttttattcagctaagccgtctttaacggaattttcgtttcggccgtatatttgagatacattcacaatgtaattatgtgaatagggcaattaagagtcgtactcaggctaagaaaactctgaactcatgttgtcagcagcagcacacattgcgtgcctggccagaaagacgatgatgatgaaaagccgcatgaggaaagtccgaaaaactaaaacactttctaggtcaaaagttgaaaggcacaagggaaacatcaccatgatgctcataaaaaaggcaagaagcgtagatgaaaatcagaaaaaaaaatgcggctgcataaaatgcaattaataaagcagtgtacccacaaagtaagagaccagaaaatgaaaaagaaaatgaaaatgcttcactttgtgactggcttgttgcgtgttgattgagccaagtcagctgcgatctgagatgccgcctgtcaatttccagggggagttcctattaacaacggagaaattacagcatgcaaaaaagttagtaattgttgttctcttgcaataggggaaatcgcatgagttgcaataatctagacaaagcctttactttcaagaaaagggaattcatttgaagggcaacaaagttgtgaaccttatcaaattaatggcattcatgtgcaatatagagaacctcttcaaacactgatgatttttatggccccttaaaaggcatttggctttaagggagccttatcgatagaagggaattcaatttgcccctccatgaattattaaattggtcttgcagcgcttagctaaatgtttatgtggctgtctaaactgacagaaaataagataactccgaacttcgactaaaatttaaacctttcaccagaacttagattgggcagtcttttgcgagacactcctcccgatgagattacaacttctcactctcctaccattttggcactataattcccagctacgccgaacgaaaacctgttatttccgcagcaacttaattctaatgtggcccgtgccttttggctgtgctccttttcctctttacaatttgcagtgctcttgagattcggaaactggtcgcttggaattaaacttggaatcgcacttggacaatgatgccgcatctgatgttgtccgctgttgctggtgcggctgctggttctcatctgatttgatttggtgccacttgccaagcgatctcgttgctatatagcagctatatagttggccagaagaagtcgttgttgctgctgctgctgctggcggaggggcagcgttacagttcggaaaatcggtcaatggaaacgggcttgtaagcaggtgcaattgctgcgagagccacggaatagaccaaacagccggggatccagaggccgggcgagcttggaggcgcaggcatgtcgcttaaggtgagtaaatgctcaggtattgacccatataacacttaattgactcaaccggatcgcgtttgatggctcttttaatgggaaaaactcaaatgaatagcttcggcaactgcgaactatgatttaagcgcactgtcatggatttgaaattgagaaaaattgaaagagttcaatggattgaaatcagatcttgatgcccagattatgtctgaagctttaaaagtgtttctcacctgctgctactcacaaacatatatcttggtcgtcgtcatcaggaacgtgattatcacgatggcatcaccgtcttcattgtcattatgtcacttcaaagtgcagcagcatttgcattgttaccctcgcaacttgagtcacgtcattttcatgcaagggttttcacttgtctttgcctttcaacaggtgcttcaaaccacttcatcaatggcagaaacctggctaaaaagcaaacacacagacaaacacgggcacatctgggccacttaattcgcttcattaacgcaatgttgacatttcaaacacacttagctggaaaaaatatttgttgcatttcctccttcagctgaaattggcatgccagttaaccctcaaaaaaaaaacaaatgcatcatatttagatttcgacacatattactcataccacccgtaagccgccctctgcatttcatttcactgtacagccctgtccatctgagggttaggtttcattttgaaaaaatgcattcaatgtggcacaacatccgctgcgaaataacttttttttagtcactgctctgaccctaattactgcaaacaggaagagtaatattcccacgtggcgcccaaatgcggaatgggggggggctatgaagtgggaactttggccagaaagctcggggcacgggtatcacttccccgaaaatctctctatttggacagctgctgcggggcaagttgataattgatttgattccgttttcaatttcatttttgcgactgcagaaggagacgccctcggatgtgcaactgcacatggcagcgatgaggggagatgaggtggctcttcttcgcgttctggacagtggcaaagtgcatgtcgactgcaaggatgaggtaagttataaaaagcatttaaatcagtttatgcaattacacgacttccagttatataaagtcggttaaatgcactttagttttgtacatgcaatcgttaatgcatgacacatgcgacttcaaagtgctgtcagtgaagtattgcgaaatcgtagcccaaaacaaagtattttttaaagtctctacgaggcaaacatcagttaacacgtcgttgctaaattaagtacgcaccaattagcaaggaaaacgaaaaatgcagcaaacttacatgcgactgaaacaaaagccataaatttttgaattttcaaaagtaaacagaaggcttttgaatactctagcaatcgaagatgaaaagaatatttaaatgttgagaaaataaagctaaatgccttagtattatatcttaactattttacttaacgtaactagtgatacttccacctgaatatcccagttatagtactttttgttagtgtataaaaattgaaattaaatttcgctgcccattcagtggagcatggactcaagtccaactaaaaggaaagtgggctgcgggggcagtgtgccattgtgtttctatgtgtatatatatacatttctatatatatatatatatgtatattattatgccagttggtctgcaagagtccgcggatagggtgggcactacgtgactcccccatttggatgcagaccaccgagtgcatcgagagcgatttgcaagttgtggcgtgattttcccgctgggacatgcctcaatttcccctgttgtttttcctctgtttggtttttgatgagtccgagccacggacttgcatgcaaatccgcacgatgcgattaagcgttgacttggtgaaactaatcgcaaattgctattcaaatcacttgttggccaattagacaattaaacaatttatcgctttgaagttgaaacaaacgtaagctgtcaatttgtgatgtcagacgattggaactttgtttcattgtataattaaagattttatggttttgattgttgctcattgattgaatggcaattattggtacaaacttaagcaaattatgacattttacgcggttttttggtcataacatggcctaaatgagtcacagagatgaaataatgactgatttttaaagcttttgatctaaactaactatccctatcacgtttatgctgatttttgaaaatcaattttttgacatttttttcattttttgtaaggggtaacatcatgattttttgcgaaaaatggcaaaaattttacatttagaactgtgaatgccattcgaaagagaattttgcaacgattacaacgaggtatgacattccatatttgaactaatattttgattgttattgagaaaaaacgtagtatgatccctaatatttccttaaaagattatactcatgtacagattatgtgtgtatataagccaagacatttctatatactatttgtttttattatctctatagatagatatctttctaatttataaaattatttgcaggatggaaccaccccactgattttggctgctgccggaggtcacacctactgcgtgatggagctgctcgatcagggagccgatccaaactcgcgtcgcctaacgggcaccacgccccttttcttcgccgcccaaggcggccacctggacgtggtgaagattctgataaaggcgggcgccagcgtggacacgccctccgcggatggcggcacgcccctttttgtggcctgccagggtggtcacgtgaagatcgttcgcgagctcttggactgcggagcgaatgtcaatgcgcacatgaaggtgggtagtccgagatcttgacgaggcataatctaacagtgacctatttctctgcaggatcgagccacgccggtttttatctccgcccaaaatggccatcgcacggttctgtcgctgctgattcaggctggtgccgagatcgatatcaagcggatagacggcgccacgcccctgtggatagcagcccagatgggacaggatcacatatgcaaggtgctgctccagaacggcgccaatgtggacaccgtgcgttgcgacggcgccacgcccctcttcaaggcggctcacaagggccatgccgccgtaatcaccgtgctgctcaaataccgacccaatctcggccagctgcccaatggagagtccgcactgcatgccgccgccatgtttggccacatgaccgtctgcaagcagctggtggccgccggcagcgatgtcctgctgaagaaccacgatggtctgacggccctgcagttggcgcaccagcaaaagtacacctccatctgtgattatctccaggaacgcatacggactatggtggcgcgcagcgccaaggcaatggccacgtccggagtgtcgtccacggtcaagacgatgtcggcgtaaggggatatcgcagttgggagacgacgactccaaagtacctttatgcacaataccctaatgttccaaaaacgcaagaggatggagatgcgagtgtttggcaatagaatggggggattcaccaccatttggagtcgaattggaagccaggttaatgctggtttggctatattcgaagtaccctgacttgaattgctcagtgaggcactcacttccgcacaaaaattaaccaaaagatggaaaaaccactagtaagaacacgtccaaaatcaacttaatggcctaacccaaggaaaccaaactatttattagataagccgtatcattcatattaaaaccacttggagcttgtattttgaatttaacactaaccataacaataacactaacgttaaagataacaattactataaaaatgttaacatggacccggaaagagatcgttacactgtcccctgtacataaccatatatatatacatatatatatatatactataacttaaatatatacctatatttaaataaacctaatgctacttatagacctactctaccctaagcaattgttgacgagtgctttaagtttaaacgcctttttgtctttaaattagaaattagttaacaccgatggttttccgcttgtttctttgtaaattaggtacgataattaattaatttcttactttattaacacttaagtatagtccaccattttgcaagtttaataaattgacacacgattacagatgagttttatttccaacaatgattcggtgatatcaatttaaaaattcctttatcttttaattttgaagctgaagcgtaaaccgctttttgttaacaagtgttagtcacttggttgtttaaaacctggctaaaaagctttcgattttagcgcatctttttcagttggtataactattggaattaccaatttacaacttgaatttagtttttttataaagttcaaaaagaagcttaaagtgtagattaattttcta

SEQ ID NO: 5714 - DNA, 1504 bp, DROSOPHILA
aaggctgcagatttcgcgtcgggaaaattctattgcatatttaggggcgcatcaagtaaatggctcccattagagtggctcaatatatattattcgcaagctcccaactgcacggacttacttatttagcattgctcttgagattcggaaactggtcgcttggaattaaacttggaatcgcacttggacaatgatgccgcatctgatgttgtccgctgttgctggtgcggctgctggttctcatctgatttgatttggtgccacttgccaagcgatctcgttgctatatagcagctatatagttggccagaagaagtcgttgttgctgctgctgctgctggcggaggggcagcgttacagttcggaaaatcggtcaatggaaacgggcttgtaagcaggtgcaattgctgcgagagccacggaatagaccaaacagccggggatccagaggccgggcgagcttggaggcgcaggcatgtcgcttaagctgctgcggggcaagttgataattgatttgattccgttttcaatttcatttttgcgactgcagaaggagacgccctcggatgtgcaactgcacatggcagcgatgaggggagatgaggtggctcttcttcgcgttctggacagtggcaaagtgcatgtcgactgcaaggatgaggatggaaccaccccactgattttggctgctgccggaggtcacacctactgcgtgatggagctgctcgatcagggagccgatccaaactcgcgtcgcctaacgggcaccacgccccttttcttcgccgcccaaggcggccacctggacgtggtgaagattctgataaaggcgggcgccagcgtggacacgccctccgcggatggcggcacgcccctttttgtggcctgccagggtggtcacgtgaagatcgttcgcgagctcttggactgcggagcgaatgtcaatgcgcacatgaaggatcgagccacgccggtttttatctccgcccaaaatggccatcgcacggttctgtcgctgctgattcaggctggtgccgagatcgatatcaagcggatagacggcgccacgcccctgtggatagcagcccagatgggacaggatcacatatgcaaggtgctgctccagaacggcgccaatgtggacaccgtgcgttgcgacggcgccacgcccctcttcaaggcggctcacaagggccatgccgccgtaatcaccgtgctgctcaaataccgacccaatctcggccagctgcccaatggagagtccgcactgcatgccgccgccatgtttggccacatgaccgtctgcaagcagctggtggccgccggcagcgatgtcctgctgaagaaccacgatggtctgacggccctgcagttggcgcaccagcaaaagtacacctccatctgtgattatctccaggaacgcatacggactatggtggcgcgcagcgccaaggcaatggccacgtccggagtgtcgtccacggtcaagacgatgtcggcgtaa

SEQ ID NO: 5715 - protein, 342 aa, DROSOPHILA
MSLKLLRGKLIIDLIPFSISFLRLQKETPSDVQLHMAAMRGDEVALLRVLDSGKVHVDCKDEDGTTPLILAAAGGHTYCVMELLDQGADPNSRRLTGTTPLFFAAQGGHLDVVKILIKAGASVDTPSADGGTPLFVACQGGHVKIVRELLDCGANVNAHMKDRATPVFISAQNGHRTVLSLLIQAGAEIDIKRIDGATPLWIAAQMGQDHICKVLLQNGANVDTVRCDGATPLFKAAHKGHAAVITVLLKYRPNLGQLPNGESALHAAAMFGHMTVCKQLVAAGSDVLLKNHDGLTALQLAHQQKYTSICDYLQERIRTMVARSAKAMATSGVSSTVKTMSA

SEQ ID NO: 5716 - DNA, 6105 bp, DROSOPHILA
catagttggcatccaattcgctgcgtagctccgagattttgccgcgttcggatgggggactcatcgacaatgggtgcagatatcgcagcaggtgacccacaccgccgccaaagaatggtagtctcgttagctgactatcggtgcgcgcccaatccagatatgttttgccgcccacctgctccaatttcgcagtaattagtagcagcagtggcagccacgcccacttccagggtaggcggtgcatattattggtatcttttggtatagtatcgttcggtttctggatcttgccaatattgcggtgcgatcgattgggcagttggtgcgaatttaatgcgttcacaagtcgaacggtgagccgcagcctccggttaacggcttttcgcgttctcaattcttcattctcctcgttctccattctccgagccgcgttcttctcgtcttccgccgacccgtcatatttccctattactcgaacgattccccaattaaggccaacgcatttgcatattgacgaaatgccgctgattctgatgcttttcatttcggacttttactttggttgaggtgtgggaattgttatactgtcatactgttatactggctagtataaggcagctaccgattcttcatagacaaatagtcttattaacataattttagctgtgtgtgttttgtgtgtttaagcatataacgttttaggttttgtttattaactattaatcaaaatattaacattttattgctcccagtcaaaacaaatttacgtttttctcaattcattttaattttaattttttttaattttcaataaacatttttcagtctatttagatgagctttttttgtttttgtttttcttgtgtgttcttttttgtgtgttcaatttgtctagttacaagtagaataaataaataaataaatagtattcatataagtagtaaaaaaaaaaaatcattaggctgatttacaaaaaatcgcattgagctaagtgtcaggactagtggccacgcctccggctgccactgctgttcctggccaccgattttccgcgtccctgggcaatggccctggccacggtatcggcgaatgtcacaccatccttgccgttgtactggatgaatcgggcgggcaggacgaagccataccgtccggtgtcgcccatttcaatggtgtaggcatacttgatgcccgcaatgcccttggcccaatcatcggagccaccggcggcgggatacaaagttgtggcggaggatcccaccgtatacttcacgcccgtcgacttggtgatgctctggaagagcaagaacacaacatgtattattaggtggttattgagaaacattcggattagggtaaactcaccgttccggcctgtcgtgccacacgatcgagatcggcacggtcctgggttagctggtagtcgtagccccaaggatacagaatgtactggccatagctgtggaacgagaggtacgcctggaaggtctcgcgcggaaagccgctgatgaacttggagatgtagaaggtctccggctcggagaaggccttgctgccgcgatatgtctgcgagcagggactggccgaggtgcccttgccgccccacttatagccaaagttacggttcagatccacaccggggcactggcgaccatgggcacgcatattcttgcgccagagtcgatcggttgtgtgagaatactcatagccatcgggattggccaccggatggatgtaccagttgatgctgcgcatgtgctcgggcagatcctcccaaccctcgaccagctggttggcaatgtaggtgaccgtggccggactgatccattcgcgtgcgtgcatgccaccatcgatccagatgccaggattacgggcattgccattggaaattctgagaaaaaaacatacgagtatataacattgcgctgcattagatgttctttggcaacactcacttgagaatcttaagtggtcgcttctccaccgagtagccaatgatctcagtggagcaaatatccggataggttttagccatatagtcaatgaagccgtgaatgtcctccagacgatggtaggcctgccaggtgaggcgatgtcctgcgggcaacataaaatgcaaagcagataagtatgatgtattaacccctttggttcattcaacttgctgtcaattcaaagcaacaaaagggaacttggcactctgaccctcaacttgaacccagaaccctcggccctgaaccctcgaaggagacatccttgtcttggcgtcgtctggcgttccccgtttcgctggctatcgattaaacaacagcgtcttgcaagaacctggcccttttctccgggtgcgttttccccccccctcaaagttcactgatcggagttggggcagcgtggcacgtggcacgttcctatggcaaagccactttgcgattgatgacttttcacacgcccctcgccgagtgcattaaatgctcgtttgcggcaacacctcgctttggaaaaaaaggggtggcaccagcctgtcaatcaaaaactcatactccacacacaaaaaaaaaataataataataaaaaggaaatatcctttggctccacgaaaagcgggtgtgtgaatcaaggcgtattcttcttgacaacaatttagaattttgtgggcttaggtaacacaaattgcttcttaacttcattctgcacgtattttaaattcactatttgtttgcttttaaatttacttacccttgcggttctgcagctcggcaatcttctccgctggcggattctccttttcaatgacacgctgcaaattgtcgatcagaacgatccgggaaagattagcggcgcgaatgtgacgttcggcggcggccaaaacttgtggcttcagcagatagtccacctcctgcttgacctctttccacagttggccatctaaaaaaaaatatggcaaatataagattagataagctattaaatggtactagagcatcagatgggaaacacaccatatttggactgcagttcgtcggccattcgcttatccttgtcggtctggaccacgatgcgccacacttgggcgccatcatagcggcgcagatgagcattgaatggtgactcctcctccgtcttgggcagatccgtttccgatggctgctgctgcatgaacgaggcgttgacatagtttagcacactatcctggacctgaagcggttgcgatggcacctggggttggggcatcaccatgggaatgatggtggtcagcagggacgattccaggggcttggtttccttctccggctgctgggcttccttctctacttggggttcggcttgggtggagtcggattgaatttcatcttggactttagatgggatttcagcaggaacttctgctggggtttcagctggggtttccgctggagcttcagctacaacttgagctggaacatcagcagggatttcagcatgggtttcagcaggagtttcagcagggatctcagcagggatttcagcagggatctcggcaggaacttcggcagcgatctcagcaggactctcggcagggatttcagcaggaacttctgcagggatctcagcaggaatttcggcaggaacctcagcagggatctcgacaggaatatcagcaggagtttcctctggtttcacttcggtgacagctggttgagtctcagcataattctggtcatcctcctctggcttggcatcttcctgttgcttgatttcctcctcgggcttagattcttcaactggcttagactcctcctccacttggacttcctcctcaggcttgccttcctctggaattttagctggagcaatctccgcttcagtgtgttgctctggggcaatctcgactggctcttcatttgaaggctgggcactatcctgctcggtttcatcggccaaggttatctgctcgggttccttttccttttcctgctcaatttcgggaactgcctgctcttctatggcttctgtgacaggggactgctgatcttcgctttccagctccgtttcctgcttatcactggcttctgccaattcttcgggcaccaggttgtccatggcggcagttagaccatcttcaatgccctcgaccagggtttccatcagcgatgcctccgtggtgtccacctcgttatcactgattttctcagcctcaacttcgggttccctttctggctgggactctgcttctggctgggattcagcctctggtagggattccacttcaggctgggcttccacttctgcctgtgtttctggttctgaatgagattcagcctcaggctgggattccacttctgactgaggttccacttcaggttgggcttctacttctggctgggattccacttcaggctgggactcaacttctggttgtggctccacttctagttggggctccgcttctggctgagcttccgcttctggctgagcttccacttctggctgagcttcaatctctggcttcgtttccgcctgttcaccatcagattctgattgatattcccctggttgcacctgttccggctgaatttccgattcctcgggcacttgatcatccatggccgcttcggattccttttccaattcctctacggcactctcggtggcagcaggagattcctcatcctctggcaattcgtcgtttaatggaactggtgccgcttcggtggccaagtccaccgtctgctccaactgtgcctcctggctagctggtttcatcagcaccacatgttcctcgatagactcgggctgctgctgatcgttctccgtgtcgtgctccgtttctggctgagattcggctaccgtaatgtcgctgggcagttctacgagttgcatagccgggctggaatcactctccagcatcagcatgtcggaggaggatgagccggaggggtccgattcgggatcggcctcgatggagttgcgattgacatgctcggtgtcttccagttgactggccaccgtatcgggcaccagcatatacatgtccgatgagtcggcggatggtatggaggtgagcttcatattgtcgacaagaacatcctgctgttgttgctgctgttgatctgctggcagctcgttcctctcgagagccaggcgatccagcgacatggacgccacctggtttaaaccaaggactaggagcagagagccgatggtgactattcttttgggggaaatcccctcgttggcagcgctgccacgcgatctcgcgttgtacatcttagcgggatctgactgtgaaccgtaatgagacatgtcccattggtggagtggtgcttttataccaacgctgggaaagtattgccatttcattttcgatatttctctccacgctgccgccaccgcagccggcgtcgctctgccgcgctgccggcgtcgctgcccgcttacactggccatcaaagagtggaacttgttatgtatgttaatgtcttccaagtgcccgtagctcgtggctctcttccttgtgagaggccgcggcgaggcccacgatctcttatgttaatccccaccagcaagtgtcatcggcataaccatatctcccgcccagcatttctatcatcttcgaatgctccgactacgatcccacatttccataccgacaactcgaccgctctcgctttctttcgggatcggagcatagctagaaattaataatcgaaatatatgcactgctataacagatcaaatggcacgatatgcccccaacatttcttgagaaactaacaaaaagcggttaggatcaataagcttatcacaatttctgtgcttagtactcctaaatatgcccatttaaacatatacatataatgagagaagttataatgagaagaataaagtgaaaataagtcaaataaaaaaaaacatgctccacatttgcgctgtgcaattatgtacggttcagtttccgatgccataaataacattttcccccaattaaatattaaatgtagctcgccgtaagtgccatcaactgtcacaattatcgagtgatcgactttctatatgcgcagcaaatcattctcgagctccattcccataccgatctcgatctgaatcgctgaatcagcgggagcc

SEQ ID NO: 5717 - DNA, 3579 bp, DROSOPHILA
atggccagtgtaagcgggcagcgacgccggcagcgcggcagagcgacgccggctgcggtggcggcagcgtggagagaaatatcgaaaatgaaatggcaatactttcccagcgttggtataaaagcaccactccaccaatgggacatgtctcattacggttcacagtcagatcccgctaagatgtacaacgcgagatcgcgtggcagcgctgccaacgaggggatttcccccaaaagaatagtcaccatcggctctctgctcctagtccttggtttaaaccaggtggcgtccatgtcgctggatcgcctggctctcgagaggaacgagctgccagcagatcaacagcagcaacaacagcaggatgttcttgtcgacaatatgaagctcacctccataccatccgccgactcatcggacatgtatatgctggtgcccgatacggtggccagtcaactggaagacaccgagcatgtcaatcgcaactccatcgaggccgatcccgaatcggacccctccggctcatcctcctccgacatgctgatgctggagagtgattccagcccggctatgcaactcgtagaactgcccagcgacattacggtagccgaatctcagccagaaacggagcacgacacggagaacgatcagcagcagcccgagtctatcgaggaacatgtggtgctgatgaaaccagctagccaggaggcacagttggagcagacggtggacttggccaccgaagcggcaccagttccattaaacgacgaattgccagaggatgaggaatctcctgctgccaccgagagtgccgtagaggaattggaaaaggaatccgaagcggccatggatgatcaagtgcccgaggaatcggaaattcagccggaacaggtgcaaccaggggaatatcaatcagaatctgatggtgaacaggcggaaacgaagccagagattgaagctcagccagaagtggaagctcagccagaagcggaagctcagccagaagcggagccccaactagaagtggagccacaaccagaagttgagtcccagcctgaagtggaatcccagccagaagtagaagcccaacctgaagtggaacctcagtcagaagtggaatcccagcctgaggctgaatctcattcagaaccagaaacacaggcagaagtggaagcccagcctgaagtggaatccctaccagaggctgaatcccagccagaagcagagtcccagccagaaagggaacccgaagttgaggctgagaaaatcagtgataacgaggtggacaccacggaggcatcgctgatggaaaccctggtcgagggcattgaagatggtctaactgccgccatggacaacctggtgcccgaagaattggcagaagccagtgataagcaggaaacggagctggaaagcgaagatcagcagtcccctgtcacagaagccatagaagagcaggcagttcccgaaattgagcaggaaaaggaaaaggaacccgagcagataaccttggccgatgaaaccgagcaggatagtgcccagccttcaaatgaagagccagtcgagattgccccagagcaacacactgaagcggagattgctccagctaaaattccagaggaaggcaagcctgaggaggaagtccaagtggaggaggagtctaagccagttgaagaatctaagcccgaggaggaaatcaagcaacaggaagatgccaagccagaggaggatgaccagaattatgctgagactcaaccagctgtcaccgaagtgaaaccagaggaaactcctgctgatattcctgtcgagatccctgctgaggttcctgccgaaattcctgctgagatccctgcagaagttcctgctgaaatccctgccgagagtcctgctgagatcgctgccgaagttcctgccgagatccctgctgaaatccctgctgagatccctgctgaaactcctgctgaaacccatgctgaaatccctgctgatgttccagctcaagttgtagctgaagctccagcggaaaccccagctgaaaccccagcagaagttcctgctgaaatcccatctaaagtccaagatgaaattcaatccgactccacccaagccgaaccccaagtagagaaggaagcccagcagccggagaaggaaaccaagcccctggaatcgtccctgctgaccaccatcattcccatggtgatgccccaaccccaggtgccatcgcaaccgcttcaggtccaggatagtgtgctaaactatgtcaacgcctcgttcatgcagcagcagccatcggaaacggatctgcccaagacggaggaggagtcaccattcaatgctcatctgcgccgctatgatggcgcccaagtgtggcgcatcgtggtccagaccgacaaggataagcgaatggccgacgaactgcagtccaaatatgatggccaactgtggaaagaggtcaagcaggaggtggactatctgctgaagccacaagttttggccgccgccgaacgtcacattcgcgccgctaatctttcccggatcgttctgatcgacaatttgcagcgtgtcattgaaaaggagaatccgccagcggagaagattgccgagctgcagaaccgcaagggacatcgcctcacctggcaggcctaccatcgtctggaggacattcacggcttcattgactatatggctaaaacctatccggatatttgctccactgagatcattggctactcggtggagaagcgaccacttaagattctcaaaatttccaatggcaatgcccgtaatcctggcatctggatcgatggtggcatgcacgcacgcgaatggatcagtccggccacggtcacctacattgccaaccagctggtcgagggttgggaggatctgcccgagcacatgcgcagcatcaactggtacatccatccggtggccaatcccgatggctatgagtattctcacacaaccgatcgactctggcgcaagaatatgcgtgcccatggtcgccagtgccccggtgtggatctgaaccgtaactttggctataagtggggcggcaagggcacctcggccagtccctgctcgcagacatatcgcggcagcaaggccttctccgagccggagaccttctacatctccaagttcatcagcggctttccgcgcgagaccttccaggcgtacctctcgttccacagctatggccagtacattctgtatccttggggctacgactaccagctaacccaggaccgtgccgatctcgatcgtgtggcacgacaggccggaacgagcatcaccaagtcgacgggcgtgaagtatacggtgggatcctccgccacaactttgtatcccgccgccggtggctccgatgattgggccaagggcattgcgggcatcaagtatgcctacaccattgaaatgggcgacaccggacggtatggcttcgtcctgcccgcccgattcatccagtacaacggcaaggatggtgtgacattcgccgataccgtggccagggccattgcccagggacgcggaaaatcggtggccaggaacagcagtggcagccggaggcgtggccactag

SEQ ID NO: 5718 - protein, 1192 aa, DROSOPHILA
MASVSGQRRRQRGRATPAAVAAAWREISKMKWQYFPSVGIKAPLHQWDMSHYGSQSDPAKMYNARSRGSAANEGISPKRIVTIGSLLLVLGLNQVASMSLDRLALERNELPADQQQQQQQDVLVDNMKLTSIPSADSSDMYMLVPDTVASQLEDTEHVNRNSIEADPESDPSGSSSSDMLMLESDSSPAMQLVELPSDITVAESQPETEHDTENDQQQPESIEEHVVLMKPASQEAQLEQTVDLATEAAPVPLNDELPEDEESPAATESAVEELEKESEAAMDDQVPEESEIQPEQVQPGEYQSESDGEQAETKPEIEAQPEVEAQPEAEAQPEAEPQLEVEPQPEVESQPEVESQPEVEAQPEVEPQSEVESQPEAESHSEPETQAEVEAQPEVESLPEAESQPEAESQPEREPEVEAEKISDNEVDTTEASLMETLVEGIEDGLTAAMDNLVPEELAEASDKQETELESEDQQSPVTEAIEEQAVPEIEQEKEKEPEQITLADETEQDSAQPSNEEPVEIAPEQHTEAEIAPAKIPEEGKPEEEVQVEEESKPVEESKPEEEIKQQEDAKPEEDDQNYAETQPAVTEVKPEETPADIPVEIPAEVPAEIPAEIPAEVPAEIPAESPAEIAAEVPAEIPAEIPAEIPAETPAETHAEIPADVPAQVVAEAPAETPAETPAEVPAEIPSKVQDEIQSDSTQAEPQVEKEAQQPEKETKPLESSLLTTIIPMVMPQPQVPSQPLQVQDSVLNYVNASFMQQQPSETDLPKTEEESPFNAHLRRYDGAQVWRIVVQTDKDKRMADELQSKYDGQLWKEVKQEVDYLLKPQVLAAAERHIRAANLSRIVLIDNLQRVIEKENPPAEKIAELQNRKGHRLTWQAYHRLEDIHGFIDYMAKTYPDICSTEIIGYSVEKRPLKILKISNGNARNPGIWIDGGMHAREWISPATVTYIANQLVEGWEDLPEHMRSINWYIHPVANPDGYEYSHTTDRLWRKNMRAHGRQCPGVDLNRNFGYKWGGKGTSASPCSQTYRGSKAFSEPETFYISKFISGFPRETFQAYLSFHSYGQYILYPWGYDYQLTQDRADLDRVARQAGTSITKSTGVKYTVGSSATTLYPAAGGSDDWAKGIAGIKYAYTIEMGDTGRYGFVLPARFIQYNGKDGVTFADTVARAIAQGRGKSVARNSSGSRRRGH

SEQ ID NO: 5719 - DNA, 3367 bp, DROSOPHILA
tctgtaggcgaggaacttccaaaaccagatgttcgaatcatagtgcagaaacagatttgatctggcctgcggttcgatgagatacatgcgcctacgtccctcagaatcgtaagtattgcccgccagcacattcacattttcgaggcactccctcagcttttctgcggtgggacccgcattcttttgctcgcatttggagggattgggcagggatagctcaaccaagcgacgcagtgcagcacgactcatcacagtgccgggtgagccgaaatagatggccagctgtggactgtagggatagaccatgtatctcaggttctccatcaccacgtacgtctcgtcgtcagcctctaggaaccaatcggcatcgtttaggtgatgatcatgaaggtacttcaaggccatcttcgtttttagccacgactcccggaagtaggggcttacgggcagttccacagatccagttagattgagatcagagcggctgctaaagaagatcagcttgttgcaccgcctgccccaagtttccaaaacggcttgggcctgagtcttgtgattaatgggtttggtgtacacatagcacaggactcgcacctcatcggtcaaatcgatgtccagtgaagtcgatgcacccgtgcgattcgtgtgcgatttgagatccataattggccatacaagaaccttggtgatcagatagccaattccgatgcccaggagcaggaaaagtactggacgagctgttgatggcgacgttgtattcggctgggaatgattgctccgatcaagaaaaacacactccttcctttccattttcgccattactgcgctcgttctctaagtccataaattatatatatatttttcatcgtcacaccttttcgttacgccgagatattaaaaatgctcactaagtcatctctcttatagagatatcactttatatatacatacatgatgtacaaatatatactatatgatctataccaatttaaattgattaatgggtattattggatgtgaggaaatttcaaacaaatggtgacgtatttctagtcattttgactgattttataggtttcatcgataggacgttatatatgttaataatttctaaaaaaaaagaaattcccggattaatcagtatatactctaaatattttatttcattagtcttttgtgcttcagcttatcgctatgaaacgcacagatttcaattaccagaacagtctaggaatctgttcgattgggagaagatgtcgcggttgtgcacttctttggtcatcattttgggtctcatcctctcgagcggtggcactcacatatgcctgagctccaatctgtgtgttcccagggaaaattgtcgtgaagagatgccgttcttcgactttagttccaccattgagtgctccgacgaagaagtgtgctgtgaaaagtcaaatgtggtaggtttatatatttatttacatacatatttctaccaaccgtattaacgagctttattctgtttcaaagataggcatgagtaagagtcctccacaacattcagtggacacacttcttaggacaagttatccaaatgccctggatggaagccctcaggtgtttggtgaccaaaccaaaccgaatcaatttccctgggtgacggctttgttcgccaagggatcttatctgggaggaggatctctgattaccccaggacttgtactaaccgctgcccacatcctagcgggattatcccccaatgacatcatggttagagctggcgaatgggatctatcctccagtgagaaactaaatccaccgatggatcgtcaagtgatcaagatcatggagcatgaggcctttaactacagcagcggagccaacgacttggcgcttctcttcttggattcgccttttgagttgagggccaacatccagaccattcgcttacccattccggacaagactttcgatcgaaggatatgcacggtcgcaggttggggaatgagatcgtcgaccgatgttgatattcagaccatccagcagaaggtcgatttgcccgttgtcgaaagttccaaatgccagaggcagctcagactaactaaaatgggctcgaactaccagctgcccgccagtttaatgtgtgccggcggtgaggagggacgggatgtctgttctctattcggaggattcgcccttttctgctccctggacgatgatcccaatcgctacgagcaggcgggcatcgtaagcttcggcgttggatgcggccaggcaaacgttccgaccaccttcacccatgtgtccaagttcatggagtggatcaatccgcacttggagcaagtgcttagcgtgcctggaaatatgcttcctgccatgtcataatatccttgcactaatgttatctataagcaagaaaactatacatttatccgcatcttaaaagttggtttatcccaaagaatttgcttatgtgcaagaaatacagccgcatcaatggtcacatttgtacttttaagtataatataaaatataaaaaatttatatatgtatatatattattcaaatgccaccatacatgttaatatatgtttcaagtacatatattttaaagctattacttgattgaatcgaagcgtttcgcattactgttctctgataacgaagagggtgattcttttttcccagaacacgagttcgaagaaaagatctctctgaatattttgagtcagtgttgattcagtcgttaagctagcaatgtggcggcgagtcatatttatcagatgctgtttctggacgctaactgagacgggagcaccgtgtggcctccagatggagtgcgtgccccagggactgtgcaaaacgagcgcttggaatcagaatgctatttcttggccgagcccgtgccagagatcagaaagttgctgtcacagttctcaaaaggtaagtgtggagtgaaccaagtttgattgccagatatatactcgtaatatataaattgcagttagtgatcggtgctccgctaaactgtggcaagagtaatcccaatggcctgggcggcacagtagaagaggttgtcgatcaggcgaaacccaatgagttcccttggactgtggctctgatgcaaaacttgatcaacttctttggcgcgggaactctggtcaccgaaaacattgtgataaccgctgcccacctgatgctagacaagaccatcaacgacttcggaatcatcggcggtgcatgggatttgaagcagctggctggtaaaacgattcagtggcgaactgcgaccaggattgtatcgcatccggacttcaacaaaatgaccggggccaacaacatagccctgatcgtactggaaacttcgttcgtgatgaagccccct

SEQ ID NO: 5720 - DNA, 1128 bp, DROSOPHILA
atgggtattattggatcttatcgctatgaaacgcacagatttcaattaccagaacagtctaggaatctgttcgattgggagaagatgtcgcggttgtgcacttctttggtcatcattttgggtctcatcctctcgagcggtggcactcacatatgcctgagctccaatctgtgtgttcccagggaaaattgtcgtgaagagatgccgttcttcgactttagttccaccattgagtgctccgacgaagaagtgtgctgtgaaaagtcaaatgtgataggcatgagtaagagtcctccacaacattcagtggacacacttcttaggacaagttatccaaatgccctggatggaagccctcaggtgtttggtgaccaaaccaaaccgaatcaatttccctgggtgacggctttgttcgccaagggatcttatctgggaggaggatctctgattaccccaggacttgtactaaccgctgcccacatcctagcgggattatcccccaatgacatcatggttagagctggcgaatgggatctatcctccagtgagaaactaaatccaccgatggatcgtcaagtgatcaagatcatggagcatgaggcctttaactacagcagcggagccaacgacttggcgcttctcttcttggattcgccttttgagttgagggccaacatccagaccattcgcttacccattccggacaagactttcgatcgaaggatatgcacggtcgcaggttggggaatgagatcgtcgaccgatgttgatattcagaccatccagcagaaggtcgatttgcccgttgtcgaaagttccaaatgccagaggcagctcagactaactaaaatgggctcgaactaccagctgcccgccagtttaatgtgtgccggcggtgaggagggacgggatgtctgttctctattcggaggattcgcccttttctgctccctggacgatgatcccaatcgctacgagcaggcgggcatcgtaagcttcggcgttggatgcggccaggcaaacgttccgaccaccttcacccatgtgtccaagttcatggagtggatcaatccgcacttggagcaagtgcttagcgtgcctggaaatatgcttcctgccatgtcataa

SEQ ID NO: 5721 - protein, 375 aa, DROSOPHILA
MGIIGSYRYETHRFQLPEQSRNLFDWEKMSRLCTSLVIILGLILSSGGTHICLSSNLCVPRENCREEMPFFDFSSTIECSDEEVCCEKSNVIGMSKSPPQHSVDTLLRTSYPNALDGSPQVFGDQTKPNQFPWVTALFAKGSYLGGGSLITPGLVLTAAHILAGLSPNDIMVRAGEWDLSSSEKLNPPMDRQVIKIMEHEAFNYSSGANDLALLFLDSPFELRANIQTIRLPIPDKTFDRRICTVAGWGMRSSTDVDIQTIQQKVDLPVVESSKCQRQLRLTKMGSNYQLPASLMCAGGEEGRDVCSLFGGFALFCSLDDDPNRYEQAGIVSFGVGCGQANVPTTFTHVSKFMEWINPHLEQVLSVPGNMLPAMS

SEQ ID NO: 5722 - DNA, 4420 bp, DROSOPHILA
tcagctgtgtccaaaaactggaactcaacatcatgcccaaaaacaccactgttgtgacggatgcctgctggaacttggtgacattccactcgcagaacaaagacgggcccaatatgctgagaatggccatttccatggagtcggacatccagcagagccccaccaagagcgacagcttgacgtgaaaccatccgaaaccgaaggcattgatcgcctgctgaacagtgtaggtatctgtgaaaggtgcacttgttacccgaaatgtgtgaaattcctcttcggaccacttaccatccggatttatagacaccgtcttcagctccaatgtggatgagtgcacatcccgtggggcgagatttgcgggagatggaagggcggctggctcgttgttcagatagtacatcttgaatctagaatcacttagaaaagtaactttgtcattgaattgcatcttacaatccaactatatcaaatatcacattttttaacccgcgatttcgattacatcatgatttttatgattttattatgcattagcataaattaccttcctcaaccgtaaagaaagttgttctcgattttaagactgtgatttatgtcttcgtatgcagatacacagagatttatccattatatttgaacatattcgaatttgcgatctcgaagttagttaattctgctaattctgattaggaaacacacaacaaatagtttaagccacagcacaaacaacaactttctttcaagcactttcttttagccagtgagagactgagaatcgaatgcaatgtaaacaactcgcaccaccaagtctcaaaaactggttataaggtaacgactgaagaagactgtcttccagactgtgagatcgataacgatagatggcgcgcagctcgaagaattcaaaatcgttgataagttataagattattaacattaaacattgcaagttggtattatttgtatggaattgaaaatattttttaaaataactaaataggctgattgtcaaaccattactcctacaattattgggttttcccaagccaaacaacacatgcttttgaggattttagatcagagtctcactattccatcgcgatggacagggattcctgccaaaatttctcattagactccacgagcagttcccattttgctcctccgccagtttgcgcgcccagaaggaagaagccggagaagcccgcagctgaggaggcatctcccgaatgctccaacgtcacatcgtcatcctcgtcctcgacaaccaccatatccataggcgccttcgattcgcaatgcaacctccacaacgcccggaatcccgaggccccgaacattggctatgagttgaacgtggccaagtccatattgcagaagtatagcaccctcagtggggacaacttgtgagtataggatatcgtcttaagtacttggtactctttctccaagtcggttagtacataacccaatcttcaatccctgcaggttcgatcatcttagtgacatcataaagagggtgattgacgaacgtcctccgaatgtgatagacttcttcgaggaatttagccgaaatgttcgcgaacagaagttccacttgccagaacgctttccgcccagtggcgtgttcgatgaggtgcgatctttccgggtggccaagaaaattctccaatccatgaaggtgagcagtgtgttatgtatataagcagctacaccacgcaactaccatctcgcatagctgccctatgtcgttgagggtgaggatctgatgggcgaagacctgtccgtcgaggatttgagaacgaacgaggatatgcgcattgtcatcgacgattccatgcgatacttcgtcacattcaacgagcgagtccagcagctgcagttctattggacacagtgcggatttagcatcagcaacgacgacatcttccagctggccagcgccatgaaccggctgcagacgcatccctcgatcatgcaatgcagattctggggctgcatcaacggactgaaggcctcttactacatagtggaagcttcgctcacccgcgaggaaatcgcctcgcgcttggtcatgatggaggaagagatgcggcagaagcagattccgttcccgatgcgcaaggacagggaggacaagccaccgccggcgcacattgggccggagctcacaccgggcatctatggctgggaggaatttccgcctgaggagctcgagaagatgaagcccaaggctgcgcccgttcccctggtggaggagatggagctctacgacattccaccggagttcattggcaagggctgcaataggtactcctatttcgttgtgaactcgctatttgacgactggatcgaactacctatagtgacccctcgacagattgtcgtttcgcggcagatcaagaagttcctaacaggcgatctggaggcggatgtcatatcctacccctgcttccctggaaaggagaaacattacctacggactctgataggtcgcatcacagcgggtacctacatcgctcctgtgggctactacaggcgcatgaccaagaaggagcagcggatgttcgatggcgaggaagaagaagagggcgaggaggaggaggaggaagaagaggaggaggagttcaacgaaggcgaggaggagcaaatagaaggtgagcacttaccatacgcacgattcgcatagcaatacccgattattttgcagataacgacgtaatgcttttgaaaaacgagaagtacgaggcggaaccactgggttctctggccaccccggttgcttgggttcatgtcaggtccaatattctgaaccaacaaggccgcgttgtctggtacgacgaggagaaggcccgcaaggagcgcgaaaaggcactggccctgtacctgaagatgcagatgctgggcgagatggaagaggaggtggaggaggaggaggatgaggaagaaggcgaggaggagggcgaagaagagggcatgatcgagggcttcaatcagcccgaactgggtcccagtatcctctcctcctgtgccaatgacatgaaccccgaggtgccagtttcctggctcgcccgcatgaccagcaagtacacgaatcagaaggagcgaatgctcgtgatgcagtcgaacgtctggccaggcgcctacacgttcatctttgagaagacctgcgagtcgatatacttgggctggggccacaagtactacgcccgcaatattcccttcaagcacttgccgatggtgcaggaggagttcccccacaacccagaggacttcgtcgaggccaacgatccgactgtcgaggaggaggaagcttacaaggcttggctcctccggaagcagcagaaggccgagtatgtggccgaagacatcgaagactacgatgatgacgagttcgccgatcagtatgacgacgactgagttaaatgaaattgcttgtttttatgttctcattcaagttctgcaataaaatgtattggctttgtgagctttagtttgatttattacttgcaaataaaatacatatcgtgtatctaaagtgaataatgttggacttacacttacttcgccccccccatatgtacatttactctttctaaacttaactgcttaactgaaatcacacgtgcacatcgtcatcctataaattgtcattaagttaaatagctcttcgaaccatatgtacattgcagttttcgtgtgcaataaatgtaattgtaatttagttatcgttggctgtaactcggacacatggaatccatgaggtcttaatggctaaatacggaatcgaacaaatttggtaatacaacgcagcaatgcagcagcttacagcttcaaggattcctgaagcttcactgtagcatttgcagacggctttatgacttcctgcttgacggcaatcgcttcgggctgtaatcgaatgttgaaactctttagaagataagcaatcatacctatattataatttataccttggggactacggatccgtcttcgctgctgggtgctttaatattgcccatgctctgaatgcaaaagttctttagctgatccacggaagcggccagcatattgttcttgttgtttgccagcgttatctgaagtttatcaagtttagtacatctctacctgtaatcatgttcgatcgacctacctctttctcaattctctccaaagattcatcgaaactggtcactttctgtttatattccggccagctgttacttattgtggccacatgggacgtaatgttttcagatcgatccagcaggtcgtctattttcgtctgcaataaataaagcaaattagagctgataacgcagcagaatttggaagagattaccttgtgcagagatatttcctcgctgaggattttcgttgtttgacttagggtattattcacattcttcagatcgttggc

SEQ ID NO: 5723 - DNA, 2228 bp, DROSOPHILA
gctgattgtcaaaccattactcctacaattattgggttttcccaagccaaacaacacatgcttttgaggattttagatcagagtctcactattccatcgcgatggacagggattcctgccaaaatttctcattagactccacgagcagttcccattttgctcctccgccagtttgcgcgcccagaaggaagaagccggagaagcccgcagctgaggaggcatctcccgaatgctccaacgtcacatcgtcatcctcgtcctcgacaaccaccatatccataggcgccttcgattcgcaatgcaacctccacaacgcccggaatcccgaggccccgaacattggctatgagttgaacgtggccaagtccatattgcagaagtatagcaccctcagtggggacaacttgttcgatcatcttagtgacatcataaagagggtgattgacgaacgtcctccgaatgtgatagacttcttcgaggaatttagccgaaatgttcgcgaacagaagttccacttgccagaacgctttccgcccagtggcgtgttcgatgaggtgcgatctttccgggtggccaagaaaattctccaatccatgaagctgccctatgtcgttgagggtgaggatctgatgggcgaagacctgtccgtcgaggatttgagaacgaacgaggatatgcgcattgtcatcgacgattccatgcgatacttcgtcacattcaacgagcgagtccagcagctgcagttctattggacacagtgcggatttagcatcagcaacgacgacatcttccagctggccagcgccatgaaccggctgcagacgcatccctcgatcatgcaatgcagattctggggctgcatcaacggactgaaggcctcttactacatagtggaagcttcgctcacccgcgaggaaatcgcctcgcgcttggtcatgatggaggaagagatgcggcagaagcagattccgttcccgatgcgcaaggacagggaggacaagccaccgccggcgcacattgggccggagctcacaccgggcatctatggctgggaggaatttccgcctgaggagctcgagaagatgaagcccaaggctgcgcccgttcccctggtggaggagatggagctctacgacattccaccggagttcattggcaagggctgcaataggtactcctatttcgttgtgaactcgctatttgacgactggatcgaactacctatagtgacccctcgacagattgtcgtttcgcggcagatcaagaagttcctaacaggcgatctggaggcggatgtcatatcctacccctgcttccctggaaaggagaaacattacctacggactctgataggtcgcatcacagcgggtacctacatcgctcctgtgggctactacaggcgcatgaccaagaaggagcagcggatgttcgatggcgaggaagaagaagagggcgaggaggaggaggaggaagaagaggaggaggagttcaacgaaggcgaggaggagcaaatagaagataacgacgtaatgcttttgaaaaacgagaagtacgaggcggaaccactgggttctctggccaccccggttgcttgggttcatgtcaggtccaatattctgaaccaacaaggccgcgttgtctggtacgacgaggagaaggcccgcaaggagcgcgaaaaggcactggccctgtacctgaagatgcagatgctgggcgagatggaagaggaggtggaggaggaggaggatgaggaagaaggcgaggaggagggcgaagaagagggcatgatcgagggcttcaatcagcccgaactgggtcccagtatcctctcctcctgtgccaatgacatgaaccccgaggtgccagtttcctggctcgcccgcatgaccagcaagtacacgaatcagaaggagcgaatgctcgtgatgcagtcgaacgtctggccaggcgcctacacgttcatctttgagaagacctgcgagtcgatatacttgggctggggccacaagtactacgcccgcaatattcccttcaagcacttgccgatggtgcaggaggagttcccccacaacccagaggacttcgtcgaggccaacgatccgactgtcgaggaggaggaagcttacaaggcttggctcctccggaagcagcagaaggccgagtatgtggccgaagacatcgaagactacgatgatgacgagttcgccgatcagtatgacgacgactga

SEQ ID NO: 5724 - protein, 708 aa, DROSOPHILA
MDRDSCQNFSLDSTSSSHFAPPPVCAPRRKKPEKPAAEEASPECSNVTSSSSSSTTTISIGAFDSQCNLHNARNPEAPNIGYELNVAKSILQKYSTLSGDNLFDHLSDIIKRVIDERPPNVIDFFEEFSRNVREQKFHLPERFPPSGVFDEVRSFRVAKKILQSMKLPYVVEGEDLMGEDLSVEDLRTNEDMRIVIDDSMRYFVTFNERVQQLQFYWTQCGFSISNDDIFQLASAMNRLQTHPSIMQCRFWGCINGLKASYYIVEASLTREEIASRLVMMEEEMRQKQIPFPMRKDREDKPPPAHIGPELTPGIYGWEEFPPEELEKMKPKAAPVPLVEEMELYDIPPEFIGKGCNRYSYFVVNSLFDDWIELPIVTPRQIVVSRQIKKFLTGDLEADVISYPCFPGKEKHYLRTLIGRITAGTYIAPVGYYRRMTKKEQRMFDGEEEEEGEEEEEEEEEEEFNEGEEEQIEDNDVMLLKNEKYEAEPLGSLATPVAWVHVRSNILNQQGRVVWYDEEKARKEREKALALYLKMQMLGEMEEEVEEEEDEEEGEEEGEEEGMIEGFNQPELGPSILSSCANDMNPEVPVSWLARMTSKYTNQKERMLVMQSNVWPGAYTFIFEKTCESIYLGWGHKYYARNIPFKHLPMVQEEFPHNPEDFVEANDPTVEEEEAYKAWLLRKQQKAEYVAEDIEDYDDDEFADQYDDD

SEQ ID NO: 5725 - DNA, 2999 bp, DROSOPHILA
tggtaaagctggtaaaggctgtgtttcggtgtagcaaagggttagattgactgttccttggagtgctgattctgtactcactctgcttgtcagcgtcctccgccttgatggcacccatctcagtgccggagccgaagttgcacactatgatctgctgatcgcgggcgtcccagacgccgtccgccgtctcgacatcctgcggctccgacgcagcttttacctgcgccttagcctgctgtccactccgctggtagaggagctgctgcggcgcggtgctcgacgctttggcgggcaaactgggcgctgccgttccagttccgagaagcagctccgtcttggccttcttgcgcgtgggatcctccgccggagtggcggtgtcgtcgccgctgcgcttctgcaggctgaccgcattgaaggcagcggcggccacggatgctactctttcgggtttcgccttttcggcggcaccaagcgatgttgtcaccttcggtatattcataacaaacacacaagtggaaacgcggaacgccggatgcgatgcgctgcgtttcgtgggacgggaagggcggcggtctagctagctagggctcgcgcggcctgcttttttttttaccgagcgaaaacatgcacgattagtcaaaaaaattttattttcgtgtatgcagagcagtgttaccagatggtaaaacgaccattaccctgaaacgttcttacccatccctggttttccactcagaaacccaccacttttcccatcccatttcaacatatcgccatggcggttgcaatcgaataacgtttgtacagcaatcatttttcgttaacttcagaagtttttaatacataacataattattgtgttccacgtgcaatatggcacattttcaactgcaagaataaaccatagtctggacagggccgtcagctcactcgaccaatcggtggtctatcgatatatgtttttagcaccacatttattagctcgatctggcaacggtggccgttgatgcaacacatctttgcacaatacaattttataaataagtaatatattttgacataaactcaccatgctctcattaaagttagtctcccagctctttaagcaaagccttgcgtgtaagttgcagtggcgcttcctgcctagccacatccaatccgataacagtttgcaacaaaccacttaaacttttctttgcagcgggcaacatggcaattgtcaacacagccggtcttaagtatttcgctccgcctattaaataccagagtaagtagttgcatttaaatgtgcacaatgaatttagagcaataaatgaatgaatgtgggaacccccagatgtggagcagccggagagacccaagctgagggtcattgagcgccagccccagctgccgccaaacatccgtccgccaaagatgcagaagcgcctgcgatacatgcgcggtccggagatggtgcacaacacgctgctccataagcagtacgcaatcgtggccactggcggagggcgcctgcgctggggccactacgaaatgatgcgtttgaccatcggacgcaagatgaacgtcaacactatgttcgccacatggcgcgttcccgcaccctggcagccgatcactaagaagggccagggccaacggatgggcggcggaaagggagccatcgaccactacgtgacccccatcaaggccggtcgcgtcattgtcgagatagccggcaagtgcgagttcgttgaggtcaagcagttcctgcagcaggtggccaaccagctgcccttccaggccaccgtcgtttcccaggagatgctcgacgaacagcgcgtcgccgaggaggaacagacccgccagaatgagaacccctttaccatgaagtacgtgatccagaacaacctcagcggctgccaccgttggctctcgcccgtggaccacaagtggttcggcaagcacctgtagatgtatagcttcaattaataaagccatccttcgttaatctgttacgaaactgtttcaagtacttttgaaaactggaaatatcttaaagtaggttcgaacttcgaacttagggctcgttgttccaagccgtgactctgcggcacccaattgtggagcaaataagaaaaacgccatatgaagggaaatgtacgagttctattgcaaacatttgtttaattttccatttcgtttacgtgggtaatatgtaatgcatcatataatatgtttttcttgccgtttcgttcgcattataataaatgtataatattatgcatgtatgcgtgtgtgtatgctttgtcgcggggtatggtgtgtgagcaaatagccttctcccacggacttcagttctggaagcagaactttgacctgccgcagctcctcgtatttgtcaagtaaaatccacaccttcgttgatctagtcaagtttcggtgatcgcgattccgggatccgggatggaatcaaagccggtggaagagggctattgtgcagggatgggaattcgtgtgttttatgttatggggtcgaatggatactcgacccttacccttagctcggcttgtctaacaatcggtatcgtaccaggcagccaggttgttgttgtcattgggtggcgtcggcatggcgtccaagtcaaagttcaatgcaccggcatcaatctcgccaacgtccatgtccatggaatagggcgaagttggtgcgccgctaggcggaatggcgccgatgttaccaccgccgccgctagctccgcctacagctccaccattgccgggagcaccgccagcaccgccgccgcccactgggctgctgatctccagaccctgcatcgaatctattggtagagtatcatatcctgtgaacaaacgagatgggcaaagaatgatagggaatattgtgattagtggagaggatttacaatctccgccagccgtcaactggcagatggtgcgacaccttgaagtcctgcaaaagtggattcactgctgctcgctttaatcgggaactcatc

SEQ ID NO: 5726 - DNA, 848 bp, DROSOPHILA
ccgttgatgcaacacatctttgcacaatacaattttataaataagtaatatattttgacataaactcaccatgctctcattaaagttagtctcccagctctttaagcaaagccttgcgtcgggcaacatggcaattgtcaacacagccggtcttaagtatttcgctccgcctattaaataccagaatgtggagcagccggagagacccaagctgagggtcattgagcgccagccccagctgccgccaaacatccgtccgccaaagatgcagaagcgcctgcgatacatgcgcggtccggagatggtgcacaacacgctgctccataagcagtacgcaatcgtggccactggcggagggcgcctgcgctggggccactacgaaatgatgcgtttgaccatcggacgcaagatgaacgtcaacactatgttcgccacatggcgcgttcccgcaccctggcagccgatcactaagaagggccagggccaacggatgggcggcggaaagggagccatcgaccactacgtgacccccatcaaggccggtcgcgtcattgtcgagatagccggcaagtgcgagttcgttgaggtcaagcagttcctgcagcaggtggccaaccagctgcccttccaggccaccgtcgtttcccaggagatgctcgacgaacagcgcgtcgccgaggaggaacagacccgccagaatgagaacccctttaccatgaagtacgtgatccagaacaacctcagcggctgccaccgttggctctcgcccgtggaccacaagtggttcggcaagcacctgtagatgtatagcttcaattaataaagccatccttcgttaatctgttacg

SEQ ID NO: 5727 - protein, 243 aa, DROSOPHILA
MLSLKLVSQLFKQSLASGNMAIVNTAGLKYFAPPIKYQNVEQPERPKLRVIERQPQLPPNIRPPKMQKRLRYMRGPEMVHNTLLHKQYAIVATGGGRLRWGHYEMMRLTIGRKMNVNTMFATWRVPAPWQPITKKGQGQRMGGGKGAIDHYVTPIKAGRVIVEIAGKCEFVEVKQFLQQVANQLPFQATVVSQEMLDEQRVAEEEQTRQNENPFTMKYVIQNNLSGCHRWLSPVDHKWFGKHL

SEQ ID NO: 5728 - DNA, 9244 bp, DROSOPHILA
aactgtacgttttcgcttatcgttttgtctgcctttctacaggctatgctcacattacaattcgcataaatattttataaaataaacataacataatagcaaataatatattggaggattcaaggaaatacaaggtaatacaattctttttaataataaaacgctgacccgatttatgtaatatcctctatatacatatatgtatataaacatacacatatatatctgtttttgaagggtcatcgcttttgttttttacgttctctattcgttttggctaaaatcaaagcaaagtgttcttgaaacaggtccaacaaaaaattggctaaaacgtgtggggctcattaagctcaagcttttcctaaacttttccctttttttttatacacatacactacacttagatttatcttaatttatctaagtctatttaaaattattcctaagctcaagagtaaattttaatttacgcttacatatttatactaagtaaaaaaaaaactacaactgaaacggctgctacaaaatcccttcgctttatactttatattctattgctaactaacggctagcttaagtatttatttatatatatgttataattacatgtagctagcttgccctaaaaatgtggtgttttctctcatttagaattgtggctgcttgttggttttgttgttaatattattgttgcttgtttggtatgcgttgatccccatccagatcctgtgggctacctgtcctggcaattatttacagtatatggaaattgttaatattattgttgcttgtttggtatgcgttgatccccatccagatcctgtgggctacctgtcctggcaattatttacagtatatggaaattgacgagaattcttggcttccgcggctgctcttccccttcccagtttcggtttagatttcgatttcgattttgttgacatcacagacagatggattggatgaccccgcgggctcagtggtgccacatgagccatcgttaactcttggcgacggcctgctccgcgctgggggtcgcttcattggttcccacggcagttaactgctgcttgcgatcccaccactcctgtatgctggacgccatgcgatggcggcggaagcgcagcgattccacgatacacatgtccacgaaatccgactgcatatcctggtcgcccttgaccagattcaggtgctccagcagctggctgtagtctcggccgggtcgccgtatatcacggaagatctgcaatcgtagttcgacgttgtgcaaccgggccgcttcgcgctgctcctcggtgaaaatgagcggcaggctctgtcccggtgagcccatgcccccgttgttgtgcgtcggtgaggagccgcagctggagttgatcttcacctccagtttgttggggctgctgttgttgtgaccccggtggttgtgattgttgctcaacgtcgaaccgctagctgctccagcggcgctgctgttgttattgttgtgatgattgagaccactggcccagtagtagtggggatttcccgctgcagtgctgcccgcagtacccgctgtccgtttcagggcatcgaaactgttgccacccagcgaggcatgatcgtcggatgagactcctccgccactctccgtgctgccattgccattcaaattgctgttgcttgcgcccgctccgaccgaggagccactgctggttccattgtgacaggtctgcagtatgcgcgagatctccgaggcatcgttgatgtcattgtggctgaagtaggcggaactagacgatagtcccgagctgctggcagcgggcgtacttgttcccaatggtgatagaggcaccaaggacaatggcgaaggtggggaaatggctgaactatgaccgtgtccataaccattggccagtggcagcgatcccggcttgctgacaccgagtagtcccgatcctccgccacccgccgctccacccagggagctaaggttgtccaacggcgagctcggaccacccagattactgctgtaggccgcatgggtggtcagtccgttgaggggcacgtagagaacgcccggggaactggcgctggagctgatggaactgctgctgccggccgcgacggcggagcaaacttcgctgccattgctggcggggatcacagatgttgctggcgtggctgaaactgctggtgatgctccaattgacgacggttcgttagctgaagacgcacccggcagggatgccccgcctggaactgcttccgtttcgcccgtttctgcatcgtcgctgatgccattgatgaaattgtgcacataaccattgagcggcgtatcctgatcgctggtctcctcctcgatgaaaacgaaactgattcgcaagggatccaaatgcgagtttgacatccctgaatcactggccgaggcctccgatgtggagctcacaaagctgctgttgctattgctgtcctcgtcgaaacagctggaactgggaccgccatcagcgcccatggcggaatcgcagccggatatggatgacgtggcgcctggtatcggtgatcctggtgcactacccgttgttgatgattcggagccggagctcgaagatcgcgagtccgtagatgatcgacggaattcaaagctacgtggcagcggtcctgctttcctctttcgcccacgagacgttccgtccagttttttagaggatccgccactgccacctgcgcccagcatcagtcctgacattccaccccccattcccggcattccgggcatcccgggacccgaaccaccgccgggcgaagagcccggggatgagggacccggtccagtgggcgagcccgatccggaaggtgagccgggcggcgctccacccggtccattgccatttggcgacttcattggcgccacatcgctcagatccgcctcgtccaccatcaccatgtgcttgtccttcttgtacggattaccgaacatgtgctgccgcacattcgtcggctcgatttcacgcagcggattgtccttgttcttgaggtactcctggtagttgcccatctcggcgatgggcaggcaatggcccgagtccttggccaccagcgagacgggtcgcagtaaggtctcacgcatcttggctatttcctccaccaaatcccgccgcggtatatcgaagggattgcgatgcgacttggccgacgactgatgcgttggctgcggcaccacaatcgtataattctccacgggatctatttccccatgcaacttggaaaatatatcccggagcagtggatgccgcaccaaatctctgcgcaacggcgcacctgtgaacagtttgcccgtctccacttggcgatatggtggcttcggctgcttcagctgcttgtacaccttcatgcaaagattctcctgatcctgcttggccgtattcttgatgtgcttcagctgattggcgatcgttggcgacagatagttgtccacattctccggcagcagaaactgcagcagctgatacggcacattgatgttgaccagcgccttgcgcaggaacgggcagtaatacggcggtattgaacgcacataggcgttgaatttgtacatcagatcgctcggcggactcatattgtacttgtgaatgaggtcatgcagaatgggcagcaacgctggataattgtaggccagtacatagaggtgtacctgcgaaaagttaggcgccgcttttaggtagccaaagggcagctcgaatccatgcatgccattggtcacaatcacctgccagcacttgttcatctcgcgcttgttgagaatctgcagcgttaacggacagccttcaatctcgtacttgtcgacggggaagctgcgcaccagctgtggctcgtccaccgccggcgtcaggaccttcagcttgggatgtgcgtcgcgaggcggcaatgtaatcgccttggagtccggccaatagggctccggcagtggccaatagccgatgggaaaggttttctgcgtgatgtgcttctgcacgtagatcatcttctttaccggctggaagacaatatcgggagcgggacccgctccggacgttgaggatattcccatgccggatatcgtgctcgcacccgccgcttcgccagcggtagcggaagtagcctccttgggcagcataggctcgaactgcagcaccacaccaggctgaaccttttggacaagactttcaatgcactggttgagtacgtagtggcttcgcactcgatatgaacgtccgccggttacctcgcacatccgttcgatgggagaatcgtcatgcggcaccttgccgtccactcgctcgtcaatcttgttgcccggcatgcggaggacaagcgaaaacaagcgctgatcccagcgaaatggctccttagtaaactttgtgcccggtatttggttacttagcggcagtatgatctcctgatggacaccattccggtacgaatagcgaccgccgtccgtaatcacaatgatgaccgatggctccagataaaacgggcacctgccctgcccgtacgtatcgatgcccgactgcatgcgattcagatttaacaaatcgaacgcattgcgcagcgattcacccatcgaggtgaggccagtgactctgtaggttcttcagctcgttcatgaaggtggcatggttctccttccatccagctttcacgtttgccggtggctcctcgaatgtgagcagcatgtagcgatctcccaggcaatcctgcgtacgctggcgatacttgagaaacgtctccacggctcccttggcaatgtccagatacgttttctgtaccccattcacatacgccttctggcacatggacgacgaagtgtccaccaggaagagtatgattgtcatggcgatgattgatcctgcgttcgagggacctcttcctcttcccaatttgcgtgtctttccgtctctctctgatatcctagaagaaacggacaaatgtttcaaattaaaatactaattccgattatactttttgttatatcgtagagtaaaggaatgtcggcttggcgttatggtttcttggctcttctatatcacaaatcttcacacaaaatgaaattaaaccatgacgtaatttaattctaagtcaaaacaatgtgaaatcttacagagttatgcacaaatgtataataatttgagtttcgagccaaacaatttggtggtacgctttttgaaaaaaaaaaaaaaaactctgcaaaaagtgtgagctcaaagtactcgtctacttggaaaactcacaacgtttaacgttttggttttgacaattaaatcaatgttttggtgttatgaaatttggtaaacgttatcggtacaggttcaatttcgattgaccaacaaaccaaaaagtcaagctttacttactttatctcttatcttttatcgttgatcttttatttcccctctcaggtgcactttctccctctccttctctctcgctttctgctatattcttgctatttgtggttgttgtttttgtatttgttgctatctccctttgcgtgtgtataggtgtttaggttttgtttacgttgttagcagctctctttatctgcttgttgtttttgctgccgattctcttgcacttgttgttcttgtcctgggcttgatcgatttgctctttttctgcgtttcgctgttccgcttctatggtacatgttgcgtgcaacagctgacatttggactggagaaacaacaacaacagcgaactgcgaatggtaacgaacgaaacagaacagaacagaacgaaatgataatgaaacaggtacgcaactggttgtaaaatatcaataggttgcgcatacgcactgtggccaatcgattaagaagcggcaatataaatccatacagataatgaaacaactgcgtaatcaacgatatcactcacaaactatctacacaccgcacactctgtcgcataacgcaagtgctaattaaacaacaaaatggaatttaattcccagggggtcggccgttggtcctagagagctaaatatttatgttggggaaaatcgctttgacacaaatccaaatccactccgcttcactcactggccattatgcctcctctgcatctcctcctcgctccatctaactcgttccttcttctctttctattgatgccccactacggagtcattcactcgacgccactgccaccactacaacgctctgctggcgtcgcctagagatggcaacgtgagccaggtgggcgacacgcgtgtgaatagctttggctttgccaaaaacaatacgaagtctagtactaagcaataatatttataattgtcgtacttgtcgtatattcaaaataataaatgagttagattcatatgtagaagttttaaactaggtaacaagtagtcattataacgcaggtgccaaagagattgatctttaaatggttctctattttctatctgaagtgtaccattacacaaattagtgtttagtttcgatatccttacactttgttatattgcgtgatattcgctgcccctattaacaaagtagattactgctcccaccatctcgagttgaggtaaaaggtaaccgtaaatcgattacacaatgaccaagctcacgatcgtgagtgtgtgtgcgagggagcacgacctacgcatctctgatggagagcgagggagatggcctgccgaagaaggggcgatggaggagaaaaatgagaaagggggttgggatgtggtggatgccgatgccagggggaggagaaggaggaatgcgattaaccaaagccgggataacgataacgatcactcggcgatcgcaggcgtaacccacatccttacaccttaaattaggtcagccagtctaaatgtgtttttaccggaggagccgtaattgtcttgaattcgagtgcaaaacattcaatttctatttgaataagagcgcaaacacatacgcacactcgcgcacatggacatgcacacacacattcgcacacacgcggctcggtgtagttgccagatacccccacttcggacaggtataacgttgagcggaaattaaaatatatctattaagtttcacaaattttgtcttaagtaaaaacaacacaaaattcgtattaaacgagcggtgtgtgatttatcgttgatctggcaaccctgctccgacgtgttggaatggtacgggtggctgcgggggacgagtcggcctattgtgtttgatggcaatccacaaagctcacacacacgtttaaaccaaaacgatatagggccgagcacttcaagtaatcgagttttttccgtctaattaatctcggcgcagcgatgttttggccaacaaaatgacacggctctttgtcggaattcacttatgcagcagcggcagggttgtcagagctcgaaaaacggtgaagaaataaacacactttttctagttgtttcgcataaatggggggcggcaaaggggtgcagggcctttgattggtggtcatttttcatttggatgaccttaatttgcatgtgataatgctgattagtgcagccgcgttatcggcacggtaatcgttatcgccagagttgcaagcgcccgcccatcgacagcccgccaaagctttcgaatttgaaaatgtgtggacatattttaaaagtgcgattctaaggatcgcatggttaatattttagatctaaattttctatctcaaaaaaaaaaaaaatggtacaacattcatacacaactacaccggcagcatcttcgagtgagagtttccggccaaaaaaaaaaaaaaaaagaataactaaaacaaaaacgcactcacaagaagaggaatgtttctcctccacccaatactcgcaataattttcgattagcttctatatgccgcgccacgattttttattctgttatatttttactttgtgccaacagaaatttatcaccaccgcgcgagagagcgagaacacacacgcacacacacagccagagtgcgctctctttcgctctgccgccgaggtgcataggcgagaacgaccgacagacgcgactagcggtcggaccgaccgaccgaacgaccgtcgctatcgccgtccccctctcgctcgtaggtttgtatcggggagttgttgcttacacgcactcgcacacatacttttgcacactggcgcctcgtcactgttgttgcattgctgtcgtccactcctgcgcttcttcttctcttgttcgactcgcttctcttcggattttactttgctgccgagcaataacaacacaacactaccgttctcaaagttcgaatgatttgatgccgttctgtgtttttttggtgtggccgagaagcgccaaatcagtggggccgtatcgcggcgattcggaaaagccgagcgaaggggtcacgataaatggatttgtggttgaattaactgagtttgtaataattgatgtcaaatatttacttaccttgttaggggatttatatgtatgctgcacatttaatcttgaatgccattagttcattagtttggtataatccataacattcacttaaaatgttatatcgttaatctttgatccaaataaacagaatcacaactacagtattccctccaatgctaataagtttataagtttcagttactattatccataaggtaccataaacacgattgcagcactttgggtggtgattagtactactattacgtttaaaataaactacgcagggtttgacatgcaagttgtaaacatttgactcggagttcaagataacgctataaaattacttaatcagggtccactgtactctatcgatagcgataactgaccacctacacagacatttattgttatcgaccaacgaacacatgttcactccgatttggcgcgtaaacaagtaaataaatagtattattaagaataatgccggagagcctgatcgccggcattccggtgcactttccgttcgagccgtacccggttcaacgggcgtacatggagaaggtgatccattgtctccgcgatggcacgaatggagtcctggaatcgccaaccggcacgggcaagaccctaagcttgctgtgctcatccttggcctggatccgcaccaggcaatcggagcaccaaaagcagatggttaagatggagaaggcagatttttcgggtcttggaggcggagcacctgggggagacctgtccgagctggccaagaccatgggtcgtgcgaataactggggcgtgcccaaggtcatctacgcctcgcgcacccactcccaatt

SEQ ID NO: 5729 - DNA, 4114 bp, DROSOPHILA
ttgtgttgttattgctcggcagcaaagtaaaatccgaagagaagcgagtcgaacaagagaagaagaagcgcaggagtggacgacagcaatgcaacaacagtgacgaggcgccagtgtgcaaaagtatgtgtgcgagtgcgtgtaagcaacaactccccgatacaaacctacgagcgagagggggacggcgatagcgacggtcgttcggtcggtcggtccgaccgctagtcgcgtctgtcggtcgttctcgcctatgcacctcggcggcagagcgaaagagagcgcactctggctgtgtgtgtgcgtgtgtgttctcgctctctcgcgcggtggtgataaatttctgttggcacaaagtaaaaatataacagaataaaaaatcgtggcgcggcatatagaagctaatcgaaaattattgcgagtattgggtggaggagaaacattcctcttcttgatatcagagagagacggaaagacacgcaaattgggaagaggaagaggtccctcgaacgcaggatcaatcatcgccatgacaatcatactcttcctggtggacacttcgtcgtccatgtgccagaaggcgtatgtgaatggggtacagaaaacgtatctggacattgccaagggagccgtggagacgtttctcaagtatcgccagcgtacgcaggattgcctgggagatcgctacatgctgctcacattcgaggagccaccggcaaactcgggcatcgatacgtacgggcagggcaggtgcccgttttatctggagccatcggtcatcattgtgattacggacggcggtcgctattcgtaccggaatggtgtccatcaggagatcatactgccgctaagtaaccaaataccgggcacaaagtttactaaggagccatttcgctgggatcagcgcttgttttcgcttgtcctccgcatgccgggcaacaagattgacgagcgagtggacggcaaggtgccgcatgacgattctcccatcgaacggatgtgcgaggtaaccggcggacgttcatatcgagtgcgaagccactacgtactcaaccagtgcattgaaagtcttgtccaaaaggttcagcctggtgtggtgctgcagttcgagcctatgctgcccaaggaggctacttccgctaccgctggcgaagcggcgggtgcgagcacgatatccggcatgggaatatcctcaacgtccggagcgggtcccgctcccgatattgtcttccagccggtaaagaagatgatctacgtgcagaagcacatcacgcagaaaacctttcccatcggctattggccactgccggagccctattggccggactccaaggcgattacattgccgcctcgcgacgcacatcccaagctgaaggtcctgacgccggcggtggacgagccacagctggtgcgcagcttccccgtcgacaagtacgagattgaaggctgtccgttaacgctgcagattctcaacaagcgcgagatgaacaagtgctggcaggtgattgtgaccaatggcatgcatggattcgagctgccctttggctacctaaaagcggcgcctaacttttcgcaggtacacctctatgtactggcctacaattatccagcgttgctgcccattctgcatgacctcattcacaagtacaatatgagtccgccgagcgatctgatgtacaaattcaacgcctatgtgcgttcaataccgccgtattactgcccgttcctgcgcaaggcgctggtcaacatcaatgtgccgtatcagctgctgcagtttctgctgccggagaatgtggacaactatctgtcgccaacgatcgccaatcagctgaagcacatcaagaatacggccaagcaggatcaggagaatctttgcatgaaggtgtacaagcagctgaagcagccgaagccaccatatcgccaagtggagacgggcaaactgttcacaggtgcgccgttgcgcagagatttggtgcggcatccactgctccgggatatattttccaagttgcatggggaaatagatcccgtggagaattatacgattgtggtgccgcagccaacgcatcagtcgtcggccaagtcgcatcgcaatcccttcgatataccgcggcgggatttggtggaggaaatagccaagatgcgtgagaccttactgcgacccgtctcgctggtggccaaggactcgggccattgcctgcccatcgccgagatgggcaactaccaggagtacctcaagaacaaggacaatccgctgcgtgaaatcgagccgacgaatgtgcggcagcacatgttcggtaatccgtacaagaaggacaagcacatggtgatggtggacgaggcggatctgagcgatgtggcgccaatgaagtcgccaaatggcaatggaccgggtggagcgccgcccggctcaccttccggatcgggctcgcccactggaccgggtccctcatccccgggctcttcgcccggcggtggttcgggtcccgggatgcccggaatgccgggaatggggggtggaatgtcaggactgatgctgggcgcaggtggcagtggcggatcctctaaaaaactggacggaacgtctcgtgggcgaaagaggaaagcaggaccgctgccacgtagctttgaattccgtcgatcatctacggactcgcgatcttcgagctccggctccgaatcatcaacaacgggtagtgcaccaggatcaccgataccaggcgccacgtcatccatatccggctgcgattccgccatgggcgctgatggcggtcccagttccagctgtttcgacgaggacagcaatagcaacagcagctttgtgagctccacatcggaggcctcggccagtgattcagggatgtcaaactcgcatttggatcccttgcgaatcagtttcgttttcatcgaggaggagaccagcgatcaggatacgccgctcaatggttatgtgcacaatttcatcaatggcatcagcgacgatgcagaaacgggcgaaacggaagcagttccaggcggggcatccctgccgggtgcgtcttcagctaacgaaccgtcgtcaattggagcatcaccagcagtttcagccacgccagcaacatctgtgatccccgccagcaatggcagcgaagtttgctccgccgtcgcggccggcagcagcagttccatcagctccagcgccagttccccgggcgttctctacgtgcccctcaacggactgaccacccatgcggcctacagcagtaatctgggtggtccgagctcgccgttggacaaccttagctccctgggtggagcggcgggtggcggaggatcgggactactcggtgtcagcaagccgggatcgctgccactggccaatggttatggacacggtcatagttcagccatttccccaccttcgccattgtccttggtgcctctatcaccattgggaacaacgggcgcaagcaacagcaatttgaatggcaatggcagcacggagagtggcggaggagtctcatccgacgatcatgcctcgctgggtggcaacagtttcgatgccctgaaacggacagcgggtactgcgggcagcactgcagcgggaaatccccactactactgggccagtggtctcaatcatcacaacaataacaacagcagcgccgctggagcagctagcggttcgacgttgagcaacaatcacaaccaccggggtcacaacaacagcagccccaacaaactggaggtgaagatcaactccagctgcggctcctcaccgacgcacaacaacgggggcatgggctcaccgggacagagcctgccgctcattttcaccgaggagcagcgcgaagcggcccggttgcacaacgtcgaactacgattgcagatcttccgtgatatacggcgacccggccgagactacagccagctgctggagcacctgaatctggtcaagggcgaccaggatatgcagtcggatttcgtggacatgtgtatcgtggaatcgctgcgcttccgccgccatcgcatggcgtccagcatacaggagtggtgggatcgcaagcagcagttaactgccgtgggaaccaatgaagcgacccccagcgcggagcaggccgtcgccaagagttaa

SEQ ID NO: 5730 - protein, 1194 aa, DROSOPHILA
MTIILFLVDTSSSMCQKAYVNGVQKTYLDIAKGAVETFLKYRQRTQDCLGDRYMLLTFEEPPANSGIDTYGQGRCPFYLEPSVIIVITDGGRYSYRNGVHQEIILPLSNQIPGTKFTKEPFRWDQRLFSLVLRMPGNKIDERVDGKVPHDDSPIERMCEVTGGRSYRVRSHYVLNQCIESLVQKVQPGVVLQFEPMLPKEATSATAGEAAGASTISGMGISSTSGAGPAPDIVFQPVKKMIYVQKHITQKTFPIGYWPLPEPYWPDSKAITLPPRDAHPKLKVLTPAVDEPQLVRSFPVDKYEIEGCPLTLQILNKREMNKCWQVIVTNGMHGFELPFGYLKAAPNFSQVHLYVLAYNYPALLPILHDLIHKYNMSPPSDLMYKFNAYVRSIPPYYCPFLRKALVNINVPYQLLQFLLPENVDNYLSPTIANQLKHIKNTAKQDQENLCMKVYKQLKQPKPPYRQVETGKLFTGAPLRRDLVRHPLLRDIFSKLHGEIDPVENYTIVVPQPTHQSSAKSHRNPFDIPRRDLVEEIAKMRETLLRPVSLVAKDSGHCLPIAEMGNYQEYLKNKDNPLREIEPTNVRQHMFGNPYKKDKHMVMVDEADLSDVAPMKSPNGNGPGGAPPGSPSGSGSPTGPGPSSPGSSPGGGSGPGMPGMPGMGGGMSGLMLGAGGSGGSSKKLDGTSRGRKRKAGPLPRSFEFRRSSTDSRSSSSGSESSTTGSAPGSPIPGATSSISGCDSAMGADGGPSSSCFDEDSNSNSSFVSSTSEASASDSGMSNSHLDPLRISFVFIEEETSDQDTPLNGYVHNFINGISDDAETGETEAVPGGASLPGASSANEPSSIGASPAVSATPATSVIPASNGSEVCSAVAAGSSSSISSSASSPGVLYVPLNGLTTHAAYSSNLGGPSSPLDNLSSLGGAAGGGGSGLLGVSKPGSLPLANGYGHGHSSAISPPSPLSLVPLSPLGTTGASNSNLNGNGSTESGGGVSSDDHASLGGNSFDALKRTAGTAGSTAAGNPHYYWASGLNHHNNNNSSAAGAASGSTLSNNHNHRGHNNSSPNKLEVKINSSCGSSPTHNNGGMGSPGQSLPLIFTEEQREAARLHNVELRLQIFRDIRRPGRDYSQLLEHLNLVKGDQDMQSDFVDMCIVESLRFRRHRMASSIQEWWDRKQQLTAVGTNEATPSAEQAVAKS

SEQ ID NO: 5731 - DNA, 3092 bp, DROSOPHILA
aactccttaagcactgagagaaaagttatagtgcatagcacaaattatatatcttacaaaaataccgttcttgagagttatgtctacttgcacatcattttgtgcatttgatatatttgcttaataatatatttaatattcgtatttcctccgtgtagtcatttggtgctctttcctcttcttttggaattcaacaaatttgcggatttggtttgtaatttattaaatttatcgcatgctcagagcgccttaacagtcgtgcaacgaggaggaggaagatcccgatgaggatgaggacgataatggggataaagatgaggatgagggtcaccacccagtggggcgtttgggagagaatgacctacgcctgctaatgtctgcggttgcgcttttccggcgggggagggggaggggatgggcagtgaggagcagatcccccggacggagtctccaggcagtggcatctgcaacatttgttgatgacaacccaaagacacggagtgcaacatttcggcgaacatttcgttggccgtattttgtgtgcggcacgcccatttggggaaagtcattgcgagcttagaagttattattttgatttataggaaaagttcgtttagcgagcgaaagttgctcgtatattttccgcagtggaggatggaagagaggggagtttgaggagtgaaaaaaattagatagaagcacagcttttaaagtgtggcgagtgcggggcgaaaggcatttgtatgtatgcagctcttgttttcattattagtggctaaaactttgaaatgtatctgtatgtgtgcttttagaactgaagaggattagatagaacaatccagcatacggttcggaaaactattctcacgataaattccggacttcttcactgccacaaattcccattaccataaacactaacactttatacgttttgcacgacagaagttttacttccacagaaatttttgctaatgttgctccaataatttccaaattttcataccgttgccagcttagtctgcaaattgtctgctgtgatattcttcttcgtccagccactggaacagggcttatcattgtcgggatcgcctacgtttcctacatccttctcgttccccggacacccagatgcgcaatacgagtcatggagatcggagcagtccgtattgcagatatttcgccagccctccgaatgaatgtggtagagacgcacgattccaccagaataggcatccttactggtcgcatggtaaatcgctcgcctggccaggtcataggcctcctgatcggagagatcatagcggtacccagtgtccaatacgccgagcgcatatggagaaccgctgcccacggagaagacttgaccatgggatctcatgccctccgagtccacgtaaatcagcttgggtccctcgtcgtcgaagccggccagcatcatgcccatcaccagacccatgcccttgtactccgtggatatgttgcagatgatccgggcagccgtgtccacggtcatgcgtttccgatagcgcagctggtgcaggcgacactccttagccaaaacccgatcccagtagacgcaatcggcggctccgccggccaatgtgcccagcatatagtcgttcagctcgactattttcctcatcgtctgggatccaatatactggccagaggtggccctagaatcagcacacagaatcactcctccgcgatacttgaaacccagagtggtggtgccgtgatcgaaatccatgcgaatgccacagtgcgacaggatcttgggcagattttcagcgggcttgagaagagtttcaatcttagatggatcttttggattatgaaacctatactaactctttcgaagggaggcgccatcagttcgtagggattctcaaaattactggttgcctcgcgaagctgctccttctgccattcggactgcaagtcatcgaagcgccgcataaaaggcattttattcatgccgcaaatcgcttccagagccattatgtgttcaaaaagagtttattatttccaataaatagtttagtgtaatgtgtaaatgagcacactaaacgagctcgaatgattgtggagttaagtctctaaggcatcttacaagtgtatcaaaaatgtactttaatcaaaacaagatcacaagatcagaaagctggacatcttgttcccatcaaaatatcgcattccgcttgaaagtttcgctccactggacaatccgcagcggcaattcgcagtctccgattccattggcatttcatggttagtgggtgagagtggtcgcagcggcactttcgccggccacccaagtggaatccaatggaccttctgtgggcagtggcagtggcagtggcagtggcgccaccgcagagatacacgacattttaattggactgccgggcagggtcatcatcgccacctgccgagatgcgaaattgggaccaaaacgagtggggaatggcatagaaggtgctttcgcagtgaccacgcccactcgcaggcggtggcaaacggattagccgctaattaaaggccaattggcaatgtttgccaaactgtttgagtccgcgggtcgactggcctgataccccccgtgatatatgtcccatcccagtggcagtcgcagtcactccggctgctcccactgcctccattagtggacgccatgtgtcactgatctaaatttatgcaaattgccgaggacttggcctccgcattccccaaaccaccgaattccatttcccattccccattccgcatctcccatccgccacattggcacatttcatttttgcacgcgctttccattgcagcctgcattccccccgcccttcgaatggaaaactaagggggcggaagcaattcggagaaaggcgggctggaaaggaaaaatcgaggcaaaagaaacgagctggctaagcccttcatccaaacataccctaactatgagtacatgaaaccactcactgttattttattggtcacgaagcataatagtttactggactatctaaatgttaagtctaagtattagtattaagtattatttaagtatccaattggatacttaaggtttgtcg

SEQ ID NO: 5732 - DNA, 1036 bp, DROSOPHILA
ccacaatcattcgagctcgtttagtgtgctcatttacacattacactaaactatttattggaaataataaactctttttgaacacataatggctctggaagcgatttgcggcatgaataaaatgccttttatgcggcgcttcgatgacttgcagtccgaatggcagaaggagcagcttcgcgaggcaaccagtaattttgagaatccctacgaactgatggcgcctcccttcgaaagacccgctgaaaatctgcccaagatcctgtcgcactgtggcattcgcatggatttcgatcacggcaccaccactctgggtttcaagtatcgcggaggagtgattctgtgtgctgattctagggccacctctggccagtatattggatcccagacgatgaggaaaatagtcgagctgaacgactatatgctgggcacattggccggcggagccgccgattgcgtctactgggatcgggttttggctaaggagtgtcgcctgcaccagctgcgctatcggaaacgcatgaccgtggacacggctgcccggatcatctgcaacatatccacggagtacaagggcatgggtctggtgatgggcatgatgctggccggcttcgacgacgagggacccaagctgatttacgtggactcggagggcatgagatcccatggtcaagtcttctccgtgggcagcggttctccatatgcgctcggcgtattggacactgggtaccgctatgatctctccgatcaggaggcctatgacctggccaggcgagcgatttaccatgcgaccagtaaggatgcctattctggtggaatcgtgcgtctctaccacattcattcggagggctggcgaaatatctgcaatacggactgctccgatctccatgactcgtattgcgcatctgggtgtccggggaacgagaaggatgtaggaaacgtaggcgatcccgacaatgataagccctgttccagtggctggacgaagaagaatatcacagcagacaatttgcagactaagctggcaacggtatga

SEQ ID NO: 5733 - protein, 315 aa, DROSOPHILA
MALEAICGMNKMPFMRRFDDLQSEWQKEQLREATSNFENPYELMAPPFERPAENLPKILSHCGIRMDFDHGTTTLGFKYRGGVILCADSRATSGQYIGSQTMRKIVELNDYMLGTLAGGAADCVYWDRVLAKECRLHQLRYRKRMTVDTAARIICNISTEYKGMGLVMGMMLAGFDDEGPKLIYVDSEGMRSHGQVFSVGSGSPYALGVLDTGYRYDLSDQEAYDLARRAIYHATSKDAYSGGIVRLYHIHSEGWRNICNTDCSDLHDSYCASGCPGNEKDVGNVGDPDNDKPCSSGWTKKNITADNLQTKLATV

SEQ ID NO: 5734 - DNA, 8361 bp, DROSOPHILA
ataccacaaaactgtttctggggcaaagttgtaaggtcgtcccacgccatagccacaaatgacctcatgccacattaaatgtagggaaaagcaaaatgtaggtaaaatgtcgcgtaagcaaaccattaaaaagcgtactagagctcctttaaacgaattacggcaccgattaacttatttttacgtaaaacacgaaatgacaaagtacaaccccttatcggctcattgaaaactcctatcagctgtagattgacacccatagataagcccctccaataactcatgagtcatgagcgaggccgtgaacttttaacttagattgaataaaccaatggccagaaccttagcttccaggactaactactataaaaggctgataaaccaatcaaagtacaagactgggaatcaaagaccttcctcaaggtaaagactttcctcgaaattagttagtggtattttatttcgagatacatgggtccgccgatcgaggaatattcacagattataggcttttcccaaattcattcaagacttagtagaagaatgcgctggcttttgagagagagccaacccgcagtgcctctcaatcgcactagaatccccaccagaagtagtgcttctattgtcgtcccactctaaccacagacgtaaagcattggggctgtgagagtatgcgatggcactctctgtcagcggttgcctaaatttctgcctttgttccactgccgcaattgcttatttcagttgcgatcgcggcgcgagcgagtgaagtcctaatatttgagaagcggcagtaccgtttcgagcagacgggtggaaaatttctctcaccggaccagacggtggtggaatcgaatcgagaacgcgaacgaaaaaccaaacgggaacgaagggcagcaggggctgcagtattgctgtcagtgctaaagtttacaaagaatacacacacaacacagtggttgcattttgctttttaacccctggttgattgattgacaagatgactaagaacgataatgcaaatctgttgaacgacaacagactgggcacagccggagcgggtcagttgaaagctcaaatagtacccgcccagccaaagacgctccagcacctccccaagcgaccagcggtggacctggcctttcacaacctgacgtaccgcgtcaaggaggggaaccggagcagtaagtacttccactgtctagtacctctctctatatcaagctgcactcctcggcagcacgagagcgggatcttgaacctcccgcgcctgctctcacctcaccctagagcttttgtttccggtcctggctagtagtactccgcacatgtgttattgagctagttctccggagtactctgtcgctattacgcacttccctggctttagcgggttttacttgtttgctttagctgcgcttcgcattgtgttggtttctggtttctttgttcttttagcagctgtaacgcagtatcaacactcagactgtgagcaacggagaacttcgggttgtggctgagtagatatgtaacccgtcgtctcttcgtcaaattcatttcccagtttcacaagggcggctctggccaaagttcactaggtttcaccgcgataagcactgctaaatacatcaaaatcatcagccagtagccgcggagtaactgcccacacaagctatttcgctattgggacagtcaacaacttggttcgatgccatagcatctaaaaggcgaggagccatgtactcgcacttttctcacgtagcagtgtatctactttaaagcatgggtggagcacaatggggtttttttttggatctactgcttttatggaaaacaatttgtgatgacgtgccagagggagaggtattgtttttataccctttcctcgtagactgcccctgatccgccaaaaaaaaaaggattatgaaattgagtagcgggtatgttatagttgaggaagtcaagactgatggcggcggtatgtgctttctgtgttagcagagcgattaggatttagtcactgccaatagctagctttagtcgggtgtggtggtgaaaacacatttgtggtaatatgcagtgccccggtggggccgttcagaataagtaatgatggccgagcgataatattccattagtttggtatgcgaacgtgcacaactgctttattcttatatttataaaagctcattcatgaaacccactcccctcgttgtcgcattggatggctggcctcacggcggacatagtccgtgaatcccgtctaagattgagggactgtcaaagcctgtttttaagcccaaggccagccaagtgcaaaactaattggagaaggcagcagcctgaactttgcacacctcaaaggtcggccatccgactcaattaagtcgttcagaataagcgaatatacacagatttatttacactgccctgtgagcgtgccccacctagccgaaagatttgcagatggcacgccgccttctggggtgtgctaagttatgtgccaaaataatgtatacaatataagatggaagtgaggcaacagatggaaattgcgctgattttggctaactatgccacttaaagtaaacacaattaatgaagtaagtgcctgctaacgttttcggctgctatattaaaacagatataaataaattctgaaagcgactttctgtgcccttgttgcaagtttggcgtaaccttttcttaggagccctgaatggttccacttgttgtccaatccggtcataaacatcaaagctacgatttggccttagcgctggactatagtttttcaagcgtgaccccacttttggtgctattacatcaattggcaagcaagtaagttcaatgagagacattgcgtacctagtggttacgacttgctagtcgctgcctggcagctggaattcattaccagcttttaaagtctacgtattaagtaagtcgccgaataaaacatttacagtccctgcatgagcttaataaatttgagtttcacttctgagcgggtcacggtactttactaatcggagttatgacaaacataaaatgaattatttcgtaatagtcactttacagaagctctataaccagtcatagctcgcttttgtgtccaaagtcgattcaatagtaaatacatcttttgattaagagccggcagtcgaagagcgtgcccccatgaaaacgggtatattagcattttccgtagagcagatggcttgctgtacaaaactattggtttaaactttaaaggtatgccatgattataaggcacttccgcatctgaacagttccatttaggcagcatctgcgaatatacgtcagaataagtcaaactatttttaaacaagcgttactaaagtgcaattggctttttacgaattttagccgctttgtttattagttgtccgttgttgatgttggatgtttaataaaatttgagtaatggacgcggttgtttgacaactgttggaattctgtcgataatagcataagtcatactatatatggaggtggacgaagaaaaacgtgatggggccattgaccgtgctatgtgtttcgattgtcagactttgcagattttgtttacctatcggctctacacttgctcgtccaaaagccaatgcaatcaatatctttcttgatagctgcggcggcacttagatattgacgtaagacatatcaaaacgcgaactatttttagtcccaacaagagattggcccaaacactaattttgtgtgtttttattacagatgccaagaccattctgaagggcgtcagtggacgcctccggtctggagaactcaccgccataatgggaccatcgggtgctggcaagagtacgctgctcaacattttgtctggctacaagtaggtttcgcagggcctgattatttgcattcacgtcaagtagctgctgattccgacactgaatctgaccttgcgccagcgcacgagaatacggcgaaacgagttcgaaaatgtttatattcagccctgtattatcatcagaaataattgcgacttgataaccactctgccgcttttggtgcttaaacagccgacctattctcgccttgcgttcttcgtatttctgtattttatgtgggatacacacttacatatgtacctattctaagcgcaaagactttccttctacagctcaatctttatttatttattgtaaaccttaaattttgctctattgcataataatcataaaccgtttcattaccctttcatgcattaaattttgttaccaggagtggtcaaccgatcaccctgaatcgatacgagcaggaaatctatgatacatagatacaagtgtacttgtgtgtaatcgactgctttgctatttcctcacacacatttagcaatgtcgccaagttttattggtttgaatatttgagggagaatcagctactactttgctggacttcggacttaggttgcccgatcgcgtgcacatgtatgcttagtatatcaaataaaggtccgcatacacacaaacgtagatatgcacaataaaatacacgctagattactcgaaattggctttgcccagtgataataggtctagtagacgcacaaaaaaaaaaggttgggcctttttagactatggtacaggaatgtaatttagatgatactcatacttacaatagccctcggttctaaaatccaaattaccaaattactaatctattgcacttgcagaacttcgagcatcgaaggcagcgttacgatgaacggtgccgagcgcaacctaagcgcatttcgcaagctttctgcctacatcatgcaggacaatcagcttcacggaaaccttaccgtccaggaagcaatgactgtggcaacgaatctgaagctcagcaagaagttttcgaagcccgagaagcattcaatggcaagttgaaaaaattaaaaaagcccgagaggaagaatttgataactttaaagattaatcataagtagccaatccagtagacaatttgattcgacagtcttgtgtattgggttttatcttaaacgtgctaataacctgcttaacaccctcttccagatcgatgacattttgcttactctcagcctgagcgagcaccgatatacgatgactcgaaatttgtccggcggtcagaaaaagcggctctcgattgcccttgaactggtcagcaatcctcccataatgttctttgacgaacccacatccggcctggacagctctacctgttttcagtgcattcatctgctaaaaatgctagctgctggcggacgcacagtcatatgcaccatccatcaaccgtccgctcgtctcttcgagatgttcgaccagctgtacactctcgcagatggacagtgcgtttatcaaggcagtacaaagcaactggtgcccttcttgtctacgctaaacctggagtgccccagttaccacaatccggcaagctacgtgattgaggtgtcctgcggggagcacggagatcatacgcgcaaactggtcgatgctattgacaacggcaagcgggacgttcgttcatcagcagactatgccggcctcaaggctcgcaacgatttggtaaaggtgcaaaacctgaaggctattctcgataagaacgacgcttcaagtgtcagcggtcgcaagtacgaggacaatttgaccttgaacaacggtttgctcaacggcatggtcaatgatattgtgaaggagggcaacgttagctctgccttggtcactaccaatgaaaggggagatgccatgatcgatgtggagaagtccgtaaactgcaccactgccttgcttacggaggagataacatcaccagagcgatatccaacatcgcagtttcaccagttctgggtggttcttaagcgaactttactcttcagttaccgggattgggtaagaaaacttataatggtgcttttcaggattttagtaaacattgcttctctttattatagactcttatgtatctgcgtttatttgcccatctgttagttggatttttgattggggcactctactatgacattggcaatgatggagcaaaagttttgagcaacctgggattcctattctttaacatgcttttcctcatgtatacatctatgactattacgatcctatcatgtaaggaaaccagtttgatattcctttctctgtagttaatatattattttgtgtgttctagtcccgcttgagatgcccgttttgttgaaagaaaactttaatcgctggtactcgctaaagtcctactatttggctatatcagttgctgatttaccgtttcaagtgagttgcactcagctgttgagtagagcgaatgttactaatacaaaataattgtttcttttaggctattttctgcgttatctacgtgtcgatcgtgtattatttcacttcacaaccttgggagctattccgcttttccatgttcttgtcggcctgccttctcatttctttcgttgctcagtccgtgggtctggtggtaggcgctgcaatgaatgttcagaacggtgtcttcctggccccagtgatgtccgtgcccttccttctgttctccggcttctttgtctcctttgacgctataccagtatacttaaggtggatcacatatttgtcgtacatacgatatggattcgagggcacagctctggccacctacggttacggacgggagaaacttaggtgcttccagacttactgccattttaaatcacctattaccacgctggaggaactggacatggttaacgctaactttacactcgacattgtggccctaattgtgatcttcgtggtgctgcgcatctcggcatacctgttcttgcgctggaagctgaagactgtgcgataagcatattacataattttaaatgttgttttggatttaatagctttctatgtacgtactttatattgtagttttcaaaaaagcgtcttgggttttgttcttaatcattaatcttttacaaatttctttttgtctagtttttagtcgcgaaattcttcttttaagtgatacaaacgcaaggaggtttcttatcttaaatcagcttgattccagccgcatatgtagtaaaaccaattcaaaccactgttggagcacatcattgatataagtgaatcgtataatgaaataagttattgaacgtgaaaccaattttctaaataaaaataactgaataacatttccaattgtatttaccgaaggatttttgaatgactttaaattaaaaacgaacatgttttgtgtctatatacattaatatttttattcaaggtactttaagaccctttggaattttttgtaatattttcttattacaggtttagaataaacatttttgaatatatactgtacaaactacgtgttcttggggcaaataaagatgtctacctaaaaagttgaaattagacaatttgagattatgatacccattattttttgtgatcaacggcattatctacttaaaagctcttggagcgccatctgccggaaaacgaaatcaagtcgtgcgagtcggccgtttaaattcgaatcgcttgcagtggacgacaacgtttttctggggcgtctattcaagcaatcaagcatttacttacatacacataaaccaccgtcgcaaaaatatcttattttcttaatttgaaaaaggttttagcattgtagcattcaccacatgggatacgaatgctgtaaatttccaagtgggatcccagatatgaaaacataaacatcccgctgttttgttcacactattgctaggagtttaaaattttgcaaatgacatgccttaaattgttcgaaattatggggaccccttcctataaatgtgcctgctttaatttcattcagaaatagtgtttggtattcaattttaaaggaatgtcacttataatatttcgatccttaacaaaatcctaattggaaatcgtactcaaaattttaagctactataattaaggtaaggacttgactgaagctaaagcctggtctctctttcttttttatttgtgagtggtgagtgagtggaatcggtataaatagactggccatatccttcgaatcggattcaatgggctgcaaaacaagtttttgatcttttatagctgaagccagcctctagacttctgaagggcagaagaattcggcccgggcactagacttcgcctctgtaaatctagcatttgcagtagcagtcactgccgcagtcttcctgcactcgcatttagtacatattcggtcgtcggtgcaacaagacgacgcttcttcgctgctgtggcgtggttgccgccatgagaaagagtgaaaaaagccagcgacagcagcaactacaaaaagaaagtggagtaagtgccc

SEQ ID NO: 5735 - DNA, 2283 bp, DROSOPHILA
atgactaagaacgataatgcaaatctgttgaacgacaacagactgggcacagccggagcgggtcagttgaaagctcaaatagtacccgcccagccaaagacgctccagcacctccccaagcgaccagcggtggacctggcctttcacaacctgacgtaccgcgtcaaggaggggaaccggagcaaccattctgaagggcgtcagtggacgcctccggtctggagaactcaccgccataatgggaccatcgggtgctggcaagagtacgctgctcaacattttgtctggctacaaaacttcgagcatcgaaggcagcgttacgatgaacggtgccgagcgcaacctaagcgcatttcgcaagctttctgcctacatcatgcaggacaatcagcttcacggaaaccttaccgtccaggaagcaatgactgtggcaacgaatctgaagctcagcaagaaatcgatgacattttgcttactctcagcctgagcgagcaccgatatacgatgactcgaaatttgtccggcggtcagaaaaagcggctctcgattgcccttgaactggtcagcaatcctcccataatgttctttgacgaacccacatccggcctggacagctctacctgttttcagtgcattcatctgctaaaaatgctagctgctggcggacgcacagtcatatgcaccatccatcaaccgtccgctcgtctcttcgagatgttcgaccagctgtacactctcgcagatggacagtgcgtttatcaaggcagtacaaagcaactggtgcccttcttgtctacgctaaacctggagtgccccagttaccacaatccggcaagctacgtgattgaggtgtcctgcggggagcacggagatcatacgcgcaaactggtcgatgctattgacaacggcaagcgggacgttcgttcatcagcagactatgccggcctcaaggctcgcaacgatttggtaaaggtgcaaaacctgaaggctattctcgataagaacgacgcttcaagtcgatatccaacatcgcagtttcaccagttctgggtggttcttaagcgaactttactcttcagttaccgggattggactcttatgtatctgcgtttatttgcccatctgttagttggatttttgattggggcactctactatgacattggcaatgatggagcaaaagttttgagcaacctgggattcctattctttaacatgcttttcctcatgtatacatctatgactattacgatcctatcattcccgcttgagatgcccgttttgttgaaagaaaactttaatcgctggtactcgctaaagtcctactatttggctatatcagttgctgatttaccgtttcaagctattttctgcgttatctacgtgtcgatcgtgtattatttcacttcacaaccttgggagctattccgcttttccatgttcttgtcggcctgccttctcatttctttcgttgctcagtccgtgggtctggtggtaggcgctgcaatgaatgttcagaacggtgtcttcctggccccagtgatgtccgtgcccttccttctgttctccggcttctttgtctcctttgacgctataccagtatacttaaggtggatcacatatttgtcgtacatacgatatggattcgagggcacagctctggccacctacggttacggacgggagaaacttaggtgcttccagacttactgccattttaaatcacctattaccacgctggaggaactggacatggttaacgctaactttacactcgacattgtggccctaattgtgatcttcgtggtgctgcgcatctcggcatacctgttcttgcgctggaagctgaagactgtgcgataagcatattacataattttaaatgttgttttggatttaatagctttctattttttagtcgcgaaattcttcttttaagtgatacaaacgcaaggaggtttcttatcttaaatcagcttgattccagccgcatatgtagtaaaaccaattcaaaccactgttggagcacatcattgatataagtgaatcgtataatgaaataagttattgaacgtgaaaccaattttctaaataaaaataactgaataacatttccaattgtatttaccgaaggatttttgaatgactttaaattaaaaacgaacatgttttgtgtctatatacattaatatttttattcaaggtactttaagaccctttggaattttttgtaatattttcttattacaggtttagaataaacatttttgaatatatactgta

SEQ ID NO: 5736 - protein, 620 aa, DROSOPHILA
MTKNDNANLLNDNRLGTAGAGQLKAQIVPAQPKTLQHLPKRPAVDLAFHNLTYRVKEGNRSNHSEGRQWTPPVWRTHRHNGTIGCWQEYAAQHFVWLQNFEHRRQRYDERCRAQPKRISQAFCLHHAGQSASRKPYRPGSNDCGNESEAQQEIDDILLTLSLSEHRYTMTRNLSGGQKKRLSIALELVSNPPIMFFDEPTSGLDSSTCFQCIHLLKMLAAGGRTVICTIHQPSARLFEMFDQLYTLADGQCVYQGSTKQLVPFLSTLNLECPSYHNPASYVIEVSCGEHGDHTRKLVDAIDNGKRDVRSSADYAGLKARNDLVKVQNLKAILDKNDASSRYPTSQFHQFWVVLKRTLLFSYRDWTLMYLRLFAHLLVGFLIGALYYDIGNDGAKVLSNLGFLFFNMLFLMYTSMTITILSFPLEMPVLLKENFNRWYSLKSYYLAISVADLPFQAIFCVIYVSIVYYFTSQPWELFRFSMFLSACLLISFVAQSVGLVVGAAMNVQNGVFLAPVMSVPFLLFSGFFVSFDAIPVYLRWITYLSYIRYGFEGTALATYGYGREKLRCFQTYCHFKSPITTLEELDMVNANFTLDIVALIVIFVVLRISAYLFLRWKLKTVR

SEQ ID NO: 5737 - DNA, 3182 bp, DROSOPHILA
atttcgggtatgtgcattttatgggatttgcccatcctgctcccaatgggcagagatgattgcccctcttgtatttcgaagatggaaagttgaagcgaaaagggtggacctccgaaaaattgattgcgttgcaaacagttttcggttttaagaatttaataacttacacgttgtgtttctatctggccaaaaaggggtatgcaatctaaattaaatacccaacataatcaatcaaaagcaaaggcagattcggccacaatcactcgagaaatccaggactgaaaactacaaatgcaaaatgcagaaattgaaagaaacgcagcgagacgaactgagctgaaaccacagaacgaaatgcggtaacacgcagaactttgctgaatcaactactaaaagatttatggtatcaaaatagtgccacataaaatattcacaccttggcccggcttggccagaatctaacgactctggagggacgcaggaaagggatttgggcggggcctggaacggagggagaaagccaaccatccatccaaccaaccaaccaaccaaccaactgatgccttttgccgataaagccattgtttatactccgcacagcgactgggttgtggattgcattttggccataagttggcaacattttttatgcgttcatcatgcggtcagcataaatttttcatcgccatttcagcttttccctcgtccaattttccttggccgagccccccaccctccaccacactccgcttgccgcgaacatgttgccaattttgatgtctgatggccataaatcagggcgtttaaagtcgccagatgaaaaacaacgaatgaataattccatttcggccataaacatataaactatttattccacaccaatatgtttgtggccaagtctgtgtttcttgtgggtttgagtatctgtttgcttgcgtaggggaagtcttggaacaaataaataaagagacaccaatcatgcaaaagtacaaaaacaactaatgatgggctcaagggtttcgtcaacgccaatgggggaccttgctaaccgcttttcctgaaagcagaacattgtatatcattcttttatgcaaaaaaaaaaagtgagtactcaccacaattgaatgattgattgcctttgctgtacttcgatgaatcgtgtatcgatggtgcgctaagggttagagattaaaaaggattgctatggatcggattaggatgccgaacgcccctgggcgagatctacttactttagaccgttccgcatatcccggtacatgggagcgtcgtaggaggtcttcatccggttgacctgttggtgtccctggctcggctgctgatagtgctgctgctgctgttgctgctgctgctggtgctgctggtggtactgcggctggtgactctgcataggctgactgtattgccacatattggagctgttcatcatttggttggggctgggaccggagctccagccgccagcttgcgagggcgacgagggacagggcgcagacatcacagcattgcagccgcccgtcagacgtccttgatgcatttgggtggtagatccactgggattgtactgttgcagcggctgcatctgacccatcgaggtcatcggctgcaggtcaggcagcactgcattgatcccgggggcatcgatggcgcccatgggattgcccatcatgggcatcatggtcatgctgctcaggggagtcaccgctccaatcggcagctgggtggacatcgtggacatgggggtcatctgattgcccccttgcatcatgcccagcggcataccctgcattgggtacgacgaagcgcccgactggcacacgggcatctgcatctgcagattcatctgcggtggattcaggggctgcatggccatggactgtccttgaccctgacctactcccatgcttagggggtactgaggaacgctcttcatctgaaatatagacttagacttattaccaagtctacagaaccaatgcaactatgtgtaccttggaatcggcgtacatgccgtagtcagcttcgtaaggcactgaacaaaaattcattttcgatgtgtggaaagctcgagatactccgaaagtgtttataaaatatttcactccaaatttgtatataacttaaattttgagaattttttttttcttactttctaccaatagatctgaatcctacgatgaaataaatacgaatgaagtgtgtagaggaaaacttcccagacatctgacagagatgggaaaagcctactatgattgaatagaatacaattttagcgtgtttttttcatgatcatctcaaaggctttggataataatattatcaaaaacgtcagagtatttatcgtattgtatatttccaaattacttgttatcacatcgagtaaatgggacgcaaaggccacaagactagaaggaaagttaaagtccactcgaaggtccatcctcctcagaaaattaaagcgaagctgccgaaaagagataaacgtagcacacttcgtcccaagattaataattcgaaggtttttcacgtgaactgctgcaagtacaagatccgttcgagacccatgaggcgcaatcagtgcaacctggccacccagtgcccctcccacacggtcgccatcgccccgtctgtgccgctcctgcatcatcctgtccggcggaaggtggtccatatgccggaaaccgtggtcatgcacatgcggaatatggaggacgcccgccgagtggcggttaagcacagaagaacccttattcaaacccatgttccttcgccggatgtggatgatgacgaagatacacaccaaatcgatcggaggtcaaggcaagcctataggatgggtcaaatgagacccttatccagcgacgtggatgtggatgacatggatgtggacccgtttcagtagggatgtgtgttggaaatatattgtaggtactgtggtaattgtttaacttctcgtttacaaaatgcccatgagtcctactttatttctagttgccaatccacatatcccgtgagacgagggattccattgccacttctaactagttgcttcgccccatgggcatatcgtgatcatccataaaaccacgcccctccgccagtctccccaagcccaaccaagctgtccaggacaattaattttacaccggcttgtcagcttattg

SEQ ID NO: 5738 - DNA, 990 bp, DROSOPHILA
atctattggtagaaagtaagaaaaaaaaaattctcaaaatttaagttatatacaaatttggagtgaaatattttataaacactttcggagtatctcgagctttccacacatcgaaaatgaatttttgttcagtgccttacgaagctgactacggcatgtacgccgattccaagatgaagagcgttcctcagtaccccctaagcatgggagtaggtcagggtcaaggacagtccatggccatgcagcccctgaatccaccgcagatgaatctgcagatgcagatgcccgtgtgccagtcgggcgcttcgtcgtacccaatgcagggtatgccgctgggcatgatgcaagggggcaatcagatgacccccatgtccacgatgtccacccagctgccgattggagcggtgactcccctgagcagcatgaccatgatgcccatgatgggcaatcccatgggcgccatcgatgcccccgggatcaatgcagtgctgcctgacctgcagccgatgacctcgatgggtcagatgcagccgctgcaacagtacaatcccagtggatctaccacccaaatgcatcaaggacgtctgacgggcggctgcaatgctgtgatgtctgcgccctgtccctcgtcgccctcgcaagctggcggctggagctccggtcccagccccaaccaaatgatgaacagctccaatatgtggcaatacagtcagcctatgcagagtcaccagccgcagtaccaccagcagcaccagcagcagcagcaacagcagcagcagcactatcagcagccgagccagggacaccaacaggtcaaccggatgaagacctcctacgacgctcccatgtaccgggatatgcggaacggtctaaacgcaccatcgatacacgattcatcgaagtacagcaaaggcaatcaatcattcaattgtggaaaagcggttagcaaggtcccccattggcgttgacgaaacccttgagcccatcatt

SEQ ID NO: 5739 - protein, 283 aa, DROSOPHILA
MNFCSVPYEADYGMYADSKMKSVPQYPLSMGVGQGQGQSMAMQPLNPPQMNLQMQMPVCQSGASSYPMQGMPLGMMQGGNQMTPMSTMSTQLPIGAVTPLSSMTMMPMMGNPMGAIDAPGINAVLPDLQPMTSMGQMQPLQQYNPSGSTTQMHQGRLTGGCNAVMSAPCPSSPSQAGGWSSGPSPNQMMNSSNMWQYSQPMQSHQPQYHQQHQQQQQQQQQHYQQPSQGHQQVNRMKTSYDAPMYRDMRNGLNAPSIHDSSKYSKGNQSFNCGKAVSKVPHWR

SEQ ID NO: 5740 - DNA, 4810 bp, DROSOPHILA
tacggctgccggcggtgaactgattcctggcgggcgccacgtagtcatagccatcgggcgtggcctccgagttcagagcattgttgctgggcgtgtggtagtcgctcaggaaatcctcgccagaactggacgcactgttggccgccttcgcctccttctcgttgtagttgtactccgcttggctagtggccaaaagtgccagagacagcagggcgaaaaactgcaagtacatattgaatgtatttatcatgaatatatccatttggtccttgcatcctgatcacaactcaccttagctgccatctcaaatcgtttggatcttcctttcgtgggagtgcctctacaaattgtcagctaactaatgtcataattgaagcagcccggagtttttatacttcatcccaatacttcatgcagttcattacccaatgttggtagttatacaatgtcatgcgcctcaattgattgatttaccattgtccaaagtcgcgacacaatattggtaacactttcgttttcaatttgtgaccacttttatgctgcgtaagcgcaggccatatgaaaagatgatatggagtaggtgtgtgatcgtggaaacatcagaatggggacaaaagttggcaataaaagtggagaagaattcaagcatttttaaaatttgaaccacagctcattagtgccaaaaatactgcctaacttctcgattagcttaagattaactatttaaatttattcattgtttaaaaaaatattataatatcccaacccaattaattcagtatcccacatgcgcagtgatccctaatctcccactgaatcgtcgcagcttgatgcctcttgataagaaaacgaatcaaaccggttgctagccaactgactgatgccaagatgctgcttgattttggctgattgccgtctggctaaaacaaacggccagctgtcggcaatcgggaaccgatcgtcgcggagaacacaacgctcgtggagaatgacggccaagatgaagctgcggtcccagctgcatctgctcactggtttcatggctggattcgtgctggccttcgtgctcctcctctacgtctacgatgtcagcagggtgacgccctgctggagcagcacctccaccatgaccacggccacaacggccaggattgaggatggtccaccaccgcgcattctgtgcatggtgctcacctgtccggagaacgtgcagagcctggccagaagtgtctacgagacctggggccagcgctgcagccgcctgatcttcgccagcagcgaggactacgagccactgggcgtggtcggtgtggtggagccaactggcggtggctacgaggatctgtggaataaaacgcgcgagggattccgacacgtttgggagcactacgctggcgactacgattggttcctcaaggcagatgacgatacgtgagttaagctggcggatatcgttttggatacatctttactttcgagtctgtccacaggtacgtggtcatggagaatctgcagcacctgctccgtggcttcgatccgaatacgcccgtcttctttggctacaagatgtcgcgatacaatgtggtgagtaattctacataattagcattaacttccggctctggctcgtaattaatcgattatagcttcgctgcacagggaaaaattgcttaaacttcttttgagtatgattttgctcgtgatttatttaataagtgatccagttgatcgctggcattagcttctaattaactgctcaccttttcatgtttttgtcgcccgcttcttgggctaatttgaaattctaatttttgattttcagtttcgctttttcgaagctgttaaaattatttcttccgatcgaagtcaaaatgctcccggcgaaaagagtttcttacggtcaataaattttaattagtctataattattcagagcgcgtgagcatatcataatcgttttcaacagttttatagctgtatcgattaataattatttagtaagttaattaaattaaacaaaaggcggtaattaaagcactttcagcttgggcggagtgcttttacgatatttgccgaagaaatgtgctaatcacgaatagaactctttgttggaagaaccggtcccctattgtgagtgtaattttcaaatatccaaaagcgatttattgtgcattgtctggcggtaaacaagcattaaatctattattggtgggatgatatcactcaaaacagttaacatctctactggccaaaagcttcttgtcttctcttggcattttccgtgcgcatagatcaagtggaagaaattaaattcgcattaaccattggccagccgagctgcactctgcgcagactaatggcaatgactcacctgaggtcatcgcgactcacctgtcacgcatctttcacagccgcgccttttgggcagcaggcgcggatttacctcgccacttggcatttccaagagttgagcaagctcttggtgagccgaagtacatctggacatctgggctgaataaataagtaaagacaacgaatgagctacgccggcccactgactagagagacaaagatgttaaaatgttttctttgtttcagcttctgcattttgaatagagtttatctgacggattgattattcctaatgcatcataaatgtttaatgatttgtgattgattacagtgattatttcgcacgactctgcttatcattgtgttttatttatgttttgaatagcctttggatactaaatcaattaacatatttttatgctcccatgaattatgcatccactacaacgtttttttgtttttaagattttatagacatggttttggagttataattgcacagtttcggggtatatccgacacataatccgacataatcccaagtcaaatgtgacaattgaattcaatacttcacttccattaatttgagagctttgctcgtttgtgagtttgattcgtgttttgacacatcattcccagcaaccttcaagacgggattaaattcatcttgagttcgttggtgggtatgcttaaaacctcatgttgttactaaagtttggaaaaacatggtctttcgggcctttgaagtaaaatattcatagtttagcataaacgtttataacgatatgggaacgggttttggaaatttaccactgggcgggtaccatttcaaaatgacaatttgcgataatagagtattttgctattctctagagttatatgtctggcggagcttcgtatattctgagtcgtgaggccctacatcgatttgcaacacaagcctatgaatctgaggtgatttgtccgcagccaaaaaagatgggcatcgaggacttttacatgggaatttgtatgcagaatgtgggcgtccactttgtcgactccacacacgctttggatggagacacgaagccgaagtttatgcccctggatctggagaactatatgtcggatgcgaattacacaattccggagtggctgcgcctcatgagtctatctcgagttgaaacggtgagtcctaagatgatatacaaacatgcgaaaataataactattttattttagggcttggcctgctgttccaactactctgtggcctttcattatgccagtcgagaacggatgttcctctacgagtttctaatctatcatctgaaagtatttgatcctaaccagatttcagaacgcggacacagaagtcgattaactttatctgatttaacgagaagatttccactggaagataactccaatataaaagacttgctgcaaatgtccgagaaacctgataatttttagttgcctatttgttttttggcttaagttataacgattgtgatatgaactaatgaatatatttatgatatttttgttaacctatgatgttagtttatattgaggttaataaattttttgcggacttagggcgaggatacaagtaaagtggcccatgccaaagattgaaaaagcaaaaaaatctcttgcctacttttaggcattttgaagaatgcctgtgcgataaaaaatggccacacgaaaatatccgccgtgtcaaaaccataattttttacgtgagctaatatctaattaaaaaatagtgactatgaacacatattcattcaatttggatattttttatgatttaatctataaaatacattttagtttttacttttctaattacagaaactaattattttcttcataaaatttagtgatcataaaacgacatgaatttctgtatactctaccttagcacttataataaaataatcttaagtttgcatttaaatagctgaaagttgggcctcttttattttttcgttatttattgcaaataagtgtgtaccaagttcaacagagtacatttcacctgcgtttgattaaagattccgcaattggtattaagcggatggcacatggtccgtaatatatttttaaaatttattgcattgaccttgcgggtattgactgcggtatttaactaacacctgccagctaaacgtggcagctaaattggcagcagcggaggtattgggcctggaaaataaggccaaaacccggcaagtagcacatggaaatccttcaatggggccattcttgcatgaagggctgaccgactgaactgcactcgtctaggctgagttttcattaccaaagtcaatgccccagtctcaccttaaagccgccgcctcacctgcttcacttcacctgccaacgaacacacatgaactacatatgtatgtatctatgtgctgtgctgttgcgaagccaaagttaattaaatccaaaatcacgt

SEQ ID NO: 5741 - DNA, 1056 bp, DROSOPHILA
atgaagctgcggtcccagctgcatctgctcactggtttcatggctggattcgtgctggccttcgtgctcctcctctacgtctacgatgtcagcagggtgacgccctgctggagcagcacctccaccatgaccacggccacaacggccaggattgaggatggtccaccaccgcgcattctgtgcatggtgctcacctgtccggagaacgtgcagagcctggccagaagtgtctacgagacctggggccagcgctgcagccgcctgatcttcgccagcagcgaggactacgagccactgggcgtggtcggtgtggtggagccaactggcggtggctacgaggatctgtggaataaaacgcgcgagggattccgacacgtttgggagcactacgctggcgactacgattggttcctcaaggcagatgacgatacgtacgtggtcatggagaatctgcagcacctgctccgtggcttcgatccgaatacgcccgtcttctttggctacaagatgtcgcgatacaatgtgagttatatgtctggcggagcttcgtatattctgagtcgtgaggccctacatcgatttgcaacacaagcctatgaatctgaggtgatttgtccgcagccaaaaaagatgggcatcgaggacttttacatgggaatttgtatgcagaatgtgggcgtccactttgtcgactccacacacgctttggatggagacacgaagccgaagtttatgcccctggatctggagaactatatgtcggatgcgaattacacaattccggagtggctgcgcctcatgagtctatctcgagttgaaacgggcttggcctgctgttccaactactctgtggcctttcattatgccagtcgagaacggatgttcctctacgagtttctaatctatcatctgaaagtatttgatcctaaccagatttcagaacgcggacacagaagtcgattaactttatctgatttaacgagaagatttccactggaagataactccaatataaaagacttgctgcaaatgtccgagaaacctgataatttttag

SEQ ID NO: 5742 - protein, 351 aa, DROSOPHILA
MKLRSQLHLLTGFMAGFVLAFVLLLYVYDVSRVTPCWSSTSTMTTATTARIEDGPPPRILCMVLTCPENVQSLARSVYETWGQRCSRLIFASSEDYEPLGVVGVVEPTGGGYEDLWNKTREGFRHVWEHYAGDYDWFLKADDDTYVVMENLQHLLRGFDPNTPVFFGYKMSRYNVSYMSGGASYILSREALHRFATQAYESEVICPQPKKMGIEDFYMGICMQNVGVHFVDSTHALDGDTKPKFMPLDLENYMSDANYTIPEWLRLMSLSRVETGLACCSNYSVAFHYASRERMFLYEFLIYHLKVFDPNQISERGHRSRLTLSDLTRRFPLEDNSNIKDLLQMSEKPDNF

SEQ ID NO: 5743 - DNA, 3483 bp, DROSOPHILA
ggtgggttagcgtttggtggtgccagtgccgagtgccgccggtggttgcttggaccgccggagatgagtagagatacagagtgggcaacaatgaatgaatcattgggggaagaggcggagccatcatcatggcatcataagcggaatccgtttgcacagtcaaaataaaacaacggccaccgagaaagattgtgtgatttgactttgttggcctcaacagaaatcatttattcaataattacatattgacatacaaacatcaaaggggcggctgttacatacggtatggacatatgtatgtacgtcgtagattattattatttattaaattttttttttattatttttataaattaattataaatttttataaaaaatcactaattcggactttcagttaaaatttaacagacattcaagggtgtggaagaaaaaagttctaaggggttaaaatttattataaaaaatttattaaaaaaaataatttttatatgtatttaagtgaaaatattatatgaacggtttctatttaagttaatataaaaaaaattgtatactgtaaatagcaaatgatcaattaaatgatctagtcagaatatgcagacatttattttgttaatttttagcatatgattatctatggacaatatttaaatattatgaaaataatgatattttaaataatagatttttaaattttagaattgtgtggccccttttcgacacccttggaacggatgcttcacagcactgtgctgacagcacttaccaacactgcttgggcgccaaatacagagttgcatttggagagtacaacttttatccaactttcgaacgagaatacaatccgataccaacttcggactccaaaataggagtatacccagctggatcctgcgcatggcacctaccaatcggcggaaaaccgcttgccacggattgacgccctggaagtggagatgcaaccctagcagctcaccgacaaaatgaccttgcgctgacattgccgcacagcagttgaggacgaagaagattcgcggaatcagtggtatcgcaatccggagtttgctagcacgcacaggaagtatccagaaaatccagaaaaatccaaagatggccttcaataagctgagcatcgaaaacctggacttggcgggcaagcgggtgttgatgcggtaatccaaagccaatcctcgcgtgaaattcagttgcataaacattgcccgtgcttctttgcagcgtcgacttcaatgtgcccatcaaggagggcaagatcaccagcaaccagagaattgtcgctgccttggatagtatcaagttggccctttccaagaaagccaagtcggtggtgctgatgtcccacttgggtcgtcccgatggcaacaagaacatcaagtacaccctggcacccgtggccgctgagctgaagaccctgcttggccaggatgtgatcttcctaagtgactgcgtcggcagcgaagtggaggccgcttgcaaggatcccgcaccgggatccgtcattctgctggagaacgtccgcttctacgtggaggaggagggcaagggcttggatgccagcggcggcaaggtcaaggccgatcctgccaaggtcaaggagttccgtgccagcctggccaagctgggcgatgtctatgtcaacgacgccttcggcactgcccatcgcgcccacagttccatgatgggcgatggcttcgagcagcgcgcagctggtctgttgctgaacaaggagctgaagtacttctcgcaggccctggacaagccaccaaatcccttcctggcaattctcggtggcgccaaggtggccgacaagatccagctgattgagaaccttctggacaaggtcaacgagatgatcatcggtggcggcatggccttcaccttcctgaaggtcctcaacaacatgaagatcggcggttccctgttcgacgaggagggctccaagatcgtcgagaaactggtggagaaggccaagaagaataacgtgcagttgcatctgccagtggactttgtctgcggcgacaagttcgccgagaacgctgccgtcagcgaggccaccgtggaggccggaattcccgatggacacatgggtctggatgtgggtcccaagacccgtgagctcttcgcggcacccatcgcacgcgccaagctcatcgtgtggaacgggtaggtgtcacactgaagctacttctccaaatgtcctataatggttttcccattttagaccccccggtgtctttgagttccccaacttcgccaacggcaccaagtccatcatggacggcgtggtggccgccaccaagaacggcaccgtctccatcatcggcggcggcgacactgcctcttgctgcgccaagtggaacacggaggcactcgtctcgcacgtctccaccggaggcggcgcttcgctggagctcctggagggcaagacactgccaggcgtggctgcattgaccagcgcctaagcgtacatatatacggtatattaatgttaatcgcatcgtttaccttgtaagcacaaaccacgacgttaaaaagtgttgaatctatttgttgcggaaccatataatgcatacgaaataaaggaatcctagtttatttgcgggcaaagttgctgtccattgaggaggcggtgcgctgtatgttgttgagattggcccggatgcgatcgccaattgagttatggttggcaatggccttcttcacctccttgttaatgaactccttgtcgaagtctcgttcacgattttgggcctcctcgcgcgcgtatgcttctcggtgcttgcgaaccacctggctgcgatccgcttctctccaagtggcgttgtccatcatttcgcgcaggcgagcttctcggtcggcttcgcttaactttggcttgccggtgggacggctgggaggcggtctttcggcaatccttcgcttgtcatctcctttggaacttcggctcctgctgcgttttgatctggaacgctcttcaggtgtcctactcctgcgtttctcgcgctgctttgaagtgtccttgctttgacgtctggcttttctgtcctctgggctcctggttcttctctgtcttctcgctaagggacttctgctcctgctcctgcgcctttcccttctctcttctggactcctttgcctttgcctttgttccggacttctactctgtcgcttttttctatcccgggggcttctactcctgcgtctttctcgctgatttctgtcctctgagctgtggctccttttgtgctttctccttggctcttcctcttcgtcactactttcgtcactgctatcgctgcttttcttcttcttggatttcttgctctttttcttcttggtggccatgtctaattgatttgaaatggtgcggtacttggcgtccagcagcttgtccagtttaaggtcaccttggtctcccttgagtttgctcacttggcgggctaattttctgtccaagtcatc

SEQ ID NO: 5744 - DNA, 1361 bp, DROSOPHILA
acattgccgcacagcagttgaggacgaagaagattcgcggaatcagtggtatcgcaatccggagtttgctagcacgcacaggaagtatccagaaaatccagaaaaatccaaagatggccttcaataagctgagcatcgaaaacctggacttggcgggcaagcgggtgttgatgcgcgtcgacttcaatgtgcccatcaaggagggcaagatcaccagcaaccagagaattgtcgctgccttggatagtatcaagttggccctttccaagaaagccaagtcggtggtgctgatgtcccacttgggtcgtcccgatggcaacaagaacatcaagtacaccctggcacccgtggccgctgagctgaagaccctgcttggccaggatgtgatcttcctaagtgactgcgtcggcagcgaagtggaggccgcttgcaaggatcccgcaccgggatccgtcattctgctggagaacgtccgcttctacgtggaggaggagggcaagggcttggatgccagcggcggcaaggtcaaggccgatcctgccaaggtcaaggagttccgtgccagcctggccaagctgggcgatgtctatgtcaacgacgccttcggcactgcccatcgcgcccacagttccatgatgggcgatggcttcgagcagcgcgcagctggtctgttgctgaacaaggagctgaagtacttctcgcaggccctggacaagccaccaaatcccttcctggcaattctcggtggcgccaaggtggccgacaagatccagctgattgagaaccttctggacaaggtcaacgagatgatcatcggtggcggcatggccttcaccttcctgaaggtcctcaacaacatgaagatcggcggttccctgttcgacgaggagggctccaagatcgtcgagaaactggtggagaaggccaagaagaataacgtgcagttgcatctgccagtggactttgtctgcggcgacaagttcgccgagaacgctgccgtcagcgaggccaccgtggaggccggaattcccgatggacacatgggtctggatgtgggtcccaagacccgtgagctcttcgcggcacccatcgcacgcgccaagctcatcgtgtggaacggaccccccggtgtctttgagttccccaacttcgccaacggcaccaagtccatcatggacggcgtggtggccgccaccaagaacggcaccgtctccatcatcggcggcggcgacactgcctcttgctgcgccaagtggaacacggaggcactcgtctcgcacgtctccaccggaggcggcgcttcgctggagctcctggagggcaagacactgccaggcgtggctgcattgaccagcgcctaa

SEQ ID NO: 5745 - protein, 415 aa, DROSOPHILA
MAFNKLSIENLDLAGKRVLMRVDFNVPIKEGKITSNQRIVAALDSIKLALSKKAKSVVLMSHLGRPDGNKNIKYTLAPVAAELKTLLGQDVIFLSDCVGSEVEAACKDPAPGSVILLENVRFYVEEEGKGLDASGGKVKADPAKVKEFRASLAKLGDVYVNDAFGTAHRAHSSMMGDGFEQRAAGLLLNKELKYFSQALDKPPNPFLAILGGAKVADKIQLIENLLDKVNEMIIGGGMAFTFLKVLNNMKIGGSLFDEEGSKIVEKLVEKAKKNNVQLHLPVDFVCGDKFAENAAVSEATVEAGIPDGHMGLDVGPKTRELFAAPIARAKLIVWNGPPGVFEFPNFANGTKSIMDGVVAATKNGTVSIIGGGDTASCCAKWNTEALVSHVSTGGGASLELLEGKTLPGVAALTSA

SEQ ID NO: 5746 - DNA, 14388 bp, DROSOPHILA
gttaacaaaatgtttggctcttcttttgtttctaccatgcggcctaacttttctattattgttaaatgaattctgcattgtttacaaagttcacaagttcaatcaacttgacaaaacggaaaatgaagttgcgtggcagacaaagaggtgacaaaggcacacacgcacataaaaaaaagtacggtaaatgcatgcatagataaaggaaagggcaagaaggaaatacgaaagaaatgtaaggcgccaaagcaagagggaatgaacaacttctcgcaacttctacgcaaaaaggaatagagcttaaaataaatcgatttaaaaataggaaacatttatgcggcaatgaagaatcccaaataatgccacagaaaagcaattgaaacctgtagttttatgtcgattaacattaacataaataaatgcgtatatttataaatttaatttctatattttaatatacataccgtaagtaaattaaggaaatgaataaaattttgttttgatttccagtcaactacacattttcgtattgcatttatttcacaaaaacattttgagccagttcaagttaattgtttatgtttttatttacggagcaatttgcgatttgtctcaattttgtttgcgctcaattattgtaaacaccactcaaaaatctcactctctttcactcaaaaaaaaaataccggcaaactgatgctgttatgtgaaccagtgtgcgggagaggcaaagaaacattgatcattttaaatgcattgcgtactatttgaaaaccttcgagtattaacaaatcgtgatgaatccaaatgtgatctaaatgtgatccaaatgtcaaagaagatttttgttgaagctcctattctcaccacttaaagcgaattccagcaaagagagcagcagtgagcatgcgcagtgagagcgcagagagcgcggcagtctggtacgatagaaattttatttaagccacagacaacatgaaacgggcactatttctgtggcgtcgcgtgttcagttcaccgcgggtaattcagagaatcgctttgtggattggatttttgcctgttttccgcccgatacaaaaaaaaaaaaccaaacgctatataaatagttctgtagtaaaacctgaagcaacacgttttaaaatatacaactactactaacaactgtcacagccaagttacaaaagtgctaaatcccagaaataacctaagagccgacttaaaaccgcgcaaatacataaaaaaaaatcttctccaaagcagaaacaaaaacttgtgaaaaactagaattaaaaaaagattttttaaaaaaaatcagctagtgcaaaataaacgggaagaatttttttttgtgtccctttttttggtgttttttctccgtctttccccttctttgacgcaaaaaaaaaagtgcccaacttgctggcggcacgggaacgggatagaaatagatatagccgaaagcgactggaaagcaaaggaagctaactaaattggattacaatcaattaaatagagacggatacggaaactatgttcagcgaggtgagtgcaaagatatatatatataatatatattatttatcggaacgcaacgacttcaaaaatcgcgccactacggggaattcaaaatagaatttctgggaaaggtgaaatagcttaacttttaacggtgctctcacacacaatgacaaatcagtgatcatggccgcacaaatcgatacgaaataacggattctaggaactcagaaggaatgttaagaatcaagtgcttacaagaaattaagaacaaaaagtgagacaatagaaaagtggaagtggacgaattttgcaaaacaaaattctacaaagttctttattgttttgtgaaattcttcttaatgctggcaagtattaaaaacgctttgatggcgttgaaacgagttggtaatgttcgaaaattccagaactctggggctccaaagtaattaaataaaatggtcccaaaatttttacgaaagtattaaactttttaaaggagaaataaatcaattaattaaaaaaagaaataaattagcttgataaattaaaaaagaaataaattagcttgataaattaaaaaagaaataaattagcttaataaatttaaaaagatttaaataataatttaataaatgttgatattccaattttactatgattctgaaattcaatatataccgggttgcgttcgattctgcgaaagacatgtactgttagtttttgctcgtacttgtttaccggaatgcaacggattctacgaaaagggaaaagcacagtaagctttgcaggtctgcgtttatcggtaaaaggaccgtttatttttcagtaactggaattgggtatttgatatttggttttccttttatgcccttgtttatttcattagtatatgtattttttttttttttttgctattgtcaagagcgccaagattgacgatttcgggttcaaatggttaatagtgtataaatgaagctataagctaaatttgcttttgataacatttgctgaaccctcgacatcgcctgacgtcattataggtgaaatctggcacagtagaacgtgacttaatacaataataatattaggagtttagttactcttacattatagttgaaatgttgcaaaaatccttatgttgaagaagttttcaaaaagtgtgttgccgacatatttatttaattaagttcaaatatagaatcatacctacaacgatttccgccttatctatatttttcagacaggcatataactcaggaacttaagatatatagaaagaaaaaaaaacccagacaacataatcgcaatggccctttaccgctctgatccgtattccataatggacgaccaacttttttcaaatatttcaatattcgatatggataatgatctgtacgatatggacaaactcctttcgtcgtccaccattcagagtgatctcgagaagatcgaggacatggaaagtgtatttcaagactatgacttagaggaggatatgaagccagagatccgcaacatcgactgcatgtggccggcgatgtccagctgtttgaccagcggtaacggtaatggaatagagagcggaaacagtgcagcctcgtcgtacagcgaaaccggtgccgtatccctggcgatggtttccggctctacgaatctctacagcgcgtatcaacgatcgcagacgacagataacacccagtcaaatcaacagcatgtcgtcaacagtgccgagaacatgccggtgatcatcaagaaggagctcgcagatctggactacacggtctgtcagaagcgcctccgtttgagcggcggtgacaagaagtcacagatccaggacgaggtccatttaataccgcccggcggaagtttgctccgcaagcggaacaaccaggacattatccgcaaatcgggcgaattgagcggcagcgatagcataaaataccagagaccagacacacctcacagtcttaccgacgaggtggccgcctcagagtttagacataacgtcgacttgcgtgcctgcgtgatgggcagcaataatatctcgctgaccggcaatgatagcgatgtcaactacattaagcaaatcagcagggagcttcagaataccggcaaggatccgttgccggtgcgttacatcccgccgatcaacgatgtcctcgatgtgctcaaccagcattccaattcgacgggtggccaacagcagttgaaccaacagcaactggacgagcaacaacaggccatcgatatagccactggacgcaacacagtggattctccgccgacgaccggctctgatagtgactccgatgacggtgaacccctcaactttgacctgcgccatcatcgcactagcaaaagcggcagcaatgccagcatcaccaccaacaacaacaacagcaacaacaaaaacaacaaattgaagaacaacagcaacggcatgctgcacatgatgcacatcaccgatcacagctacacgcgctgcaacgatatggtggacgatggtcccaatttggagaccccctcagattccggtgagtcaaatttatatacttttcatatgccccattttcatcaatattggaagcttaaagtccgaatgtcttacaagaaatacaaaatggtctggtcgttggatgcatggcaaaacagtagagattagttagatccctggggatgcattaaaatttagtttacgcctgagtcagtctaaaacgcctaccaaaagtggcatactaattacaacgtcgtggggcggccgattagtttacaaccggccacatgaccccccgcccgcccgcacattcatccatcctttgggtgttgcacattcaactagtgttcgcacttccgtttcgtgtgggtgcagagtaacgcccaaacgcacaagtacgctgtataccataggcaaccggaaaatcgattggcggaaaacgcctacgtcaacagcaaacgtagtaaacttgttacgttgcacaaaaaaaaaaaaacaataaaaaagagaagaaaaaacccgcccacgcgacgccggcgtctgtctgcggtggttttccatttcccccattgatttttgtgcttttcgctgcgatgtgcttgtatgctcaatgctctgagctcttgctctggactttcctttatgatttttcccacttgccacccacaatggggaaaatgttggcgcggcgcgtggctttcatggctcattgtgtttatttgctccatggcgtcatcctctctcttccgaaaaacttatcacccgggggatgatgatgatgttcttgcgcagaactacgcccagaataaaaagaacccatatatatatatatactacatatataatatatatatttacatatatatatgtactacaatttctctcttttgggccaacaccccaatttacttggcttttcctttccgggctgttgttgtgcgaatttcaaggatgtctggtcactggccacgtggcagacagccccaaaattttcctacctccttggcggcattttctctaacaactcgtgtatgcgccgaaaatacgggatatttgcccgtgactagaaacaagaataaatcttgcccatcaaaaaaagatttattatgccattaataatgcagaaaaaaaagtaaaatattgtacttctcaataatttaagagggaaactacattaaaaaaaagtccagctagaatacgtgtttttcatatctatatttttatagtactcctacctacttgttttatttgtgccggcgagttcaatgtctggctctctttctctctttttggcgcgcaaatcgttatccattgagcaaccctcgcaagcttacgtcacgtcaatcatcttgatttttactacgtcttacgctacaactacaactgcgcatgcaactacgtgtgcattttctactacaatgactactacaactacaactactactactactacgctatggagccggtgtgggcgtaagctttttgccgccgctcattaaaaaaaatatatggtaaataatagcgggaaatcaagaaggggctagaggtggggcaatgcaagggataaattaaacttggattataaaatatttaccaataaagcaaaaagcaagagcaacagcaagagcaagagcaaaagcatttaactcgtgtttctgctcccgctttttctctctcgctcgcctgtctttagtttctctcttgcaatttgccgagtgcagttaaaccgagaaattgcagtaacaacaagtttgttttgtacgtttgttttggtttatatgctttgcttttttctgcgctctgctttttgggtgttgtctgcttttgcgttttgcgtgcttttttttttgtgtgttttatgcttttgcttctaccgcaacgaacggaacgcaaaaaatgtcaaaaaagaaaatgtgcaatatgtaaaatgcttaccataaattgaggaaaacccacacacgcgtgtgtatgaattttaattactcagaatcagaaagacaaatttacgtagaattgctagtattttatgatcgtttggcaaaatggaattctgaagcgttatcatcatcttagtttggtgacgaaatcgcatcataattttccactgctaatttggcaaactaaaagcttgacacaagtggctcgagattagttctttctattctttttgcgtgcgcgattcttgttggaagcagatatgggaatagcagaagaaacgtaaaaagaaatcaggtgcgtgccgcagattagcaaatctttgccctcttgctcgcacgcgaaactcgtgaggcttgcgagagggagatggcgctcttcgaacacacgcacttgtatcaatatcaattcttttctttcctttattgtggaggggggttgctttctttatcgctatgctgcagtcttctaattagtataaaagcttacgtgagcgagcgagacggggcgcgtcacgtgcgagcgagagcggcggttggcaacaacgcacgaaattcggcacatagataaggttcacgggggagtgagcgagagactagaggccacatgcctatgatgttggcgcctctataaaagtgcgtacacacacacacacacatacatgactggctgtgtacgtataatatgtatatgtatttacctttggcagtgcgtgctggtttttggcatttcgcaccttgcgactgtgtgtgtgtgtgtgcgtttgtgggtttggaaaaatgttaatgaactgaaccaaggtcagccattcgccggaaaaaaaagtgcgtagaaaccgaaaattagtggtgtgggggtgcggcacagaaaaaaaaaaaaaaaaaaacgtatggccaagtcatgttggctaaaacaatatttcctattttggcctcttcgctttacactttcgatctcagcagctcttctgggctctcttgtggccttttagaagaagacaacaatcgaaagtatagagacatgtaaacaacattaaatgaaattaaataacgcccaagaagaaagaagaaactgtatgaaaaagtagtggataataataatacgaaaaccccaaagactagaacataaatagttgtcgattgttggcaagacaccctttttgttgtaaatgcccaaaaaggcactcttaacaatgggccgtatgttcttttttttttccggctgtggggctattttttttgtcaaattttttcgtacacatttcggcagtttccttcgactgttgctaggcgtctctctccccgtccttatctctctacatagcgcaatctctttctgatgtacgaattgcgtcgtggttgttggcttgttgttgctttattcgcacacgtgtagcaataaattggtttgctcaaggtcgcaagagcagcgacgtcggcgttataaaaaaaaaaaaccaaaagcccataaagagcaaagctttttcgcccctctcgctctcacacgcacttggcacagctttatttatttatctttttttttttgcttcttaacaaacgagcctcccttttggcgttcatcagagatttcctgtggtgtacacatgtacgtctgtatgtacaacgaagatgtatccacgcccaagaatgttgccaaaagctccatgccgaaatgttgccagacgcattttcataatttatgtgccagtcacattattacattagggatgttgtgtcgtcccccgaaccttcttctaatatccaatatggtctgggctctaatcgtcgtgttcgatgtgtcgcattgcgacgtacatttgtcattattttcgtgcttttagcgggaaggtgtgtgtgtgtgtgtggagggggggggtttagagtgtgcagaggtttgcatcggaaaaggcttaacttgatgactcacatcctgcttctcctccgatgatgaaattcccactgactacgtcacaaaaaaggaaaggccgagaaaatcaaatggacgggggcaaagaaaaaaaatatatataatattaaaggaagaaaaagtgcaagaaatgcgcgtgggaaaatcttacagtgcagcggaagcaatgtttttccgcaattgtttataacacagcggtggctaatgttatatgataaatattttaaagttcaacaagagtatgcatagcattcgctttgatcagataagcagatgcttattattatttctaaaggactacagtttaaattgccttgtgtgcccctgtgttacgggtgtgtgacctatttcgctggccgttggtgtggcaagttgcggttgagcgacatgttgccagcagatgttgcatctgcggctgcaatttctgttgcagttatcgctgtagatgcaatttctgctgctgcagcagcgttgcgctgtctcccgtctcttaacctttgccaaaagtacaacatgtgttgctgttgcagttgcaatttatttgattttcatgcgaaatgccaacgcaaaagaatatagggtggtggtgaggcgtgggaaaactaagagtaaccatatttaggtatatgtattgtgtatgtttacattcacgattcttcttttcacggcttccacgaaatcgttaatcgttaaaacaaacacgagaatgccaggcgtgaaaaagtacaaattactcactgatgatctaaacgttcaaattcttcatccccccaatgaactttcttcaagatattcattaatattcgcacacgtataaacacacatccattcgtttgcccatccagcattttgcagttttcattggcgcgagatgatgtgtcattaaagtcgcagacctggagcttaaaaagcagcagcaacaacaatgtttgttattaaacaaattcacaagggcgtgtggtggttgtgagggggtgggggtgggtggtgtggtaggcgttagtctccaagtcgaaattgtcgaattttacgacttgcggcagcacagtggttgctccaaatcaaaggaacaacaaacgaatatagaaaacatttcgaaataataataatatcgctcgaatataaattggttttaactcatcaatgatgagtaatttctagcgaataattttttgtctccaagtggtcccagtttatcccactgtattttatttgcccacatatcttttatttttttaggctttttaaaacattcttgactgtattacatcatttgccattttcatttccatttgaatttcatttctcgacccaaaagatatggggtatttaacccgttcgtgaagcagcatcttctttccttctttctttctttcatctgctgcatttctgttgttgcattgatgatgcacttgtccgcatttttcgttttttttttgttgtatatttcgcattttttataattccctcttttaaggtctactctttggtctgtctgtccgcatcatctcaccgtacccccgttcctatggtaattttatagggcaaaaggcgtctctgcacacacatgcatacttgtgtgtggtgtatactcgtatatatatatatatattgcctatcgtgtacgtagaatgcagggacaggaaaaacccagcccaccgccctccccctttttccagcaaaaaagttgcgcaacatgtggcggcttgtgtgcattttatttgcaattgtaatcaacggcagcttcctcttcggaattcgataccctagctaaagggttgactcgaattcttttgaagaggtgatgtgatgtgatgatatggactattaaatcgatttatcgatgacacttttagttagtaaactgaaacgcacaatcttatcttctgcagtcgtctgcaaactttggtgaggggtatccaatagtcgtgttcgaatctcttgcacgctactctactctcggcttttgctttattgtgacgatttgatcttggcttcgttcgcttagcaacaaaagttgctgctgtcgtcgcgaataaataatacaaaaaataaaagttgctttgtttggtctgtctgcttcttctttttcttctactactactactcggtttcttgtattttaatgcagtaaacgagtttgtctggttttttattcgaattcggtgagagagagagagagagatagggagagaggagagatatattatacgatggtagctaacagcagcagcatccgatttgtgcgagcggaataaccgttagtaaaactatggcaaaagcttgcggcacaaccccagtttttatttttattgttgttattataaccgagagagcagcgctcaattgaatgcacttttgacggggccagcagatgcagatgcagatgcaatttgatgatagtaaacaagtgcgggaagtttgcactttttgttattcccttgtttcttggtttttttttttttttttttttttatcattcattcattgtctatcgaaagcgcggtggtgggcttggtcgcattcgtctggaaattcccctttcgatattaaaatagcgctcttcgctggaaatctcgcttgacagttgttactttgcatattaattgattttaagcgaaagacgagagttggtttttttttgcttacacatggcaacatactagaatttaagcctgacaaaattcgtcaaatccacttgctgcatatttatttattcgatactacaatttcatttatacgcgtataatattaactccggatttccccatttaagcgcccattcctgtggcattccgcagtttgctgtcctctgcgcttttttttttatttattttttaatccgtaaaatggccgtcgaagaagaggctgcattccaagattttgtcgaggggagaagactcggtgggtctgttggttgtctagccaaagtgaaacgatgacgttggcaaaaaaaaaagaagaaaaaaaaccagtcaagaacttgcgcttgtggctccttcgtttcttctcgtttggccggtcggttgattctcctgaaagaatctgactcatgcccactcaggcatttcttctgcaggtttcgatttcgttgcggttacttaccatcagttgggttttattcaatgtttattttttgccagtctcccatgcacatgcacttgatcttgcaacttgcaacttgttgctcttgtcagctcagcagagtctaccagcaacgtctgccgccctcctcctgcgtctctcattcgcatttaccttgttgccaagcgcagaataaagccatttcttttggtttgcttgcacagttgcctgttttactaaacaaatgaaatgtttaaacagttgacttgaattcaaagcgctaaaaatttgattcatttgaaggccacaattttaggcgataaaataaaacacaataatgcataaaacaatatcgaaaaaaatatgttatataaaaaaaaaaaagggatgaaggaagagaagtaacatgctcatgcaattattgttcattgcgaaagccaaagcccctcaaatgtttttctttggcgaaagtttaatgacccttggccagaattatgacttaggtgggcgtaggaaaaacaaacaaaaaaaaaaaaaaatacaacaaaaaggaaaggaaatgaaagaaaagaaaagaaaagaaaaggaagaaaacagctaaagcggattagtgtgtcaacgtttggggggtaatagtttcgtttctctgccatactctcatagtcgcatatatctcgtatctggagtatcagacttcaggaagcaatagatttgcacggatttcaatttcaagtggcgtcgcgacagacagacgacgacgacgccctttcgtgttgacgtcattggtctgtctccgcctttttgttttgctttgctgctatgctttttttctcccccattccattcatttcttctccacctcccccttccccaccccgcacatggcgcacaattccgcatggcaacagagaaagctggaggcttgtagaagagggactgcccgatatattggattggatgggatgtgggggcacaacaacccagagcagcttttgctgtacttcactcctctgcgtttcgctaatttaccgcttccgctgcgaccattgaaccaagaaaatgaagaagaaaataaagaaagacgccgagactgcagcacaatatataacaatatacataaccacataactataaacattattaaaacacattatgtttcggatatcgatgatatccggaaatttaaaacaaagaacgcattgctaatcaaaaatacaaaattttttttttttactatcgctgtgcagatgaggaaatcgatgtcgtttcatatacggacaagaagctacccacaaatccctcgtgccacttgatgggcgccctacagttccagatggcccataagatctcgattgatcacatgaagcaaaaaccgcgctacaataacttcaatctgccgtacacaccggccagcagcagtccagtgaaatcggtggccaactcgcgttatccatcaccgtcgagcacaccgtatcagaactgctcctccgcttcgccgtcctactcgccgctatccgtggactcttcaaatgtcagctcgagcagctccagttccagttcgcagtcaagcttcaccacctccagttcgaacaagggacgcaaacgatccagtctgaaggatccaggcttgttgatctcctccagcagcgtttatctgccgggagtcaataacaaagtgacgcatagctccatgatgagcaaaaagagtcgtggcaagaaggtggttggcacctcgtctggcaatacatctccgatatcgtctggccaggatgtggatgccatggatcgtaattggcagcggcgcagtggtggaattgccactagcacaagctccaacagcagtgtccatcggaaggactttgttttgggctttgatgaggccgatacgatcgagaagcgcaatcagcacaatgatatggagcgtcagcgacgcattggactcaagaacctctttgaggctctaaagaaacagattcccacaattagggacaaggagcgggctcccaaggtaaatatcctgcgagaggcggccaagctatgcatccagctgacccaggaggagaaggagcttagtatgcagcgccagcttttgtcgctgcagctgaagcaacgtcaggacactctggccagttaccaaatggagttgaacgaatcgcgctcggttagtggatagtgttgtctcatactatcggcttaaagcggcggcgtagggctaggataacccccaatgtatatgcaagatttgtatatcctcctacttttttttttttgcaatttactttgatttagcttcgatcctttcttgacattaagccctaaatatgatttttttctggagaacttcaatatcagttagtaggttatgtttaacgatttgcttgcgctttttccgcttttttttttgtttttttaccataccataccataccatacaaggggttagagtttacgagtgatttaacaaatttgatttcttcaatgtgatatatatatgattttctttccgcgcgatttgatttggtagggaaaggttaacgaaagcggttttatgaaatcaatttgaagtgtttttttttcgctgcatatattacaatatacacgtatggattagatttaattaacaattagcggtctgtatataacatatgaagtagaatatcttaattatttttttgaattagttacttaaccatgaagtaaacaaaaaggaaaacatttaaaaaacacaaaaaatgaggacaaagaaccaaacattgaaaagtgaaaggaatagttagaaatgacagacctagcggagaaacgaaacacaaaaaaaaaaaaaaaagaaactgaagggaaaaacacaaaaggagagaacaaaaacaaaaaaaagaaaaacggatacggaaaacagacaaaagttacaacgaaggagccacaaagaggagatagagcacacaaagttgggagcgagaacgatgagatatatacttatataacatctatatatctatatatctatatatatatatagaaattagtatagcttaaagtagaacttttggtttcgtaccccaaaggcaaaatgcgaaatgagccggcttcaaatagttccgaacttcttgacgaagcaacatggaacacgatgatttaattcgaccttggttcgctagtttattaacaaaattacctatttaaaccatggacatgtttttaacatgcgctttttttttttgggtcctatattcttagagacgcatccttggaggagaaaagaaacccaaaatgtatctgcatgcatcttgcatgcacacaattcaatgcttttgcttagaaccccaactcccccccccccttgctataacccgtatatatatattatatactatgtgtatatggattatatacatctgttggacgacgcgaagatgaaagagaaacgcttttta

SEQ ID NO: 5747 - DNA, 3020 bp, DROSOPHILA
gtcgcgtgttcagttcaccgcgggtaattcagagaatcgctttgtggattggatttttgcctgttttccgcccgatacaaaaaaaaaaaaccaaacgctatataaatagttctgtagtaaaacctgaagcaacacgttttaaaatatacaactactactaacaactgtcacagccaagttacaaaagtgctaaatcccagaaataacctaagagccgacttaaaaccgcgcaaatacataaaaaaaaatcttctccaaagcagaaacaaaaacttgtgaaaaactagaattaaaaaaagattttttaaaaaaaatcagctagtgcaaaataaacgggaagaatttttttttgtgtccctttttttggtgttttttctccgtctttccccttctttgacgcaaaaaaaaaagtgcccaacttgctggcggcacgggaacgggatagaaatagatatagccgaaagcgactggaaagcaaaggaagctaactaaattggattacaatcaattaaatagagacggatacggaaactatgttcagcgagacaggcatataactcaggaacttaagatatatagaaagaaaaaaaaacccagacaacataatcgcaatggccctttaccgctctgatccgtattccataatggacgaccaacttttttcaaatatttcaatattcgatatggataatgatctgtacgatatggacaaactcctttcgtcgtccaccattcagagtgatctcgagaagatcgaggacatggaaagtgtatttcaagactatgacttagaggaggatatgaagccagagatccgcaacatcgactgcatgtggccggcgatgtccagctgtttgaccagcggtaacggtaatggaatagagagcggaaacagtgcagcctcgtcgtacagcgaaaccggtgccgtatccctggcgatggtttccggctctacgaatctctacagcgcgtatcaacgatcgcagacgacagataacacccagtcaaatcaacagcatgtcgtcaacagtgccgagaacatgccggtgatcatcaagaaggagctcgcagatctggactacacggtctgtcagaagcgcctccgtttgagcggcggtgacaagaagtcacagatccaggacgaggtccatttaataccgcccggcggaagtttgctccgcaagcggaacaaccaggacattatccgcaaatcgggcgaattgagcggcagcgatagcataaaataccagagaccagacacacctcacagtcttaccgacgaggtggccgcctcagagtttagacataacgtcgacttgcgtgcctgcgtgatgggcagcaataatatctcgctgaccggcaatgatagcgatgtcaactacattaagcaaatcagcagggagcttcagaataccggcaaggatccgttgccggtgcgttacatcccgccgatcaacgatgtcctcgatgtgctcaaccagcattccaattcgacgggtggccaacagcagttgaaccaacagcaactggacgagcaacaacaggccatcgatatagccactggacgcaacacagtggattctccgccgacgaccggctctgatagtgactccgatgacggtgaacccctcaactttgacctgcgccatcatcgcactagcaaaagcggcagcaatgccagcatcaccaccaacaacaacaacagcaacaacaaaaacaacaaattgaagaacaacagcaacggcatgctgcacatgatgcacatcaccgatcacagctacacgcgctgcaacgatatggtggacgatggtcccaatttggagaccccctcagattccgatgaggaaatcgatgtcgtttcatatacggacaagaagctacccacaaatccctcgtgccacttgatgggcgccctacagttccagatggcccataagatctcgattgatcacatgaagcaaaaaccgcgctacaataacttcaatctgccgtacacaccggccagcagcagtccagtgaaatcggtggccaactcgcgttatccatcaccgtcgagcacaccgtatcagaactgctcctccgcttcgccgtcctactcgccgctatccgtggactcttcaaatgtcagctcgagcagctccagttccagttcgcagtcaagcttcaccacctccagttcgaacaagggacgcaaacgatccagtctgaaggatccaggcttgttgatctcctccagcagcgtttatctgccgggagtcaataacaaagtgacgcatagctccatgatgagcaaaaagagtcgtggcaagaaggtggttggcacctcgtctggcaatacatctccgatatcgtctggccaggatgtggatgccatggatcgtaattggcagcggcgcagtggtggaattgccactagcacaagctccaacagcagtgtccatcggaaggactttgttttgggctttgatgaggccgatacgatcgagaagcgcaatcagcacaatgatatggagcgtcagcgacgcattggactcaagaacctctttgaggctctaaagaaacagattcccacaattagggacaaggagcgggctcccaaggtaaatatcctgcgagaggcggccaagctatgcatccagctgacccaggaggagaaggagcttagtatgcagcgccagcttttgtcgctgcagctgaagcaacgtcaggacactctggccagttaccaaatggagttgaacgaatcgcgctcggttagtggatagtgttgtctcatactatcggcttaaagcggcggcgtagggctaggataacccccaatgtatatgcaagatttgtatatcctcctacttttttttttttgcaatttactttgatttagcttcgatcctttcttgacattaagccctaaatatgatttttttctggagaacttcaatatcagttagtaggttatgtttaacgatttgcttgcgctttttccgcttttttttttgtttttttaccataccataccatac

SEQ ID NO: 5748 - protein, 706 aa, DROSOPHILA
MDDQLFSNISIFDMDNDLYDMDKLLSSSTIQSDLEKIEDMESVFQDYDLEEDMKPEIRNIDCMWPAMSSCLTSGNGNGIESGNSAASSYSETGAVSLAMVSGSTNLYSAYQRSQTTDNTQSNQQHVVNSAENMPVIIKKELADLDYTVCQKRLRLSGGDKKSQIQDEVHLIPPGGSLLRKRNNQDIIRKSGELSGSDSIKYQRPDTPHSLTDEVAASEFRHNVDLRACVMGSNNISLTGNDSDVNYIKQISRELQNTGKDPLPVRYIPPINDVLDVLNQHSNSTGGQQQLNQQQLDEQQQAIDIATGRNTVDSPPTTGSDSDSDDGEPLNFDLRHHRTSKSGSNASITTNNNNSNNKNNKLKNNSNGMLHMMHITDHSYTRCNDMVDDGPNLETPSDSDEEIDVVSYTDKKLPTNPSCHLMGALQFQMAHKISIDHMKQKPRYNNFNLPYTPASSSPVKSVANSRYPSPSSTPYQNCSSASPSYSPLSVDSSNVSSSSSSSSSQSSFTTSSSNKGRKRSSLKDPGLLISSSSVYLPGVNNKVTHSSMMSKKSRGKKVVGTSSGNTSPISSGQDVDAMDRNWQRRSGGIATSTSSNSSVHRKDFVLGFDEADTIEKRNQHNDMERQRRIGLKNLFEALKKQIPTIRDKERAPKVNILREAAKLCIQLTQEEKELSMQRQLLSLQLKQRQDTLASYQMELNESRSVSG

SEQ ID NO: 5749 - DNA, 3905 bp, DROSOPHILA
gccaaataatttgtttcattttgtttccttccatcaaatttattagcattcgcgagagcctattgttgccacagtttcgattgattattttgaattcgctatatcgaattaacaaaaatggtatctttgcacaataaaaagtgctgataaagagacttttcatacaaaaaaaaacccttaatctaattcatggaatttagatttgagtttatactttgttaactaaaatgcttacaatgtagtttcccgtgtcgcaccaaaatcaccttgcccattttagcacacttcaagaacttgttcttcagaatcaaaaccatcaattaagttgtgaataaatcccccatttattaaagtctctcatttggtattgatcatcatttggacttttgaattgagtgcttattcatacatattagaaaaaatgtccaatactagagttcttaattaggcaaatggtattttgattaacgaaaaagctagtcaaccaactgaatcattaacatcgtgtaaactgaactgatcgtatatgttaggcaagtgtttcaatagaacttcgatttgggaatgactgcattctttgcgaatcgcaactcttaattaagccgctggagataaaataaattctttggcattcattagtactgttgttaagcggggcgagaactcgcacgggaatgtaaaattaaattaagtcatgtgcgcatttttatatgccattcaatttggcaaccaattaacagctaacaaatagatgtcactgtctacattcattatttattttaatcgccataacaagtcatagttttgagcaacttgtttgaaaccgaaagcgaaagttatcagattttggactctgttcgccaattgaacatctaagaacaaagtcttgataataaacgttttttccatttccataatagtactttagaaatcatgagccatagaaatagtattcaagtaggcgttttaactgactgaaaagtataagctaaaataactaatgaagagaaagcgagttgctagtcgtttgttcaacattttccttttggcggttctgtgctatctaatattgacttccctttctgatcggaataaaacgattagtatacgcgaagtgccccagatctacatcaatgaggaagatgaactctttgtcaacaccacgggatgtcgaataagtgcgacgaaaccactttcgctttacgccctgtccttcatggagcccattgaacccgttttatgtagaatggagcagctgatggtcgccgagacaattggagacaggaattacttggtgcgtaacatatcgcggcatgggattctctcctggaggcaagtctcctgcatttatcgggaatttgtgagggtcgatgacgcacacaacaagtacatatccttgaagtttttcaagcttaccgatcgaacgagataccttgaggtgggtactggtctgcaacatattcgcacttggtgctgggtagactttggcaggatcatattccacgacgttatgtacttcctgccaccactgcctcaggctacgaacagatcaacagaacatcagaagagaaagctgtccgtgatgatcctgggagtagattctatctcgcacatgcattacatgcgttactttcaccgcgtggccgacttcatcgagcacctgccccacaccgaattctggggctataatcgcgtcgccttgaacacctatcccaacttgatccctctggtaagcggacttagtgtttcggagatggaggcgtcttgctaccatgacgaattgaactttgacaaatgtaacttcttgtggaatgaattcaagagggcgggatacagcaccatctttgcagaggacacggataccgctgggctgtttatctacagaaagaggggctttcagaagcagcccaccgatatttacatgcgacctctgatgactgagattgaatctcattcgctctaccgcaccacattcgatttaaagtgcacgggtcatcgtctctatggagagttttactatgatttcgtctccaagctgattccgcacatggaacgtcagttatttttctcatttttgtggaatatgcatggcatacacgacgtctttccatatgccaagtttgtggataaggattacctgagtattttgacaaggttacacgaaaagggagtgatggagaacacattgatactgtttatgggtgatcacggcctgagatttgataaattcgcccgaactgctccgggacaacatgaaatgtcgcagccactcttgatcgccatttatcccgaatggctgaaaaggagatttccgctcgccatgtcgaattttgaacgaaacgccagaagtctcattaccacattcgatctgcacgaaaccctcaaagatgtgatccatcttgatcggctgaccgatgccaatgtgaggaatagaacgctttatttgacgaacgagcgcggaatcagtctgtttttacccattcctcagaatcgaaattgtaaaaccgctgagataaagcaacactattgcctctgcaacgaacttaaatcggtatccacccacgaaagtgccattcaagaggctgccagtttcgcagtggacaggatcaacgagctcatcaagccatatcctcagtgtagagttctaagcctacaatcggttcgcactgcctaccgcgccaaaagtagtacctaccgaggaaactacagggtgtcccaggttatggtccgcttgaaaacgacgcccggcgatggaaacttcgatgccaccgttctcataacaatgcttaatggcgaaaagacggatatgaagctgggaggtcctgtgaccaggacagacagatacgcccatcaggcgtactgcgttcaaaactatcgcattgaaatgtactgctattgcttatgatcgatcaattataagttgtaaaaagaaattggatacatttttctcaacaatgttacttttgacaaaatagatactagttctcagctttaacttttggtagattacttatagtatggtactctgcatatatttgccaaaaactaattatgcaatgccacgtgaaaaaaatcagcgtcttttgtttaaacgccaagcaagagtcacgaacaaagcgagatgaaagtgaattttgcgacgtaccggactcgtatgaatcaaaagacttagaaaacgaacgcgaaacagctgacgaaattgaagagagactcacagaaagtacaatgcgacaattgatggcgccgacagagttgggcacaaaaaccagtagtttttatatagtatgtgaatatctagttttttttttaggggaatccgtgatgtcgtgcatgtttttacaaaaagaaaaaaaggaaaacaaataacagcagcttatgtgttgaagcttttttagcgtgcaggtgttggttagtgattctttttttttttgtttttttttttaccaacattccgttcgccgccaacgcatagtgtttgtgtacatatagctttatttatatatatgcatatatagctgatcggagtcagctgaggcttcctctctctctgagtctcctcagctggctacgtttttggttaaccggatctgattctgtttgccatctcagacctggaaattaatgctgtttgttgccttcactgttgctagctagccattcatcactcactcactcactcagtggctctcgaaaatggtacgaaatatattcatgaagtgtagctgtagctgtagctgccaacgtcatatatctgccatggtttgctcaagacgaaggcggcgaacctacgaatccggcaaacaaaccatctttttctgtccacatcggagttatggtcggattcaaaatgccgaaatgtgatgccgtaacagaagctgtattaaaaacaatagaacaaataaact

SEQ ID NO: 5750 - DNA, 1905 bp, DROSOPHILA
atgaagagaaagcgagttgctagtcgtttgttcaacattttccttttggcggttctgtgctatctaatattgacttccctttctgatcggaataaaacgattagtatacgcgaagtgccccagatctacatcaatgaggaagatgaactctttgtcaacaccacgggatgtcgaataagtgcgacgaaaccactttcgctttacgccctgtccttcatggagcccattgaacccgttttatgtagaatggagcagctgatggtcgccgagacaattggagacaggaattacttggtgcgtaacatatcgcggcatgggattctctcctggaggcaagtctcctgcatttatcgggaatttgtgagggtcgatgacgcacacaacaagtacatatccttgaagtttttcaagcttaccgatcgaacgagataccttgaggtgggtactggtctgcaacatattcgcacttggtgctgggtagactttggcaggatcatattccacgacgttatgtacttcctgccaccactgcctcaggctacgaacagatcaacagaacatcagaagagaaagctgtccgtgatgatcctgggagtagattctatctcgcacatgcattacatgcgttactttcaccgcgtggccgacttcatcgagcacctgccccacaccgaattctggggctataatcgcgtcgccttgaacacctatcccaacttgatccctctggtaagcggacttagtgtttcggagatggaggcgtcttgctaccatgacgaattgaactttgacaaatgtaacttcttgtggaatgaattcaagagggcgggatacagcaccatctttgcagaggacacggataccgctgggctgtttatctacagaaagaggggctttcagaagcagcccaccgatatttacatgcgacctctgatgactgagattgaatctcattcgctctaccgcaccacattcgatttaaagtgcacgggtcatcgtctctatggagagttttactatgatttcgtctccaagctgattccgcacatggaacgtcagttatttttctcatttttgtggaatatgcatggcatacacgacgtctttccatatgccaagtttgtggataaggattacctgagtattttgacaaggttacacgaaaagggagtgatggagaacacattgatactgtttatgggtgatcacggcctgagatttgataaattcgcccgaactgctccgggacaacatgaaatgtcgcagccactcttgatcgccatttatcccgaatggctgaaaaggagatttccgctcgccatgtcgaattttgaacgaaacgccagaagtctcattaccacattcgatctgcacgaaaccctcaaagatgtgatccatcttgatcggctgaccgatgccaatgtgaggaatagaacgctttatttgacgaacgagcgcggaatcagtctgtttttacccattcctcagaatcgaaattgtaaaaccgctgagataaagcaacactattgcctctgcaacgaacttaaatcggtatccacccacgaaagtgccattcaagaggctgccagtttcgcagtggacaggatcaacgagctcatcaagccatatcctcagtgtagagttctaagcctacaatcggttcgcactgcctaccgcgccaaaagtagtacctaccgaggaaactacagggtgtcccaggttatggtccgcttgaaaacgacgcccggcgatggaaacttcgatgccaccgttctcataacaatgcttaatggcgaaaagacggatatgaagctgggaggtcctgtgaccaggacagacagatacgcccatcaggcgtactgcgttcaaaactatcgcattgaaatgtactgctattgcttatga

SEQ ID NO: 5751 - protein, 634 aa, DROSOPHILA
MKRKRVASRLFNIFLLAVLCYLILTSLSDRNKTISIREVPQIYINEEDELFVNTTGCRISATKPLSLYALSFMEPIEPVLCRMEQLMVAETIGDRNYLVRNISRHGILSWRQVSCIYREFVRVDDAHNKYISLKFFKLTDRTRYLEVGTGLQHIRTWCWVDFGRIIFHDVMYFLPPLPQATNRSTEHQKRKLSVMILGVDSISHMHYMRYFHRVADFIEHLPHTEFWGYNRVALNTYPNLIPLVSGLSVSEMEASCYHDELNFDKCNFLWNEFKRAGYSTIFAEDTDTAGLFIYRKRGFQKQPTDIYMRPLMTEIESHSLYRTTFDLKCTGHRLYGEFYYDFVSKLIPHMERQLFFSFLWNMHGIHDVFPYAKFVDKDYLSILTRLHEKGVMENTLILFMGDHGLRFDKFARTAPGQHEMSQPLLIAIYPEWLKRRFPLAMSNFERNARSLITTFDLHETLKDVIHLDRLTDANVRNRTLYLTNERGISLFLPIPQNRNCKTAEIKQHYCLCNELKSVSTHESAIQEAASFAVDRINELIKPYPQCRVLSLQSVRTAYRAKSSTYRGNYRVSQVMVRLKTTPGDGNFDATVLITMLNGEKTDMKLGGPVTRTDRYAHQAYCVQNYRIEMYCYCL

SEQ ID NO: 5752 - DNA, 7300 bp, DROSOPHILA
aaggtggaattattaattgcgcttggcaaaataaaaaggtgcgattaattggggtttgtttattgtgtttgcggatttgaatagtatactttaatgatatcactcaagtgtgtaaactataccctacttagacccgaatttattcatgtaatgtcatttccctaattgccgaacaccggtaggaattctttacaaatgtccgggtgtgtccgggcgattagtcgaattcgattaaaattcacgcgatattgtgttgtaattagtttttatgatgacaagtcgaatgtagataatttctcaaaattgctcagcaacttgttagaaccattagattgttgaaatctatgcaaattggcgccattccgcatgtccagccatttgtgccattgggtgcgattcaatctccgccatctaaacctcaagtcaatcaattttccagtcaattaaaaaccaaactaagtcaaccaaaaacagtgtccaatatcacaatctacaatttatcggatcacttagactttgctgaaaaccggctactgtccgcagacaagtttatgcgtaaattatttatctaatatgaagtgaacatttaaggcattctcacatctaaactagctcaaattaatgcgtcacttacgcgcataaaaccgaactaaattacgcaaataaatgcaaaattattagaaaagtcgtaacaccttggcttttattactgacaacagcgaattgcagtgaataagatatgtaggttaaggtgttgtttcaattttggaagtacatattattacatagctgaacgatctgtaatccgcttgaaagttaattgcacttgttggataaagttaacaatttagatccatggcggtgacctcagacatggtttaaataggtaacaaacgaaaacgactgttctacggttcccacactcaaatagattaaatgtaattgctctaaggcagttaactttaatatgtgtcacctgcgttcctatctttcagagaaaatgtatagtcagaccgagaaacagcgctacgatggctggtacaataacctggcccatcccgactggggatccgtgggtaagtggacagactggaatttccgccaggccgttgacaactttcgaaaaagggtgaattgagccgattacgccggtaattagaatcagttagttgtgagcttggcctggatttgcatatcgatcggattgcaattaccatattggccaggtgtgtgaaggctaacccttgcccctgctcattgttttccagatagccacctggtgcgcaaggcgccgccctcctattcggatggggtttacgcaatggcaggtgccaaccggccctcgacccgcaggctcagccggctgtttatgcgcggaaaggacggcctggggtcaaagttcaaccggactgcactactggccttcttcggccagctggtggccaacgagatagtgatggcctcggagtccggctgccccatcgagatgcaccgcatcgagatcgagaagtgtgacgagatgtacgaccgggagtgccgtggcgacaagtacataccattccatcgggcggcctacgatcgcgataccgggcagagcccgaatgcgccgagggagcaggtgggttacggtaccatcggatgggtctaaccgccactactgaaatcatactccgcagataaatcaaatgactgcttggattgatggcagtttcatttacagcacctccgaggcctggctcaacgccatgcgctccttccacaatggcaccctgctcaccgagaaggatgggaagcttccggtgcggaacaccatgcgggtgccgctcttcaacaatccggtgccgagtgtcatgaagatgctcagtccggagcggctgtttcgtaagtattgtcagttaaagtagtagtgccatgtaaaatatctccatttgtttccagttcttggtgatcctcgaaccaatcagaacccggcgatcctctccttcgccattctctttctgcgttggcacaacaccctggcccagcgaatcaagcgggtgcatccggattggagcgatgaggatatctatcagcgagcacgccacacggtgattgccagtcttcagaatgtgatagtctacgagtacctgcccgccttcctgggcacctcgttgccaccttacgagggctacaagcaggacatacatcctggcattggccacatcttccaggcggccgcctttcggttcggccacacgatgattccgccgggaatttacaggcgagatggtcagtgcaactttaaggaaacgcccatgggttacccggcggtcagactctgctccacttggtgggactccagcgtgagtttcagattcttttaataagatattatttcttaaagactctatttatcagggattttttgccgacaccagcgtagaggaggtactaatgggcttggcttcgcaaatatccgaacgtgaggatccggttctctgttcagatgtgcgggacaaacttttcggaccgatggaattcacacgccgggatctgggtgctctcaacataatgcggggtcgggacaatggtctgccagattacaataccgcgagggagtcttatggactgaaacggcacaagacctggacggacatcaatcctccgttgttcgaaacgcagccggaactcttggagtaagtgcaactcggtttaaaccattttatttaatttaatcaccaatcttgttcagcatgctgaaggaggcgtacgataacaagctggatgatgtggatgtttatgtgggtggtatgctggaatcctacggtcaaccgggcgagttcttcacggccgtaatcaaggagcagttccagcgactacgagatgccgatagattttggttcgagaacgagcgcaacggcatatttactcccgaggagatcgctgagctacgcaagatcaccctgtgggacatcatagtgaacagcacggatgtgaaggaggaggagatccaaaaggatgtgttcatgtggcgcactggcgatccctgtccgcagccaatgcagctgaatgccaccgaactggagccgtgcacttacttggagggctacgactacttctccggctcggagctgatgtttatctacgtttgtgtcttccttggattcgtgcccatattgtgtgccggagccggttactgtgtggtcaagctgcagaacagcaagcgccgtcggctgaagatccgtcaggaggcattgagggcaccgcagcacaagggatccgtggacaagatgctggccagggagtggctgcacgccaaccacaagagactggtcacggttaaattcggaccagaggcggccatctacacggtggataggaagggcgagaagttgcgcacctttagtttgaagcacatcgacgtggtcagtgtggaggagtcggccacgaaccacatcaagaagaaaccttacatcctgctgcgcgtgcccagcgatcatgatctggtgctcgagctggaatcttacggagcacgcaggaagtttgtaaagaagctggaggatttcctactgctccacaagaaggagatgactttgatggaggtcaacagggacataatgttggcgcgggcggagacacgggagcggcgccaaaagcgactggagtacttcttccgtgaggcttacgccctgacctttggcctgagacccggagaacgacgaaggcgttcagatgcctccagtgatggcgaggtgatgaccgtgatgcggaccagtctttccaaggcggaattcgccgccgctctgggcatgaagcccaacgacatgtttgtgcgcaagatgttcaacattgtggacaaggatcaggatggcaggattagcttccaggagttcctggagaccgtagttcttttctcccgcggcaaaacggacgacaagctgcgcataatctttgatatgtgtgataatgatcggaatggcgtcatcgataagggcgaactgagcgagatgatgcgatcgctggtggagattgcgaggaccacgagcctgggtgatgaccaggtcacggaactgatcgatggcatgtttcaggatgtggggctggagcacaagaaccatctgacctaccaggacttcaaactgatgatgaaggagtacaagggtgactttgtggccatcggactggactgcaagggagccaagcagaacttcctggacacctcgacgaacgtggcccggatgacttcgttcaacatcgaaccgatgcaggacaagccgcgtcactggttgctggccaaatgggatgcctacatcacgttcctcgaggagaaccggcagaacatcttctatctgttcctcttctacgtggtcaccatagttctgttcgttgagcgcttcatccactactcgttcatggcggagcacaccgatctgcggcacattatgggcgtaggcattgccatcaccaggggatctgccgcatcgctgtccttctgctactccctgctgctgctgaccatgtctcggaatctgatcaccaagctgaaggagttccccattcaacagtacattcccctggactcgcacatacagttccacaagattgccgcctgcacggcgctcttcttttccgtgctgcacacggtgggccacatagtgaacttctatcacgtgtccacccaatcgcacgagaacctgcgctgcctgacccgcgaagtgcacttcgcctccgactacaagccggatatcaccttctggctcttccagacggtcaccggcaccacaggcgtcatgttgttcatcatcatgtgcatcatcttcgtgttcgctcatcctacgatccgcaagaaggcctacaacttcttctggaacatgcacaccctgtacatcggattgtatcttctgagtctgatccacggattggctcgactgactggaccaccacgcttctggatgttcttcctgggccccggaatcgtgtacacgctggataagatcgtctcgctgcgcaccaagtacatggcgctggacgtgatcgacacagatctgctgccctccgacgtgatcaagatcaagttctatcggccaccgaatctaaaatacctttctggccaatgggtgcggttgtcctgtaccgccttccggccgcacgagatgcacagcttcacgctgacctcggcgccgcacgagaacttcctcagctgccacatcaaggcccaaggtccgtggacgtggaagctgcgcaattacttcgatccctgcaactacaatccggaggaccagcccaagatccgcatcgagggaccatttggtggtggcaaccaggactggtacaagttcgaggtggctgtgatggtgggcggcggcatcggggtcactccatacgcctccattctcaacgacctggtctttggcaccagtaccaatcgatactcgggcgtggcctgcaagaaggtgtacttcctgtggatctgcccatcgcacaagcactttgagtggttcatcgacgtcctgcgcgatgtggagaagaaggatgtgaccaatgtgctggagatacacatattcatcacgcagttctttcacaagttcgatctgcgaacaacaatgctggtatgtgcctacacacattatagtgattgaacttaaagaattattctggctttcagtacatctgtgagaaccacttccagcgactgtcgaagacctcgatattcacgggtctcaaggcggtgaatcactttggtcgcccagatatgtccagcttcttgaagttcgtgcaaaagaagcactcatacgtgagtacttgggcttttgcatttctctaaagaaacccaccattcataacatttgattgcaggtctccaagataggagtcttctcctgcggtcctcgtccgctgaccaagagcgtgatgtctgcctgtgatgaagtgaacaagacgcgcaagttgccctatttcatccaccacttcgagaactttggataggtgtgctgcgttggatgtattcaaatttttcacctgccaccttccctgtcttccccctgcctgtgtatccccctcaacgaaagcgaattctaaccgtaagattcattcattagttttagcgaattcggctgctcaaacatacaacttaaatcttctttaatcgtaggctaatcgtacaatcataatttagtcaagttttgctaagtgcgttaagaaaatgtatcccattgtaacaaaatcactgcaatcatagcaagaacaacaaaaaggcctctatatgtatatgtgtatttattgaaaatatgatttgttatcagtttttgtaaaccgttcacattatttattaaaaatttacaattatctttatacatgaaagggaaactgcgtttgaagggtgggttaagaacaatatttcaaatttcttatagattggcgccatcaagcagttgcaagcagttgcgcttttaacactaatagtactagattttatttaccaccccattttgccaataagtgcgcaggaccataaaataacagctgttcaaggatgtttaccagtaaacaagcaggccataacaaacatttcatattggcagaaagacttgaaaatataaaaggagccagttgctaaaatattttaagactgaaaacaatggagtcgatagtgcacattctttcggatgcgtaccatacaacgctcacgcgggagcttttcatcaacgaatgggctcaggaacggttcgaactctctgaatttttcggctgtacatagcgattaagagaaatccatttttcagcttgagttttggaaggcccctttggcattttctcagcgttcatttggagccaaacaaaatgttcaacatcattatccccctatgtggtatcttcagtcaggaaatcctcgtgcatctcttcacggcatttaccctgattagcacactgaactccttcgaaaaatggtaagtaggaaagacaagtcctgaattcaattctccttaataatcctttattctggactcgatttgccggacaggatatatccggagacgcgtcctttgtggtttctgcgagagcagtttgccaataatgtggttgtaaagaaaccggcggtggccttggaaagtcatcagctgagctgcgagatgaccggtgggctgccctgcgcccactcaatgaccttcacggtgttcgtactcatcctggcctcgttcttcttcgttcactgctgggatcgctttgctgcgttgcgctcttccttctgccgctgcataatgtacctgctgatcattggaatggtggtctgtatgtggctgagtcgcctctacctggccac

SEQ ID NO: 5753 - DNA, 4764 bp, DROSOPHILA
atgtatagtcagaccgagaaacagcgctacgatggctggtacaataacctggcccatcccgactggggatccgtggatagccacctggtgcgcaaggcgccgccctcctattcggatggggtttacgcaatggcaggtgccaaccggccctcgacccgcaggctcagccggctgtttatgcgcggaaaggacggcctggggtcaaagttcaaccggactgcactactggccttcttcggccagctggtggccaacgagatagtgatggcctcggagtccggctgccccatcgagatgcaccgcatcgagatcgagaagtgtgacgagatgtacgaccgggagtgccgtggcgacaagtacataccattccatcgggcggcctacgatcgcgataccgggcagagcccgaatgcgccgagggagcagataaatcaaatgactgcttggattgatggcagtttcatttacagcacctccgaggcctggctcaacgccatgcgctccttccacaatggcaccctgctcaccgagaaggatgggaagcttccggtgcggaacaccatgcgggtgccgctcttcaacaatccggtgccgagtgtcatgaagatgctcagtccggagcggctgtttcttcttggtgatcctcgaaccaatcagaacccggcgatcctctccttcgccattctctttctgcgttggcacaacaccctggcccagcgaatcaagcgggtgcatccggattggagcgatgaggatatctatcagcgagcacgccacacggtgattgccagtcttcagaatgtgatagtctacgagtacctgcccgccttcctgggcacctcgttgccaccttacgagggctacaagcaggacatacatcctggcattggccacatcttccaggcggccgcctttcggttcggccacacgatgattccgccgggaatttacaggcgagatggtcagtgcaactttaaggaaacgcccatgggttacccggcggtcagactctgctccacttggtgggactccagcggattttttgccgacaccagcgtagaggaggtactaatgggcttggcttcgcaaatatccgaacgtgaggatccggttctctgttcagatgtgcgggacaaacttttcggaccgatggaattcacacgccgggatctgggtgctctcaacataatgcggggtcgggacaatggtctgccagattacaataccgcgagggagtcttatggactgaaacggcacaagacctggacggacatcaatcctccgttgttcgaaacgcagccggaactcttggacatgctgaaggaggcgtacgataacaagctggatgatgtggatgtttatgtgggtggtatgctggaatcctacggtcaaccgggcgagttcttcacggccgtaatcaaggagcagttccagcgactacgagatgccgatagattttggttcgagaacgagcgcaacggcatatttactcccgaggagatcgctgagctacgcaagatcaccctgtgggacatcatagtgaacagcacggatgtgaaggaggaggagatccaaaaggatgtgttcatgtggcgcactggcgatccctgtccgcagccaatgcagctgaatgccaccgaactggagccgtgcacttacttggagggctacgactacttctccggctcggagctgatgtttatctacgtttgtgtcttccttggattcgtgcccatattgtgtgccggagccggttactgtgtggtcaagctgcagaacagcaagcgccgtcggctgaagatccgtcaggaggcattgagggcaccgcagcacaagggatccgtggacaagatgctggccagggagtggctgcacgccaaccacaagagactggtcacggttaaattcggaccagaggcggccatctacacggtggataggaagggcgagaagttgcgcacctttagtttgaagcacatcgacgtggtcagtgtggaggagtcggccacgaaccacatcaagaagaaaccttacatcctgctgcgcgtgcccagcgatcatgatctggtgctcgagctggaatcttacggagcacgcaggaagtttgtaaagaagctggaggatttcctactgctccacaagaaggagatgactttgatggaggtcaacagggacataatgttggcgcgggcggagacacgggagcggcgccaaaagcgactggagtacttcttccgtgaggcttacgccctgacctttggcctgagacccggagaacgacgaaggcgttcagatgcctccagtgatggcgaggtgatgaccgtgatgcggaccagtctttccaaggcggaattcgccgccgctctgggcatgaagcccaacgacatgtttgtgcgcaagatgttcaacattgtggacaaggatcaggatggcaggattagcttccaggagttcctggagaccgtagttcttttctcccgcggcaaaacggacgacaagctgcgcataatctttgatatgtgtgataatgatcggaatggcgtcatcgataagggcgaactgagcgagatgatgcgatcgctggtggagattgcgaggaccacgagcctgggtgatgaccaggtcacggaactgatcgatggcatgtttcaggatgtggggctggagcacaagaaccatctgacctaccaggacttcaaactgatgatgaaggagtacaagggtgactttgtggccatcggactggactgcaagggagccaagcagaacttcctggacacctcgacgaacgtggcccggatgacttcgttcaacatcgaaccgatgcaggacaagccgcgtcactggttgctggccaaatgggatgcctacatcacgttcctcgaggagaaccggcagaacatcttctatctgttcctcttctacgtggtcaccatagttctgttcgttgagcgcttcatccactactcgttcatggcggagcacaccgatctgcggcacattatgggcgtaggcattgccatcaccaggggatctgccgcatcgctgtccttctgctactccctgctgctgctgaccatgtctcggaatctgatcaccaagctgaaggagttccccattcaacagtacattcccctggactcgcacatacagttccacaagattgccgcctgcacggcgctcttcttttccgtgctgcacacggtgggccacatagtgaacttctatcacgtgtccacccaatcgcacgagaacctgcgctgcctgacccgcgaagtgcacttcgcctccgactacaagccggatatcaccttctggctcttccagacggtcaccggcaccacaggcgtcatgttgttcatcatcatgtgcatcatcttcgtgttcgctcatcctacgatccgcaagaaggcctacaacttcttctggaacatgcacaccctgtacatcggattgtatcttctgagtctgatccacggattggctcgactgactggaccaccacgcttctggatgttcttcctgggccccggaatcgtgtacacgctggataagatcgtctcgctgcgcaccaagtacatggcgctggacgtgatcgacacagatctgctgccctccgacgtgatcaagatcaagttctatcggccaccgaatctaaaatacctttctggccaatgggtgcggttgtcctgtaccgccttccggccgcacgagatgcacagcttcacgctgacctcggcgccgcacgagaacttcctcagctgccacatcaaggcccaaggtccgtggacgtggaagctgcgcaattacttcgatccctgcaactacaatccggaggaccagcccaagatccgcatcgagggaccatttggtggtggcaaccaggactggtacaagttcgaggtggctgtgatggtgggcggcggcatcggggtcactccatacgcctccattctcaacgacctggtctttggcaccagtaccaatcgatactcgggcgtggcctgcaagaaggtgtacttcctgtggatctgcccatcgcacaagcactttgagtggttcatcgacgtcctgcgcgatgtggagaagaaggatgtgaccaatgtgctggagatacacatattcatcacgcagttctttcacaagttcgatctgcgaacaacaatgctgtacatctgtgagaaccacttccagcgactgtcgaagacctcgatattcacgggtctcaaggcggtgaatcactttggtcgcccagatatgtccagcttcttgaagttcgtgcaaaagaagcactcatacgtctccaagataggagtcttctcctgcggtcctcgtccgctgaccaagagcgtgatgtctgcctgtgatgaagtgaacaagacgcgcaagttgccctatttcatccaccacttcgagaactttggataggtgtgctgcgttggatgtattcaaatttttcacctgccaccttccctgtcttccccctgcctgtgtatccccctcaacgaaagcgaattctaaccgtaagattcattcattagttttagcgaattcggctgctcaaacatacaacttaaatcttctttaatcgtaggctaatcgtacaatcataatttagtcaagttttgctaagtgcgttaagaaaatgtatcccattgtaacaaaatcactgcaatcatagcaagaacaacaaaaaggcctctatatgtatatgtgtatttattgaaaatatgatttgttatcagtttttgtaaaccgttcaca

SEQ ID NO: 5754 - protein, 1475 aa, DROSOPHILA
MYSQTEKQRYDGWYNNLAHPDWGSVDSHLVRKAPPSYSDGVYAMAGANRPSTRRLSRLFMRGKDGLGSKFNRTALLAFFGQLVANEIVMASESGCPIEMHRIEIEKCDEMYDRECRGDKYIPFHRAAYDRDTGQSPNAPREQINQMTAWIDGSFIYSTSEAWLNAMRSFHNGTLLTEKDGKLPVRNTMRVPLFNNPVPSVMKMLSPERLFLLGDPRTNQNPAILSFAILFLRWHNTLAQRIKRVHPDWSDEDIYQRARHTVIASLQNVIVYEYLPAFLGTSLPPYEGYKQDIHPGIGHIFQAAAFRFGHTMIPPGIYRRDGQCNFKETPMGYPAVRLCSTWWDSSGFFADTSVEEVLMGLASQISEREDPVLCSDVRDKLFGPMEFTRRDLGALNIMRGRDNGLPDYNTARESYGLKRHKTWTDINPPLFETQPELLDMLKEAYDNKLDDVDVYVGGMLESYGQPGEFFTAVIKEQFQRLRDADRFWFENERNGIFTPEEIAELRKITLWDIIVNSTDVKEEEIQKDVFMWRTGDPCPQPMQLNATELEPCTYLEGYDYFSGSELMFIYVCVFLGFVPILCAGAGYCVVKLQNSKRRRLKIRQEALRAPQHKGSVDKMLAREWLHANHKRLVTVKFGPEAAIYTVDRKGEKLRTFSLKHIDVVSVEESATNHIKKKPYILLRVPSDHDLVLELESYGARRKFVKKLEDFLLLHKKEMTLMEVNRDIMLARAETRERRQKRLEYFFREAYALTFGLRPGERRRRSDASSDGEVMTVMRTSLSKAEFAAALGMKPNDMFVRKMFNIVDKDQDGRISFQEFLETVVLFSRGKTDDKLRIIFDMCDNDRNGVIDKGELSEMMRSLVEIARTTSLGDDQVTELIDGMFQDVGLEHKNHLTYQDFKLMMKEYKGDFVAIGLDCKGAKQNFLDTSTNVARMTSFNIEPMQDKPRHWLLAKWDAYITFLEENRQNIFYLFLFYVVTIVLFVERFIHYSFMAEHTDLRHIMGVGIAITRGSAASLSFCYSLLLLTMSRNLITKLKEFPIQQYIPLDSHIQFHKIAACTALFFSVLHTVGHIVNFYHVSTQSHENLRCLTREVHFASDYKPDITFWLFQTVTGTTGVMLFIIMCIIFVFAHPTIRKKAYNFFWNMHTLYIGLYLLSLIHGLARLTGPPRFWMFFLGPGIVYTLDKIVSLRTKYMALDVIDTDLLPSDVIKIKFYRPPNLKYLSGQWVRLSCTAFRPHEMHSFTLTSAPHENFLSCHIKAQGPWTWKLRNYFDPCNYNPEDQPKIRIEGPFGGGNQDWYKFEVAVMVGGGIGVTPYASILNDLVFGTSTNRYSGVACKKVYFLWICPSHKHFEWFIDVLRDVEKKDVTNVLEIHIFITQFFHKFDLRTTMLYICENHFQRLSKTSIFTGLKAVNHFGRPDMSSFLKFVQKKHSYVSKIGVFSCGPRPLTKSVMSACDEVNKTRKLPYFIHHFENFG

SEQ ID NO: 5755 - DNA, 3687 bp, DROSOPHILA
cagcgacagatcaggcggttccggcggacggtcatatacaccatatacgacgtgaaggtctgctccagcatcatacaagacatagccgccaagttgtccccgtacttcagctcaaccccgaactcgtactacagcgactccctctttttcctgtccctcggccttcacaggatcgccgacaggagcctaaacagagccattctgctagattgtgatatagtcttccgatccgatgtccgactgctgttcaatgagttcgacaactttctgccgcaccagctgtacggactggcaccggaactgacccccgtctaccgccacatcctctaccgctatcgcgtgcgctatccgaagaccagtttcgggaatccctactatccgatcaacaacgaagggggcaaccaacatagccgtgtccaccacggctatccaggcctgaactccggcgtggtcctgctgctcctaaaccgcatccgtaactcaaagtcctacctggagaagctgacccactcggaggtgcacaccctggtcgccaagtactccttcaagggccacctcggcgaccaggacttcttcaccctgctgggatacgagtacccgaacttaatctacagactggactgcatttggaaccgccagctgtgcacctggtggaaggatcacggatactcacagatattcgacgcttatttccggtgcgagggcaatattaaaatgtaccatggcaactgtaatacgcgaattccagaataaataaaattgttataggaatattaaattaattaaatgcagggtatttttatttggtataactattgtaatggaacgttatgtaatatacggtgaatttaatcttagtttatagaccattataaatggtgatatataaaaatgaaatttaaagataaaagacagcccacacctatcaccatttaaaatatcaaaacgatgtaagaatgttatcgataggcgagaagcaacagagtgggaatatgccgcacagggtgtttcgtgtgaatgatttcgcctcttgtttcttatctttaaccttcatttctggctccgtttggctatgaattaggagcagtcccgaataatcagtcgagcatacgtagttaacgatggcgccgaatgcagcagtaccagtggagcgatatgagcctgagaacatcgggatcaacgccattctcctggggccgccgggttccggcaaaggaacgcaggtgggtcaaaattacataatgatgtgttttttgtgacacggacgccatgtagtctataaataaatacaacgtgttcaagtgcgcggtttttgtttgcaaataatcggtgaagctcgttaattctcttggaagagaattaaaactggtgaagttatataagacgatgtgtacatggaaatgtatatgtatgtatctacgtgccaagtatgtacatatgcgtcaagcagtgtctttctcttgaccctgaatcaaatcaaagccttggcgagatgtggcgaattaagtggaacacctttaggcaatcgattgggtattatgcagaccatctattaaaaggctaccagaacattcctggcctcaagaaatgcatcttatctagccgattggttaccttgcttaccttccgatatggtgctaaattgattaattgattagctctaactgaaacttatcaatgtttttaattatgcccatttcaggctcccctgctgaaggagaagttctgcgtgtgccacctgtcgaccggcgacatgctgcgggcggagatttcatccggttcgaagctgggagccgagttgaagaaggtcatggatgccggcaaactggtctccgacgacctggtcgtggacatgatcgactccaacctggacaagcccgagtgcaagaatggattcctcctggacggattccccaggactgtcgttcaagctgagaaggtagccacacgtgtgaagcactttggactttaggttataatccgttcgaaacgcactttgcagctcgacacattgctggacaagaggaaaaccaacttggatgctgtcatcgagtttgccatcgacgacagtctgttggtgaggcgcatcactggccgcttgatccaccaggccagcgggcgttcgtatcacgaagagtttgcccctccaaagaagccaatgacggacgatgtaagtatctctataggacgctatccaagaactctaaatgaaagcagaccttgtgtacttgcaggtcactggagagcccctaatccgtcgcagcgatgacaacgccgaggctctgaagaagcgactggaagcatatcacaagcagacaaagccgctggtcgactactacggcctgaggggtctgcacttcaaggtggacgccgccaagaagtccagcgacgtcttctccaccatcgactctatattccaacgcaagcgtcctgcccagatccagttatgatttgttcctgcgcaatgatcaactactgataactgcctcctgacaatttatttcgagacacacacaacgtttaagcctaaagttatagttgcatccggaaatcctgaacaaacgaaattacctttgcaggtcgactactttccttgtacagatttctaaagtgtatgtgtttgttactttttacatttcactatttgtaactacaatacaatttaataaaaaaatcgaaggaaacaagtacattttacgagacatgactgctttaaactgggctgcgttcgaatgagggatggacgacgccaagttcaaacttccacacaattgttttccggaaagcttctggaatatgatgcggctgactcagtttcgaatcgaggtttttagcgtttgatggatagctactaattgttccgagaactatttattattgcaatcaactttaaagcgactattaaagggtcatgttgcacgggtctcaagtgtaacaaatgagaaattgctaatggaaatcgctaatgagatcgttaaatctggtaaacaaataacatatcgccaagttagcccgtccatcgtggctgcgaatctctcgcagagcgactttcgatcgccgtttagtactcagacgtcacctgcctaatgttaatgtcaatttaagtgtgtataactatcgcacatatattatataaatttataacgacgattgactaatcactgggttgacttttcagcaatagcgattttcgcttcaaagtctaaagtgtgtgcaatcccgtatggatacgagccgagctcgaacacaggctcacagcgcgcggtttgtgttgtgtattacacttgaagttcaatcccaggtaaaaagtgggcccaggtataaaagcccacttcatagaaacatttctcagttagttccagcagctgaattgcttcacatctattcgctccgagtcgccccacaagtcgagccccattgtaagaccaccgcaccgtttatagtttttggagccgatcggctcggctggtcgactggtggctggtagtagtccacacactcatggacgcagccagacgggcaaccagtttcattgtgtataaacagtgacatcttttcagacagcgaatgtgtttcagatacgcatacaaagtggcctgcctggctgtgcattaatttgcatacaaatcccataagtccacagatacattttgcgaatgcagtcgcgctcgatggctagtaaaaata

SEQ ID NO: 5756 - DNA, 1072 bp, DROSOPHILA
cagggtgtttcgtgtgaatgatttcgcctcttgtttcttatctttaaccttcatttctggctccgtttggctatgaattaggagcagtcccgaataatcagtcgagcatacgtagttaacgatggcgccgaatgcagcagtaccagtggagcgatatgagcctgagaacatcgggatcaacgccattctcctggggccgccgggttccggcaaaggaacgcagttctgcgtgtgccacctgtcgaccggcgacatgctgcgggcggagatttcatccggttcgaagctgggagccgagttgaagaaggtcatggatgccggcaaactggtctccgacgacctggtcgtggacatgatcgactccaacctggacaagcccgagtgcaagaatggattcctcctggacggattccccaggactgtcgttcaagctgagaaggtagccacacgtctcgacacattgctggacaagaggaaaaccaacttggatgctgtcatcgagtttgccatcgacgacagtctgttggtgaggcgcatcactggccgcttgatccaccaggccagcgggcgttcgtatcacgaagagtttgcccctccaaagaagccaatgacggacgatgtcactggagagcccctaatccgtcgcagcgatgacaacgccgaggctctgaagaagcgactggaagcatatcacaagcagacaaagccgctggtcgactactacggcctgaggggtctgcacttcaaggtggacgccgccaagaagtccagcgacgtcttctccaccatcgactctatattccaacgcaagcgtcctgcccagatccagttatgatttgttcctgcgcaatgatcaactactgataactgcctcctgacaatttatttcgagacacacacaacgtttaagcctaaagttatagttgcatccggaaatcctgaacaaacgaaattacctttgcaggtcgactactttccttgtacagatttctaaagtgtatgtgtttgttactttttacatttcactatttgtaactacaatacaatttaataaaaaaatcgaaggaaacaa

SEQ ID NO: 5757 - protein, 237 aa, DROSOPHILA
MAPNAAVPVERYEPENIGINAILLGPPGSGKGTQFCVCHLSTGDMLRAEISSGSKLGAELKKVMDAGKLVSDDLVVDMIDSNLDKPECKNGFLLDGFPRTVVQAEKVATRLDTLLDKRKTNLDAVIEFAIDDSLLVRRITGRLIHQASGRSYHEEFAPPKKPMTDDVTGEPLIRRSDDNAEALKKRLEAYHKQTKPLVDYYGLRGLHFKVDAAKKSSDVFSTIDSIFQRKRPAQIQL

SEQ ID NO: 5758 - DNA, 2797 bp, DROSOPHILA
tccttatttcagtgttatttgaacaggaattccgagaaaacgataagccccaatatcatttcataaccaaaatgaaatactaagtttgcagaaatcgcgccattatctaatcgtacacacttattttgttttaataatatatgtatatgaattataagatatgtacatatgtatatgatatggatgaccaatatagctcatattcttttggggctttctcgcttttttaacccaattaacgcggtagcaaccccctgaaatgtgtggataaatccaacaacaaccaccaaacaccaagcaggtagcagtgtttattgatattcccgggcatttctgacccactacgaattcacctccacttccaactccaacttcaacacgcccactactccagcagaaagaacgaccaataaaaaaaagtgggcggggtcagaggtcgcacatgcaagctcttcgtggggttaacttcgcttacttaacccctgggcaccccccaaaaaaataccaacaccatgagccataagcttaaagagctcactcttcagattgccttttgaatatttacaaactctgtgaggttttcttttcccactcggtgccaaaataaacttcctcgtgtttcgaaaactaaaattcaagctataatttaataagaggtaggcattagttaaacgtgtttaacagcaagtaacttgtgcacattttcccaattagtgacaattagcacatgcctttagttgcaaatagacgaagtggtcaaaggcaggttttcaactcgcttataatgattctaaggactttatgaagttgaaggcaattaaaggtaagtacgtcgcactttggggatgaaaactagttttagaatgcaattactgaggcgagtttaatggttcattgaatagttttaaactcaatttcgatgatacatctgatagtagtgtgatatcagctctttgagctcccaaaatatgaaaactagtctatgtaacgtgggtggtacttacacttccaggatgcgatcgcccttcttgatgcccgccttctcggccgccccattctcaaggacggcgctcacgtgctgaaggggggcgtacagctcgccgttgatcgagcgcagttgacccccctcggaaacttggccgcgcacattgaagccgaagcccgtttccgttttgtaaatggtgacgacacggggtccattcgctgtggtcacgcctacgccgacgcccatgacgaccgcgccgcccccaccgccgcccgatgatgcggtgactacggcgctggcgggggttggggttgggaggggatggttttcgccaacgatgctcattgcgccggtcgttcgctctcgctcgcactcagtggtgatggctgctcttctgcctccaccgcacacccctctccacctcctcctcctcctacgctactgctgctgctgctgcccctttccgacgttcctgctttccgactcacagcagcgctgtgttgtttgcacaatatcttttgttgtgttatggttatttcgctcttttattttgcgtaatgttttctgcaacttcttttcggcacacacacagcacaacacacacacacacgtatagagacaggcaccgccacttttactttttacgctcctccctcaatccgcttcaccgctgtgaactgcgctccaccgaaactcctctggctgctctttcgttcgcacacacatacacgcgcacacaccgaaaaaaaatttattatttatgtggcttattttatttaacacacgcctgtgttttcgctccttattttattttcgcgctgcgcatttttgttccgttagttggtctgttctctgtgttgatactcgtagcgcagacttccgataacattgagtgtatcgcagtaactgccagtcgatgtatcgctggcgtcctatcgcactggcggaccgattacgactgagccatcgggagagcagatcagctggccgttaatcgatagctatcggtgctgtgcaacactactatcgtcggccgcgagcgtgacgaacgcaaatatgagcagccactttttagtatttttgtgatattttgtgatttaaaaataccatacggtattttaatccgttatttttcaaacccactcgacataataccgaatgcaaattcgaaaatttaacggtacaattttaattcaaaaaattcgtgcaacgcatatttgcatcaattaaatcgaggaaaatttaatgataatgcaaataattacaataaaataatattaaaatgtttgataaatagtctttcattaaaagctaagaaaaacttgttctaaaacgttccaaagccaaagacgttaacttatatcccccaaattagatggtcttaaatgatgcaatgggtaaaagtaaaaggctttggaggagcgactgcgaccgcgagaagggatcattcatacatggggcatggtcgccgacgcttttgtatgggcagggggagtggagggaagctgaaagggtatgccttatgagaaaatatatggtttttgcgatgtaccctagatatttccacccaacacatgaaacttgaatgcaatgctcctctttttattttcgtttgatttcgtattgatttcagtttgctttgctgctgctctgttgattctgttgtggtggttgtcttatgaaatttgttaaatacgcagactctaaattgtacatcattatttaataatgaagcagttctaaaacactgcccgccgcctaactactagtaaacgttttctctttgtgtttttcgtttttgttatatctcaa

SEQ ID NO: 5759 - DNA, 797 bp, DROSOPHILA
aataaaataaggagcgaaaacacaggcgtgtgttaaataaaataagccacataaataataaattttttttcggtgtgtgcgcgtgtatgtgtgtgcgaacgaaagagcagccagaggagtttcggtggagcgcagttcacagcggtgaagcggattgagggaggagcgtaaaaagtaaaagtggcggtgcctgtctctatacgtgtgtgtgtgtgttgtgctgtgtgtgtgccgaaaagaagttgcagaaaacattacgcaaaataaaagagcgaaataaccataacacaacaaaagatattgtgcaaacaacacagcgctgctgtgagtcggaaagcaggaacgtcggaaaggggcagcagcagcagcagtagcgtaggaggaggaggaggtggagaggggtgtgcggtggaggcagaagagcagccatcaccactgagtgcgagcgagagcgaacgaccggcgcaatgagcatcgttggcgaaaaccatcccctcccaaccccaacccccgccagcgccgtagtcaccgcatcatcgggcggcggtgggggcggcgcggtcgtcatgggcgtcggcgtaggcgtgaccacagcgaatggaccccgtgtcgtcaccatttacaaaacggaaacgggcttcggcttcaatgtgcgcggccaagtttccgaggggggtcaactgcgctcgatcaacggcgagctgtacgccccccttcagcacgtgagcgccgtccttgagaatggggcggccgagaaggcgggcatcaagaagggcgatcgcatcctggaagtgtaa

SEQ ID NO: 5760 - protein, 109 aa, DROSOPHILA
MSIVGENHPLPTPTPASAVVTASSGGGGGGAVVMGVGVGVTTANGPRVVTIYKTETGFGFNVRGQVSEGGQLRSINGELYAPLQHVSAVLENGAAEKAGIKKGDRILEV

SEQ ID NO: 5761 - DNA, 5037 bp, DROSOPHILA
tttggccacaccgatagttttcagccaagaaatcaagaaatactgcgagaagaagatgcaccagttgaacctgaaacctattattattaactatagttttcttgtatacctccaaatgctaagttccaatttggttttcatctaactctttttatatcgaaatacttgaagtaggggaacattgtgctttagtgttaccaaggcaaatttaaaatttgtatatctggtatatagccaatcgaccgacagccttacccttttgcacattcatggaaaaccctaagagcccagtaagtaaccttttcaaatcagtgaaaagtggaataaaatattgatccgttgcagatggccaacgatcccggtaagccggaaaagtccaggccacgcttctgcaccctgttgaaccatgaggtcgtcgatcccaaagagttcatggtgcacttcgccaagcggaggaagaatgaaatcataatccagggtcaggtctgcggttggtgctacaacatagattacttaaaagatgaaaaaacaaagttcaagaagaagcggcccaatctttcggatgcgagcgtcaccaagcagcgcgccacctcaccacgaagaggagcaattgcagacaaccctcgtcaattgggtggtgatcagcactgctcggaaaagagttttgcgccctctggtgacgaaatacccacaccacgtgatttgaaggacaaacctggtgaccttgcctaaggtccgatactgaagtggccataaagcgatttcaatttgtaacatgttttcattgatataatccaataaatgatacgccggctgtcttgaaatctcatttaataactttcagtagtaacatccggccccttggcagccaggccggcgtgcgatcttctcgaggtcgtgcacgaggtgcgaaatgtggcatccaacgtaaacaaaatctgtggccagataacaaatataataatatgcatttactgatggcccacatctacaatagatcttaagtattcccacaattggaaggaaagaacattcatttattatctgcttatttataaaccttgaacttatgatataacagaatttagaaagaataaatgaggatgaaatatacatatacatttctccatatgattatgtaaatggtgtaatagattaataatgccataggataggaaaatcttcgcctcgcttgtgttcttgtataaaaaaaaaaatagaatgtataactaaagattgtgttttcaaatgaatgatgtaccccatcagcgtccaaaataattgccccagtaaccgccaatcactcaagtccgtccgccagtcagtcagcattccatcaggatgtatctccgggctcttggctttgcaactgggtcaccgggtgattttggctaaaaatggtcttggttagcgcaaatgcatttcgccggcaaatgacgcgtgcttctcgtctgacagccattgtagttgctgtctgtgggtcggggtagatggtggtgcagatggtggtgcaaggaccctcggctgctccgccagtggcactcgaacaactgacagccggcaaaaccctaattgaaatggagctgaagaatgggtttgcagccggagtgaagttggaccgtgagctgtggcgtaattagaaaatgaacatggaaatatttgcgtgtgaaagccgcagacggcagataaatgcaatttgttcgaggcgaagctgaaattgcacgcaagtcagttggtttgggtatgtgccaagtttttgcaataatatgacgcacctagtgtattcctttgaagactatacgttctgctggactttgcccacggcctccttgagaaactcgaggtcggactcgttctccttgaccacatcttcgaatatttcccattgggaggttctggaggagtcagcattttccttttggaagcacttgatcaagtggcgaccctcctgcaacagagtgaaggcacttgggtattcgatgatgacgatgacgcccaggaacaaggccacatcaatgatgcgctccaaatagcggtggcagatccatttctaaggccaaataataaatattaatattaatattatttagtgaggcaacttactggttccgtgtttttcttggcgtagaagtcgttcataaaaaaggccgtcacatattgcatagtggaaaactccgccagctgtttaaggaaatacaatttacaatcctttgacttgagctctaaatcaacttttcattgtacaaaccgtttccaaatggctaataacaagaaccgactgattgacatgggtggccaggtccaattggaaggccaccaatagaatgtccttgatgttgtgatcagtatgatcccaccaaatgttggaagtatcaccggctcgacgaatagacgttcgcactttggtcaaatcaaagtcttcgagggtctagtggatatagatataggctcaataacttaagaacccactgcaattagatgtgctcaccttggaacgcagctggtctttgtcaccaaggcaaggtaccagaaaccacactgtgtactcctgggccgtgatgtactcgaatatgtggcgcacctggttgaagacctccagtatgaattctcgctccgtcagacgcactgcctcgttgacgtgcaggcatgttttggccaacttgcccatcatatcgtttggtttgatcgggttactttcgaacagctttacaaaggtctcgaacgggctgtcggggtctctgcagcaaacatgttggttagtcctcaataaatgggaatacttacggagtggctcgacctacttgaactttttgaaggcgtctccatcgccgtcgctttggatgacctttagccagttcccggagcatttctcgtgcagctgcctcagaagattgatcgagtgctggggccgcacaaagaacttggcgtggaactccgggagggggcacgattggcgtttgccgccgtttatataatatgaaacggtgtccagggcgaagtacatatcgaatcttcgctctacgttcacatagatgcctttggaatgtacgttccttgtggacgcctccttggccttgcgctccgctcgctgcaccattcgctccagggcctgtttcgaggtggacggtccctcatccaggtcgctctccgactctggctccgtctcctcttccttattcacgggatacactttgaagctcatcgagacacttcccttgccaattttcagctgcggaatcgtttcaaggctatctgaatccggataggtcagggagcagaggagtaggatggcctgggccacgggcgttacagccggtaggtcctttgccatatccgtgaccaaactgtagatgataatgtgtacattgtccgctttcgagaagtttatctccacttcatcgcagcccaagcagttgttaattttcaactaaacaatcatatacatttaatacgtgctttctgttctcaatatgaatacaactcactttgataaatttaatgacgtggtttttatttagcgtagtttctccgtacatttttcataaattttttcagtcattcgataacttaacaactttttcgcttacttcagtgaaggtaagtgctctaaaattccttgatgacgctaagttatcgacgctcgattaaatcgactcagaaagttagtgctataaaatgtcccacagaagtcaaaacgggcttttgaaattttagcaattcttgtaagtggatttaaactgatagttgatttcgaaaaatttagcttgtttcaaaccctagaaaataaaaccatgaccatccagctggtcccagtccactaatatgttgctccccatccatttgtatgccctttttccccgcctaacgcatatttatgaatcagcaaggaatcaacattattatgagccatgggaagtgagccattaaattggcttggccaggccaacagactggatgcataaaattaggattaacggctttctaagtgccatcaaaagcccaactgtcgtaattcccaaatgcacgcactgagcaacaattagtacgaaactccgtcctggtcacttttcaaagaggcttatttcgttggacagtacggaatgatattaaatttgagcaaacggcaaacaaaggcgacagaaataaaccaagattgtgattttcttttaatttttatgacgctgtcgtcgtagttttcgtcggatattttacgactcgaacgaaaaggagaatacttccttatcgccccgcctttgatgaggcccaaggaaatcatttatatttctgggcttctttctggccaattttatgccttttgcatttttaatgatgattgccatttcagcattttcttccctgggatttacgaaccgtggggaccacacgtcacgaatttaattgcgatttaatagtccaagtgatcgccaaaaacttttgtgcactcgacaattctgattccgatgttctgatgtatgtgtggtcgctggggaaatgtggagactcggggattccatggcagctcgtaaagccagcgaaattattgcaattccagcagacagcgccgatccatccgaatggccatgcaattagattaccagccttgggccacgtgattcctcctccgacctgggctcttcctttcgagagtagaggatccagtccagtagtcgttgtggctttatcgccagcataaatttgcgcagataaaagcgcgaaaagagcgctgctcatgtccacacagcattcttggagaagaatcgcggatcgaggggactggggaattccctccacttgcaatgtccagaaattatagcaatttgcttgtcaaattgttgccgacttggccaataaatcgttggctttatgggccgctctgcgtcgccaggtgatcgcgatagagttgttttagaaataaattcgccaaaaaggcgattctgctggctccgcttagtggttcgtaaacttgtaaaatgtgcaatttggcggccggcttttacttaaagtcgatcgttttccttatttttacctgcctgattt

SEQ ID NO: 5762 - DNA, 2672 bp, DROSOPHILA
gttgctcagtgcgtgcatttgggaattacgacagttgggcttttgatggcacttagaaagccgttaatcctaattttatgcatccagtctgttggcctggccaagccaatttaatggctcacttcccatggctcataataatgttgattccttgctgattcataaatatgcgttaggcggggaaaaagggcatacaaatggatggggagcaacatattagtggactgggaccagctggatggtcatggttttattttctagggtttgaaacaagctaaatttttcgaaatcaactatcagtttaaatccacttacaagaattgctaaaatttcaaaagcccgttttgacttctgtgggacattttatagcactaactttctgagtcgatttaatcgagcgtcgataacttagcgtcatcaaggaattttagagcacttaccttcactgaagtaagcgaaaaagttgttaagttatcgaatgactgaaaaaatttatgaaaaatgtacggagaaactacgctaaataaaaaccacgtcattaaatttatcaaattgaaaattaacaactgcttgggctgcgatgaagtggagataaacttctcgaaagcggacaatgtacacattatcatctacagtttggtcacggatatggcaaaggacctaccggctgtaacgcccgtggcccaggccatcctactcctctgctccctgacctatccggattcagatagccttgaaacgattccgcagctgaaaattggcaagggaagtgtctcgatgagcttcaaagtgtatcccgtgaataaggaagaggagacggagccagagtcggagagcgacctggatgagggaccgtccacctcgaaacaggccctggagcgaatggtgcagcgagcggagcgcaaggccaaggaggcgtccacaaggaacgtacattccaaaggcatctatgtgaacgtagagcgaagattcgatatgtacttcgccctggacaccgtttcatattatataaacggcggcaaacgccaatcgtgccccctcccggagttccacgccaagttctttgtgcggccccagcactcgatcaatcttctgaggcagctgcacgagaaatgctccgggaactggctaaaggtcatccaaagcgacggcgatggagacgccttcaaaaagttcaaagaccccgacagcccgttcgagacctttgtaaagctgttcgaaagtaacccgatcaaaccaaacgatatgatgggcaagttggccaaaacatgcctgcacgtcaacgaggcagtgcgtctgacggagcgagaattcatactggaggtcttcaaccaggtgcgccacatattcgagtacatcacggcccaggagtacacagtgtggtttctggtaccttgccttggtgacaaagaccagctgcgttccaagaccctcgaagactttgatttgaccaaagtgcgaacgtctattcgtcgagccggtgatacttccaacatttggtgggatcatactgatcacaacatcaaggacattctattggtggccttccaattggacctggccacccatgtcaatcagtcggttcttgttattagccatttggaaacgctggcggagttttccactatgcaatatgtgacggccttttttatgaacgacttctacgccaagaaaaacacggaaccaaaatggatctgccaccgctatttggagcgcatcattgatgtggccttgttcctgggcgtcatcgtcatcatcgaatacccaagtgccttcactctgttgcaggagggtcgccacttgatcaagtgcttccaaaaggaaaatgctgactcctccagaacctcccaatgggaaatattcgaagatgtggtcaaggagaacgagtccgacctcgagtttctcaaggaggccgtgggcaaagtccagcagaacgtatagtcttcaaaggaatacactagcttcgcctcgaacaaattgcatttatctgccgtctgcggctttcacacgcaaatatttccatgttcattttctaattacgccacagctcacggtccaacttcactccggctgcaaacccattcttcagctccatttcaattagggttttgccggctgtcagttgttcgagtgccactggcggagcagccgagggtccttgcaccaccatctgcaccaccatctaccccgacccacagacagcaactacaatggctgtcagacgagaagcacgcgtcatttgccggcgaaatgcatttgcgctaaccaagaccatttttagccaaaatcacccggtgacccagttgcaaagccaagagcccggagatacatcctgatggaatgctgactgactggcggacggacttgagtgattggcggttactggggcaattattttggacgctgatggggtacatcattcatttgaaaacacaatctttagttatacattctatttttttttttatacaagaacacaagcgaggcgaagattttcctatcctatggcattattaatctattacaccatttacataatcatatggagaaatgtatatgtatatttcatcctcatttattctttctaaattctgttatatcataagttcaaggtttataaataagcagataataaatgaatgttctttccttccaattgtgggaatacttaa

SEQ ID NO: 5763 - protein, 479 aa, DROSOPHILA
MYGETTLNKNHVIKFIKLKINNCLGCDEVEINFSKADNVHIIIYSLVTDMAKDLPAVTPVAQAILLLCSLTYPDSDSLETIPQLKIGKGSVSMSFKVYPVNKEEETEPESESDLDEGPSTSKQALERMVQRAERKAKEASTRNVHSKGIYVNVERRFDMYFALDTVSYYINGGKRQSCPLPEFHAKFFVRPQHSINLLRQLHEKCSGNWLKVIQSDGDGDAFKKFKDPDSPFETFVKLFESNPIKPNDMMGKLAKTCLHVNEAVRLTEREFILEVFNQVRHIFEYITAQEYTVWFLVPCLGDKDQLRSKTLEDFDLTKVRTSIRRAGDTSNIWWDHTDHNIKDILLVAFQLDLATHVNQSVLVISHLETLAEFSTMQYVTAFFMNDFYAKKNTEPKWICHRYLERIIDVALFLGVIVIIEYPSAFTLLQEGRHLIKCFQKENADSSRTSQWEIFEDVVKENESDLEFLKEAVGKVQQNV

SEQ ID NO: 5764 - DNA, 11334 bp, DROSOPHILA
tagccgaagtgaaagctgtacgtggctaaatcggaaatggataaatgaatgaattcccatgctcaccgccaactttcgttgttggacagcctccgcctttgtgttggccaagttgaccaaatcagcatttgctgttgccaacagagaaaacaatcgaatgacgaactttagtcataaattatgctactttactgtgacatcacttcagctctttactaagcaagcgaaaactcttatccatttccaggaacaaatttaaaaatgcttagaatatcattttcgttacaattatttatttattcagctttttaattttgtactttattgctcacgtattttacaaaactacatctctcacataggctgttttaattaataaaacttataataggtcaacatttatttatttttgaaaagtttacaaagaatttatgcctcaataaatttacaacacaaaaatgtttctaagtgttacagaaacaaagacaaaagagaatgctatagtcgaattacccgactatcagataccccttacactcagctagtgtgaatgcgaacgcgaaacatcatcatttatatgggatatcgatagatattgggaaataaaatgaaaataaaaaatgtaaaaatcgaagcaaagtgtggttgtgaccggtttggcggcaacatgggtcaacaaacttgcgctgagtcattgtctctagaatctaaatgcttaatctcagccttctagcttttatagttcctgagacctcgacgttcatacggacagacggacatagctagatcgacacggctattgatcctgatcaagaatatatatactttatatagtcggaaacgcttccttctgcctgtcacatacttttcaacaagtctagtatacccttttactttactagtaacgggtataagaatatgtacactttcaaaggtcggtaaagcttccttatacctgtcacatacctgtcaatactgtacaacaagataaggctgatagttagttgataaactttgtttccttattaaaactagatgcgacggtagcttgatttctagagcccaccttgtaaaaattacgcactctttgggttttgctaactggcgtttcagtactacttttttttatatttaacttgttgggcttccgtggaattacgttttgacgaagtttagctggaaacaaatgatgactaacttcaaagtcttttgtattaaatacttcacagtctacttggatcattttcattttaccgttaattcccggattttctaagggaagtaccaacgacaattttgggcgataactactgttgtaacttaatgctggaagtagtgcatgatccatattaaatgaaaatacgtaaaaagtatcatcccttctctcaattttactaattacatttatttgttcgcgcatattttcaaaagatttcgtattgtttagtttttgctgtttttctggcaaaacagatgtgtaatcatttaaatcaataaacatttttcgcttttcgtgtttgatgtgtatgtcacgtttttcctcaaaataattattaaaaaattcaaaaccatttgaatcctctttttcctttgaaaaattagacacgtttaaagtgccgctaatccatttatgcaaattttgagcgagcataaagtattttgattgattggaagaaccattatgggacctgcacctgtttatacagtttcgtgtacttaaatatgttaagggtggaggttcattatatgagtaagtatgagatacatttttggtaatgttttcaaaagaattgattttgtggttgcgtataccagaatttaagaaatatagagacggttctttctgtttgcctgaaagaaatgtacttagattgtttttttctttatattcctcctctgaatcagcccatagtaaccgtcgattggacatgcttaattgttttccgacaggctcaatctcacttttaccttccaagttatttggtatgttgagatacttttgaaaatttccagcgtttagagataccacaaaagccatagcaaataatatagctacattttttttaatggttgctgtggtattatttttattgcaatgctttgcctttgatgtaaatcttccgtttttattttcgcttcgttcagatcctgaatagttatgtaaaagaccatttgcatttccagattcacgctgacaagaggtggcaagcagaaatatctgatcccgtaatgttatattttcctgcaagaataatagcaatatagttcaatagtcatcatgtattttttttagaatattcataaaaagaggcggaaaacagcaaagttaagtataaatatttaataaataaaatatataataaaataccgaatatataaatataaataaagttgttggaattacagctttttggcggtttgtaggcttgaccgaactgtatatcaatataaataaaagagacaagaagcttaggatgccggttccgatctatcgatagcttgtcattcatttggcttgccctctttcatttccgtctgccagcgagggcacactctgaaaatttcagtttctaagaacaagaacaccaagatcatcaacctgcctaaagagcacacacttagattatacgtcgtgtgtattggattattttatacctaaaggaaggtcgttaataaaaaaggcatgggataccggatgtgactcggagaatacaagaacgtaaacttttaaagaggacccgttgcgtcctgccattcaggtaacttaaaatccaatttagaaaatccatactacatgagaataataatagaataataaaggcagtgtagatgacatctgtttgaagattatttttgaagccatgtgttactaaggaagttagctccataatgttagtggttgttgttcagcgttttaaaataccgttctgacatggtgatataattgacctacaaagttgcgccaataagaagtgataacatattcaaaaatcttagggatagccgacaattaagagattcctctgtaattgcttgcatccaatttgttacaacggatctagtatacccttttactctacgtaacacgaggttgccctcagggacccatcagcggtcgatttatttgacacgcgttctgtgtgtggactggggactcagtccacgcgccaggcggactatatatgccggactcatggtgccatgtgccttgtttggtgaattggtctggtatgatggacccagctctgccatgaggcatctggtgtcctgccagaggcgaatcatgcttggatgcctaccggtaagccgtacagtgtccactgtggcaatgcaggtgcttgctggcgcaggcgattgcttgctcgattgaaagactccacgttatataagtacagaaagatctgttacggtatacacttttactctacttttaacgggtatgacaagagaaaatgctttagtagacttctctgactatcccgttactcatcaagtgaaaatgagaacgcgaaaagtttttttattcaaaagctaataaaaaactcattggcctaaaaatattcttgatcagtataaacagaagagttaataaagccttgtttgtctgtctgtccatccatatgttcgcctatcgatttaaagaaaaatagtctcccagttttaaaactattttcatgaaaatttctttctttttttgcacgacggaactgatcggatcggacaactatatcatatacatatatgccattgggataatcggaaaattgttcttattcggtatacaccagttggtcgatataaattagctaccaaatgaaaagttcaaaaattacttcccatgaaaagagaaggaaaactaaaatggagcctagaaatgcaaagtacaatttatttgatacattgcaaccacgcatgaagaacaaaaaccacgagagtactttgagaaaataacccctaccatcataagttataatcgatgaagcacaaaacatattaatcttaacagacatccctatcacaactatgtagtttgcaagaaatcagcaaacaggtgagcatttttcgtgtcttgtagtaattatgaaattgtgagtggagcatcgaattgagaaaggagaaaagtaatttcggatgtctacgaaatcccgttttacggtaccggttgtacaatttgacattatatttttttgtggaagtaaaagagcagtagttcttctaactgcgagtaaatggtaaattgttgtaaatcatggatacgatactgcatcattgagttgaaggatgcccaagcatgcccagtgaataaagggaatatctgcaagttatttgcacctcggaaacaccgaattcagaatggtgggtcgtagcagcattaaacaaataagttgccattataacagcatattttgacggaaagtaactcattgcagttaacaccgggcggaaaatttgcttcggcttgcggagttgctaactaagaggttaaatgacttttgaaacagcactagtaaagtagaggcaaccccaccatcaggagccgttgctgtagctcaggatactgaaatggtatcaatgcgagttccggaggatcaccgagcggtctaagagcagatgtaaacagggcccagttgcttgtgcgggagttgtaggaattgactgaatgactgaaagtttctatcgttaaggagattcattaagacttcctctttagaattcaatttgtataaattgtgtgtgaaatgaatttaatccagcagttttgccgccgacggcattacaagttttgtgcgctgagtctttgtttaaagaatctgtatgctgaatctcaactttctagcttttatagttcctgagatctcgacgttcatacagacagacggacatggccagatcgactctgctgttgatcctaatcaagaatgtatatactttatatggtcggaaaagcttctttctacctgttacatacatacttttcaacgaatctagtatactcctttaactgtacgagtaacgggtataaaaattgtcgaaaaacgttgacctctcatttttttttttgccgaacgggaataaaaagaagtcgacaagtcaggactacacggcgaatgccgtcgctgtttgcaggtgcagatgtttaagccgatgtgcgagagctcgcattgtcttgataaatagtgatcggtcttcagctgttgttttttctaattttttgaaagataactgacaacaaatgattgtgtaccactcagaagttactgtaaatccacatcaaatccaaatatagatccaaatcctgtcacgatctcatagacgtgactcgaagcaccgcgatcgcatttattgcgtatttcgcttattttttgcgaccaaccgacacgagccttctattgagcaattaaccattgatctgagctgttggtgaatttatccacgttttggggtgagaggaatttctgaactaactgtaaacaacacaaataacgctcgtataacaaaaagttctgagtacgtattacctaaaacatgtcaaactttacgatagtgtttttttttgacgtattgcaacaatagggttgtccattccttcttagtgtgttacataatttttaaataaataaccatttcgtattgaggttagcgaaaatcggctgtttgtggcttatcccggaataaagtaatacatataatataccttacttactggtgcgttttctcagacatgttgagatcatatgaaaattggaaggctaattaagaataagtaacctacttattatgttaagaaggaatgagattaaattaccaaatttgctttcgaatgacaagtaaaaataggtaagtttattatttaaactgaaagagagtacttacagcttttagggaatcgcattctttttcaagtttatttattcgagtctctaatgaaacaacatactcctttctttttttgcgtgataaggaagcagactctcggttcttaatcatacgttgatattttttgtagatcttatcatccattgtatgtgatggagtgctttctttcaatgattgtataaaagttgcattttttttcttaataacgatattagaaatcttagacctgacattaacatttttctttaaggttctatcaccgttacatttcactgttggcaaaagccctttgtaatcatgtgaaggtaaataaattgtccttgacaaaggtaaaactgtttttggaacttgattatctagattcagctcagtatttattggccagcttttggttaaagttgaattattccttgaagtgttatatgaattaaaacccaagtcttgggaagtttccggaagttcgttttttatatctgatagattagaaatcgtgctgttgaattctttgttggggctccgaactttagcaggttcaaaaaatggatcaaacttatctgaatcgactaagagtggatagaccgcctcttcgttagaacatccatttacatttgaacgatttaagcttcttgtgggagacgaattaggctcaggtaaatcatttctactgttggtaagatccaattgaaaattattgtcatttacatttcttttaaattcaccagaacacgctgaaggaatttgtttcaaaccagaaatcggggaactcaagctaaattctgaagttattgggtttgacgagaaatgcaatccaaaggcttctttttgaagatcaggtattaattcacttagatctaacgatgtatcattgtagaatgctgatgagttcagaatgtcgtgtacaatattattgtcgtagttattttcagtcacttctcccaacagcgataaatcgtctgaaaataaacatggcgtcatttgtcttaaagaataaaatattattaatcttaaaaatattacaggaatataagaaaatgctatagtcgggtatcccgactatcatgtacccgttactcaactaaattacaaaataacaaatagtaaaaaactgtgggcatgacagtgttgaggcatgggcaaattgttttttgtatatcggtagaaatcggccaggagaaataaaactcgaaaagagaaggtttgcagttcgatttcattcgtctctctcaaataagcatgatgtggcagccggagtacaacaggaaaatgtacttgggactctgctttactgtttgtacagctatgacatgccgctgtcagacgccagcctacccgggacgtcaatgatggaaacatttgcagatgacgtgtgtgtcacctacaggtcctgcttcgaacaagatgctcctgatggcatccaggactttgcatcaacatttgcgaaatgggcaaggcgctggaacatggtatcaatggtgacaaatcagcgaatgtgtgctcacaagccacaagcctggcaagccggaaagggagcccgcctcctaccggctgatcagtctcctcccttcaatttctaaggtgtttgagagactgattgctgtccggattgtaaggattatggaagcccgggggattacccctgagcaccagttcggttttcgtgctggccactgtactgtcgagcagctccctcgggtcgtcgagaaaattctgactgcctacgacagtaaggaatattgtaacagcctcttcattcgagaagcgtttgatcgagtgtggcatattggacttcaactaaaaatcaagcagacgctgcctgctccatatttgggattgctaaagtcgtacctggaaggaaggaggttcgctgtgcgctttcattaagcaatttccaccgagcacaaagtggcagctggtgttccacaaggtagtgtcctcggccccctgctctactgcctgtatagccacgacatgccgcagccggatgtaagcctttacggaaaatcaatgttggcgtgatgacgtgtgcgtcacctacaggtcccgatgcgagcacgacgcacccgatggtatccaggactttgcagaccggttctcggaatgggcaagacgttggaacattggcatcaatagcagtaaatccaacaacgtctgctatactttaacggagaacgccaccgcccgtctacatcgaggaagcccccgtaccacagccgaacgcagcaaagtaccttggagtgcttctggattgcagactcacatatgccaagcatgtgaccggcatcggaacgcgcctacgtgctaaggtggcgaagcactattggctactttgttcgcgcagtaaattgtcgctatccaacaagctgacaatttacaaacagatcttagcaccaaactggaagtattggtggcaaatctggggcttggtatgcgacagccaaatcaaaaggatccaggctatccaaaataaggtcgcaagactcatcaccggctgcgagtggtttgtgcgaaacaacaccctgcacagagatctgaaagtcgcaacggtatttgacgagataaagcagcactcgagtagataccatgacagcttggggcgccacagaaatcggctggctagcgctctaagcagacctcgcccaccaaggaagctcaatagaaggtaaccgaggatctcatttcccgatctcctttgacaagggtcagcagaagctgacgcttatcttaaatcctatttgttatatgtgattgttatgtaattgtagtaaaattactgtagacttgaaaaagctaactatagttagccgacgcgcccaaatgggctgaattaatagaaaagaaggacacaaaggggctccaagatttccccgtatgccttgataaataaattaattttaaaaaaaaaatcctggataggagactcaccttctcgaagcatgcgtatgcgtgcaccatttttggcttataaattcgcgaagtaaattgtcactatccaacaaggtgataatttacaagcaaattatagctccaatatggaggtacagctatcaaatctggggcttggcctgcgacagccaaatccgtcgtattcaggctccccaaagcagaatcgccaggatgattaccggctgcgattggttcgtaaggaacacaacaacaaagagctcaaactagccactgtcttcgagacaataaacatgcactctagccggtaccacgacacgttagagcggtatagaaatatcctagccaaggcactaaacaaaggtcgcccacccagaaggctccacaggtcacccttgacgagagccaggagatgatgatctcataattgttatgtagttaaatgttacttatatcatttttatttaattgttatttatatcattgttattgtaattagctaactttgtcaggaaaaaattaaatgaaaaaatttaaaatatcaaaccattgtaaacttacaagactaaaaaaatatgaaatactttcaaaactcctgcggcgacgttgtattattataattgtttattatacatacgtcgacaaaatttatcgcaaaggctgttggtgaaacgaaacaggcaataaaaatacttataaaatataaaataattcattaataaattaaaaaggatgactaaaagtgttgttcgaaaaaaatcctatttaatttaataacttaattgcagtgaataattaaaactgtcgaatgggccgctctattgtctgaaaaacagcttaaacagctgttaactgtttactaaacattccgatagcaaaaatttgagaatacaagagtaacttacgcaggaatcgaaaaaaattacactgttgcaagatacatatggtattatcaacttatcaaagaaagggacaaagtttttgtaaggttgtcctgtttaaactgcacgaaataagctatcactttacgtatggcaatgcgtcagcaaattataagatttattgatagacagtaatgataaggacgcgaatttttaattattaagaaatcttttaattttatatattgttgtttattattcaaatatcgtatgtcgtacttcccttttatgtttttctcttaacctttgttcaatcgatttcttttaatacatacattaatatacattttattttttattccatttcgctgattctaaagcagaaaaaattagggtgccagccactcatttcacattttacacatattcatacatatgatgaatttgataatagatattagggcaagactttttcaacttgctttgcttgtcactgacgagaaggaaacttactgtataaattatattcattgatgtccatagctaatcggccatagaattcgaattgaatatgtttactgaaccagaattgattaccacagcaaacgtcagcaaatacacgacgttttggcacattaaaatattaattatcaatatatactataatagtaatttcacattttaggcttatatagtaagtgtacttttcacatccgtcggagcggttgagacttcctaagaaatatcgatataaaaaagtagtttcaaaactatcacaaaaaactattaatcaccatctactgaggacggattttaccttcttagctttatatccactagttgtagagtacaatgcactatgggtaaaaagccgggaattttggtattaattacaattataaagatagcgacttgattttttttatgtttataattaagatttaaatagaatttcggattttgtttattttttgatctgaccacgccttcatctccgcccaccaaaaaaatccttgaatataaagtgaaaaatgtatttatatacatatgaaagcgggtttcaagggagatggatggtgggcgaaggattggcgtgggagcgaagtgaagacacaagatacaaaaaccaattttatgaaataaaagtcaaaatttttttatatttgttatccatccttgcttctgctacttttgaataaggatggaaaatatcgcatcctttatgcttattgagcggttttatattattatattgctactttgtaaatccatgttcaattgggaaagctaaagcgttttcagcacttattttaatagaatgatttgtctcaattttcttttttatattatgtatgttttcaattccctttttttcaatataaaggccgtttctgcctgcttcgttgttttccggaaaatgaagcagcatgtacgagaagtggagttgaatgcccttattctgcagcctgcttatttggtaatcttttgctctttagtctcaaagttctcttgtatattttccacaatataactgttaatagcgtctgcatcgcgtttgttgttgctccatttttccattattaaaaataaactccaaatttgctatgaagacaatgtttacgctgcacatttgttcaactttttccgaccattttcgcaattcaaagcacctctg

SEQ ID NO: 5765 - DNA, 2414 bp, DROSOPHILA
aaattactattatagtatatattgataattaatattttaatgtgccaaaacgtcgtgtatttgctgacgtttgctgtggtaatcaattctggttcagtaaacatattcaattcgaattctatggccgattagctatggacatcaatgaatataatttatacataagattaataatattttattctttaagacaaatgacgccatgtttattttcagacgatttatcgctgttgggagaagtgactgaaaataactacgacaataatattgtacacgacattctgaactcatcagcattctacaatgatacatcgttagatctaagtgaattaatacctgatcttcaaaaagaagcctttggattgcatttctcgtcaaacccaataacttcagaatttagcttgagttccccgatttctggtttgaaacaaattccttcagcgtgttctggtgaatttaaaagaaatgtaaatgacaataattttcaattggatcttaccaacagtagaaatgatttacctgagcctaattcgtctcccacaagaagcttaaatcgttcaaatgtaaatggatgttctaacgaagaggcggtctatccactcttagtcgattcagataagtttgatccattttttgaacctgctaaagttcggagccccaacaaagaattcaacagcacgatttctaatctatcagatataaaaaacgaacttccggaaacttcccaagacttgggttttaattcatataacacttcaaggaataattcaactttaaccaaaagctggccaataaatactgagctgaatctagataatcaagttccaaaaacagttttacctttgtcaaggacaatttatttaccttcacatgattacaaagggcttttgccaacagtgaaatgtaacggtgatagaaccttaaagaaaaatgttaatgtcaggtctaagatttctaatatcgttattaagaaaaaaaatgcaacttttatacaatcattgaaagaaagcactccatcacatacaatggatgataagatctacaaaaaatatcaacgtatgattaagaaccgagagtctgcttccttatcacgcaaaaaaagaaaggagtatgttgtttcattagagactcgaataaataaacttgaaaaagaatgcgattccctaaaagctgaaaatataacattacgggatcagatatttctgcttgccacctcttgtcagcgtgaatctggaaatgcaaatggtcttttacataactattcaggatctgaacgaagcgaaaataaaaacggaagatttacatcaaaggcaaagcattgcaataaaaataataccacagcaaccattaaaaaaaatgtagctatattatttgctatggcttttgtggtatctctaaacgctggaaattttcaaaagtatctcaacataccaaataacttggaaggtaaaagtgagattgagcctgtcggaaaacaattaagcatgtccaatcgacggttactatgggctgattcagaggaggaatataaagaaaaaaacaatctaagtacatttctttcaggcaaacagaaagaaccgtctctatatttcttaaattctggtatacgcaaccacaaaatcaattcttttgaaaacattaccaaaaatgtatctcatacttactcatataatgaacctccacccttaacatatttaagtacacgaaactgtataaacaggtgcaggtcccataatggttcttccaatcaatcaaaatactttatgctcgctcaaaatttgcataaatggattagcggcactttaaacgtgtctaatttttcaaaggaaaaagaggattcaaatggttttgaattttttaataattattttgaggaaaaacgtgacatacacatcaaacacgaaaagcgaaaaatgtttattgatttaaatgattacacatctgttttgccagaaaaacagcaaaaactaaacaatacgaaatcttttgaaaatatgcgcgaacaaataaatgtaattagtaaaattgagagaagggatgatactttttacgtattttcatttaatatggatcatgcactacttccagcattaagttacaacagtagttatcgcccaaaattgtcgttggtacttcccttagaaaatccgggaattaacggtaaaatgaaaatgatccaagtagactgtgaagtatttaatacaaaagactttgaagttagtcatcatttgtttccagctaaacttcgtcaaaacgtaattccacggaagcccaacaagttaaatataaaaaaaagtagtactgaaacgccagttagcaaaacccaaagagtgcgtaatttttacaaggtgggctctagaaatcaagctaccgtcgcatctagttttaataaggaaacaaagtttatcaactaa

SEQ ID NO: 5766 - protein, 739 aa, DROSOPHILA
MTPCLFSDDLSLLGEVTENNYDNNIVHDILNSSAFYNDTSLDLSELIPDLQKEAFGLHFSSNPITSEFSLSSPISGLKQIPSACSGEFKRNVNDNNFQLDLTNSRNDLPEPNSSPTRSLNRSNVNGCSNEEAVYPLLVDSDKFDPFFEPAKVRSPNKEFNSTISNLSDIKNELPETSQDLGFNSYNTSRNNSTLTKSWPINTELNLDNQVPKTVLPLSRTIYLPSHDYKGLLPTVKCNGDRTLKKNVNVRSKISNIVIKKKNATFIQSLKESTPSHTMDDKIYKKYQRMIKNRESASLSRKKRKEYVVSLETRINKLEKECDSLKAENITLRDQIFLLATSCQRESGNANGLLHNYSGSERSENKNGRFTSKAKHCNKNNTTATIKKNVAILFAMAFVVSLNAGNFQKYLNIPNNLEGKSEIEPVGKQLSMSNRRLLWADSEEEYKEKNNLSTFLSGKQKEPSLYFLNSGIRNHKINSFENITKNVSHTYSYNEPPPLTYLSTRNCINRCRSHNGSSNQSKYFMLAQNLHKWISGTLNVSNFSKEKEDSNGFEFFNNYFEEKRDIHIKHEKRKMFIDLNDYTSVLPEKQQKLNNTKSFENMREQINVISKIERRDDTFYVFSFNMDHALLPALSYNSSYRPKLSLVLPLENPGINGKMKMIQVDCEVFNTKDFEVSHHLFPAKLRQNVIPRKPNKLNIKKSSTETPVSKTQRVRNFYKVGSRNQATVASSFNKETKFIN

SEQ ID NO: 5767 - DNA, 25891 bp, DROSOPHILA
acactgcaagagatgcggggcacttctgagtcccatattcatatgcacaaatgtgcattgctggcattatcagtagaatgcaatttcgggaaattttccatcgcatcacgagacaatgaacgtaagagagaaatggagcctcaaagagggagggagagagagagcttgagtgaacgagcgagcgacaatcgcgagataacggctgccttatcagcaatgccgaccgccccatcaccccacccaaaacgcccaaccaccacccaccgccgccgttccctttcctccatcgtcgagaatttcgagttcagagcagcgcgaccgaaatgaaaagaaacaatttaaattccaaatgtataaaataggtaaactatggcttttatttattaatattgacgggggcacaaaggcggtcacctcaatagtgaataacatgttttttataatgaatacttttcaaattgttattaatatgcaatgacgtcttaaatgtttcactgcagctgaactttattcttttcattaaaacagtcacccgttattaaaaataaatagattaagttttatattattaaatttgtaagtattgaaacaattccttttttattttatacgaattatcatttagttggggttaatatcccttaaagagagaaatttgtatgctttaagatttaaaatatctattgcatttatagctatagctataacttctcttatttcacgcagaaaatactcaaataaaacatatcgatttggcataccccactaattttttggccccaagtgtgtgagagtgtgtgagacgaagcgcgccacaaacataaaaaagcggtgaagtgagcggttgtggaacgtgagtggatgctaagagcaagctctcacatacgcggacataggtcgcacacacacacgcacagaccgcctttttgcgccgccgaaacgaacacttttacgaaggcgacggcgaatcagtttcagttgtcagttcgcatccaactagaaagcagttaacgagtagtctgtgttttttcgcttgcggttaaaagccacgaggtcgttcatcgttcatcgttttccttttcaacttcaagcaaagcaaatataaaccaatgcaaaaaacgcagtgatcttttgaggcccaaatcgtttggggccgaacaccgttgattctaaaacgcaaatgtagaaacaaatcaagaaagtggaaaataaatatgtttcgctttcaaaacatgtgaatgtgccgaactcaaaactgaaacgtagaaggaacgcgttcgttttttacatacgacaatcgtataaaataagagaaaagctccaaaacgtattaaatagcgatgcttggatgatcttcgtagcagtcacgttgtacatacaaatacatacatatgtacctactatatggcacataaaatacgttacgcacactagtggcgaataaaaagcgaattggagtaagctccgaaacgtgtttatattaaaattttttacccatttgaactttaaacaacttttcgactgcgccgcacggttttcattgaattctcatacgaattccaattaagtgttgtgtgtgcgtccaattggcatgaattgatgacgtgacgtgatcgctctcttcgctctctccctctctttcttcggcacacacacatacacacactacgctctttaatcgcgccgctctcttcgcgctctttttatttgtttattttgattgttgttatatatatattctaatttaccgtttttacaatcgtctttagcttaagcaaaaccgccgcccagcaacaacaagaaacccatttaatgagtgtgtgtgtgtgtgagcagaaaattatgccaacagaattctaaaaaatatatatgtatatatttaaataaccactaaaaatcaagaaatccgcacaagtttcgctcaaaacaacaacacaatcatatatactacccataaaaaaaaaacaaacccataaaaaagtgcaaagcaaccaggaaaataaagtaaaacagtgccagttaacaacagcaaacggcgatcaacaaatcccaccggcaaaatcaacaattttttaaatcgcaatcaacaaggagcaacaaattagccagctatttcccattgcaaacatttggcgggtaaatattattaacaattacgagtaggtgtacttgattgaatgaaaaatgtcatgttttttaagttcctaaattcgattcgaatctaatcggcaattgattgaaatattctaaaagtcaaattttgtttcgtcacgcgattaaaaaagtaattgaagcagtgctttcctacacatcaattaaaatttaaattaaatggtattttatgttgattacaacaacattttttttagtcgccacaataaaatattcattcttccgtgaaatatttccaatataaattgctattgctatatttataaaaataagctttgataaaagttaagaggtttaatagaaactagagttaggttcttttatttatattggtgtttagaattttagataggaaagctggactttttgttgtgttaaagtagtcacatctattgaatttacgacccaaattttaatacaaccgatagggaatgtgatttataaccttattcgagtaattcctagtttcactttcaagatcaaaacgactagaatcataaagtcggtcacgttcggcgctgcagtgtcgctccaatagatgatctttcagttcgtgtgggttttgattagtccgttttggtgtgttacttgtcatgggagtgggcaggggagatcttaattagagcagcgctgataatggctctaaaaatagagccccagcgccacactgatagcagagcttgaagcgtgtgtcgtttgcgtggagctcatttctttcgttctgtgtttgtttgctcccccgattttcgtatgcgatccactaaggtcgattttgttgccatattttgccagcgatctcgtatacgcaccgttttcagatgcttttgaatattctcttgacatcagtattgacattgaaatgtgattaggtttaattttcataaatgggttgattcgccactcggttagctgtcgaaagaggcttttttattccccatttacagataaggcttttatctattcgcaatgtgccaaggtacaacagcagctgatggcccaaaaaaagtgtacatataagcctatacacacatctgtatagtcgtcctatgtgcttgcgattgtgacttttatcatatcttgagtgtttgctagccacattggtggaacgtgccagttgataacaagaaagtgtgcgaaagtttgtctaaaaagctgtaattgaagcagggaaaccgggaagtcaattaattttgagagacaacattaaacgtattcttcgtattctagtattcttcaagaattagtaaagctcttactaataagctcgtttgagaatgacgataagttatatcgataatgtcgattttaccgataaccgaaaaacgttagtaatggaaatttaatgatcattaaatgagagccactacatattgttttgtttagaaagatatagtcggaataccagtagttatttcttagtattattttgtgatttttaaatattctactcagatgtgtagaactttttttcgaacgcttctttttgcttaatttatttcgtttttcgcgccgaccccaaaaacgttagtaatgcaaatcgattgcgtttgcgaagtcagatgatcccatccatgatttccatgcgtcagttgtcccagctgtcaatcgaagatcgccgtttgggggctctacgttcctggttgacttcgccatcggtcgagtggaatcgaatcgttcgtttgctctttaattattgtaatgaattcaataaacattgcagggcctctgccgttcatttgcatttgcgttcgcactcgctgcattctgaactattgcacattgcctggtcgggcctctccttctctatatagcgatatatatgtatatgtatatgtatatataaatatatagaaatctacatatgtattcatttatatatatgtaattctctatttctcttagttgctctagaagcgcgtgattctctcgcagatccacgtgccgccagataactgcactttcaataagcttttatttgaataagcttccgcgataattgacttaataaattattaaatattaacagcgtagaaaaaaccagaatgcaatgactgacatggcatctccttgtggattttctaatgccaagttaataggaaaatcatgcaaaatagctggaaagtgcattagggcccgactgagctcacaaaaatgtcttaatatatcattttcaatcactgcattaccagattcctaagtcttagtcactttccaatgattaatatatacacatataaattattgttatttatttcccaaaactaactttaatatcaagcaaaaacgcagtggtacagaaaaccaacaattaaagcacagtacaaataatatgaaaaagagcgcagattgaaagtgccacaaaaaagatttgttgtccaaggtttatgcttggcattgtaaaggggttattgtggcgttgcttggggtcagaggtttggagggtgcccaccgcgataagcagctggtcgccacagagggagagggatacaaacagatagaaacgggtgccggcgagtggagctgctgctccacatggcaacagttgctggctggcggggagtgcataaatatgatgtgcattgctttcgtttcagctctttatcgcttctttatctttggggttgcgtgataagaacgcactcggaaaaaaagcgacagcacaaagtgtcgacagggaattattgggaattattacagggagttgcgaagttgaaaacctttaaagtgaaattagaaaagtgaatcaattatattttttattcaacaaaaaaggaagcttaacttaacacaaaaacacttaaagcccgatcaaacttttactgtaagattataataataataccagaccaatataattttaagtcgattttttttcaatattaggcttaactttcctttaaccggaagttcgcccatgtaccgttttaacctgaagttataactagtcccttggcaagccgaactcgtcgctctcgcgttatattgctttatcagcaggttagtccatgacgagttgatattgctgggcataattcactttcgaaggcaaaggtcgttcggttttatggagggtgacacagcacagcacacacattttgagatccccggcacaccggagtggccgacaagtgggttcgatgtggcctcgtcatcgtcaccgcgccatcgtcattattatgatcatcatggggtcgcgaggtacttgagatcatgggcctggaaccgaacctgggctttgggattgataccgtcgccgttgtcgtcgtcgtcgtcgtcgccgccgtcctcttcatctcgaagtcggctcattaggcagggtagaccggaccagattggttcagaccataccagttgctgtgctgctcgaatacctacctcctcatcgacgaccagctgtcagtcttgctttttattttctctgtttttggtttttttcttttcgtttttcgattttttcttcttttttttttttggccgagcatcgggcttttctcgcattgacttactttgctttataatcctgtttgacgggttgtgctgctggctgctggggtgtagatctcttttacttccacattgctgaacccggtcatgtgtgatgagaggggcaggtacagcgttgagcagcagcatgggaggaagggtgaggaagggccatacctgagattcaggggcaccacgagatggtccagtctcaaggcacaagaaatcacatggttcgttcgccgaagtcgagggttcttgcaatcaaggagcatctggcggacacctttctggttggccaagtgatcttgagagcgcagctccccgcctgataagcactgagttagcagggacgtgggcaaaagtagggctctctaggagtagttaggaactattaaaaaaaagcaatagaagatattaaatgtaatggaatgctatcatttcaaatatgtacaaatctgttaccaaacttctgtcataagaactgtgagtttaaatgactaatgcatccctatggttttacaactcaaaaatcgattaaaagctattttgaatttagttatttttaattataatccatttaagtagactttacctaaacgtcgcctgtctgattccccctgaactatataaagtcgacgcccctgaattgtcgactatagcttggcttatcatctgattggcgaggccaagtcaatccggaacagctgctcaaaggcggcctagcagctacgatttttagtagggcgccaacgagtggcactaacttaactgatagccgaactattttctatacgcccgctgaagtgggaaataatactcatacgcctatatgtacgtgtaagaaccatacggcggaactcatgagaaaagtcggaggagagcgcactattgaaaggcgttacgtaagatgtgtgggtttatttttgttttgttcgctctgttgatctttatttatttcgttttgctcctcattcttcccttttcttaccactgattctgttttaatttttataaaatctttttattgccatcttcgcttagttcgccctgcctttgttttgttttattattttttaagatctgctttttcttcggttttttgtttttctcacttgctttcgttcggcttttggctctatcttttaatctatatgtataaatatatttttgaggacccccacgtttatcggcgtatatctagttatagaatttctcaacttgttgcgcgtcgtcacaaagcttgaaaaattggaccacctgaagatttgtaccgagcggaaattttgactttgcttgttcgtgacattgaaatacatacatacgtacgtggaatgctgtgctaatttctttttggggtaccttcccccaaatttcctaaaatcattgtgtaatttttgaaaatacaccgattattttcgtagcccatttccacatcccacgccgccgtgatctttaaagctgatttatgctttatttgcccagtttgaggaaagagccaaaaccaacgcgattctgaatcacgctataatttttgatgtgatactcagacttttgcgttgtttgcatttgcattaggaatattatctgatattatcgctagtatcctattaacataatctagcaggtttcagccgatccattgaattcccctctaatatcgagcgatcaaagtcaaaacacctacgtcttatatgcgtcactggataatctaatgtaagaaaaatatgtttgtcgagaacctgtctcaaaaaacctcaacaatcaaccgactttcaaagtaagctgtgacgcagtagatcaaaagtatttcgcatcggactatatatattgagttaatcccattcgcaatccaatactttttcatctgtcttgttattgtttacatttttttctacctatgcttttctatttttttgtatttttgttttgcttattgcccctggttattttcaaataatgacgttcttaatattattaaatgttattgcatattatttaatgctttactcacgactttgcgacgcaatttctcttcgtgaaagtaaaaaaaaaaatagattaaatttaagtgcgaaatgcaaatagcaagtgctcatttactcaaaatagttgcccgttggcaattagaattttacactattttaatggacattgcggtgtagactatactgatactcagtgtctaaaaatattatgatgttttctctaaaacaatcctgatttatttaatggttaatctaatttaaagctttctaaaaacgttgagtatactattttaaggcctgcagatataatcatacattttaaagatactttttctaaaaataaattcaaaagaataaattatgatatgccaaccacacttactataaacaaattcttttgttcacggagcagaaaacaatatgtattaaaatcagtttaaaataaagatgttgaaactgagaagaggagtttggagcgaagagaaagcgatgatacaatatattgaccccaaaagcaaatcaatgaactttcgttaaatgagtgctccgaaaattccagatgcagatacatagggaatatctgagtcgatcattggcgagcttagagttactggtagttttgtgcgagtgtattttttgggtttcttttttgacagccccagtgtatttgctttgatttttttttgttgagttttgttgttgttgctagtggcttaggtcaggttggaatgtttcggtaagtttttgttttgcgtctggactgggtttttcttctatttttttttttctcctttgacggggcacttgagtgcgactcattggcattcgcattgcgattatttgcggccgtaaacctttcgccgggcagatattatgcaatgacaagcgacgacgcgcgaccctatctaaattatttcgttatttaaatacacaacacaataaaaacgcagcacgaaaaattccgagaaggaaataatgaggtgacgtttggattgctctcaggtaggcaaatgtttaggtagccaataaatgaacttccgtgttctcaaggtaattctttgccgtcgctgttggattctcttcatttcccctgcttttccgctctctcgcagtctatattttttggccaagataaattattataaaacgccgaataaaagtgtgcctcgtacgatccgcacacagatactcgctgtcgtttctgtgtgtgtgtgtgagttttctatttgtttacaatttcaagttgaagagaagaaaagctttttgcgctcttaagtggacattataagctgacaaacatttcgatttttttttttttacaaattttcttaagtatatataattttttgcatttttaatgagaacttttagtaatatttaagaaagtaattttttgtagttatcgtttataagtgattaatagtttagttagtttagtctactcattgggtttcttgttttatgattcttcgtttttgattaatgaatcgttcattataattaattttgattatttcttaacagaaggtaaccttttaaatttgagtacctgaagtgcatttcaatatattagctcgatgataacatttttaacatttgcgtaccttatgaattcaaattataaatttcatcagacttttgtcattatcagttggcaataattctatgaaatgtattccttaaatatagagtgacacttggcattcccagaccaaattatacttgataatacctcagataaatgtcttcagttccaagaagttcattgataatgttttttataccaaaaagagccaatgtttgggttaaaattgtaccagacaactgctatcaaagtgcgatgctcgttgagcttcaatgacttatcagtcctctcattccagacagagtcaatagacctatatattggagtagattaaatatatatgtatgtaggaacctacagagagagacttgtcaaacttttgattatcaatacttgtagtatcatcaattattaggaaatatatgtataacttcggtcgccgccgtgctaactgaaatcatttcaattatatactacagctcgtattccagctgtgagctaaatttagtcataaaggcatttatagattttattcaaactaattgatttccattcctaggcaaaaaaaaagaaacaataaaattgtagagtactgaaaggcaaagaaaatgtgcgaggcatttaaacaagatcataacctacattatcgtaacgctattgcgtttgccttagtttcctctcttatttgtattgggtctgctgataacgctctcttactttcatttaagagcgattttcttcaatacgtactaaaaaaaagaatttacatttgttcgatttgcattgaaaaataatcaaactacattttctacgattattatttatagtgctgtcgcaaagtttttcacattaagtactcctaatcaaatggtatacgggtactataaatcatatacgggtacaagaaattgttcaccctgagtaaaatataatttttataaggaaacgttatagtaatgggtgtgtgctctctccaaaaaaaaaggtaaagattaatttaatcgtctactgaaaaatcgatttgtcaatttgttgaacgacccaagatcattcggaaatcgttttccacatttcgaagcacgaaaacaatcaaaatataatttcgagcgagacgattgatagagagacaagatgacttgacaaaattacacaaaaatgctatagtaatttcaatccaaggttaaaattcgacatatatgtatgagtactctgaacaagatatatagtcatgtacaactttaaatgatcaaagtaattttaaattaatctttagtagcttgattagatttgtatttaaattattaatataattaagatatattttaattggctttcttttagattgattgcgaagctttcacattcgcttcgatatcttttgggctggcgaggattgcttgaagagccgcaaagctgcaactgcacaacgaacttttctaccccatgatggacggctacgcgcaggaatggcccaggctgacccacacagataacggcctggccatggaccagctgggcggggatctgcccctggacgtgggcttcgagccacagacccgggccagatccaacacatggccatgtccgcgtcccgaaaactttgtggagcccaccgacgagttggacagtacaaaggccagcaatcagcagttggccccaggaggttggttcttacagaatattataaattatatatatatatattaatatcatattttaataatatcttatcgaatagactcacagcaggctatacagaatgcgaatgcagccaagaagaactcatcgcgtcgcaatgcatggggaaatctatcctatgcggatctcatcacgcatgccattggatcggccaccgacaaacgattgacactgagtcagatttacgagtggatggtccagaatgtgccatatttcaaggacaagggcgattcgaatagcagtgccggatggaaggtgagttattcataaataggctttttgttttatatgaaccttcggggattcatgcattttaaatgggttattcatatttcccagctcgatactttcactttttatacttactaagcttaagtttaatcttcataatcaaagccacaaattgcactacgttttcttgttgttaatgtttgtttcgaccttttttccaccatgctcgctggtctcgaaaaatagccatttcattcacaattcgcagagcaaacggtcaagttcatggccaagtcaagtcagtcagtcaaatggagtgagagtaaagataaaagtggagcttgtgttgtttggctttcatattttgtggtcgcttttcgctattattatgcaatcatcagtcagtggtattttttgttgtttttgtttgttttttttttttttcgttgccatttgcagtggtttttgttttcaacttatttggtgagtgtgtgaaatgtttgtcatagtggatggcatcacatttccccttgactttgctggatttccatatttctctttttttctttgcgcagagttttgcaattaatgcgcttttatcttcggatcgtttttcgttttgtttacatcgcagcatacgtaaataaatagacacgtgcacacaaacacatgcatgtggcacatgcgtaaatcatgaatcattttcattcacattcagagataccggttgccccttttcaatgctgcaatgcttcttgctatccccaccttaaattaccttaattcatcttactagactttatagaacttataggttggttttacttttgtttatttgcatgttttccccttgttttcgttgcttttgcactgataacatttgcctacatagccagtatattcacgtattcgtgcacttatactaaacgatctttttttgcaagctatcaattaatcgccagagttcattgacattaacctcaaatgggtattcacttttggggtggcaaaggaaataggcacttgtgattttggtttttagtcatatttactggaagtgagttgtaagtcatatggcttggaattttgctgattgcacttcctataactttatccttttggtgatcgccatgcgtatgcgtgatccgccccataaatcattcgatctactcatatttctttgctaatgcagtgcgtcattcacgtgattgttttctttatcatttttgctgatacttcagcactccgcctggatttttgttggttttctagcacctctggctgtgataaaagaccaacggctgttgaagaattcgctgcgctggctacgaagaaatcgaagacgactcttccacttgatacccgaaactttatttttcgcagacagcgcgcttccagcgaatttcagtttgtttttgtttcgagtacacatttcctagggctgtgaacaaatattggtattatttatattaatggtgttgtttataattgctgttgatggtcgtcatttgttttttgttttttgtttttttttttcttagccggcttcacggaagtagtcggcttgtcgcctttaatttttgccactgctttgggtttttttttgcgattacgagtggaaataatagtcactgtgataaagaaatttattcgcgcgtcgtagaaaacgttgttttagactagataatgttcctacgaaatttagagatcgtaaacaaaagtgcaatcaatgcagtttttaaggggattaaaggtgacaaagggtttgttttttttttttttgttttgccgcaaaacggtaaacaatatttattgctctatagtttgtctatggataatcgaactattttccatagtttcaactttttaatatattatttattttttttggcactatttggacgatgtttctatattaatagaattaatattttaagaaaaaaaggggctactttcgctttttttttttttatcaaagtgataaactcccacgcaaatgtggacttaacatatttttagattttttccgttgccgcattgaaagcaagagttcctgtgccgcacattcctttataaaattttatgacatttgctaatttatgcaacacgttgccgcgttccacctgacacttgcttccttttttcccagtcctcccgtatattttttttcacatttttttttgctccatagcttcttcctcctcgaatagtcgtcataataataaagaacgaaacgagcgaaacactcaaatgacatttgtggaattttaaatttgccactcgacggctgcattgcaaaggcttcttcctccgccggttggtggtggttcggtggttccgtggtttggcggatcggtggtttggtggctcggtggctcgtgtcttcatcatcgagaactcatcctcgcagtcgggcgatttggccattgaaccggtgccaagtattttcttctgttgctctttttatcaatttattttcgtgtgcacgaaatgttatttttattttcatttttttttactcagttcgttttttttttttcgtatgtgtgttatatttgcttcttttaattggcagcaaaccgcagcgtgttataaatatttttttggcccaacattttcgtggttttattcgccctgaactcgtcgcgctttggcaattatgtttggaaatttctgtaatttatgacgccttcttaggtggcatgccactatttacgatctctgattttatcatggaagaagatgagcggaattgtttctgctcagaatagcactacacagattatgggcgctaaaatcacggagaactgaatttaaattgggaaatagatagatctgaatctttatctagacctagctgaaatagttacgacactctcagatagaaagttcccgatcgatggtttgtaatcgcagagataacacaagcacattgaataatacttgaacaatgcaacaaggcttaaagagtgaaagaatgcagtttgcctagcactctgcgcggtaacctttgttaactttggccttatcataatgggccttatcaaggcaatggccttgccagtaatgcgccagaagctagaggaactcaaaagtcggtcggtgaaatgcgcattactcagtgcaattgaccagtgcagctctgcaaataggctgcaccaatgtaaatatgcaataaaatgagggaaataaaggcattcattaacgatatgacgataggcatatataggcaatgtatcttgcgtaatcaatttgacacttgacagtgcacttttctctctgatctgagccatttcgtatttctatcatgttatttttttcccctagatcttcacgcttgtttagctgcgcattaagtatacgcattgttggtcggtttgtgttttatttggtttgttcgaattctatgtggtgtaaagtgcatttcgaatgcgaaatcaaaacaatgggcaaagcacaattcaagtgttttctcattatggtctcgttgatgatgattattttgagtttgatttggcaggggcgttgaaatgaaacgtgcaaatactggaaataatcaaattcagtcaaaaaaaaaaaacttaagaaatagagaaaaaagaaacgaaatggcactgccaatcgggaatgagaacaaatacgagaacaagaacgagatcagcactctaagattgccggccacatacacataatattcgtttataaataagcattaaccttgctcgcaccagaccatgccgagctatttggcgtattttttgattctattatttatattctattatatttgcatgcaacactcagtcgtcggtgtggccccacttactgtaccggcgtactactgcgtagtattatacacttttgccttgccggccaacacacgcccccttttttttttagtgttttccgtttcgttttccgttccccccatttttgatgtatatatatatatttttttttttgttagcccactgatagcaaagacagaggcgacacggaagcagccgcgccctcgattctgttctttttttttcttttttactaaatgttagtaaacaattattttgtgcaaagggggctcgaacgtgtaaacccttcttctagctgcgatacccattagtcagcattttgagttggattcattaaatttattacccaatatattagtcgatttaacgatttttatataacatcttaatggatcagggcagcgtataattgttcgctatctccagagctgaagtttagaatttgtatacttgaataactggctgccttactgcgtaataataattcgaaatatttcattgcgcccacttaatattttagtacattctttgtttatttttaaagtgcgggctttcgaagcactcaaaacaaagaggccatataagttctatgaattggctatatcatctaggaacgatttatctggcatattcccgatgtttgtcatgatctctgtggcacctttggtgatttatctcagggcataccaaatatttccgatgttgccaataaagttcctgagatatgaggccataaaacacgacctcgtcataaaaagagaaaaaaaaaacgcatggtcgcaaatcatcagtcaatcatgtgcatacgtatgtctagcctgtctagatcgtaattgtggtgctattaattatgttgcactttgcaatgcacactcggtttttagttgtgtgaggttagtgtgcatttttactgcgctgttctactaattaacaccagcacagtcgcagcgaaattcgcctccgggttgtaaatttcgtgaaactcgcatagccatagagccacatgcaaatagtatgtatgtacatatatctctatgggcgaattttatgctttttgcttagaattttacgagttgagcacgaaccagtcggaatgcaagtggcagtcgggcatggccgtagacaaagtatggcactgcaaggtgtctggccctgggatatgtgtgttgcaccccaatcccaatttcgatcccgatcctcgggaccataaaatgccccacttaccccgaccatccagcatccaaaaaaaatgcatcatcttctttttttttttttggaaggagaacgcaaacatttcgtgccatactttctgcttttctgctctgcctgcaaattatgactttcgagaacaggcagttaatatataaaagccttattgatatgttatgaacgttctcggcattctaatcaacttctttgtttgcccgctttctaataaatatacaatatacatttacaatcaaaactgcaggcaatcaaggcagcgcaaatcaaactggtttcgtcgcaaagccaagcaagcaaaattagaaaaaaaaaccaaattgcaaattatttattgagaaattatctcatatgggggctgggtgccataaaaaaaaaaaaaacgccactcattgtcttactttgtcaacgcagaagccgaagtcaagtcactggatctcaataaatatgcaataatcataagaaataagccataaagccaaccaaacttctcatctctttcaatgaccaaaagagataaaagtgaaacaaaaggctacaaaagtggatctaagaatgtgctcgctactgcaatttgatcgaatgagtaatgccctggaaaattaataaaaaataattaacaataaggaagcaaacttacataccaaattattgttatttcaatgaacgaacgagttatgcgaagatagatagagattccgcttttcactgtgtagaacattcatggaaacttcatacatatataaccagcaaaatgaccatgctgaagataataaaatcataatctattttcctacttctttaaaacttcctgcccacgaaggcgtcaggctggtgggcgtggcctcgaccaaggaacccacgatgacaactccaaatcccattgattgtcgctcaaagaccacttgctcaagttccgcccacatttatcactcgatttgggtggtggggcaggccattcatgtccagttaatggccaaaatgagtgaggagggggagggtggttagcatcggaaggaagaaagcaaactaatggggcggccacactcggatcgtaaataaagtttggtgcaaattgtttgcctgccgccccccttgtggcaaggaaaaaaaaggaactcgcttaaaggcggtgcatagtggcaatcgttatttaatttgttgcgcgactctttaagcctcgcctgccccaaaatccgcacacataatcaatcaggataccgagtattatcaaccagccacaagggctttccatgtcccattccttttcctcgtcccgaacctaatgagtgccagtgagcttcataaagtttgccacaaaatgtccaagcagcagacacaaacacatttatgaacttggcttcaatttttgttgcatgcaattttggggcaatgtcctcgcccgcactaagtaaccaaactcactgccatatttgcacatatactcgtatagaaattgcacatcatttggcccgatttcgttggcggagtgcaattgccaaagttcaagttggccttttgttggttcagcttcagcttcgcttagagctcaattgctactacttgaaagtgttttctggaagaaagggactttctattctattgcaaaataaatttaaaaatgtaattatttcaaatgttattgctggtattttagaaagtaaataggatttgttttagacttgttgttacaataaaacagctgaaatgttcttacaaagtatacttgttatatatattatttttaatgaaacaacaaaacctgacttgtaacttattttttttaaaagaagagtatattttcgtcagtttctgttaacaattctttctatgaattcatttcgttgctattctttgtagtcgctcataaaacgcgacacttatggactgcttataaaacgctcttcaatggcagacagacaccactcactttggctttgagtccttcgaagtgagtccttttccacaaggctcttcctgcttaaagtttcccaggtgaaattcaattcgaatcgctacagaaaggccgtgtgtatattttttgtcatttgatttccgtttccgtttggcacgcaggcgccaacgtgtcctgcgattaatcgtctttggcggctttgttgcagaatccttttctataccaatgcccctgccgcgcccactggcattcataaaagtttgccaaaaaaaaaaaaaaaaaagagagaaagtaaacttcctaaaccgaaatcgaaacacacaaaactgagctgtagaaagagaaaacttttgccattccatatcatatcatcacatcatcattgcgatgataatgccgcctgttttatgtgctcacatatctttacaatatagtatataagttgtgaggaagggaggtttgctggtctatatcagttgctagggcccagtgtttgtcctatgtctattgctcttttatttagtttgccagagtttgaatttcgcatttgtttgctttgtttgttgccttgcaaatgtgtttttgatatagaaattgttcaaatattgattttggtctggctttaaaggaagcaacttttaaacttagttttttttccccagttcgcttgccattttccctttaaattagcctagattacatatggctaaaagtgtcattttgtttcagcttagagcttaacttgatcgatgggcaaaaaaagtgcgctactttctatatccgatcgattggtcgcgaatcagaacattatgtgttcacttggtctaggtcattactgggtcattatctaatcaattacaggtgccattgggcattaggttctatcgattgtgttgattgcctcgcatctgggcacattaaatttgttgcacacgcgccagaaatcaatcggtatacaatgaaaacctcgatcgtgatacgattcgaaatggatttctaaatcgcttgccatttaatggcaactgtcaatgatctttcggggtaaacaattgctcgaatatcgtctgctgccatcttgctaaagctgaaattgtttaaacaattaattagtcttgggtaaacagtatgcagatactcctgagagccgggagacaagagccacaaccagatcgccatcatcataaattgtatctggccgatttgtttagtctttagtctttggttcactccgggatcaagtgtttacaaattggccagtcgaacaaaatgttttgttcaaacaattgaggcagcaagaaaatcggagaccaaacttactgttctgtttttttttagaagcagttatttgagagttcaagggtaaacttttgattcaaatgtggaattgctaaattatgggttaattatattgaatgatttgttgctttacggatgtaattttgaacttaatcatacgatttactgcactaaaagtgtttgttgcagaaaatcaataaaatcgaaatggttttagaagcattttgaattttgaatttttattcggtaataatcgatttctggatttctcggaacgggtaaattaatcaaataatttaataaattgatttttttttctgagagtatttttatgttgtcactcgcagccatttatcgttcccactggtttttttgtcttttttttttttttttggtattaaattttaaatgctcaacctggtcgcggtagcaattagccgaatgaatcggggggttggcgaagtagtaacctgtttgcagggcactgaacacattcagctagaaagagtgtcgtttcaaaaatttatatctcaatttcacatctaaatgcgaataatctttttttttctatgcctctatgtgtgtgtgtgtgtgtgtgtgttgccattgagtgtgctgtgggttcatttgatttgtgtgtgagaatcgctgcagctgtttggcattggggcgctggaacttcgccccaaaaccccacaaaccttctccccgcttttcagaggttaaccgtttaccatgaaccgatatagatctggctcgtttttttgcgttttgtttgatatttttggtcacagaacattcgcgctgcaatggaacaaaaaaaaaaaaaaaaacgtggattaaatgatgagttcagcacagaaatagggtttaaaccgttgaatatgtcctataagtacatagaaacagtatattttaacctcttttaagtttaatcagaagaactaagacatagaagtgcaatttggatcttaagttaaaggtctttaccgaaaaggtacttaaacctcctcgaaagccacttgttcgaagacatggatcattggaggcgacccagttagcgccacatgtcgcgattccgtttccccaataagccgctcaaatggcccaatgaaatatgcatatttgatacgagatgacagcgtatcatggggcagcaatggtgaggggttgccttcatggcgggtaaggcaagagcacagactgataaagtctcaagttaccccagaggagagaagaaaaaaaattgggattgctcgacgacgtatagaggaaaaactgaaatgaaacgagctggcagatttaatatattttagtgctggccccgctgctgatgcgacccgcccttctactcccaattactcatataaattataaagaaatgaatcaggcagctagattccacgcccataaataaaagttttgctgtaataattgtaattggtcaacgggaaactttaactacgatttccaccacatcgattttgggtcactagtgaattactctggcaactcaatttggtttagttccttgtgattcacgctcgatgcacattaattgtacacaataaggatacgcatatccttgactacgatagccattctacccatgaaatgtatgaaatttccatttctgggtttttgctcatttggcgctccaagtgaattcaatggaagcccagttttgtcccgttagcttttcctgcgtttgccatggatgcaaaaattgtggaatggggcgatgtgggctgacctacatacatatgtgtaaatgcactgacaaaaacggggaggccaaataaaaatattattcaaaagttatataaatctgtttatcttattgctttgatctcagctttaaactgcactttctaaggaaggattgtagcactgaaccttttgagaaccctatttttttgagtgtatttttccagcacatgatgcagctccttggtaatcactaccactactatatagtctgtatatctggtcggcatgtggtcgctgttgccgagttgcgtatatatctctctctcgatttaataggcccaattagttagatgtgttgtgaatgttctgaatgctctcgcgttctttaggcttttttctctggccgagatttaagtttatgaatattcaatgaagtgtgtgccataaattatgaatgccatttgtttgcatttcgccttgatttaatggccttgagttggaatgcctgaagcacaaccctccttgaacttgtctttaaggtttgtcatttctgtaacaactaagtgattacttttgaaaattcttcaagtaatagtttataaacattatgaagtattcaaatttagtatcggataaataaaagtttgattagatgaccctgttccaccttccactcaaatccaaataaataccaccacgctttccataccagaaataatttctcattactcacccacccacacaaaccgaagacatcctgttcctgggcggaagttggttggataattccgcaatctggccattagcataatcagaacgtttgccaagaaaaagaaaatgtttgaacaacgccaactgggagcgagggaaatatgaaatgggaaatggcaaagacgcctccgctggcggcgcacttaaacatttaaataaaaatgataactttatgcgaagggggtaaaattagatgtgggtggctaaagcgaaaccaaaaatgtcattacaggacttacaggacgacggacgcaacagagaagcagcttccactgacgccaagtaaaagttttcgcaaataaagggaaaaaaatctgtgaaaatggtaaagcaaatccagccaagtattagaaagtccatggagttgggggctgttgcttctgtctgcgaacaggtttcgtcgtcaggcgggcgtctgacacaaaccctctaagcccgcactcccccatccgccccctaaattcaccaccgcccactcacatgtcctggcaacggtgataaatggcgccaatgtgccgcctggagtcgcgacgcgtcgcaatcgctttttcggtgtctttttgaagggataagcgagctggattcacacagaaaaattattaaagtattattcttcctattaaaaggtgctatatgagggtacataaataaacaaacaaaaaatcaattagttacaatttttatttatgtttaatattatttgaatatacccacaagatatgaattttgtacttaacctttgtacgatttatttcaaacattttcgctgtgtgtgtccggcgaacttttggataggtggaatctgcggcaagttgcctttaccagttagtttagtttgtaatgctccatttagcctgactaacagtgggtcccatcctaatttttgtcatcccgatacctatgtatgtacatacagtacagctgatgacaaatccacactaaacgtgtttgattctatttgtttcaggcagttggtttcttctccttttttttttttttaagcactgccatgacatgtaattgtccttttttccacctagacgggattgggagttactcgatgggggcggctgtgatggggggattgggttgtgtagacgatgtcgattcgctgtcattacgctgcttacacgcggttatttatgacaattgttggaaaatatgaattgacagcgacgacggcgacaggcgacgaggtctggtgaagacatcttccaattagagagtggaggatatacgttcgttctgcttctgcgagccataaaaatgtcgacagacaattgaatggcacacaagagcggcgaaaaggaagcgcagtgccttgtcctgtccttccacccaagaagcaattgcttacaaatcgttacatcagcgcgatgagttcccaaggatttgcaaattttgcaattcttttacattcaatatatttcggtttttgcaaaatatatatatttatatgtacatatatgtttctctctcgttctcgttacagaactccatacgtcacaatctgtcgctgcacaaccgctttatgagggtccaaaacgagggcaccggcaagtcatcctggtggatgctcaacccggaggccaagcccggcaagtctgtgcgccgccgtgccgcttccatggagacgtcccggtacgagaagcggcgcggcagggccaagaagcgggtggaggcactgcgtcaggcgggcgtggtgggcctcaacgatgccacgccctcgcccagcagcagcgtcagcgaggggctggatcactttcccgagagtccgctccacaggtaactatcaactgcgatgagtaaatagtagagtatattaaaaatcatagaacaactagttaattgcttagcattttcttgattcttagtgcgttatttacacataatctaacttgtatagatactccttgctattatatcttcgtagatatttcttaattattaaatacaagaacgaaatataaaatctggatcataggcactaccttataaatatatagaaagccttttgaaaatcctttaattgactttcgttgtaaaattgactttctagcatgttttatttatagtttttagaggtgataggatcttaagattcttaaatttaacttaataatatatttatctagtttagttgcttagactagcgcttgtagagcatgatctccagataaattttttttttgttagatattatagcaaaaagtgcttaagtttcactgacttcttgcgcccatttcacttgtgccgactctatagtcttgtccataagttttgttctacgattatttcatttaatttacatgcgtttttattcgatttttatttattggttttccacttgtttttctttttttatttttacctgcgataacaaagtggcggtggcttccaattatcgcccgatttccggcaacgcgcctcatccaatgccagttcctgcggacgcctgagccccattagggcgcaggatcttgagcccgactggggattccccgttgactaccagaacacaacgatgacgcaggcccacgcccaggcgctcgaggagctgacgggcacaatggcggatgagctgacgctgtgcaaccagcagcagcaagggtcagttctcgatggctgtttacctcagtttgtttaaatgcccatatatgtcacacaatatgtcccggttccacccaaccttttgttgtttcatataatttattgcatgccgaatggaaaatcaaaatagcttgagctttgcacgttgactgaactcagatattttttttcgcttgttataaaaccgatctataaagtcaacttctcttctcgtttttgccacccaacgatcgtacggttggagcaggttcagtgccgcctcgggacttccctctcagcccccgcccccgccctatcagccgccgcagcatcaacaggcgcagcagcagcaacagcagcagtcgccctacgccctcaacggccccgcctccggctacaacacgctgcagccgcagtcgcagtgcctgctgcaccggtccctcaattgcagttgcatgcacaatgcaagagatgtgagtagtagatagaaactaaaggaaacaacacctttaagataaattttgaacttttttaacgaatattatactctatatttcccagggtctctcgccgaactcagtaaccacaacaatgtcgcccgcctatccaaacagcgagccctcatcggactccctgaacacgtacagcaacgtggtgctcgatggtccggcggacactgcggcactgatggtgcagcagcagcagcagcagcagcaacagcaacagctgtccgccagcttggaaggtaattatgaatgccccagcgttattttcacacttcttatctgtgccactatcctgcttatcttccctctaaccgtctgccgtctatgaaactccacctgtatcgatgcgatatgttagataataactgcgcctctactttgataggacaatgcctggaggtgctcaataacgaggcgcagccgatagacgaatttaatctggagaactttcccgtgggcaatctcgagtgcaatgtcgaggaggtaagtggttagagtgcccaaatcatccattcaaccattgtaatgtgtatactccattgccatagctgctgcagcaggagatgagctacggcggcctgctggacatcaatataccgctggccacggtcaacacgaacctggtcaacagcagcagtgggcccctgagcatcagcaacattagcaacctcagcaacataagcagcaattccggcagcagtctcagtctgaatcagttgcaggctcagctgcaacagcagcagcagcagcagcaggcgcagcaacagcagcaggcgcagcagcaacaacagcagcatcagcagcaccagcaacagttgctgctaaataataacaacaacagcagcagcagcctggaattggcaacacaaacggctaccacaaatctgaatgctcgggttcagtactcacagccc

SEQ ID NO: 5768 - DNA, 2162 bp, DROSOPHILA
aaagcagttaacgagtagtctgtgttttttcgcttgcggttaaaagccacgagcttaagcaaaaccgccgcccagcaacaacaagaaacccatttaatgagtgtgtgtgtgtgtgagcagaaaattatgccaacagaattctaaaaaatatatatgtatatatttaaataaccactaaaaatcaagaaatccgcacaagtttcgctcaaaacaacaacacaatcatatatactacccataaaaaaaaaacaaacccataaaaaagtgcaaagcaaccaggaaaataaagtaaaacagtgccagttaacaacagcaaacggcgatcaacaaatcccaccggcaaaatcaacaattttttaaatcgcaatcaacaaggagcaacaaattagccagctatttcccattgcaaacatttggcggattgattgcgaagctttcacattcgcttcgatatcttttgggctggcgaggattgcttgaagagccgcaaagctgcaactgcacaacgaacttttctaccccatgatggacggctacgcgcaggaatggcccaggctgacccacacagataacggcctggccatggaccagctgggcggggatctgcccctggacgtgggcttcgagccacagacccgggccagatccaacacatggccatgtccgcgtcccgaaaactttgtggagcccaccgacgagttggacagtacaaaggccagcaatcagcagttggccccaggagactcacagcaggctatacagaatgcgaatgcagccaagaagaactcatcgcgtcgcaatgcatggggaaatctatcctatgcggatctcatcacgcatgccattggatcggccaccgacaaacgattgacactgagtcagatttacgagtggatggtccagaatgtgccatatttcaaggacaagggcgattcgaatagcagtgccggatggaagagttttgcaattaatgcgcttttatcttcggatcgtttttcgttttgtttacatcgcagcataccacctctggctgtgataaaagaccaacggctgttgaagaattcgctgcgctggctacgaagaaatcgaagacgactcttccacttgatacccgaaactttatttttcgcagacagcgcgcttccagcgaatttcagcttcttcctccgccggttggtggtggttcggtggttccgtggtttggcggatcggtggtttggtggctcggtggctcgtgtcttcatcatcgagaactcatcctcgcagtcgggcgatttggccattgaaccggtgccaaaattttacgagttgagcacgaaccagtcggaatgcaagtggcagtcgggcatggccgtagacaaaacatggatcattggaggcgacccagttagcgccacatgtcgcgattccgtttccccaataagccgctcaaatggcccaatgaaatatgcatatttgatacgagatgacagcgtatcatggggcagcaatgaactccatacgtcacaatctgtcgctgcacaaccgctttatgagggtccaaaacgagggcaccggcaagtcatcctggtggatgctcaacccggaggccaagcccggcaagtctgtgcgccgccgtgccgcttccatggagacgtcccggtacgagaagcggcgcggcagggccaagaagcgggtggaggcactgcgtcaggcgggcgtggtgggcctcaacgatgccacgccctcgcccagcagcagcgtcagcgaggggctggatcactttcccgagagtccgctccacagtggcggtggcttccaattatcgcccgatttccggcaacgcgcctcatccaatgccagttcctgcggacgcctgagccccattagggcgcaggatcttgagcccgactggggattccccgttgactaccagaacacaacgatgacgcaggcccacgcccaggcgctcgaggagctgacgggcacaatggcggatgagctgacgctgtgcaaccagcagcagcaagggttcagtgccgcctcgggacttccctctcagcccccgcccccgccctatcagccgccgcagcatcaacaggcgcagcagcagcaacagcagcagtcgccctacgccctcaacggccccgcctccggctacaacacgctgcagccgcagtcgc

SEQ ID NO: 5769 - protein, 448 aa, DROSOPHILA
MMDGYAQEWPRLTHTDNGLAMDQLGGDLPLDVGFEPQTRARSNTWPCPRPENFVEPTDELDSTKASNQQLAPGDSQQAIQNANAAKKNSSRRNAWGNLSYADLITHAIGSATDKRLTLSQIYEWMVQNVPYFKDKGDSNSSAGWKSFAINALLSSDRFSFCLHRSIPPLAVIKDQRLLKNSLRWLRRNRRRLFHLIPETLFFADSALPANFSFFLRRLVVVRWFRGLADRWFGGSVARVFIIENSSSQSGDLAIEPVPKFYELSTNQSECKWQSGMAVDKTWIIGGDPVSATCRDSVSPISRSNGPMKYAYLIRDDSVSWGSNELHTSQSVAAQPLYEGPKRGHRQVILVDAQPGGQARQVCAPPCRFHGDVPVREAARQGQEAGGGTASGGRGGPQRCHALAQQQRQRGAGSLSRESAPQWRWLPIIARFPATRLIQCQFLRTPEPH

SEQ ID NO: 5770 - DNA, 19491 bp, DROSOPHILA
ctgttcaaagaagtatgatttaagatcgtatctgctttgattttaggttactaatagtaacttactatgtatttgtattcctatagtatatttattcaaaacatttaaaaatatatcctcattgcatgtaaaaactcagctactctctagggggaaatcacgattataaactatttttgtgacaaagtattaattaaattatatttcataattattgtgctgacatgtcattaagatggacttgtcagcccaaaagtaggcacgaccttttaataatgcatttccaaaaccaaataaattgcctggatggatcggatctattgaaaaagatttaatttcacagtcatactattttggcttatcgttagataagtaatttgttttgattttttgtgaaatatacgatacagtgccgccatttacatggcaaatctcagctttcataggcgaaggaaaaatagtacggaaagtgaaacttggcacagaaaagctttgctctacagcaaatggcaacattgtgtgccattgagacacttccgccccagtacgcatgcaccaaaaaacatactgcgaacaggttctgaaggagctttcaactttacatgtgattcccagtcagatgtttacctcctttgggaaaatctagagagagatatagtagggatttttgaaaatatgtatgtaaaggtactagacatgagatactgtagtagttattcaactcttacttatgaaggatgcattttatggtagtgcctattttatgattatcctcctttgcatatcatacagacgtaggggctcagccatgtccagctggcctaaagtcttcccctccgagatttccgctgcccaaaagctccccccacggtggacaccgccccgctcacccgctggccgagcggccaaaatcgatgccccaaccggttcgctctcgcgttttggcgagtggcccaagcttttcagcgctgctcctggagcgtgtgggccaaaacgcgaatgaacatcgaccgtggaagttgactgctgaagtacaaagcgctaggctgaaggtgaatgggaaagaaaaattctagaggctcataaaaagtggcaatgcccatggaaaatcattcaaaaatgtgatgaaaaaattatgaaaattaaacagaattggttgaaagcaaagcaaaagtgttgaaagtgttttccaatttgttatataaatgaaaaggccatcgaaagccccgaaatgtatagtgcgcgtgtgtatgtgtgtgtggtgtgggtgcgtgtatgcgactgtgtgtgtgcgagtgtttagcacgcgctgacaaaaaaggagaacattttttgtgtatcagaatttttcgcagcaaatgtcgagaaaaaatggcagctaagcaagaaaattttaattgaaaattccaatgtgcaatgcgaagatgaaagaagcgctgaaaaatgggctatcattgaaagtgaaaacgcatgtgagccacttgcggggatattgatttttcccacccgactattgtggtgctgtaggccagtcgaaagccaggattaaaaagcatatcaatgtgaattcggaaaatccgaatccgcagtccttcaacgccctataattaaataataaaaaattaaaattgaaatgagatttttaactatcaacttgaagtgtctgagtgcgagagaaaaaaggaaagctcaattcaagccaaaagaggccctgaaaaggacgaaagaaatggccctaagaaaatctctatcctgaatttgctttcttcgaggaaaaagcgaatttgccaacctcccactctctctctctctctctatttttgtctctctctgcccactcaccaacacgcacacacatgctcttttgggcaaggagacacaacacacagacacacacacaaagccgagttcgctctatcaatatttacgcacaccattgtattttgctattacgtatacgctgcgtatctcttcaactctctcactcactctctctctatatctctctctctctctctcttcctcactttccgctgacatcctttgtactgcaaaatatatgcaaataaatctaaataaattgaattaatttcaattaattttattacaaattatccaaaaaagtatacgaaattcatgtgagactagcgagccgcggcctcactagccaaagccagtcacaaaaaaccaaaaacataaatcaggcagcagcagcagcacacatacatcgacaagcgccaggacccgcatcaccatatccttcctgccaaatagtcgccactgctgccgaccctccccgctcccctcgcaggagtcacgcttcgttaaacgctgctcaaaacccatcatcctaactaataaagcggacgataaacaagcgaattaagtaccaaaaacgaccgagctattaacgctagtctggatcccaattgctgattggaaaggagaaacattggcagcatttctgattagggggtgagtgttggtatttacaagaacgtagcacactttttggggcagtccatagagtgaatggagaaacatacataactaaagggttgctgcagctaaagaaaaactaatctctaagctatcagagaaaatgtgattgcttattattctaagatacaaacatttcccatggttaacattcatcttgaattatattaatatctaaataatcaagttaattaatagattcacaaaaatttgcaggaatttcctttaccaattaaacccaaaaggtctgaaatactttgggtttattaacttgattaattgccagactgccaaattctctgcccagtgccacacatcacttgttcatcgtgtcctttcttatcttcgtctaataagaactaaacctgatttagtcctgctcttcgctaattagctttggacagcccgaagttgggctggaattcctcggagggcaggctattaagggcattgccgaagcatagcaataaaaatgctgcaaacaagctcggcaggccgcacataattgccaataatcaagttggcccgaacggcagcgtaattttgacccttcgcgtcgcccgaaaatccttttgtgtgaaattcgagaatatgaatgaattgtttgcacggagtctatatttgattttgaaaacatcgagacggattgttcaatgaaagcgaaaagcataatgatgtggaaaattggttttctccgccaggcattcttctggcctgaggcaatgtcgggctccaacgtctagcttggattttccttcatgttcatttctttttttttttatttcctttgctattttccgagtttttattttgttgccttctctgggttatgtgcgcagtaaagagagcagaaacagaaacagaaagagagagagagagagagagctgtgggcatgtgtggcttttccgcttttccatccttccgctctcatagttttccactctccggctcgccaaaaagtttaaccgtttccccattcgtgagcttcgagagcctcctggccattttctacgcgattcgcccgtattacgtgcgtgggttccacagatgttgccatagatccgaatccgaacccgaatcatattgcgagctccatttgctcgctggcgggtttgtttggacccggtaatgggtaatgactgcctgtccaatccatcccatgttaatttgttttgacagcttgatggtaagaccggtagaaaactctatttttactcgggttcttcgttgcttactcgcagtatccttttaccatttatcttatcgccatgcgaaccccgcgctaatctaaaatgcccagccaattgccgttatctgtgctccactttttgtcactgcattgcaccacccaccgggccaccaacccagcagcccacgcacccttatcagctttttctgcaccaccgcccacaatttatgaaaaagcagcagacagctgcctatttataggtccttcgccaaaggtcaaatcgtagcaattattactaggaaagcacacattcctcttatcgtccctaaattggagctccgaactgagctttgattaatttagtagggtcttcgacacgaaagttctgttcatattgagtaagttcatcaaaagtggtaattgaattttacaacgttaagtggaatgctgatttttggaacttattaggagatttcagtgtaccttgctttatttgctcatttcaattataatacttttccgagactggctttcaaaagcagtacttccttcatgtttatggcacttttgacagttactggaaatgttttgccatcaatcgagtgctcaacaatgaactcactgaccactcaagcgtcttactaccaataacaaatactggaagcagctgttttggccctaaacataatttacactttagcacgaaacgaagccgttttgaactgcgtagtttgttatttagctgccacttcttggtgcccagacaagtgggcaccgcaaaataaccagcacacccatacgccccgttgacccgtgggcaaaaaaaaaaaaaaaaacagtgccacgaaatgctggcagaatgacaaaagtgtggcaactggcgcatacaatatttgtgaccttcttgtgccttcctggaaatcacagtagctgcacatcttgttcctattaatgttaagttctttttcttgcgggtttttcggccccttatgccaggaaacataattcagcatgagattttttggtgcataaataaaatatgaataacaaagtggtccacctttgggtgattgccattttccgggcaactttcggtagctaggtgtttctgattgttgcgtccacatttattatggatgagtctttcggagggtagaaagcccttgtttatccattttatttatctgccactgggctgcaacgcaatttgtcagggaatcacacggaaatcgtgacatctcccagctttccactttttgctgccacatgactggttttccccttcctccatctcaaggagtcatttccaggcagcttctgtgccgcacaacttgtcctagatgcatttaaatttatttatttctcggtaattttcctttttgtcctcaagtggccaagagtcgtggtcgctcattctaaaaagtaaaataagttagtgcatttaaaagtaggacaacatttaaaatttatattgatcatgttaaagttatgatgtttatcaattgtgcactcttaaataatttacagagaaattgtctgtcttaagtttaatcttcgcgaaatacgagatgagctggcaaaaactcatttaagaaagcgataagcggagaaaagagacagctgtttattattcatatgcaaaattggtgaaaagtaaacaatttcattaaattcgtgataagaacatgtatgtatattagtccagcagcagtacttttatttagtcgctctagtttaactgtgaggtatggacatcaaataagtatgtgattaagttatacaggtaaaaattatatataagaaatatttctataattagttttcattacttaagccatgatgcatgcctttttatttgaaaaatatgtttagcttaattttatcgattttaaagatgcctttttcgacccaaaactgaattaaatcgcaaattgcgtttgcctagaaggcaattaacccgcataacttaatttcgcacattattcatgcaaattgtattgtatgttgagcaaacacagagtttgcatctaaattttccacccgcgtggcatccacaacttttgaattttaagcatatttatggggccaaataaacaaagctgccttcaggcttttcatttaagcggcttgccgagttttttcgagttttccgagttcttttccattttccgttggtgtgtgttagcgtgtttcagggtatggatgtcctttgacgtcatttgcaaagtaaacaagagaaaagccataggagaagcatcgctttccagtcattttggctttaaattgctctacacacacagtttgcttttctttctttctggctgagaggataagtggttttggtgacatattaagttatctttggctcacgagatgctttatggaaacaatgagatgcaaacaaaaggtgaacaaacaatggatagcggacttggaatatcatttaacataaaatcaatttgacaataggattcctcgtgaataaatttcatattctgctgttcagatttaagtgaaccaataatattccaatgaaattcgacttttagtattctttcggctgacatgtgtcgttcaacttttgatggattacccaaattgcagtcttcaaatgagagaagaaattgccaatcagcgagacataagtacccgcgtatattttccactggggcaacccccaagctcccaaagtcccaggagtccgtctctgcaacaatggcagttcagggtcaaaggatgtctgacaaaaaggaaaagaggagccaagcacccaactcaagcagccatccgccgtccataattaatacgactcaagttgttaaagtaaacgaaatgaagtaaaatgcggaaaattcaaaacgagcgactacaaaaagcagctggagaacagaaccagcagctcggtgttaatattaatgaattcaattaaaggagaaagtgagcgaaatgggaaaaaactgagcaaaatcgtaaggggggatcccagccgttcaaagcgttttgcgtgggtgccattgtagaaacacatatatatgtatatatatatgtatatgtggatgggtggctggttgggtggctttgggagtgcgtgcccttggtggctaaggataagcacttttacttggtgcgtttggtgccactgccaccaccacccaacagcccgttttagatgacgccgtcagcgcatttctagtgtttcaaggatgcgagtgtaggagaaattgctaacgacttttgtgggatttctttgtagccacactcgagtttagcgctatttttaagccggcgacagcccggaaattaaacacacgcatcattaatatccatttacgttcagctactcattaaattttcactttgcagcaacaacacagcaaaacaaaatgccgccaaatgcaaaatcggaaacggacgccaaaccggaagcggaaccagcgccagcgtctgagccggcagcggatctggagtccgtggaccagaagctggaagaaacacatcactccaaattccgtgaagtggacaggcaggagcaggaggtgctcgccgagaaggcggcggaagcggccagtcaaagaatcgcacaggtggaatcaacaacacggagtgctaccacagaggctcagggtaagtccaaacggatttatatatttaaacaatatatttatttagttattattcgtacagaatccaccaccaccgcagtgccggtgatcaaaaagatcgagcatgtcggcgaagtggtcaccgaggtgatcgcggagcgcacggggctgcccacatggggcgtggtggccatcatcatactcgtgttcctcgtcgtctttggtataatcttcttctgtgtgcggagattcctgaagaagcgaagaaccaaagatggaaagggtaagaagggtgtcgacatgaagtcggtacagttgttgggatcggcgtacaaggagaaagtaagtgtctgacgcgccattaaatcttagtagttattgggttctggtatgtcataggttcagcctgatatggaggaactcaccgaaaatgccgaggagggtgacgaggaggacaagcagagcgagcagaagctggggcgcctcaacttcaaggtaggtctcccaattcccaatccccgtattccccaggacccaaccacacagcaggcctaatttccagcatacgaaactaaccaaacgtaactcagataggtgtaccataagtgtgggcagagttgatgttctagacacggggagcacactcacagagaggacaatataaactcaatgaatactgtaacaacttcctttataatgtttcacgtacactgaacaaaattccgtttccactgggtcatattcttgggcaaattaaattcggttctaatagctagtttcaatatccaaaatcccgaaattttaccattcagcggggaatctttccttgtgtgaaacctaatcaattagatcttggcacttacatacatattgacatattaaacaagcatatccttttgccacagtactaatatactattttccattgtctctttttggtccaaaaccaaaaacccctgttgttgccgcctttcgaatctctctctcttttagctggaatacgatttcaactccaacagtttggccgtgacggtgatccaagccgaggagcttcccgccctggatatgggcggtacctcggatccctatgtcaaggtgtacttgctgcccgacaagaagaagaagttcgagaccaaggtgcaccgcaagacactgagtccggtcttcaacgagacgttcacctttaaggtgagattggctacttttcatacaagtgctgaaaagaaatatcccttttaagcaattttctcagatttacagaacgatatcatcattatttttttgttataatgttacagagtttgccctacgccgatgccatgaacaagacgctcgtgtttgccattttcgacttcgatcgcttctcgaagcacgaccagatcggcgaggtgaaggtgccgctgtgcaccatcgatctggcgcagacaatcgaggagtggcgcgacctggtcagcgttgaaggagagggcggacaggtatgtagagctgggccggggtccacgtcggggtcaccagtactatccaagctatccgtaactctctctctctgtctatatactcgtactatatacaactcgatgtgcctctaagtgtgtttttatatccaactcaagaacatcagttgagatctgtctttcgtactcttatgattcgaaccttatgatttttcttatgcgttcgtttataatgatctaagtttttggagccgaaagcaggccgacactgaaatcgtgtgatatttgttgacttctgttctgtaatctcgaacacctacttactatatagtacgatgattgtgttttgtgtgtattttgcattcgaacttcagccacgaccaaaaaatatgaaaatacagcagacacccactgatatttgttttttaagtcaacgaacccatccccgagccccctccccagaagtacttttaagggcagggaacaaagacaattacagtgaaaactttccaaaacagatacaatatcaacaaacaacaatgaaaacttcgcggaacagacaagcaaaagttgttcgagtctcaaacgaaacttttttacacacccagttcaaaatgcaaatataaataaatcaaagaaattatcttaccatttaaataagcaatactcaacaaagaaaaccaacagcaagcgggggggtaaatcaaatggcactggtcctttgatttttccccacgctccctgacagttttttttaattttttattgaaagccctcaaacgacaccaacaactattacaaaaaaaaaaattaaactctaaatttctctttctccaattcccccctctgaaacaaaccaaaaaaaattgatttcgaaacatataaactcttgttttcttgaacttttgtagaaggtaaatacaaaaacatgctttcaattcttacttaaaccaaaaaccaaaaccgagattcctctaacacctttgcatacaccatatgagtttatgattttccctcttacaaaattatataatctgtgaactgtcgctcttgtacacaaaagcctcgtctactacgattacaataaccaaatgcatctaaccacaactaaccaagcgaatcttcaatagccatttcccacgataatcaatcaatttggtcttgagcgattgttctgtgacttttctctgtctcttctatatttccttatacgatatatccaataactatactgttgcgtctgcatactttctcgcatcattaatattgtagttgaatttttgtattaatataagcgatttatctatgtttgggctgtcttgtttgcaaccgaataatcaaaatgacaaatgttttcacatttccatatgcaaatgatcacactgcaatattaatttgttgagaaaacctgtggcataaaaaaagctaaagtaaatcagcatggttgactgattttccccgccgcccccgaacttcgaaccttctccatttccccaaaaacttttcgcccgatttcgggccaattatcctttgtcacgtattgaccatgctgatcgaattgtttagttgctcaatcttttccccaaaactacactactcacacattttttgtttgcacttggattggaacaattaaacgtcaaaaatactgaaaacttttgcatatctttcttacagtagtaaccaacttttgcaccccagttatttgcataaagtctgtcaaacttttactatccaaacatacccgaaactcacacgctctctttttctctgttaaactcacaaactcaaatacacacacacacacactctaaaacgcacagaagaaattctctgaagtaacaaacgataagttatataaataaatgaaaatgttgtaaaatatttgcattgattacattgaattggtcaaatgatggaatgaatgctctagaaatctatcacacagatacacagaaacacacacaaaaccatgtacagatactcacacacaattcaacaaacacgcacacagatacaagataaaagatacaatttcagagatggaaaacagctttaatttttcgcctgtgaatgccagaaaaacaaatggtattgtctgatcgaatcttttcggtaagccgaaagggaaggcacttgctggattttaatgaaatatttttactagacaagctttccgatttatgatccataaatccaccaggacttgcttagatattatattttctttttatttcactgacattattatttattttccaatatttaggtggtcttgcgagaagtcaacatctaagccaagttaaatccagcgaatgcttaagcctggcccaataccattatgccacaaaaaataggcataagctttattaccagactaatactgtaacttttcctactatgaatattaaaacttacttacagttagcttagaaacactgcaaatatatcattctgaacaatttttactctactgcatgcctttccttttgcttacgactttataccgatatataactcacactaagtattagaaatccacacgaaaacattgaacacggacatgcgaccattgattggttacaaaactatacgaaatttgcaaaaaccacattgaaacttatcaaaattctactggaaatggaattcaatgatttttaatacgctcttcatttttctctttaattatttttgaacgtatcgctaaaaaatcaaaaaaaaaaaaaaaaaaaaaaaaaaccaaatcaaaaacaaatccaaatctgtaatcacaaaattcgaaaactcgaaatttccaaactgtactcgaaatttttgactcatgccatggggaaatcaatccgaaacctgaaacatgcccaaaaatccatgtaagtatacgatcgaaggaacgaagattcataattatcgttatttgctttggttgttgtcgtcataaatgtgttcaaagttctgttcgttgtgtttgtgttcaaattctgttcgagctgccaaattaaatcgtataatccaaatcgagagccaatcaatccattggagcagtcgaaaaacgaattgcatattatatacatacatacgtaaaaaacgcttatttaagtcttaacttttgtgtttagctctctgtcgctgtctcgcccgatgtgtgtgtactgtacttatgttttgagttgcataacttgattgtgtactgtaatgtgtaagcagagcttcgatgacagtcaaatacaaaaaaacaatgctcaataatcttgttttccaatttcgatattttgttcgattatcttcgattactttcggtttcgattatggacctttttgtttccatgagacattcaccaaacatttaacaaagaatatttcgaaaggcacccaaaaaaaaaaaaaaaatcacaaatgataactgaacttgaatcgaattcagagaatcaaaatatttaagtccctagaaagttgcggtaagtgactccgatttaaaaaactctatcaattctctataacgctcgctcgctcgctctctgtctctgtctcgctcgctcgctctctgtctctgtcttgaaacttttttaactaatccaaataacacacaaccacacttcccatagctaagcatttatagttcaacaaatacagtttcgttttcccgggttagtttggcccttggagaagtgatcaaggaattggcatcggattggtttgtgttataacacccagaaatcgaagtaaaatctacatatatcccaccactgcaagcggttcgaaccagcctagggtcctatatgtgttataactattagccgtactgcatatctagatagatttttcatttgtaatataaacatatatatatatatatatataattatcatgtacatttttaacttcttattcattgcgatcttcctccaaaaacaagtcctactagagctagtctctaaaaatgtacatacaaatcggttcaactatgcctgatttcaacttcttatcttcttatctctctgtctctgtatttttctattctcagtagttttttaagaacattttttgaaaaccaacatatttttgcattttgtgcagtcggttttgagctgggtgttttcataagacaaacatgaagtaaagaaaatagaacatattagataacatactaatcagaagtgaaactgtaagttttggtaaagttatcaatacaaaacggagaagacacaagcccctaaaaacaacgaaaaaaaaaaaacacttgaacaatatcaacgagtttactttcagttgagtactttgcattggtttctttagttttctttttggatatactctttcccctgaaaaacatctcaataggtttatacttacacttaacaaaatcgaagctctaagacgtgcagtaaatgtttgatgtacttatttgtggcgttttcgttttatgtcaataagatataattaagaactaaagttctcgtataactaccgtactgttcaccccaccccgaaaaatccattaacttgaacttatccgagtgtatttgatttgccctacttaccacgtgtataatcgaatattcttggttattctatatatacttgttactttgcaaccgtatatctcgattaaagcttagttcgtcgtttgtttaaccgatatatatcattgggtggctaaaaactaaataactaagtgaaagctccacataaaaaaaaaaatacaatttcttaaccatatgtggctcactttcccatccttggcaccattttcgaaaagaatcaaaatcgagttttaactggtagttaatttaaagtcattgctaatgggccaagtgaattgaacaatgtatattgcataagtatttataatactcgtaatgcaaaagacgggcgaccaaaaaccctatataaatattaacccctatatactttgaaatggatatgtatatgtaatcgtaccaatagagtctgtgtgacatgttgtttgatgcaagaccactgaatcgcacgatcgaaccccactaacccatttccgtttccgttccatttctccggatatcgccacacaggaaaagctgggagatatctgcttctcgctgcgctacgtgccgaccgccggaaagctaaccgtcgtcatcctagaggccaagaacttgaagaagatggacgtgggcggattgtctggtaatgtggcgttataccaaatcgtgggcggggccgatcggggtcctgagatgagattttgttggacctgcgtcggttctgtccgcgactttgttgctttctgtgttttgtaattttagctaagtgtgtgacgtacgttgttcgttttattttcggttttgtggcatacttttactttcatttacaatatatctatatatactcgtactaacttcttcagacgtggcaaacggcaaggcaacgtttgctgttgtaacaaaaaagcgaaatcaatgagagcaaagagatactacttttattccaactacttttctactatcaattagcgccaatttatcaacttgcatatcttaccgtatttagcccaattcgcgtacgctaaaatatcaattttatcattaatcagtggatatatttacggtgcggcagcgtttccatcccgaaatattcgcacagttttttcctatgcctggcaaaccaatagaaaaccaaattcgactttaagctctatgccaatcaagccaatcaaatggccgaaaatcgcttgcttagcttcacttttgcatgtaatctgtacaatttttttgtaactcaaacactcgacatcatttcgggtccagatgccagatgctgaatgaaaagcgttgccgccgaatatatccaaaacaatttaaagttcttctaggcttttacaaacaacagaacattttcaagtgtgtttttttttaaatgctccaacaataatcggtaacaagtaattcgagtaacgaagcgaatgagtttttcgtataaattataatttgaagcaatgccttgagtttaacaggttgctgagttccaaaatgttcaactatggtacaatcagtgattgatgtgaactttaaatgattttcaaaaagccagcaagccaaagtaaaaattacactttcagttgtgttccaaaaaatctgcgagaatttgaaaacaattcgaaaagtttcaaaaagtatgaagttggaaaatattcactgcatacttttaggtacttttttttgagtggtttcaaatctttcgatatttttgtggcgcccaacgtattttttttttatatgtattgacgtttttgttttattaaacatttacactttggcctgtttcttgttttctcgttcgacttttaatttgtttttgtgtttgcaaagtaaaaattgatctactctatatataacaagtacataattattcaatgtttttggtgtacattacttatatgtgtgtaaagcaaaagataaaaaaaaaaaatcaaatatgatgtgttaatcagattattgttgaaattttactttgttataaaacgaaaatgttttctttttctttctttcaattctttccaatattatagatccatatgtgaaaattgcaatcatgcaaaatggcaaacgtttgaaaaagaagaagacaagtatcaaaaaatgcaccctcaacccttactataatgagtcgttctcatttgaagtaccatttgaacaaatacaagtatgcgagaatgtattatactatcctataaataccacaactactactactctactactatactactactgcctactgcctatacaaactacctactactactactactattactgttactactgttactactgtcctcttctgaactatctaccaaagaaaccaaaccaaaccgagttttgagtacccaacctccctctaaacacacactagcctacttacgtgcaatcgttgttgttaattatactacatatataccgtatatatatatatatatccatatattgaatacttgtattccgaaacaagcgacaacaacaccaaactctgaaccaaacaaccgaacacttttagagaccaatcttcgtattacccataaagatatctaaacttcccccaaaaactaacttaatcaatctttgtgttctatcaaaaatcccctaaaaaaacaaaaaaaaaagtattcaatgttaaatgttgtaattttaaccaaaatttgttcgagcttcttttatgtttgataatccctgatttactattgtaaatatgcaaaacggaaactgaaagcccaacaaatttagcaaatattttagtttgttgcctttgtttgtgtagtctttgagaaatttttgtggaatctgatttctgttctgaatttgagttttaaacagcctcgatgtgtgcttagcccagctgatttggtttatgttttagttgttaaatgtgtaatgatcgatttgaagacaatctggcaagcggtaaagcaatgacaatcaggcatgcctagtggcttaggaatccgtaaactccggcaatctagttgccccaattcacacaccgtcttagatgacattttgaatggagagcaagccgtagtgtgcccgcttcgctcgcaaccgagcaaaaagcagccaagcagaaaagcataagcataaaaagcataaagcattagcgtccaagcagtcgagcagaaaagcataaacgcaagaatgcagccaagcacgagccttacacacactacgctcactccagagaactacagtgaatacaacctaatacaaattcgaataccaacttaaactactctttccataatacaaactatcgcaaactcctataccagcggcgtcaataatgcaccacgcagcaaccaaatcgcagtgggtacattattttgacactgtcttctgatttgaatatcgaataccaatcgcaccacaacagctacagtacaaatacagtttacacagaataaatacccaaatgccaacacagagaagtatagcgtatcaccatgaataccaatcataccaatcaaaccaacatatagccaagcgatctggaaaacggggagaactctgttacggttacgttacgtgtgctagtcgaagagttagccccctgtctataagtaggacccccatgccatgaccaattaccaaagaacgacgaatgggattgaatattatacattttcgtttacacgtatttaatgaacatttttctttttgccacagcttaagtgtctgctatcaagtatcgagaaaagtaatttgttcattagtccccgaggttaaaggtggcgagataacatatatattctcgtccctacataaatccgaatctgccgacatcttcatatgcttctcaccttacgcaaatcaaaagcttttaggaatttcttgagtttcgttatcaacatttattattttaagctactcattcttagccttagacatttgcatgatctgcttgttaattcacaatcaaaaaaaatatgaacaccataagggaatactactccacagcaagcaaattcctcgccgaaggagctttttgtaatgcttgaacgccctttagatgttaaacccaaatcgaaagtgcttgtgcaaactggaagtattccacccgacgatctccacgattaaatctagcctgcactataactaatatacagcactcaaaagccgaaaatattccacgtagtgccgaaaacctctgtctataacctgcttcccagtacagcattcgtagtgtctgcctgttagcgaacaacagttcccacttcaatcccccaaaaaaaaaaaacaacttgaaacccaaacagaacacgtatatcgaaataccgaaaagttcttcaactcaaaagcgaagccccctcccgttcaaaagagatatagaccgaatcgaaagtagccgcatccagaatatccctactaatgccgttcctttccttgaaccctcttcctccaaatcgcgcacagaaaatctgtctcgttgtgaccgtcgtggactacgatcgtattggcacctccgaacccatcggccgctgcatacttggctgcatgggcaccggaaccgagctgcgtcactggtcggacatgttggcctcgccccgccggcccatcgcccagtggcacaccctcaaggatcccgaggagaccgacgagatcctgaagaacatgaagtaaggcggcaacatggataaccaaatgcaggtgagtgatataaaaaagaaaagaaaacaaatatcctaggtgtctgaaagtatgcaacaataacttgtaagtggattgccctttcactgcatactttcagacacctttaaggatggtttctaaccactggaatctggaaacctcaacttacgatccatgaactcaagaactaacctctccactcgatctcatcgttgacagacttacagcacatctatcaaacgtataaatgtaaccaaagaacatgtacgcgaaccgtcagacattgaaatcgaatgcatcatcatcagctacaaaacgatcctcctcacccgaaacgacaagcaacaatcagcgaaatatcgtagttaatgcaaaaattgttcatctatgcagttatctcaacataaacatactggaacacacaaaatgccgattaagtaataccataggtgtctaagttatatctcattggttgcgaaagcaaagcgaagtgaaagctatgaaatcctatatagaaagcaatgtgcaatgtgtccctttcactggccggaatcccaaatagttcgatcgattttacatataaatccacacatgaattcattccgagatctatgaatttgttgttgtcccaaactatgaaatttacgagtatgttcttattaaatgcaaaactctatatactcaaactatttaacggatgaccgcgagagtatgatttttaaaggttaagtttactttcgtttttaacttagtgcaatgattaaagggatctttccggttttaaatttgtttttcaatcgttgaaagattactagtgaataatattactgactaatgaatatataaacaaacaagcaagcaaaacaagaacgtaaaggcaacttaaactgttatgtaaattatttattatgtttattgagcattacgtacttaactgtgtaagtattaatctatgtgtgtgtttaaacgaagtgaacatggcagacatattaacatgaggacggaagggaaatcataaaatatatattatatataaatattatgtataacgacctaacagaatcagacgaataagtagaggggaaaccaaaaaggaaaccgaaaaccaaaagcaaataacaaaagttaaactttgaagcgtgatttcaacggaatatatcatcagtttaaacttaaagaaaatatcgaacattttgcacaatggatcagattggaatattcatttagttcgaacaacttgatttacgctaacttagtagaaatatggctcagtttgggaaaggtttccatttccgataagtttatccctcggttagctttgaattttcgttcgaattcagattttttgttcggtagcttcttcttctcgaatattaaggtttctattgtacaactatctatgagtcgttttactcgtttccgactttatcacattccctgatttagaaatcatattaggacctaatgaaaatatacatactaactaaatgattatggcaaaatgttaaaacagaaaaagaaatattaagaacaataatagttattactatttatattatattcaagtatatgacatctaaacaatata

SEQ ID NO: 5771 - DNA, 2244 bp, DROSOPHILA
tgaacatcgaccgtggaagttgactgctgaagtacaaagcgctaggctgaagtatacgaaattcatgtgagactagcgagccgcggcctcactagccaaagccagtcacaaaaaaccaaaaacataaatcaggcagcagcagcagcacacatacatcgacaagcgccaggacccgcatcaccatatccttcctgccaaatagtcgccactgctgccgaccctccccgctcccctcgcaggagtcacgcttcgttaaacgctgctcaaaacccatcatcctaactaataaagcggacgataaacaagcgaattaagtaccaaaaacgaccgagctattaacgctagtctggatcccaattgctgattggaaaggagaaacattggcagcatttctgattaggggcaacaacacagcaaaacaaaatgccgccaaatgcaaaatcggaaacggacgccaaaccggaagcggaaccagcgccagcgtctgagccggcagcggatctggagtccgtggaccagaagctggaagaaacacatcactccaaattccgtgaagtggacaggcaggagcaggaggtgctcgccgagaaggcggcggaagcggccagtcaaagaatcgcacaggtggaatcaacaacacggagtgctaccacagaggctcaggaatccaccaccaccgcagtgccggtgatcaaaaagatcgagcatgtcggcgaagtggtcaccgaggtgatcgcggagcgcacggggctgcccacatggggcgtggtggccatcatcatactcgtgttcctcgtcgtctttggtataatcttcttctgtgtgcggagattcctgaagaagcgaagaaccaaagatggaaagggtaagaagggtgtcgacatgaagtcggtacagttgttgggatcggcgtacaaggagaaagttcagcctgatatggaggaactcaccgaaaatgccgaggagggtgacgaggaggacaagcagagcgagcagaagctggggcgcctcaacttcaagctggaatacgatttcaactccaacagtttggccgtgacggtgatccaagccgaggagcttcccgccctggatatgggcggtacctcggatccctatgtcaaggtgtacttgctgcccgacaagaagaagaagttcgagaccaaggtgcaccgcaagacactgagtccggtcttcaacgagacgttcacctttaagagtttgccctacgccgatgccatgaacaagacgctcgtgtttgccattttcgacttcgatcgcttctcgaagcacgaccagatcggcgaggtgaaggtgccgctgtgcaccatcgatctggcgcagacaatcgaggagtggcgcgacctggtcagcgttgaaggagagggcggacaggaaaagctgggagatatctgcttctcgctgcgctacgtgccgaccgccggaaagctaaccgtcgtcatcctagaggccaagaacttgaagaagatggacgtgggcggattgtctgatccatatgtgaaaattgcaatcatgcaaaatggcaaacgtttgaaaaagaagaagacaagtatcaaaaaatgcaccctcaacccttactataatgagtcgttctcatttgaagtaccatttgaacaaatacaaaaaatctgtctcgttgtgaccgtcgtggactacgatcgtattggcacctccgaacccatcggccgctgcatacttggctgcatgggcaccggaaccgagctgcgtcactggtcggacatgttggcctcgccccgccggcccatcgcccagtggcacaccctcaaggatcccgaggagaccgacgagatcctgaagaacatgaagtaaggcggcaacatggataaccaaatgcagacttacagcacatctatcaaacgtataaatgtaaccaaagaacatgtacgcgaaccgtcagacattgaaatcgaatgcatcatcatcagctacaaaacgatcctcctcacccgaaacgacaagcaacaatcagcgaaatatcgtagttaatgcaaaaattgttcatctatgcagttatctcaacataaacatactggaacacacaaaatgccgattaagtaataccataggtgtctaagttatatctcattggttgcgaaagcaaagcgaagtgaaagctatgaaatcctatatagaaagcaatgtgcaatgtgtccctttcactggccggaatcccaaatagttcgatcgattttacatataaatcca

SEQ ID NO: 5772 - protein, 474 aa, DROSOPHILA
MPPNAKSETDAKPEAEPAPASEPAADLESVDQKLEETHHSKFREVDRQEQEVLAEKAAEAASQRIAQVESTTRSATTEAQESTTTAVPVIKKIEHVGEVVTEVIAERTGLPTWGVVAIIILVFLVVFGIIFFCVRRFLKKRRTKDGKGKKGVDMKSVQLLGSAYKEKVQPDMEELTENAEEGDEEDKQSEQKLGRLNFKLEYDFNSNSLAVTVIQAEELPALDMGGTSDPYVKVYLLPDKKKKFETKVHRKTLSPVFNETFTFKSLPYADAMNKTLVFAIFDFDRFSKHDQIGEVKVPLCTIDLAQTIEEWRDLVSVEGEGGQEKLGDICFSLRYVPTAGKLTVVILEAKNLKKMDVGGLSDPYVKIAIMQNGKRLKKKKTSIKKCTLNPYYNESFSFEVPFEQIQKICLVVTVVDYDRIGTSEPIGRCILGCMGTGTELRHWSDMLASPRRPIAQWHTLKDPEETDEILKNMK

SEQ ID NO: 5773 - DNA, 9985 bp, DROSOPHILA
agaacacgcatgataagtaagaatcgattttgtttaataaaaacgacagtgcgtctatcccaagaccagcagtgttgtacataccggcttcctgtttatcaatcagttactgcgacacttgtagagcgaatctcatggtgtggcgctagcatcacgcatttgaatccaccgcgccacaatctcctagcgggtagttacccgggacgattgtggtaattttcattgagatacacatagaatccgcatttaatgctttatgttgcatctcagatcaatcacatatgtatatacatatatgtatgtaatttgtgagttgcggcacagctgattgcgttactatcggctatcgtcggatgatcggtcagggctgcaaatgtgtaaataaattcgtagtgtttttgatctaatcaaaaccataaagttgagatgttctatggtgttgctgctatcattaaaataatatgaaaatataaaataaatatatgaacagtttgagtcaatggtcaatggcgtgactcacgaacgtggtgcgataccggtggcaggcacgtgaggatggcccatccctggattggattgcgcaaaaataaacagaacgcaaattgtttttgtgctcggcaattcggcgaattgcactttacctaataatttatttattcaacacaatacatctcgtggaaagctgcaaattagcaatgagtaagtagactgcactcagtggctcacaactgaccctcgaaatcttcgctagatcacgacgcattaactcttagattttgtttttatttaaaaatgttatgttaaattacaaaaaaaatgtatcacaattagaattattttcgtttcttccttttgtcgctgttgctgttgttcttgtcgtgctggtttagtagaaaagtgaaaagttgattgaatattttggatcgtgtgcgccggtagccctagaacttggagtcatcgtttcggtggacatgtcgtcgcttgcctgaaaacgatgagattagcaaatttttataagcccatcctgatcaccggacattccaggatcaacgctgcacttacgaccgttgcagtggcgtccatagaatcccggatggcacttgcagtgcttgtgggagacgcaggtgccattgcgacacttgcagatggagcgctgcttgcgcccgatctcgcagtgatcgcctcgtagtccgttggggcagcggcacaggttgttcccgatgcaccgtccctcgttcttgcaggggatcacacacttggctgtgagggaaatgggtgggcaaaggttcagtgtttcgcctcgataagagttgagccgtttgctactcacagtactcgcaacgcaggccgtagtaacccttggagcactggcacttgtccttctgtatacacttgccgccattcaagcacttgtccttgcaaatacctgttgattacaatgggatactattagttgcgcgccaggcacatttcattcttatataatgcccagttatcttgccccaagtgtacttaatcatcgcgtatcgtatcaccctccttttctacgcagatggaatgctgagaagaggtcttagccggcccgagccacgcctgctctccaagcgctatctaagctcagcaactggaggaggatcagcaggcacgaccgaaggaggcagctctgaaaccaccccgctgcgtccacgtccaaatgcgctcacagatgagattatacgcgtcgatcatgccggcgaattgggagcagatcgcatttacgccgggcaaatggccattctgggcaacggaccgctgggcaagaccatcggacacatgtgggagcaggagaaagagcatcgtaaacagttcgagcagctcattcaacagcaccgcgtgcgtccaacgatcatgacgccaatttggaacgtggccggatttgtgctgggcgccggaaccgccctcatgggcgaaaaggcagccatggcctgcacggtggcagtggagacggtgatcgtagaacactacaatgaccagctgcgtcagataatggaggcaccgaacccggataaggtaagtaccatttgcaactgccccaagcaacggacgaagtaacaacgttatatgattttgcaggagctgttggccaccatcaccaagttccgggacgaggagcaggagcaccacgacacgggcattgatcacggtgccgagcaagcgcccttttaccaggccatgaccgaggtaatcaagtttggctgcaagacggctattgccatctcgaagaagatctaggctgaaacagttgggccccctgtatatatcaaaatcaaattatctgttccgctaagctaaccgtgttaagcattaaagatagagctaaatgtccataatagtcgcgtctacttaccaccttcgcactgcgtgccctggtagccctccggacaggtgcagacggacggcgccgtgcagttaccgccattgagacactgcggaaaacagaaggccgtctcgcagtattggcccgtgtagcccacgttgcacttgcagatgtggtgctcgttgcagtacccgttcttgccgcacttcaagctgcattctggatcgggagcttaagtttttttagtttagttcaatcgttcgcatgtcacgaggcataaacactcattttaacactcatttggactcacacttaacggagcacatcggaagcacaaagaggggcaggttcgagtagacagtggatacatagatcatagatagatagatacaaaagcggttggcgtgggagcaaagggtagatcgtatcgaattatatattttttgcgggctatcaatcaataatttactatcgaaaaatttggaacaaatttgaagaattttcgaattcaagaatgaatgcaattaaatttacaatttcatataacatatctcataaaggctatatagttccttgtgacttgaatatgtgataatgtcattaggtagttactttcgccagattctctttgatagcccgagtaatttagtgctgtggaaagagtgaagagctgggtgcaggggactcgtgaaaagcgactacgtggggtaatggaatcggattgaatcgaatcgaatggaatggaatcgtgtgggcggggatggcatgctgggatggcgcatggatggctgatgggcggagtgtgcacaacatgtatgtataatgctaatttacaattactatcgactagataaaagcattgcttgatatttcatatacactaccttgcaaagttgttagtgaagtagggttggaagcgtctatatcatacacacctctgtgggcgcattcctttttgaagttgaggcgaatgggtgtgcccgagagcggcttgttgtggcgcgtctggatcttgaggccgacgttgaaggacgcggtgccggagctgttgccggtgcagggcaggaatatgctaaaatctggcttgggatgaggcttggttgccgcactctgacaatcttcgccgctgccgcagcagcccgctctacttacttttctgctcctgcggaatgcgtccgctcttgcgaatggacagcgttggcgccttcaagatactttcatccatggtctgcaggcggtcaaagtcgtagaagtatttgcggcgccccgacttccatgtgaagttaacgtagttgacctccgatgggattaccaggaagttgtacagcgtcgtgtccctcagatcattggtcacccggctgttgtgaatggcgtacaggcgctccgagtagccctgtgggaagtagagcgctgtggaggaggagaaatggtttaatgtccaggtacgtccaggtacaatttaccaactttttttaaggacatatgcatatttttttgaagacaagcatataggcattagcgaccaccaacctgtaagcattttgagctgctgctcattgatccacaacgagatgccgctctcctcgttgcgattgtgccggcttccaccgcctcctccgtttccgccgccgccgccgctgcctcctcctccacctccctgctgtttctttcgttgaccccgacgcggctggtgtccatggccaacgaagctggcgtcctgatctgcgaagttgtccaggccatcgctggtgttgccgtggccctcctctgagctggacgagtccgctcttctgttattattattgttattccgattgtggtgctgctggcgacactcgagctggccgatgcagaggagcgtgtgcacgatcagcaccagatataaccacttgaccaggcagccgatgccctgatgtgtcatagtttccccagctggcaaagcaaaccgaaacggagattgaaattaaaagtaaacgttgccagtgagtgcattatggcctggccagaccacccccacctcgcaaccaatccccgccaaatattggatatctgattgcttattgccgatcgcggattgccaatcccacacccatgcagtttgtttatcttttgccatatttgcagacccgcgatctatttgcgattcggtttcgctgctctggacgagggaattatctatccgctgtaggggattgggcatactctgtgtgctagcactttagatttccaggaatagtgcatatacatatgtatatgtacatacatatatatgtgattgaatcgcttaggttttttcactgtcagactacatattttaactcaagagtcacaagtgagttataaaacataaccgaagagcgaagttgccaaccagcaactgaagtgtccccattccggtgcatggactgccctcggcgaaacccccccaaccctcctccccaaaacctcattcagcttggcccgattgaagcgctaaacggcagtctctcgaaatgatgcagaagtgaaggaagagcaggtacaaagtcgttagcactttgcccggtgtgaagttacccaagtcaacgagggccaactccagccagccagccagccagccttgttacacggcagaccggacagccagaagccagacgtttaacacggccaacaagtgaacggacaaaagagacccagtgatgacactttgaccttttttctttggccatttaaaatacaaattcttattcagatatcttatcacatgagtaaaaaattcgcatcatctaaaagcctagcttaaaagtggctttatctgagagcaggttggctggctttcacattaagatttccaatttccaattccaagctctatagggctctgaagaaatcactgaggaaactcacagcaccactgactggacaagcgatcgatcgagcattgtccgtccatgtcccgtccatcacgtatgaatgggttgattcgagatccggggacagggcaaacgacgatgatgggcaagaaaacaagttaagctgtcttaataagatcaaacatggcgattatgaggaattacttggagataatgacatcgtccagcgactcaaagggctcggactctcgaagattgtgctctgggatcatcgggcagcaagaccgaaatccaactccaaacttatctgcaaaacggcccctgggaaatgaattcgttaagtgaactaattgctcttgtggatgcccagcgtgcatgcatgaatatatccgatgtgtatatccagatagtaattgaatcagtggttaagaaatcgtaggcggaagtaattcatggagctggcatattacaacgcaatataaatatatgtatgtagaacataaacgggaacgtcatatggccatcacagattggaattgaaattggattcgaaatcgggatcgtgtggggatctcgggatcgggaccgggccagacctcgatttcctataaatacgatgttcacgctttgttttgaaattatttttatttcgtgctaattaatggtcggtcggccgataaggaagcacatgatggcgatagccggcaccggcgcatagataatcccactcatggtcaatctaagtccgaatcagaattggaatttccagctaaggcgcattcgcagcgcaggctgaggaaagcttagtcagcgtgcaattaatagggagatattcataaaggtgtaaagtgtatatatataaacatatatatctatataagcattaacttaaccccttttcaccattacactgagcagttagcaagcactcaactactgttggactgaagaattcgcgtgtctgttactttcccttcgtttggttgtgagaggatcaggtgcagtgcagggaagtggttatcaaacaccgtatcaggtcgatggaatgaagatgaagatggccatgcattgttagtgctgtcgtcaacgatataattgcttcagctggaggaaaagggacagattaacattttagcgtgaaagaagagagatgaggagatggaggaggtggagtggcagtagcaatcaaagtaggaacggcagcagcgcaacaacaacaatttgttagctctttacgattattgcctttctcacaccttattaccaagaaaataaagaagcagcatccacaggggcaacaacaaatactcgacgatgagacgtgaaaataaaaaattaaagaacccaaacacacacacaaggtacgacaaaaggcaacacaacgagaacaagaagctgccccttggagtggcggagtggactcgactggactggagtggactggagtcggagtggagtgggatcggatgggatgggatggaactgagactggaaaaggaagtgggggcggaggagaggcactggaaatcgcacactcacagccagccattaatggtgtactgcaggtgcaagcgagaggcaagttgttcataaacaatcccaacgtaaaaaatgacatacaccgagaaaagaaaccctatcgattccaaattacccatgcagtagttatccaaaacaaatgtgtcgaaaccgagatattacacaatattttttggatatcttaggcttattttacagatatataagtacatacgaatttgctcagatcagatatcaggatcaagtgctttgaaaatatccaaacatatcatatgtttctccctgtgtagtatagagagtacaagcaatttgttgactcaaaaagacaaagtcatcggctaaaaggatttcgaatgaaagagcaagccagatgagcaaggatgagcgagtgaggagagttacatactttcccggctaccgatttaaatgatgtccagtaacaacaacaacaacaacaacagcaacaagtggcacttgcagctctgtttgcttaatgaaacaacagcgacacactcacactggcacacacaaagtaacaccaagcgactgtgtgaaacaccaacaaaaacaccttgggcaaataatgcagacaggacggccacagtcgacttgctaaatacccatcaagtgtttggacattggccaattggaagcatattgtttcttgagcattcatgtgtgttttactttaagaaaaagtaaaagtatctgtaggaacaaatgtatctacaagatattaaagtatctataagatacaaaagtatctataagatacaaaagtatatataagatacaaaagtatctgctggattttagtgcatcagctcaaggttattatgcctaatttctaagattattattttctccgtgtaggtcatagctgtgacacctgacctagagggtgttggcctattcgtgatgctctagactggcgcagcccattaatcctggttgctactcctactgatgataacgatcaccaattgagtggcaaaagggagtgggaggaggaggggtagaagtagaaggaggggagccagacaacaggcggataaaaacgcctgtctccaagtggactcaagtgccgcaggaggtggaggttggagttggagttgaagttcaggttggtggacgcggagctggagagggggcagcgcagcgagacacgcaggctgccggacaaccggcagcatgggcatcaggacaagcagaagaagcagcaaagtcagaagcagaagctacttgagagccacagaattccgattccgatgaggcgatcgtgtgtctatatgtatgcatgctggagagtcaggcattccactccactccactccactgcagtccacttcattaccagttcgcagatcgccgcatccagcatacagctccaaggagctggcaatcaaatggccaacgttggacaatgactttcacgcctttcgagcgcgccaaaacgaacatgtcaagtacagccgaccagcgggcatcccagataccctacatacctcggtagctttggcacttgggtattagttttacgacaaattttcgaataatcttggcactatcagtttagtttcgaaatggcccaaactatcattccgttaggggaaagttaagatcaagaatctgcctgcgaaaaagttatattcgctaatttagcttatctgttttggttttatatctgtgcacttctcacatgcaaaattctgcccgttttcaattgcacttaagcctacaatctggacatcaactctcgatctttcgatcaatcgagcaaggtgatttgaatggccaggtgagatacccattgatatgggtaaaaaatatgcaagtgctttcgcacttcagcggtttagttagttcttatcacaaaattgcgctagtgcgagattaaaactctgcatgtctagcaatattttcacaacaatcacataaacttaggatcacaggttagttttcaatttcaaatttgcacactttacgtactcgttggctgtcgccggcttgaaacaaaaaaaaacaaacagtcgtttcgttgacaaaatacaagggtgtaaaaaacaagtaaagcttgatttgttggtcctttatgttccgatttacatgagccttaaactttgcacgtatttcgttggctcgaaagctcctttggggcttgaacacaaacgcgaaaagagtcggtttcgacacttgaaaaatcccgcaaagtttcgtggcgcgaccgtcgcactgcagctcctgagctcatctgaacaaaccaacgaaaaccggcgaacgtttcgatcgcagcgcagtgatgcccgctccctcgatcggatcgctctgctaaaaagaaaggaagaacacatgacgcttaattgccaaattccccttaaattcccatcgaatattaagtattaatgaaatgactgtcataaaattaggcgcgtatagaactgtacaataaattatgattattttggaaaattgttgatagaaagtacgtaccttccaatgcattcgttgaactctacaaaccagttggccatagtttatttatacaaaagtgcttctgagtattggtatttggtgaggacataaaatctaatggcgctttgtattgcacagaaaaaaaaatagccaaattggcatcactactgcggttgcctctctcgaaccttcaaacaattctctcaaaccgcttcaagccgcaacctcgctcttaaaagcattaaacaatttaaatttagtaactgcttctttgtatcaaaggcagattgttaattgtttaaaaaaatgggttaaataattaatttgatttttttcccaaaacatcgtccgctacaaatgatcgatttttggccaaagttcatacccagatttttggcgatataaatcctatatatacaaaattaaataattgtcattacgctctgttataaatgcgaatgtgtctgtttacaagtcgtacaaaacagtgccactcttttcggctaagttattgaaaaagcccattcaaaattattaaatttttgaaattttttgaaaaatataatcagttttcttttggatagcaacaaagagagttgaacaatattagaatgccatgccccactaaactcaaaattaaatttcccatttaactatatttaaacatggaaacggtaattttatcgaaaatttcgatgacttacacccttatcgaaaatgcgaacatttttatttcgaatttaaatagtcatatgtgtttattggc

SEQ ID NO: 5774 - DNA, 1587 bp, DROSOPHILA
ctgcagtgcgacggtcgcgccacgaaactttgcgggatttttcaagtgtcgaaaccgactcttttcgcgtttgtgttcaagccccaaaggagctttcgagccaacgaaatacgtgcaaagtttaaggctcatgtaaatcggaacataaaggaccaacaaatcaagctttacttgttttttacacccttgtattttgtcaacgaaacgactgtttgtttttttttgtttcaagccggcgacagccaacgaatgacacatcagggcatcggctgcctggtcaagtggttatatctggtgctgatcgtgcacacgctcctctgcatcggccagctcgagtgtcgccagcagcaccacaatcggaataacaataataataacagaagagcggactcgtccagctcagaggagggccacggcaacaccagcgatggcctggacaacttcgcagatcaggacgccagcttcgttggccatggacaccagccgcgtcggggtcaacgaaagaaacagcagggaggtggaggaggaggcagcggcggcggcggcggaaacggaggaggcggtggaagccggcacaatcgcaacgaggagagcggcatctcgttgtggatcaatgagcagcagctcaaaatgcttacagcgctctacttcccacagggctactcggagcgcctgtacgccattcacaacagccgggtgaccaatgatctgagggacacgacgctgtacaacttcctggtaatcccatcggaggtcaactacgttaacttcacatggaagtcggggcgccgcaaatacttctacgactttgaccgcctgcagaccatggatgaaagtatcttgaaggcgccaacgctgtccattcgcaagagcggacgcattccgcaggagcagaaaaattttagcatattcctgccctgcaccggcaacagctccggcaccgcgtccttcaacgtcggcctcaagatccagacgcgccacaacaagccgctctcgggcacacccattcgcctcaacttcaaaaaggaatgcgcccacagagaatgcagcttgaagtgcggcaagaacgggtactgcaacgagcaccacatctgcaagtgcaacgtgggctacacgggccaatactgcgagacggccttctgttttccgcagtgtctcaatggcggtaactgcacggcgccgtccgtctgcacctgtccggagggctaccagggcacgcagtgcgaaggtggtatttgcaaggacaagtgcttgaatggcggcaagtgtatacagaaggacaagtgccagtgctccaagggttactacggcctgcgttgcgagtactccaagtgtgtgatcccctgcaagaacgagggacggtgcatcgggaacaacctgtgccgctgccccaacggactacgaggcgatcactgcgagatcgggcgcaagcagcgctccatctgcaagtgtcgcaatggcacctgcgtctcccacaagcactgcaagtgccatccgggattctatggacgccactgcaacggtcgtaagtgcagcgttgatcctggaatgtccggtgatcaggatgggcttataaaaatttgctaa

SEQ ID NO: 5775 - protein, 445 aa, DROSOPHILA
MTHQGIGCLVKWLYLVLIVHTLLCIGQLECRQQHHNRNNNNNNRRADSSSSEEGHGNTSDGLDNFADQDASFVGHGHQPRRGQRKKQQGGGGGGSGGGGGNGGGGGSRHNRNEESGISLWINEQQLKMLTALYFPQGYSERLYAIHNSRVTNDLRDTTLYNFLVIPSEVNYVNFTWKSGRRKYFYDFDRLQTMDESILKAPTLSIRKSGRIPQEQKNFSIFLPCTGNSSGTASFNVGLKIQTRHNKPLSGTPIRLNFKKECAHRECSLKCGKNGYCNEHHICKCNVGYTGQYCETAFCFPQCLNGGNCTAPSVCTCPEGYQGTQCEGGICKDKCLNGGKCIQKDKCQCSKGYYGLRCEYSKCVIPCKNEGRCIGNNLCRCPNGLRGDHCEIGRKQRSICKCRNGTCVSHKHCKCHPGFYGRHCNGRKCSVDPGMSGDQDGLIKIC

SEQ ID NO: 5776 - DNA, 3507 bp, DROSOPHILA
tatatatctatattgtataatgagaatcgtcggttctgcttgatctaaattggtgcctgtgtttgctctatgtgctaagtgccgaaaacatttgaaacatttttgttgctgctgttaacattttccaacttcgtccaaccaccggaccagacgaccatcccatcccatttcatcccatccgcatccccgaattggagcatcgagagccaaggcgattgcaattgcttgtgaatgtacaaattatataaatgtatatatatatatatatcagtgccaaatatactttacaatatatgtgggtgaggcattcggtgcagccgtgggccagtacgaatctgagtgcacagattcttccggaggcccgacaactgaccagccggaatatggcaagctaaccgaaggagatgtgttatgtgggctcaaaggcggagtattcggcagttcggtttcccccaccaacgaaccactaacgaacaatgtgcaatgcctcggcccgcctggtgatgctcggtatggaactgggttgtttagtctgcccctcctgccgtcgacgccgtcgctgctgctctttcagctccttctgctccactgactcctgctcgtgctcctgctcctgggtctgctcctcctgcagcaccttccgccttccctagtcgccgctgtcttcccacttgcgctcctccatgatgcgatcaaagcagtccgcaaggaatgcatgctgcaagatggaaaacaatattaattaaatgcaattcacatgggagtggaatggagggacttgtggcttatatattgtgcagctgacctctctaaattacattcctaatcaacaagacaattgtttgccaattaattatgtcgtgtgcatcacacaatggtaattaaccaagttcaatctaccatatattacaatattaatgggaactatataatggctatactatattacacactatattgcacttttccacaaccaaacttacatatggcgtgtagactttgacccaacgtgctggcttatctggacgattgtactgaaagcagaatgacatggactcctcgtcgctctcggagcgcgtaatgctgtcccaggtcagctcgaccatttgcgcctccagcgagccatcctcacggcaggcgtgcagccgaaagctcttcatgcctgtgaataaataagaaatgttactagattgcgttgaatagaggcgtctctaaatacaattactcacccacggcgggcacaacgtgtccctccttgcgactatcacaggagcagtggggaaagacgacatctccgtatcctggcagtgtgcgggccaaggccagataatcgcccgctttcttggcgtcctgcagcgccttcagctcatacaggcgaccatcggctcggatattgccgcgattcacctcgtcgaccgcctgatagaagataaagcggccagcctgttcgccgtccggcagcgtcagctccttggccaccgagaagagccagcgacggacgcaaaggcaggtggatgaggccgtgctgtagttctgcacgtacagctgatgtggaatctcgtgcggctgcagctttcgctcaaaattgtactcgacaatctcgaacaggtaaaaatactgctgcgtgtaggcggtgagattggcgcgctgcaccagaatctcccacaccacctgggcattggaggactttttcaccgacacggtgctaacttcgtgatcgggcagcatcaccttaatgtccaccggcgatgcggatatatcatcctccgtatcggtgagaaagtcctgaacggcatcgctctcggcaatcacccgcacagcacagactttctccagatactgctccagaccgcgccgcctcgtgtccagctgctgttcgcttagctggaagggccacttgccgggcagcttggggaagttaaagccggaaaactccttgcgcagcagcgagtgcaggttagcaaactctcgatagcgacgcgaacagagctgccttccagccatgtgtatattgaagacgatgtaccgctcgccatttcgattcacgatcccatagtccggtatgctgaacagggtatagcatatatattagttatccatttaacaatgtttgtctaactacttttgtactttacctaatgggcagcgagcgcttgtccgaataatcgatgtaggagtaaccgctctgatcctcctgcggctccagtcgatcggcctcctattgtatggtatatgtgtggtgttatgttttgtgattaaataaattgtattttgaactcacctgctgtgtcactgatatcaccgtcagagttaggcagtcaccgccggatttgatcagatctacgacctgtttatgtgtggctccctcgacgctgacgccatttctgcaatttaatggagaaaagcattaaaacatcattttgtttctttttttttttttgtcatggcagtgtgctataggagctatagggaaaacccaaccgaagacaacgtttctctaaggccatcaactgtgcatactgaacagaatgaaagggtagcatttagcacggaggttggaaaacgaagaatgaaatcggtgctgaacgatcgtcgctggcgaattaaaggcgttgccatcgagcacagatccatttaagcgaaaataacaacagtgggagaccagagatagcgtcgataatggatgcattgacatctcgcagtagcgttgataaggcggcgactctggatggtcgacggattggcgtctcttcgatgcgggtcaggttgaaatccacttgtattgtattgtatctatctaggagcgatgctctcgaacttgagaaggttggtagagacagagaaacccatgaggggaaacaaatcacattttagtgataagcacttaattgaaattacaagtataaatctggcaatcgaatagggggcaataccacaattactaaaattgaaacgacaacaaatggcatcaatgttatttacaccacctcgaatccgcattaagtgaatcaagttgatatagcaatgaaatgggagcagcgaaaggccttggatatgggcagctcgcagccttcttcctcgatttccttcacttcgccggaggaggaggcgtcttccggcttgcaatccccattgcatccgtaagtgaagcaaagcaaagtaaagtaaagtaaagtgagtgaataaataaatcgctgcagatatcgtcgcacattgtgacgcattgtggaatggttgaaaggctcccgaggctcgcagcatgactcacatagcgacatgtcagaaatccagaaatcggggggccaatcagccggagtggagtgagtgggaggagggggggggggtgtgttgagggaatggaaggagatgtggaggagagttcagtgcaggagactgaaactgaatctgaaactgaaacctaaaccaagacgcgacgactctgctccggaaacctgtttgccagccacttggtaaaaatagttaagaaatacagcaacgcaacaaaaa

SEQ ID NO: 5777 - DNA, 1296 bp, DROSOPHILA
atggccttagagaaacgttgtcttcgaaatggcgtcagcgtcgagggagccacacataaacaggtcgtagatctgatcaaatccggcggtgactgcctaactctgacggtgatatcagtgacacagcaggaggccgatcgactggagccgcaggaggatcagagcggttactcctacatcgattattcggacaagcgctcgctgcccattagcataccggactatgggatcgtgaatcgaaatggcgagcggtacatcgtcttcaatatacacatggctggaaggcagctctgttcgcgtcgctatcgagagtttgctaacctgcactcgctgctgcgcaaggagttttccggctttaacttccccaagctgcccggcaagtggcccttccagctaagcgaacagcagctggacacgaggcggcgcggtctggagcagtatctggagaaagtctgtgctgtgcgggtgattgccgagagcgatgccgttcaggactttctcaccgatacggaggatgatatatccgcatcgccggtggacattaaggtgatgctgcccgatcacgaagttagcaccgtgtcggtgaaaaagtcctccaatgcccaggtggtgtgggagattctggtgcagcgcgccaatctcaccgcctacacgcagcagtatttttacctgttcgagattgtcgagtacaattttgagcgaaagctgcagccgcacgagattccacatcagctgtacgtgcagaactacagcacggcctcatccacctgcctttgcgtccgtcgctggctcttctcggtggccaaggagctgacgctgccggacggcgaacaggctggccgctttatcttctatcaggcggtcgacgaggtgaatcgcggcaatatccgagccgatggtcgcctgtatgagctgaaggcgctgcaggacgccaagaaagcgggcgattatctggccttggcccgcacactgccaggatacggagatgtcgtctttccccactgctcctgtgatagtcgcaaggagggacacgttgtgcccgccgtgggcatgaagagctttcggctgcacgcctgccgtgaggatggctcgctggaggcgcaaatggtcgagctgacctgggacagcattacgcgctccgagagcgacgaggagtccatgtcattctgctttcagtacaatcgtccagataagccagcacgttgggtcaaagtctacacgccatatcatgcattccttgcggactgctttgatcgcatcatggaggagcgcaagtgggaagacagcggcgactag

SEQ ID NO: 5778 - protein, 431 aa, DROSOPHILA
MALEKRCLRNGVSVEGATHKQVVDLIKSGGDCLTLTVISVTQQEADRLEPQEDQSGYSYIDYSDKRSLPISIPDYGIVNRNGERYIVFNIHMAGRQLCSRRYREFANLHSLLRKEFSGFNFPKLPGKWPFQLSEQQLDTRRRGLEQYLEKVCAVRVIAESDAVQDFLTDTEDDISASPVDIKVMLPDHEVSTVSVKKSSNAQVVWEILVQRANLTAYTQQYFYLFEIVEYNFERKLQPHEIPHQLYVQNYSTASSTCLCVRRWLFSVAKELTLPDGEQAGRFIFYQAVDEVNRGNIRADGRLYELKALQDAKKAGDYLALARTLPGYGDVVFPHCSCDSRKEGHVVPAVGMKSFRLHACREDGSLEAQMVELTWDSITRSESDEESMSFCFQYNRPDKPARWVKVYTPYHAFLADCFDRIMEERKWEDSGD

SEQ ID NO: 5779 - DNA, 4678 bp, DROSOPHILA
atttgctgagtggtatggttagtggtgagtggtcactggtcagtggccatcggtgagtggtgagcggtggagcaccgcctccttcgaccggtttgatccgcagtcttatttttgatcgccagccgattagcaacgggcatttttacggtcatgtccagaacgaacgcgctaataaatgactaacagaaaagggacaatgcagtcgggtttattttggctcgatcggttttatcagttcgcttaattaaaatccattgtccccccaggtgctagttattttccatacttacatataatcgaaaaaccgcaaaatactggaagtttcccaggcttaagtgacgtcagttttttgaatccattagccaaaaccacaaatttggatgctccgccgcttaataaacgaactgtttcccaccatttaatgtgggccaatagaatgcacaaatatttatgatttaactaaatttatttgatttttaaagctatgggaatttaggcccaagtgaatgccactattgttcataaatgaagtgagtaatttatgcagagctctgggaagtttccatttaatcgaaagccctctacttatctcggcttcagtttagttcgattccataaaatcaggattagtataatttgaacgggatttcatttaaaatcccgcgttcggcgccaggaaattgccaagtgccgaaatagctcagttgggagagcgttagactgaagatctaaaggtccccggttcaatcccgggtttcggcaattcttagcttattttttatttttctatcgaactgctgcactgcactggatggtgcaagccatcgctcagctaagcggggtgttaaaccatcgcttcgctttgcaacactgttagatcttgccaggggcgcagaatttggtttgcgtccaaaaaaaaccagggattactggcctatttttagccattttctgcaaatgacggtcggtcactctaattcgacttgatttccagcactagaactgccatttcctttctttttcgttccacgtttccggtgagtgcatgtgcctagaaagttattttccgaaaattgccacttaaatcgtattcaaactcatttatttgtagccaaggcactgtggtacgtttgcggtcgtgttaatggtgtttgcggcgcaattctggctggtggaaatcaacacgtcgaattggccggccagaaaatgcgctgacaccaaaccaattcattttttttcttacatattttttttactgtgggcctgcgggtcaaaactgaaaggtgcaccatgtaaaaacaagcgaatgcatgaatgcattatatgccttgatggcattatctttttttttctgtgaaatattgtgtaaattgttccagaaatgcatgtggtgttgtcattgtgtctgtgtgtgtgtgtgtgcctatgcgcgaacattgtttctcaaaagtatttaaactatccaaataaagtggtaactcaatgaaatgcacatagttagacagttttcaatggatttcgactcggaatccgtgcagaatttttgttgtttacaggagcacacacatgcgcactcccttacgcacgcacacacacacataggagcaggcagccgcttagttttttttctcgctcattttgcacgtgttttgattgccgccgcgtttttagataaaaaccggtgttccaattggttatattcttgatatatttacacacgaccgccagcgtatttaggttgccctctgaaatgagaaggaaattggcgaaaatctcgcaattttcgcattttacaataccggtcaacataatagcagcagcagcaaataaaagcgtggttaattcaagcaccaaattttgattcagcttgctacaacaaattcgaaacctttaaagctttttgaagcgtctcaagaaactcactagaatttaattcaattttaaataatcatacaaatcaataagaatccattaaaattccttctgctagcgtgccacaactgctgtctaatatcttgaccggatgtgttatttacacatatcaaatattaagatatcttactaattgcccatgtttcttgcagatattgaaaaatgggccgttactcacgcgagtcagacaacgtggccaagtcgtgcaaggcgcgcgggcccaatctacgtgtgcacttcaaggtgagaatcctgcccagaaatccgaggaacctgggccttcttgggcatcaaccagtccgcagcttaaatcagtgaatgccagccgattgtgcagcatctcgcttttgcattgctgctagaagaatcctccaatttggacgagttcatcagctgagtgccaagtcccaaaactctggacgccctcttctaaaatctcgccaacaaccaattatcccaatgaatccagtatttcggcatgccaactaaaaaggcggttgctccattctggacaactgctgacgatacgtgtgcccagagcgaatccaaagccttgctaaaacagcggcctgctgctttcaatgagctagtctctacctgtagcctggcacagatctaactaaacccaaatgaaatccatcacggaatccactagatcaagctcatatcaccatcaccagttagctaacgaaataatgtacacatatctagcagctcaagctgataacttaaccaatagttatatgccatgggcatatccaatcctgtatagcttacatgatatgagttatgatttatgttccccctgcatgggcacagttttaaactaggtggttatcctccatggaagatcaccgatcgaaagctgtgcccaaagcaaaccccagccattgtaaaacagcggcgtgttggccctcagtgctcgcgtctctacctgaaccttggcacaaagtaatatagtactttccaatcactatgatttacgatcgcgccgcatttatgtatcagcagcaactgatgaacgatcatttactcgttttgcagaacacacatgagaccgcccaggccatcaagcgcatgcccctgcgccgtgcccagcgttacctgaaggccgtcatcgaccagaaggagtgcgtgcccttccgtcgcttcaacggaggagtcggtcgttgtgcccaggccaagcagtggaagaccacgcagggtcgctggcccaagaagtccgccgagttcctgctgcagctgctgcgcaacgccgaggccaacgctgattgcaagggtctggatgccgaccgcctggtcgtccaccacattcaggtgaaccgcgctcagtgcctgcgtcgccgcacgtaccgtgcccatggtcgcatcaatccctacatgtcgtcgccatgccacgtcgaggtcatcctcaccgagaaggaggagcttgtctccaaggccactgatgacgagcccgccaagaagaagctctccaagaagaagctgcagcgccaaaaggagaagatgttgcgttctgaataaaatgtgttctgggccagccgcccaagccggtgacaactactgaagctccattctttttttttttgtatcctaaacttaatatcgattgttgtgcgacgagattggaagtcgcggatgtggagaatacagagcacaagccccagatttgacctcctggaaatgctatgcgttttgtgtttaactcaacccactttttttttgctaggctaggagagcaataaagtgaattgctgttttcgtacatctgacttgaactcaaaatggggttagggctagattttggcgctctctagaaaggaattttttaaaggtattgtgagggactttgatgaaataggaatatgcacggcataatatgcaaaccactaattatatataagtttatttagatcggattgttttttccagtgtgcattggcattaagccaatacaccatccttagttagcggagacacaatacacattggttagtacgtgcgcgaaccattgcgataacttatcgatatcgatatagccaagatcgagttccgcaacagcgagcttcagacagctagcccgttgagcgcgcatttgatttgaatttgaaaaaacgttttgccgatcaacagcgaacattttcagtctatttccttccgcagagctcttgtggaatgttcggtggcttttgcgcgcattcacttgcatcaattgccttcgagtggccacttggcatattcatttaaactgatttcattgtagcgcactcgtttaccagcctccccacattttctttgattacaattcagtcgtacttatacttacaatgcaaattaattgaattatttcaatttgctgtgcttctggctctggtcagcgtatttcgtattattattttcgtgagctctcttccctgtttttgtctatttttgtacttttctttcctgattcactcgctggaggaatgccacgcccacaagccctgcttgatatcaattccattgaaggagcaacccaccgagaaaaaagacggaaaaacaggcattcggactcaacgaagagcacttgagcggcataatgcaataaatgtcgggttttgttttttgcttttcttggcgatcgttgcgatgggatctttgcggatctttggggatctttgggtcttcttcttcttctttttaccgagcttggattcagatacacctaaacctaacgttgtccgaactgagacaaatctaatttaca

SEQ ID NO: 5780 - DNA, 914 bp, DROSOPHILA
aactgccatttcctttctttttcgttccacgtttccggtgagtgcatgtgcctagaaagttattttccgaaaattgccacttaaatcgtattcaaactcatttatttgtagccaaggcactatattgaaaaatgggccgttactcacgcgagtcagacaacgtggccaagtcgtgcaaggcgcgcgggcccaatctacgtgtgcacttcaagaacacacatgagaccgcccaggccatcaagcgcatgcccctgcgccgtgcccagcgttacctgaaggccgtcatcgaccagaaggagtgcgtgcccttccgtcgcttcaacggaggagtcggtcgttgtgcccaggccaagcagtggaagaccacgcagggtcgctggcccaagaagtccgccgagttcctgctgcagctgctgcgcaacgccgaggccaacgctgattgcaagggtctggatgccgaccgcctggtcgtccaccacattcaggtgaaccgcgctcagtgcctgcgtcgccgcacgtaccgtgcccatggtcgcatcaatccctacatgtcgtcgccatgccacgtcgaggtcatcctcaccgagaaggaggagcttgtctccaaggccactgatgacgagcccgccaagaagaagctctccaagaagaagctgcagcgccaaaaggagaagatgttgcgttctgaataaaatgtgttctgggccagccgcccaagccggtgacaactactgaagctccattctttttttttttgtatcctaaacttaatatcgattgttgtgcgacgagattggaagtcgcggatgtggagaatacagagcacaagccccagatttgacctcctggaaatgctatgcgttttgtgtttaactcaacccactttttttttgctaggctaggagagcaataaa

SEQ ID NO: 5781 - protein, 186 aa, DROSOPHILA
MGRYSRESDNVAKSCKARGPNLRVHFKNTHETAQAIKRMPLRRAQRYLKAVIDQKECVPFRRFNGGVGRCAQAKQWKTTQGRWPKKSAEFLLQLLRNAEANADCKGLDADRLVVHHIQVNRAQCLRRRTYRAHGRINPYMSSPCHVEVILTEKEELVSKATDDEPAKKKLSKKKLQRQKEKMLRSE

SEQ ID NO: 5782 - DNA, 4633 bp, DROSOPHILA
caaactctgcatcccagtggtcttggctctcagtccgatccttgttatccttgcgaagttcgacgcacttttgatggcatctgaacaggctgccatagcattcgaatagaagcttgttgctggaccgcaaggcatcctggagcagctcagaactgagaaccatgggcaggacttccagtgccgactcgtttgcgttctcctcccgggagacaatctcgtagagagcgtgaatcaactggcatttcgttgtctgagtaacccagccaggctgcgccctcagcctcaggaaatccttgagttgttggaagggtaaatccttgcacccacccaatgatttcgccagccagtcggcgatgacctcgtacttattgaggtaggggaactccacggactgccataccttcagagcgaactcaacacgtgccgcgaacggcttgttcgtttcagtcagccaggacttcagcgctgcaaatggacgtggagcttactgacctggtccatcggaacggtattataaagcacttaccctcgcctgtgtccatgttgcctcgtccagtgaagtacaaaaaaatgcaatctcaaatcgaaatttattttactgcggcacgtgcggaataaacaaaaaatttatcgatacaccgatgcgatttcgatatcgatttgcgatatgcgtaagcgctgtttgtagctgttgtagctacgtcaaatctggctattttatagccgctacagaaacacattctattttgagttcttggcccaattggatattaatatggttaataggtagccataatacctcggtggctttgtaataaaataccaacagatttggcaagtggtgagatttggtagtgttttcgcttcatatcaagctaaatttggacatttttagctatttgtcaaaaacactgctggaacagctgatcgtccaccaccgagaaagaagcagagcaccgttacagattcgtgttgtttattttataattcgaatcattttaaaaaatccactgtttttttttgtacatttctgaatgagacaagaatcacaatgctgttaaactgtacgaggctcacacacctctgcacgactctccgggtcaggaaaagcagccaaataaggttgtccacatcatataatcaccatttgggcaggtgcctccaccatcgaaccgcccggtcgcttcaacacagccttccaccgccgaaccgttaccatagccacctgcacccaacactccgcatgccgtggtggtgcatgcgacgtggatttgcacagagcagcaagtggttagccaggaatgcaaaggcgaacttaccaactgcagttggagccggaatcgtgcccgcccccgtcaaaatgggcagatcccagtacggccgcctgctcagcctgactaaatcggagaaatgggtgctgacaggttactagcatacaacgcattttgaaatttcccaaatccttatgttctttatttctcagcgggcattggctgtctggtagtttcttcagctatcaccatgtcggttcctctgttcctgggcaaggtcattgatgtagtctttaataaatcgggcatggatagcgcagccatggccaaattgggcgagtactcggtgctgctcttcgggatcttcgtgctgggcggattcgccaactttgcccgcgtccatctgtttgggaatgcgggtgagtgggatgtagaaaacacacatctctaacactgtgctagccctggaaagtcgttcgacctcataagatatgaacatcttctgggaactgtaccatcttggattgttttacattaatcaattacgatttaatgaactgtgaagtagaatgcgtttattttgaccacttattcgctttatacaaagcatacgttataagaaccaattcatataggtcttatgtctacctgtttctcgtttcagctctccgaatagtgcgcagtctaagatcccggctatacagatctatgcttatgcaggaggtgggttggttcgataccaagggcactggagaactaataaatcggctgagcaacgataccttaatggtgggcacctcgttgagccagaacgtatcggatggtctgcgatctgtagccatgatcggcgtcggcacaggcatgatggtatgatataacaaaaagtggtttgcactgcccaaaaccttattttatccagttctttcattgcagatctacacctccccccagttggctgccgtgagtgccttggtggttcccgcgatggcgggcatggccatcgtgtacggacgctacgtaaggcggatcaccaaagtagaactagacaagtacgccgagattatgaagtttgcggaggagcgatttggtaatgttaaaacggttaagaccttctgccgagaacaacaggaagtagctgccttcgatggcaaactggatgaagctctccagattggctacaaagagacacgtgccagagctattttctttggattggtaagacctaaaggaaaggtacttaggaaaatcatcaaaatctgttatcccttatttcagactggcttctgtggcaacttcatcattatttcagtgctgtattatggaggaaccttggtattacaagactcgctgacgattggagccctcacagccttcatgctgtacgccggttatgtggccatctcaatgaatgggttgtccaacttctatagccaactgaacaaaggcattggagcctcggagcgtatttgggagatcctggacagggagtgttctatacccattgacaaaggtgtcgtgccgttggagaagccggtgggcgaagttggattccagaatgtattctttacgtttccaactagacctgaatcggccgtcctcaccgacttttcgctaaatttgatgccgggaacaaccacagcggtagtgggtcgttcaggatctggaaagacgacgatagctctgctaatgctccgactatatgacccccaagggggaacagtgcatttggatggcatagatttgcgaacagtgaatccacagtggttgcgaaataacattggtgccgtcagtcaggagccggtgctcttctcgtgctccattcgagagaatattctttatggcgctaatcctggcgaaacaccgagcccggagcgactgcagcaggttattgaagatgcaaatgtcagccagttcaccgaccaactgccggatggactagacacgctcgtcggccaacggggaatgatgctcagtggcggacaaaagcaaagagtagccattgccagggctctaattaaggtggagtctaaattcaattcttagttactcaatttacaatttcctaaatgtaaacttattcatacccccacagaaccccgctatcctgattttggatgaagctaccagtgcgttggacgccgtttcggaaaatctggtgcagaatgccttagacaatcttatccagggacgcaccgtactgacaattgcccatcgactcagtacaattcgaaatgcggatcaaatcgccgtcttaagcgacggaaaaattgtagagcagggcagctacaacgagcttatgggcatccaggagggcgtcttccgggaactggtggccagccaagcgttcggcagccgaaactaaaagagggtgtggaatttaagataagttggactaaacggcttagaagtggccccaccgctccttggtggtggaccagctagtgctattgttaccgggatatgtgttcataaatcaaatgtttttaactctttgtaaaatatacaccgttgaccataaaggaaccgatgtcttttcttccaaaaaaaaaaaaaaaaaacatttctaatggcatctttcgttgctttgggtgaatacaaacacctaaaacataaatggttttattctacggaaacttattacttttcaaagaaaatattcaaacggttctttacataataatcgtttaattgttatcatttacatacaattattttcaagatacacgtttcgtctcaaatcgtcttaaatctaataaacaggcacacaaataaatgcaataatttctttgtatctagtttctaaatacgtcctgtgtgcaagcatccagaaattcaatacgtggaacatttcatctgaatcttctccagaatcttttcaggttctgcctatttcatggtgggcatggccacagccgcctgggtgtgggtcacatccgttttgcgccacaactgggtgaccgtcttcgtctgggtgtagaatttgataccctgtttgccatagaagtgatggtcgccgcggaaagagccacgagttccggtaaaggagaacatgggcaggggcacgggaattggcacattcacgccaacctgaccagcatcaatttcgttgacaaacttgcgggctgccgctccattggtggtgaatacggcggtaccatttccataaggattggcatttacaatgccaatggcatcgtccaaggtgtcggccttcaggataaccaacacagggccaaagatctcctcagtgtagcacttcatgctgggcgtaacatcgcttaggatggttggtcccacaaagtatccatcctcgtatccgggcacggttatcttcctgccgtccaggataagcttagctccct

SEQ ID NO: 5783 - DNA, 2190 bp, DROSOPHILA
aaaaaatccactgtttttttttgtacatttctgaatgagacaagaatcacaatgctgttaaactgtacgaggctcacacacctctgcacgactctccgggtcaggaaaagcagccaaataaggttgtccacatcatataatcaccatttgggcaggtgcctccaccatcgaaccgcccggtcgcttcaacacagccttccaccgccgaaccgttaccatagccacctgcacccaacactccgcatgccgtggtggtgcatgcgacgtggatttgcacagagcagcaagtggttagccaggaatgcaaaggcgaacttaccaactgcagttggagccggaatcgtgcccgcccccgtcaaaatgggcagatcccagtacggccgcctgctcagcctgactaaatcggagaaatgggtgctgacagcgggcattggctgtctggtagtttcttcagctatcaccatgtcggttcctctgttcctgggcaaggtcattgatgtagtctttaataaatcgggcatggatagcgcagccatggccaaattgggcgagtactcggtgctgctcttcgggatcttcgtgctgggcggattcgccaactttgcccgcgtccatctgtttgggaatgcggctctccgaatagtgcgcagtctaagatcccggctatacagatctatgcttatgcaggaggtgggttggttcgataccaagggcactggagaactaataaatcggctgagcaacgataccttaatggtgggcacctcgttgagccagaacgtatcggatggtctgcgatctgtagccatgatcggcgtcggcacaggcatgatgatctacacctccccccagttggctgccgtgagtgccttggtggttcccgcgatggcgggcatggccatcgtgtacggacgctacgtaaggcggatcaccaaagtagaactagacaagtacgccgagattatgaagtttgcggaggagcgatttggtaatgttaaaacggttaagaccttctgccgagaacaacaggaagtagctgccttcgatggcaaactggatgaagctctccagattggctacaaagagacacgtgccagagctattttctttggattggtaagacctaaaggaaaggtacttaggaaaatcatcaaaatctgttatcccttatttcagactggcttctgtggcaacttcatcattatttcagtgctgtattatggaggaaccttggtattacaagactcgctgacgattggagccctcacagccttcatgctgtacgccggttatgtggccatctcaatgaatgggttgtccaacttctatagccaactgaacaaaggcattggagcctcggagcgtatttgggagatcctggacagggagtgttctatacccattgacaaaggtgtcgtgccgttggagaagccggtgggcgaagttggattccagaatgtattctttacgtttccaactagacctgaatcggccgtcctcaccgacttttcgctaaatttgatgccgggaacaaccacagcggtagtgggtcgttcaggatctggaaagacgacgatagctctgctaatgctccgactatatgacccccaagggggaacagtgcatttggatggcatagatttgcgaacagtgaatccacagtggttgcgaaataacattggtgccgtcagtcaggagccggtgctcttctcgtgctccattcgagagaatattctttatggcgctaatcctggcgaaacaccgagcccggagcgactgcagcaggttattgaagatgcaaatgtcagccagttcaccgaccaactgccggatggactagacacgctcgtcggccaacggggaatgatgctcagtggcggacaaaagcaaagagtagccattgccagggctctaattaagaaccccgctatcctgattttggatgaagctaccagtgcgttggacgccgtttcggaaaatctggtgcagaatgccttagacaatcttatccagggacgcaccgtactgacaattgcccatcgactcagtacaattcgaaatgcggatcaaatcgccgtcttaagcgacggaaaaattgtagagcagggcagctacaacgagcttatgggcatccaggagggcgtcttccgggaactggtggccagccaagcgttcggcagccgaaactaa

SEQ ID NO: 5784 - protein, 643 aa, DROSOPHILA
MRRGFAQSSKWLARNAKANLPTAVGAGIVPAPVKMGRSQYGRLLSLTKSEKWVLTAGIGCLVVSSAITMSVPLFLGKVIDVVFNKSGMDSAAMAKLGEYSVLLFGIFVLGGFANFARVHLFGNAALRIVRSLRSRLYRSMLMQEVGWFDTKGTGELINRLSNDTLMVGTSLSQNVSDGLRSVAMIGVGTGMMIYTSPQLAAVSALVVPAMAGMAIVYGRYVRRITKVELDKYAEIMKFAEERFGNVKTVKTFCREQQEVAAFDGKLDEALQIGYKETRARAIFFGLVRPKGKVLRKIIKICYPLFQTGFCGNFIIISVLYYGGTLVLQDSLTIGALTAFMLYAGYVAISMNGLSNFYSQLNKGIGASERIWEILDRECSIPIDKGVVPLEKPVGEVGFQNVFFTFPTRPESAVLTDFSLNLMPGTTTAVVGRSGSGKTTIALLMLRLYDPQGGTVHLDGIDLRTVNPQWLRNNIGAVSQEPVLFSCSIRENILYGANPGETPSPERLQQVIEDANVSQFTDQLPDGLDTLVGQRGMMLSGGQKQRVAIARALIKNPAILILDEATSALDAVSENLVQNALDNLIQGRTVLTIAHRLSTIRNADQIAVLSDGKIVEQGSYNELMGIQEGVFRELVASQAFGSRN

SEQ ID NO: 5785 - DNA, 4897 bp, DROSOPHILA
tgagcatttttatcataacttgactaaaagtgatcataaaacgaaaataataactgttttgagcagctaattacaagggctaaccatccctatccctttttgaccgatttaggaaaatttatttttggaccaattttcgcattttcggtaaggggtaacatcatcaaaatttgcaaaaaatggctaaaaaatggaattcccatttttggacacagttcgattgggaatttaaatacaaactctacgtgatatgacattccgtattcagacaattatttttagagttgtggccaaaaaactgactattttatcacgaaaattaacaaaaacatattttggcaaaaatttaaaaattttagatcactattttaatcataacttgactaaaagtgatcataaaacaaaaaaaaataacttttttgagcagctaataacgaaggctaaccatcccaatcactttttgaccgatataggaaaaataatttttgagtcatttttcgcattttttgtaaggggtaacatcatcaaaatttacaaaaaatggccaaaaaatagaattctcatttgtggatactgttcgattggaaatttaaatacgatctcaacgtgatatgacattccgtattcagacaattatttttgaagttgtggccaaaaaactgcatattttatgacgaaaattaacaaaaacatattttgggaaaaattaaaaaattttaggtgggcattttgatcataacttgactgaaactgatcataaacactagctgagtaactggtatctgatagtcggaaaaccaaaatttcaaaattttcaaaatattctatattttcgatgggcatcttaatcgtaaattagcttaaaattatcattatgacgaaaggaaccacttaccatatattctgaatattatttcttattatttttcgatcgaagtaccaacatattcagttttaaaggcattgaccaagttgtatatacatttttatttttttgcagagatcgttttcggagccggagacgcgcatcgattgctcctctgcccgccctgcgcttgaacagcaaggagatgttggccagcgacttcgatagccacagcctggcctccaaccaggcctccatcaccagtgtcaactccctggccagtttattgcgcgagaagatgcaggtgagttgaaccctactcgagcagagatcaaagttcaaataattaaatatcgaaatccacaggcttttccgcagctgataagaaagaagaagcgcgagacgaaggactacaaaatcaagatattcgtcatcatcatgtttttcatcatcatatttctggtaagcagcaatcatcagcacttattcagtcattcattcgttcattcatttattcattcattgagtcgaagtgcgaatcactagcatagtgagtgatcataaacatgatgcagagtttttaatagaaaaattctcaatgagaatttgtagattaattcgcagaggaaattcttaatttcaataagtcgatgactttgcatttatgctatacgcatttttgccggacttagaacgtgtcaaaacgaactgatgcagaagataaaagtactttgttcgcttgaagataaagagtgatcgaataatttggcccgatgtccaaatggattttatgagcttccaaaaatagttgttgaattgttaagccttttatcacagcgctcttttatttcgagcggccttagagtgtgccactttgacaaggctactaaagatacttaaggctataagatacaagatacaagatacaatatcttttcaattcgaatccctttatccgcacacagatcggctatgcctatgtggcctaccaccagcaggtgctcacgcgtagctacttccagaagatcaagttcaattcgcacgaccgcatctttcgcatcctgagtcacgaggacaaggaggtgatatcgggtcaattgggcgtgaccctgggcttcgatacggcgccattccattgcctggaggagcagcgacgaagtgacggcagcgtgtgcatcgaatggaacggagtggcgcgactgcatctgaacttcgaggacaagggcgtctttcggtgctacacgctgcagtggcaggcactgacgccgggtctcctgcccaccgattgttatgaactgaagcgtgacaatggcctgtggttcggcggcggtgtgaccaagggtcaggagtggtccctcagctatgccaactttgattttgcgccctatgcctccggcgactcgaagatccatcagttcggcaatggggtgaagaggtatttcatcaactcgatcggcgtggccatgcaggtgagcgagaagacgccactgcagctgggcgtcaatcggacggagaatcgcttctgcctgcgggcggccaacgatgagttcacctttgtgaatcatctgacgccgctgccgcagttggactaccgcatctgcaccacggaggacatgcgcagcctgcacatgctgatgacccagcagagcctgtgggatggcctcaaggagcaggagttcaaggtgctgcactcgctgctggaggagccagtttggaggataccgcacaccgagctgcccgagtccctcaacgaatccgccatctgtgactattcggaaagtgccattgccatgggcctgggccacattgtcatcaatgagttctggcaggagaatattggcgactttacggtggacaaggccaggtttcccaccctcaaggacaccatcgatgtgctgcacaggcggggattcaaggtggtcctgaccatccaaccgttcatcagcacggacagtgccaacttcaaggatgcagtgaaacgcaagctgctgatctacgaacgccactcggagcggagtattcccgccctgaccaggtacaagagtagctccagcgccggcgttctggacataaccaacaatgcgtccgttccctggctgttggagaagttgcagcgcctgaaggaggagtacggagtgcagagcttctacctggacctgggaacgggctacaatctgccgcactactatcagtgccgccagaccttggataatccggacacctatgccaggctgttcaccgccagcctggagggtgctggcctgatggccgtctccacggcgagtgtggtgcccaagccacccactttcctgagcaccccgccggcgaacgccacctgggagggattgagggagactctgggcgctgtgctcaactatggcgtcatcggctatccgttcgtcctgccgggcgtgatcggtggcgactatctgctgcagcgaccgctctccaagatggtcagcttctattcgctgtcccagccaccgttgcccgatccggaactcttcatccgttggctccagctggccacctttatgccggccatgcagtttagccatctgccgtcggagtatcgcagtgatctggtcacccgggtggctcaggagttgaaggaggtgcgccagctgatcgtgattccgctgctcaagaagtacctcaatccgtcgatgaacgagggactgccgctggtgagaccgctctggatgatggatcctcacgatcccgcctgtctcattgtcagcgatgagttctccgtgggcgaggagctaatcgtggcgcccattctgcatgcgaatcgcgaggagcgcgagggtgagtttaagcaaccagttattagcaaatacttgataattttaagtttaatactttattaatttgtgcatatccatttggcagtttacctgccgcagggcgtgtggaaggacggtatcgatggatcgctgaggaagggcagtcgctggatgcacggctatcgggtgccgaaggacaagattgcctacttccgcaagatgccggacaatacgcggttctaggagcactgatataaactgatgcacctgatgcacctgatgcactgcatccattctcccagcagaacccatgtgatatcaactacatagagagaaagtgaaagagaagagaagagaatccggcaattccgcatacatctatctgtattgagtaacctaaatactataatattatatatcgataagcccgcgatcgtaatacataagatgccttatcgctagtgcctaagcgttatcctaagcctatgtaatttccatttttttttttttgtttttgtgcgtgcgtatagttagttaagtacatctgggatgatcgcttactcgctgaataaatatgttccataacaacgcactgatccttcggtggcgtcaataaatagggagtgtgtcctgtgctacttggtcctgcagatcggcagcgaggattcgcagggctccatttccgccggcttctgcaggtgaccacattcggcatcggccaccaccacatcgtgttcgtccagacagacgacggatcgccggcgctgaggtggcgccacaaatccaactggacgacaggtgaccggacaaaattgccaaggacctggccaccagtgggcaggacatggctggtcgccacatcctcgcgattgccgggccggtctcttgttcttggcgtgcgtccagcagggcagcgtatcacccaaggctatgagaagattgcgtttaatggacacgattcgttggaacggttcgttggactcacccttgccgttctcctggcagatgggctcacggtgctgcacgccaccgccgcagctggcggagcaggcggtccagttgctcaggcgccactggaactgcctgccagcggtcacattcagtgcgggcagggtgaactcgtagaaaatgccagcgttgctctcattgccgcgcacaatcgcctggaaaaacccgataaaattcttgctagaatgtgcaatatacaccactcacatataacgatatggaatgctggatgggc

SEQ ID NO: 5786 - DNA, 2236 bp, DROSOPHILA
agatcgttttcggagccggagacgcgcatcgattgctcctctgcccgccctgcgcttgaacagcaaggagatgttggccagcgacttcgatagccacagcctggcctccaaccaggcctccatcaccagtgtcaactccctggccagtttattgcgcgagaagatgcagctgataagaaagaagaagcgcgagacgaaggactacaaaatcaagatattcgtcatcatcatgtttttcatcatcatatttctgatcggctatgcctatgtggcctaccaccagcaggtgctcacgcgtagctacttccagaagatcaagttcaattcgcacgaccgcatctttcgcatcctgagtcacgaggacaaggaggtgatatcgggtcaattgggcgtgaccctgggcttcgatacggcgccattccattgcctggaggagcagcgacgaagtgacggcagcgtgtgcatcgaatggaacggagtggcgcgactgcatctgaacttcgaggacaagggcgtctttcggtgctacacgctgcagtggcaggcactgacgccgggtctcctgcccaccgattgttatgaactgaagcgtgacaatggcctgtggttcggcggcggtgtgaccaagggtcaggagtggtccctcagctatgccaactttgattttgcgccctatgcctccggcgactcgaagatccatcagttcggcaatggggtgaagaggtatttcatcaactcgatcggcgtggccatgcaggtgagcgagaagacgccactgcagctgggcgtcaatcggacggagaatcgcttctgcctgcgggcggccaacgatgagttcacctttgtgaatcatctgacgccgctgccgcagttggactaccgcatctgcaccacggaggacatgcgcagcctgcacatgctgatgacccagcagagcctgtgggatggcctcaaggagcaggagttcaaggtgctgcactcgctgctggaggagccagtttggaggataccgcacaccgagctgcccgagtccctcaacgaatccgccatctgtgactattcggaaagtgccattgccatgggcctgggccacattgtcatcaatgagttctggcaggagaatattggcgactttacggtggacaaggccaggtttcccaccctcaaggacaccatcgatgtgctgcacaggcggggattcaaggtggtcctgaccatccaaccgttcatcagcacggacagtgccaacttcaaggatgcagtgaaacgcaagctgctgatctacgaacgccactcggagcggagtattcccgccctgaccaggtacaagagtagctccagcgccggcgttctggacataaccaacaatgcgtccgttccctggctgttggagaagttgcagcgcctgaaggaggagtacggagtgcagagcttctacctggacctgggaacgggctacaatctgccgcactactatcagtgccgccagaccttggataatccggacacctatgccaggctgttcaccgccagcctggagggtgctggcctgatggccgtctccacggcgagtgtggtgcccaagccacccactttcctgagcaccccgccggcgaacgccacctgggagggattgagggagactctgggcgctgtgctcaactatggcgtcatcggctatccgttcgtcctgccgggcgtgatcggtggcgactatctgctgcagcgaccgctctccaagatggtcagcttctattcgctgtcccagccaccgttgcccgatccggaactcttcatccgttggctccagctggccacctttatgccggccatgcagtttagccatctgccgtcggagtatcgcagtgatctggtcacccgggtggctcaggagttgaaggaggtgcgccagctgatcgtgattccgctgctcaagaagtacctcaatccgtcgatgaacgagggactgccgctggtgagaccgctctggatgatggatcctcacgatcccgcctgtctcattgtcagcgatgagttctccgtgggcgaggagctaatcgtggcgcccattctgcatgcgaatcgcgaggagcgcgaggtttacctgccgcagggcgtgtggaaggacggtatcgatggatcgctgaggaagggcagtcgctggatgcacggctatcgggtgccgaaggacaagattgcctacttccgcaagatgccggacaatacgcggttctag

SEQ ID NO: 5787 - protein, 721 aa, DROSOPHILA
MLASDFDSHSLASNQASITSVNSLASLLREKMQLIRKKKRETKDYKIKIFVIIMFFIIIFLIGYAYVAYHQQVLTRSYFQKIKFNSHDRIFRILSHEDKEVISGQLGVTLGFDTAPFHCLEEQRRSDGSVCIEWNGVARLHLNFEDKGVFRCYTLQWQALTPGLLPTDCYELKRDNGLWFGGGVTKGQEWSLSYANFDFAPYASGDSKIHQFGNGVKRYFINSIGVAMQVSEKTPLQLGVNRTENRFCLRAANDEFTFVNHLTPLPQLDYRICTTEDMRSLHMLMTQQSLWDGLKEQEFKVLHSLLEEPVWRIPHTELPESLNESAICDYSESAIAMGLGHIVINEFWQENIGDFTVDKARFPTLKDTIDVLHRRGFKVVLTIQPFISTDSANFKDAVKRKLLIYERHSERSIPALTRYKSSSSAGVLDITNNASVPWLLEKLQRLKEEYGVQSFYLDLGTGYNLPHYYQCRQTLDNPDTYARLFTASLEGAGLMAVSTASVVPKPPTFLSTPPANATWEGLRETLGAVLNYGVIGYPFVLPGVIGGDYLLQRPLSKMVSFYSLSQPPLPDPELFIRWLQLATFMPAMQFSHLPSEYRSDLVTRVAQELKEVRQLIVIPLLKKYLNPSMNEGLPLVRPLWMMDPHDPACLIVSDEFSVGEELIVAPILHANREEREVYLPQGVWKDGIDGSLRKGSRWMHGYRVPKDKIAYFRKMPDNTRF

SEQ ID NO: 5788 - DNA, 3793 bp, DROSOPHILA
taagcggggtgttaaaccatcgcttcgctttgcaacactgttagatcttgccaggggcgcagaatttggtttgcgtccaaaaaaaaccagggattactggcctatttttagccattttctgcaaatgacggtcggtcactctaattcgacttgatttccagcactagaactgccatttcctttctttttcgttccacgtttccggtgagtgcatgtgcctagaaagttattttccgaaaattgccacttaaatcgtattcaaactcatttatttgtagccaaggcactgtggtacgtttgcggtcgtgttaatggtgtttgcggcgcaattctggctggtggaaatcaacacgtcgaattggccggccagaaaatgcgctgacaccaaaccaattcattttttttcttacatattttttttactgtgggcctgcgggtcaaaactgaaaggtgcaccatgtaaaaacaagcgaatgcatgaatgcattatatgccttgatggcattatctttttttttctgtgaaatattgtgtaaattgttccagaaatgcatgtggtgttgtcattgtgtctgtgtgtgtgtgtgtgcctatgcgcgaacattgtttctcaaaagtatttaaactatccaaataaagtggtaactcaatgaaatgcacatagttagacagttttcaatggatttcgactcggaatccgtgcagaatttttgttgtttacaggagcacacacatgcgcactcccttacgcacgcacacacacacataggagcaggcagccgcttagttttttttctcgctcattttgcacgtgttttgattgccgccgcgtttttagataaaaaccggtgttccaattggttatattcttgatatatttacacacgaccgccagcgtatttaggttgccctctgaaatgagaaggaaattggcgaaaatctcgcaattttcgcattttacaataccggtcaacataatagcagcagcagcaaataaaagcgtggttaattcaagcaccaaattttgattcagcttgctacaacaaattcgaaacctttaaagctttttgaagcgtctcaagaaactcactagaatttaattcaattttaaataatcatacaaatcaataagaatccattaaaattccttctgctagcgtgccacaactgctgtctaatatcttgaccggatgtgttatttacacatatcaaatattaagatatcttactaattgcccatgtttcttgcagatattgaaaaatgggccgttactcacgcgagtcagacaacgtggccaagtcgtgcaaggcgcgcgggcccaatctacgtgtgcacttcaaggtgagaatcctgcccagaaatccgaggaacctgggccttcttgggcatcaaccagtccgcagcttaaatcagtgaatgccagccgattgtgcagcatctcgcttttgcattgctgctagaagaatcctccaatttggacgagttcatcagctgagtgccaagtcccaaaactctggacgccctcttctaaaatctcgccaacaaccaattatcccaatgaatccagtatttcggcatgccaactaaaaaggcggttgctccattctggacaactgctgacgatacgtgtgcccagagcgaatccaaagccttgctaaaacagcggcctgctgctttcaatgagctagtctctacctgtagcctggcacagatctaactaaacccaaatgaaatccatcacggaatccactagatcaagctcatatcaccatcaccagttagctaacgaaataatgtacacatatctagcagctcaagctgataacttaaccaatagttatatgccatgggcatatccaatcctgtatagcttacatgatatgagttatgatttatgttccccctgcatgggcacagttttaaactaggtggttatcctccatggaagatcaccgatcgaaagctgtgcccaaagcaaaccccagccattgtaaaacagcggcgtgttggccctcagtgctcgcgtctctacctgaaccttggcacaaagtaatatagtactttccaatcactatgatttacgatcgcgccgcatttatgtatcagcagcaactgatgaacgatcatttactcgttttgcagaacacacatgagaccgcccaggccatcaagcgcatgcccctgcgccgtgcccagcgttacctgaaggccgtcatcgaccagaaggagtgcgtgcccttccgtcgcttcaacggaggagtcggtcgttgtgcccaggccaagcagtggaagaccacgcagggtcgctggcccaagaagtccgccgagttcctgctgcagctgctgcgcaacgccgaggccaacgctgattgcaagggtctggatgccgaccgcctggtcgtccaccacattcaggtgaaccgcgctcagtgcctgcgtcgccgcacgtaccgtgcccatggtcgcatcaatccctacatgtcgtcgccatgccacgtcgaggtcatcctcaccgagaaggaggagcttgtctccaaggccactgatgacgagcccgccaagaagaagctctccaagaagaagctgcagcgccaaaaggagaagatgttgcgttctgaataaaatgtgttctgggccagccgcccaagccggtgacaactactgaagctccattctttttttttttgtatcctaaacttaatatcgattgttgtgcgacgagattggaagtcgcggatgtggagaatacagagcacaagccccagatttgacctcctggaaatgctatgcgttttgtgtttaactcaacccactttttttttgctaggctaggagagcaataaagtgaattgctgttttcgtacatctgacttgaactcaaaatggggttagggctagattttggcgctctctagaaaggaattttttaaaggtattgtgagggactttgatgaaataggaatatgcacggcataatatgcaaaccactaattatatataagtttatttagatcggattgttttttccagtgtgcattggcattaagccaatacaccatccttagttagcggagacacaatacacattggttagtacgtgcgcgaaccattgcgataacttatcgatatcgatatagccaagatcgagttccgcaacagcgagcttcagacagctagcccgttgagcgcgcatttgatttgaatttgaaaaaacgttttgccgatcaacagcgaacattttcagtctatttccttccgcagagctcttgtggaatgttcggtggcttttgcgcgcattcacttgcatcaattgccttcgagtggccacttggcatattcatttaaactgatttcattgtagcgcactcgtttaccagcctccccacattttctttgattacaattcagtcgtacttatacttacaatgcaaattaattgaattatttcaatttgctgtgcttctggctctggtcagcgtatttcgtattattattttcgtgagctctcttccctgtttttgtctatttttgtacttttctttcctgattcactcgctggaggaatgccacgcccacaagccctgcttgatatcaattccattgaaggagcaacccaccgagaaaaaagacggaaaaacaggcattcggactcaacgaagagcacttgagcggcataatgcaataaatgtcgggttttgttttttgcttttcttggcgatcgttgcgatgggatctttgcggatctttggggatctttgggtcttcttcttcttctttttaccgagcttggat

SEQ ID NO: 5789 - DNA, 931 bp, DROSOPHILA
cgtggttaattcaagcaccaaattttgattcagcttgctacaacaaattcgaaacctttaaagctttttgaagcgtctcaagaaactcactagaatttaattcaattttaaataatcatacaaatcaataagaatccattaaaattccttctgctagcgtgccacaactgctgtctaatatcttgaccggatattgaaaaatgggccgttactcacgcgagtcagacaacgtggccaagtcgtgcaaggcgcgcgggcccaatctacgtgtgcacttcaagaacacacatgagaccgcccaggccatcaagcgcatgcccctgcgccgtgcccagcgttacctgaaggccgtcatcgaccagaaggagtgcgtgcccttccgtcgcttcaacggaggagtcggtcgttgtgcccaggccaagcagtggaagaccacgcagggtcgctggcccaagaagtccgccgagttcctgctgcagctgctgcgcaacgccgaggccaacgctgattgcaagggtctggatgccgaccgcctggtcgtccaccacattcaggtgaaccgcgctcagtgcctgcgtcgccgcacgtaccgtgcccatggtcgcatcaatccctacatgtcgtcgccatgccacgtcgaggtcatcctcaccgagaaggaggagcttgtctccaaggccactgatgacgagcccgccaagaagaagctctccaagaagaagctgcagcgccaaaaggagaagatgttgcgttctgaataaaatgtgttctgggccagccgcccaagccggtgacaactactgaagctccattctttttttttttgtatcctaaacttaatatcgattgttgtgcgacgagattggaagtcgcggatgtggagaatacagagcacaagccccagatttgacctcctggaaatgctatgcgt

SEQ ID NO: 5790 - protein, 186 aa, DROSOPHILA; identical to SEQ ID NO: 5781

SEQ ID NO: 5791 - DNA, 3399 bp, DROSOPHILA
tgataatgcgaatgagcaatggcacttagctatcaaactcagtttacatgacaaaacttgcaccaaattaagtttataaggttggtacctaacttatgatcacaaaactcaaaactatcgcatcgtgagatccttgggccgtgtcacgcgctcccctctaggagcctgaatggcagacagtggcgccggtcgccagggaccaaatgggagccaggtcccagagatcccaccgatccaagcgatccaacaaaatcgtgcgttagtcgtccgtctcgacacacacacagacactcacacacaacgcggcactcagatactgtatcttcgtatctttgtatctgcggctaggcgactccaagcgactggaacaacatcattgctcgtctgtccgtcatccgtgctgttggcattgttttcccctgcttgtgattgtagttgttgatgtttttttttgcttgtggtctatgtatgtaatttttcgcgtgactcccatgtcaagatttgatctctagcaaatcttactgctctgctggcgtcagtctccaagtctccaggtctccaagtctcatcaaggcgccaccgcccgggtcccggcttaaaagcttcattactgtgggaattacgcaaaaaaaaattgttaaaactcgaccccggattgaaaaagtctcaagaaagagtcacaacaaatattattaaataactcaacttttgaactaattgttggtgatttaaagcctaaatggagggaatttttcgccttattacttataaagagttacccactatcaaaataataacaataagagtagcatattcatatgccattgcatataattcaattaaagttaagatattttctggatcttgggtttcttggtcaatttaactgtaggtgcgatgcaaccgcagaattcaaatgaccacttatcgataagcgttgccgcaaatggcgatcgaaaggcgatagcaaaacagctggttatccgcacctggccaatatcgatagtcaacaaaatccagatgtgagagaacattttgagttgttttgcccaacaaattgggctgtgtttttaactgattttgccattcggacgcggtggcatcttgagactgcttggaggagcccgaccaacggggtcagatggcgcgcaatgtgctcgagagcagcctgctgggcgccggcttcagcatcatctttcaggtgagcccagcgcactgggaatctattttgtgtctgtgcctagtgcctcggaattgtattactcatccgcaccgctgtcgtgatcttatcgccccgtagatactgtgccgcatcctcactttcggcatcaacgcgtacatcgtgcgacatgtgggccgcgaggtgttgggcattatgaatgtccgactgctgcttctggagagcaccctgctcttcctctcccgcgaggccatcaaccgggcggccctgagcgccaatgcccagcagggcgatcgctgctcctgggcgcagctgatcaaccagatgtggctcacgtaagtaattcgccccagctcctgacagtggatctctttcctacatcataacacttttcccgattcacttcagggttcccatttgcgctgttttgtgtgctccttgcctatacatttggctaaactggctgtcggcggtggacgccatctacgcctcgcaatacgagttcgcctgctatgccgtggccttttcctgcgtcctggaattgatggccgagtccgcggtgtttgtcgcccaggtcttttgctttgtcaagcttaagatcctgctgaatacgctgcacatcctggtgcgctcggccatcttcctgtggattgtcaccggtgatcgcagtgcggcaatcaatgcatttgcgattgcccaactatccagcgcagtgaccattgtcctgggccaatatggcttcttttacttctatctgaagggcttcaaggatttcgtgacccagcaggcgaaaaagaaaccagtggctccaaaagcctggcaggtctcactgtacgagcacatggatgacttccccttcaagcagctgagcgacttcctgcccggcgtgatgttcaatccaaatggaaagcatttcaaccgggaactgcaaacgctaaccctcagctttgtgaagcagggcgtgctgaagcaaatcctcaccgagggcgagaagtacgtgatgtccgtgtcgccggtgctgagcttcggggagcaggccacctacgatgtggtcaacaatttgggcagcatggcggcccgcttcatcttccgacccatcgaggacagttcgtacttttacttcacgcagacgctatcccgggacatcaagctggccaagcagccgcaggagcgcgtccgtcaggcgagcagtgtcctgaataatctgctcttgggtgtgagctccattggcctgatcgccttcacctttggacagagctactcgtacccagtgctgctgctttacggcggtcctgatttcgtggctggcggattgccgcagagcctcttgcagtggcactgccttgcgatctatctgctggcggtgaacgggatcagcgagggctatatgttcgccacgaacacaagtcgagatatcgacaagtacaactatctgatggccatcttttcggtcagcttcctggtgctctcctacattttgacggggatctttggtccggtgggcttcatcttcgccaactgcattaatatgctgagcaggattctgtacagcacctactacatcaggcatcagtatcggcccctgtcgctggatccgttgctgggcctctggccgggaaaactctttggatgcacgctcttcctggccggcatcgtctgttattgggtaagtcctggatggtgtttctcgtcgggagtgcgatgtacaatgaatttctcttgcaactttttacagtaccaaagttctgaccttgccacacatctgggcgtgggtgtcctggctgggctcgcctgccttctgtcctgggcgttggctcatcgagatctggtgcgactggcctggcgatatggtcgccgcatcaagatcgaatagggaccatgctgttggaattgttatcctcgcttccctcgcaccgatgaaccgcaatgaaacgcacagtttgagtaataatggcatatttatacatagttgacatttgtaaattaattccaaaattaagttatgtacttattgagtgtttgtagagccttgattgcttatttaaccttaagacatgcattaaaagacaacgattactgtttacatatgaaatttttatttacaagaagaagttagcaaagtgtggtcaactaagtaattgcactttaccccgccccagaatatcaaaactctcaaaaacattgacaaaaaataaattttttagtccaaaaaaaaatgt

SEQ ID NO: 5792 - DNA, 2050 bp, DROSOPHILA
cgatagtcaacaaaatccagatgtgagagaacattttgagttgttttgcccaacaaattgggctgtgtttttaactgattttgccattcggacgcggtggcatcttgagactgcttggaggagcccgaccaacggggtcagatggcgcgcaatgtgctcgagagcagcctgctgggcgccggcttcagcatcatctttcagatactgtgccgcatcctcactttcggcatcaacgcgtacatcgtgcgacatgtgggccgcgaggtgttgggcattatgaatgtccgactgctgcttctggagagcaccctgctcttcctctcccgcgaggccatcaaccgggcggccctgagcgccaatgcccagcagggcgatcgctgctcctgggcgcagctgatcaaccagatgtggctcacggttcccatttgcgctgttttgtgtgctccttgcctatacatttggctaaactggctgtcggcggtggacgccatctacgcctcgcaatacgagttcgcctgctatgccgtggccttttcctgcgtcctggaattgatggccgagtccgcggtgtttgtcgcccaggtcttttgctttgtcaagcttaagatcctgctgaatacgctgcacatcctggtgcgctcggccatcttcctgtggattgtcaccggtgatcgcagtgcggcaatcaatgcatttgcgattgcccaactatccagcgcagtgaccattgtcctgggccaatatggcttcttttacttctatctgaagggcttcaaggatttcgtgacccagcaggcgaaaaagaaaccagtggctccaaaagcctggcaggtctcactgtacgagcacatggatgacttccccttcaagcagctgagcgacttcctgcccggcgtgatgttcaatccaaatggaaagcatttcaaccgggaactgcaaacgctaaccctcagctttgtgaagcagggcgtgctgaagcaaatcctcaccgagggcgagaagtacgtgatgtccgtgtcgccggtgctgagcttcggggagcaggccacctacgatgtggtcaacaatttgggcagcatggcggcccgcttcatcttccgacccatcgaggacagttcgtacttttacttcacgcagacgctatcccgggacatcaagctggccaagcagccgcaggagcgcgtccgtcaggcgagcagtgtcctgaataatctgctcttgggtgtgagctccattggcctgatcgccttcacctttggacagagctactcgtacccagtgctgctgctttacggcggtcctgatttcgtggctggcggattgccgcagagcctcttgcagtggcactgccttgcgatctatctgctggcggtgaacgggatcagcgagggctatatgttcgccacgaacacaagtcgagatatcgacaagtacaactatctgatggccatcttttcggtcagcttcctggtgctctcctacattttgacggggatctttggtccggtgggcttcatcttcgccaactgcattaatatgctgagcaggattctgtacagcacctactacatcaggcatcagtatcggcccctgtcgctggatccgttgctgggcctctggccgggaaaactctttggatgcacgctcttcctggccggcatcgtctgttattggtaccaaagttctgaccttgccacacatctgggcgtgggtgtcctggctgggctcgcctgccttctgtcctgggcgttggctcatcgagatctggtgcgactggcctggcgatatggtcgccgcatcaagatcgaatagggaccatgctgttggaattgttatcctcgcttccctcgcaccgatgaaccgcaatgaaacgcacagtttgagtaataatggcatatttatacatagttgacatttgtaaattaattccaaaattaagttatgtacttattgagtgtttgtagagccttgattgcttatttaaccttaagacatgcattaaaagacaacgattactgtttacatatgaaatttttatttacaagaagaa

SEQ ID NO: 5793 - protein, 556 aa, DROSOPHILA
MARNVLESSLLGAGFSIIFQILCRILTFGINAYIVRHVGREVLGIMNVRLLLLESTLLFLSREAINRAALSANAQQGDRCSWAQLINQMWLTVPICAVLCAPCLYIWLNWLSAVDAIYASQYEFACYAVAFSCVLELMAESAVFVAQVFCFVKLKILLNTLHILVRSAIFLWIVTGDRSAAINAFAIAQLSSAVTIVLGQYGFFYFYLKGFKDFVTQQAKKKPVAPKAWQVSLYEHMDDFPFKQLSDFLPGVMFNPNGKHFNRELQTLTLSFVKQGVLKQILTEGEKYVMSVSPVLSFGEQATYDVVNNLGSMAARFIFRPIEDSSYFYFTQTLSRDIKLAKQPQERVRQASSVLNNLLLGVSSIGLIAFTFGQSYSYPVLLLYGGPDFVAGGLPQSLLQWHCLAIYLLAVNGISEGYMFATNTSRDIDKYNYLMAIFSVSFLVLSYILTGIFGPVGFIFANCINMLSRILYSTYYIRHQYRPLSLDPLLGLWPGKLFGCTLFLAGIVCYWYQSSDLATHLGVGVLAGLACLLSWALAHRDLVRLAWRYGRRIKIE

SEQ ID NO: 5794 - DNA, 3046 bp, DROSOPHILA
cccgatatcgttttcccatttgacaaaataataatcgcgtgtggatcactcttgacttcccccccatcgcaagccccttattacattattattattattattggtactcgtctgcatgtctggaatttaattttttctggcatttacaaaacacttcaacccgttttgacaagagtcggcgatgacagcaattaccatacgatttgcatgacgtttatgtttattttcgctttgtattcccttccaggcggcaatcgtgaatattttgcccagcctttgtgttcttttggccaagtcgaaaagaagccaacctgcgagtgctcaggttgatttcgattttgacagctgcctgcctgactcactccactgggctgcctcgctgttcgcattttggctggattcgcatttcattagctcgttatggaccacctacggccaggccgggccaactgctgacagaggagcaccctctgatccccacccatggtttcgtccatttggcagacccacagcgaagcaattaagccgcctggcatcgaacacaatcccgtccaatggggcaatttaaggtatttacaaaagcgtaaaaaggtaaggaaaacaagactggctcctcccaatcaaaacatgacgaatgccactcgaggccctctccgagatgtcaatcgttcaagtttaagtcgattcgaccgaggaacgctccgctccttcctcctaactgaccgtaaaatgaaatctttaagttcttcaagggaactctgcagcttcggatgagaatacatacatatatgatatactcttgttagggttttttttttttttattgatatttcatcgttgaatatgttgaagcaaatgagcaaaaattgtatgagccacattgagaactagtgaaacttcaagtgggaaatttaacagaagtatactgagaaatttaagaagtctacacacttgaacagctttcatgggatatacatgttttcgaaatgcgatctttgttttaggcaaaggtttttccgccattgtcgtcggcaacgtcgtcgtcgtcgtcatcaaagtccttgtcctgaatcttaaagtaggtcatggcgaaggtgtccttggccgtggacactacccgcaaccaatcacgcaggctgaccttcttcaaataccgtttggtcagatacttgaagtagcgcttggagaagtgcacaccggagtggatgatcagcgagaagttcttggtgcgctcgaaagtgacctgatccttcagctggttgagcttgttctttatcttgatgtgggtcttcaaatactgctcgaagtcggcgaggtccaggatcatatcctcggccacgcatgcgcagtcgatcacaaagcgttgccaagccttctttttggccagcctttttccacgcagaacattcttcgtgcgtttcggcttgggcttcggatttgccggagtggcgaggctcttttttacacttttagctttggctgctggaacctcgacattttcggcttttggtgctgcggcagcttgttccttgggcttttcttgcaccagggcggcctttttggcggggacaaccgtgggtatttccgcattgccacgtttaggaggcgcagactttttcttattgtccacctcaggggcaacgggttccggcacttgcatcaagttcttgcgtgaagcattctggcctttcttcgccttcgagaccaacttctggtcagcagcttcggcggccttcttagccgattctttcatggccaaatcgagattctttagtgccacggccggagctttggccacctttttagaggacaaaggcggagccgcagatggggtggcggtttctacaggagtcaccttagccggggctttcttcgacggctgtgggcccgccttcgatttggccttggaagcattctttttctgcgtctgggaactcattcctatatggcaaaacatgagcacacgcctaaaattttgaaacaattaacttactccaaagaaattagtatcaaaaataggtttagaaacaccacgtgacttcctccgttgaagtttggcaggaaaagaattagagtggccaagtgtagcaacaatcagaaagtaactgcatttgcgatccgtgtgaccttgctcacaatcgactgtgcttacgtagaatgcgaatgccaattattcgattatcttgggcggcatgtttgtgaaaaaaaaacaggaaatctttaagtgaaatcacgagaaatgagtgtggagcaggttgggatgttgacgctctgatttaacgctgattaattggcacgaaattattattaccgcttgtcagccggggatcaatttggccttgtttgtcgtctcgcctccagttcggcctcagtaatttgtagttttcatattataccagctcccttttaagctcttttattatagggtattgtggtggatcgaaatcgatttaaacttgcgcacacaggttcgagataagttaccaaagtggaatccacatgaatccacagagatagctcaacttttcccaatgctaggcaaattgaattccgaaagcctgtttaaagtgtcatcaccttccactctctttgtcggccagttcatttatttccgagttgtacaaacatttagctatcgcttcaatattttttaagccacaaggaaatccctaaattgcataacatatcgctttgcaacgagcgccatttatcaaattcaaatgaaagagttggccaccaactgggatttgggattgtggatgggagatgccacctcctatcggcaggaaaaataaaaaataaaaacaaaagcaaaaagtgcaagccaaagtgaattcccgcggagcgtttaatcaaaacttaccggcgaacgcgttcgctgacaatgagaaattgcaacaaattcgcgctacatcgaaaccttctccctcgtgctgtctctttctgtctcgttgcagccgtctctttcgcttgccactgccaagagcaaacaaggcttaaaaaggatggcaggaggggcgggacaggggtgtcgatggcagcgcaa

SEQ ID NO: 5795 - DNA, 994 bp, DROSOPHILA
ggaggaagtcacgtggtgtttctaaacctatttttgatactaatttctttggagaatgagttcccagacgcagaaaaagaatgcttccaaggccaaatcgaaggcgggcccacagccgtcgaagaaagccccggctaaggtgactcctgtagaaaccgccaccccatctgcggctccgcctttgtcctctaaaaaggtggccaaagctccggccgtggcactaaagaatctcgatttggccatgaaagaatcggctaagaaggccgccgaagctgctgaccagaagttggtctcgaaggcgaagaaaggccagaatgcttcacgcaagaacttgatgcaagtgccggaacccgttgcccctgaggtggacaataagaaaaagtctgcgcctcctaaacgtggcaatgcggaaatacccacggttgtccccgccaaaaaggccgccctggtgcaagaaaagcccaaggaacaagctgccgcagcaccaaaagccgaaaatgtcgaggttccagcagccaaagctaaaagtgtaaaaaagagcctcgccactccggcaaatccgaagcccaagccgaaacgcacgaagaatgttctgcgtggaaaaaggctggccaaaaagaaggcttggcaacgctttgtgatcgactgcgcatgcgtggccgaggatatgatcctggacctcgccgacttcgagcagtatttgaagacccacatcaagataaagaacaagctcaaccagctgaaggatcaggtcactttcgagcgcaccaagaacttctcgctgatcatccactccggtgtgcacttctccaagcgctacttcaagtatctgaccaaacggtatttgaagaaggtcagcctgcgtgattggttgcgggtagtgtccacggccaaggacaccttcgccatgacctactttaagattcaggacaaggactttgatgacgacgacgacgacgttgccgacgacaatggcggaaaaacctttgcctaa

SEQ ID NO: 5796 - protein, 312 aa, DROSOPHILA
MSSQTQKKNASKAKSKAGPQPSKKAPAKVTPVETATPSAAPPLSSKKVAKAPAVALKNLDLAMKESAKKAAEAADQKLVSKAKKGQNASRKNLMQVPEPVAPEVDNKKKSAPPKRGNAEIPTVVPAKKAALVQEKPKEQAAAAPKAENVEVPAAKAKSVKKSLATPANPKPKPKRTKNVLRGKRLAKKKAWQRFVIDCACVAEDMILDLADFEQYLKTHIKIKNKLNQLKDQVTFERTKNFSLIIHSGVHFSKRYFKYLTKRYLKKVSLRDWLRVVSTAKDTFAMTYFKIQDKDFDDDDDDVADDNGGKTFA

SEQ ID NO: 5797 - DNA, 12143 bp, DROSOPHILA
tgcagaatttcgttcacccccatgattgtcagtgtttcgcagatatctctgcatattcaactatccctaactggctatactatccctaacttaacccatcaagggtgaagtgcaatcagtacaacacctttgcagctacccacctaagtagtatgtgtctagctaccctacgaaccccgctttttatagccaacaaatcctcataaattttgagtaaattgcttatacgccgcgtatgccgcaagttcggtttgcattttccctcagcagctgacttaaatttatagagttacccaaataaaaaacgggaaaaaaacgggcaaggaagggactgccaagcgtaaaagtagaatcgatttatgcataaaaacggtggagctggctgaaatttatgaatatcaaacatttgatctttttggtacggggtgcaccggaaaagctccttcctgcgcattctgtttttccccgttttcaccgccttttctgttgaatctgctgctgtggtactggcccttgtttgcttagcttaataaccagtttttctcgtacacgaaaagttggtcaagttaatgctcttttggcttttggcagtaggtgtgtatggttggctacgtgacgtatgattaatgtgcgtggcttgttcgcctaatgaattggccacaagattctcaccgtgtttccttactggcccaaatacttctattcagttaatacttaaatacacattgagcttacgttttatgctcactaattgacttatgtcctatgcctgttgcatggcatctcaatgagcatgtcgttccgttacgttccgttttgtttcgtttcgcttcgtttgggttaatttggtcctttagtctattggttttcatactagctagctatgcctatgcagaaatttatcaaagctacacttagggctatgctaaaaactcacttaacagctaataaacgcacacattacgtgaatccgaggacgatgatgtgaacaaggacctcctcagaacgttgtcactttgcccagccgcatgccgagcaatttacgacgctttttggcgctcagctttgtccaaatggtgctgctgccctccaccagcaggaactcatcgcataaatcatccgtctcctttgcgatgccgccgtagaaatgatcctcctgatacttctccgaacgcgaatcgccggaaacgaagccgctctccggacgggacaaggatgcggtgtgccagggtagttgttggaaccatcgggccactttcgccgttgaggatagctgcgggaaatgggaaatggaaaatcggtgggtgtggtagcgttaagcgtggtggggcaaatacgttaaagtcagtgtgtaaatttatgcaaatgagttatgtgcgcaaattgctgcccaccagcgaaatccgtaggcaactgggaaagagaaaaaaactcggaagaaactcaacgaatgccaactgccgagtgtagagtgaaaaatggcgacacttgtttttgcttctgttccttgggccacggcatcgtttttcatttatccagggagggaaattcatacactgaccgtcccacggggcggatgcttaatgcgcttaaaagtgtgctgcatgtttttgtgtcggaaaagtcattagggaaattgcccagtctggcgttaactttcaattattaacgacagtatatagagtatgaatatacatataaacgactggaaacaagtgccaagggtttttacataattatgcgatttttattattatttctggttgtttgccgttcatttttgccgcctatattccatattcaaatgaatatttgaaattgtaatttacacataacttttcagcctggcaactaattaatgcattccccatgattattgcatttttgcgaataaagattatgcgggtcacgcatgaattgaattaaaatacaacaatttacaaaaataacagtatcgaatttaatcagtttagactagactcattagcttaatcactaggtgtatagatatagtttttcatttaggggagagaaaatactttcaaacgattattgcgaacttgagtaagtttcttcgttgctgatatgctaagattatgtttcacaaatacttttacttaaggtttatcgctgctggcccggaagctaaccaaactttcgagtattataaactttcgactttggcacagttttgagctagaagatattgctaaatagatatacattacatagatatattacacttaaacggacgttgagctgggcaaataattggcacactaaacgccagcgatgcgttctgctaggacacctaaaatgcaaaactaaagtaggcttccatttctcctaaattaatactgttgcacccactcattcactcgttcctcatgcacgcccacttccacttttcgtatcctttaacctatgacctggtccactgggcgtttcgaagccctgctcctatttggtggtgtgcctggcccaggtggtcctctgcacctggctcatcatctggctgcgattgggcaccttctcgctggtgctgcgtgtgatgaaactgggcgtggccgatagctttctttggtgacccgcctcatcggtgaccctcagcaaaaccgtattgaatcgcgtttcccgactgctgctactattgctattgctattattgttgtggttctggttgccattgctgcttccaggactaatgttgttattgctgctcctcaaacgtggcgaggatggggagtccagggtggaggagctacgactggtatcccgcgtgctggtcgatcctccacaggccagtccagccagattgccattggacaccgccgccttgagttgctcctccagattattcagattctgctcgatgctcaggcgtatatcctcgttcaaggacgaactcccggcaaaggaattccgattcatggtgcccaacggtgagggggtcagtgttcccgtggctgccggtgaggttaggaaattgaaacctccggctccgccagcattgttgtttggcgtggccggtgtgcaggacaagggattcacatagaagaaggagttgtgcgccgtggccgagggcgttggctggctctggccaggattggcattcaagttcagtgcctgcaggcgattcaacagctcctgattcacctggaacagatccttggacaatgcgtcctgctgctgttgttgctgctgctgctgcagctgattgctgatgctctgcagcgcactcatcgacggatacggactactgccccccgcagcgggagggggcgtggccgcagtcggtgccgcctgcgtttgttgctgctgctgctgctgctgttgttgctgctgctgctgcagattctggaggtgctggctctgctgattcaggccactcagctggtgactcagcgaggtcaactgctgattgatgctgccaagattgctgatctgttggttgatcgtggccagattgttgttgttgctcgtggcctgcagcagcatttgtagctgcgattgctacacgatggaaagggtgaaagttcaagggacattaagttctgcagttctctctcaatcaatcaacaacaacgacaacgagagcgcacaacaaaaacggggcaactattgataaacacacgtgcaaaaacaaacggcagccaagaaaaacagaaacaaaactcatgcaaaaatgccgcacagcttgaaaaggctcgaaatgagcgcaaatttacgatcgcataactcaaaagcctatatagcatatatagtaatcggtataatcctcacctgtggcgccattccgatgttggccgacgtgagtccggctgtctgctgctcattgtaggcccccaaagaggccaggtgctccaggagctcgcggttctgctgcagcaattgttgggtgcgcgcctaaaggattacatacatcagtggttagttttaaatcccattagggacaacagttctcccgtcggtagaaaacccacctgtgcctcgatgcgcgcattggtctccgagatgagctgctcccgcaccagcatcagttgacccagagcctggcgcgtctgcagagcctgtgcctccagctggtccttcagctgagtgatctcagagcgcggcgaggaaggtgagcctggcgacttgtcgtccacatcgcactattggaagcggagggtataaagaaatatttataatatatatataatattatattaaatttttatactaaatcctgctttattcaaaaaacaaaatattttaaaactaggtcaggtgctctattaaattttaatgtcttctatgtattgcgagagttcaaagaaaatgtgtttttgcaaaatatgataaacaagcttggtatgttcttggaaatgttatgacttttctacaccgtttcaattgatagactagtttcactgtttaattattaagccattaaaaattacatgtttcttttattaccataagaacatgaaaacatttcactaaaaatggaattaaattgacacatataattgtaaaactgtgctatttggtgctttacaagcgagattcctttcctttttattcccagtttagccttgacagttctcggggccaacgaaaagttattgaatttgaattttattgtagctacagcttgtttacccccccacttctgaccgagttggttaggtaaacaaaggggaaatattattttatacattatgatctaaacagaaatgccagccagcaatgggccacattgtatttgatttcatttcgaagatttcgcctcattaaaattcaccattgccggcattttaattgccctgccaggatatggcagtgatttcgcttattattagcggtccattgaccacaattattataatagacattcataagttactcaccagcaggctgttcgatttgcgtagactcgaatgcgatggcattatatccaagtggttcggccgctgcggctgcgtgtggttcagatcgggcgttatggccaagtgctctaaaaatagtgaaataattagatttgcgaactgaatagctgctggctggatgatggctggttggttgagcaagtgtgccgtgtaagattgtgctcaatcgacctccaatttgtcaaggtcgcgggacacccacgcggcccacctggtggtctagtgccccacgatccgcactggcagccactttcgcgcttaatttcccattaattacagcgtctagagttcgatatttgttttgattatgctctttttgtatcgtataaataatgatacaattaactagtcgcttgtgcattcgttacgaatgccatgatgatcagggataatgataatgaacttgaatagagaatatagacgatggggcgtgcgaagttcacttctgttttcggctgccatttgagtttgatttgttggcaaatatttaagaaatttcttcttagaactgggggataaggcgccataaattcatataaaggtataggtatatacggcaaaatattcgtttcgcacctggggcacgtgttaattgccgatgaattgctacaagcgctgtaaaaatccttcacagcatgtaaattaatttgctgttccgcatgattttcacccgccaagcattttggcaaataattgttggaattcgccagcctcaattcctgctcatatccaacaaggattctgctcagaaaaaacacatgttgtctgggctaaatttaaacactatctattgtcgaatttttacaacccaaatgacccattttgtggaacacatcatactcaattagagagctctcgccaaaacagctgcaaaacgattccgtgacatggaacagcaataagtaatacaaaatgttcagctcttacttatagctattctatagtacggtgtgttttggatatactatttttgcaaatcgtgcggccaaagacaataaatggggtgttgattgatgtaatggcgtacttattacacatacgacctgtggtcgcagcaggccaaaaaaaaatatacaattttaataattttgttttgaggtatatacacatacaacgatttgtgtctgtttaaagtttttcggaactgtataggtaaataaataaaatttacaaagttggcagtagtctatacagataaatcctcatcattggaggcaataaatctgagggtaaggaaaaatcttttctcaaatatgtatatatatttatgagacagagatgtcaattaacttttagatacttcttctcgcttagaaattcttgaaaagtgaagtttttgtttagatatattttcaatcaagttagctgtggggacccaatttgcagcataatctcaagcatctgtgctagggtattgaactttgaacttggctgatcaaatcttcctaatctcaacagaatgtcgcacagacaaagacaaacactcgcgtttattatttcagtgtcgcgtcgttggtacaactacttaaaagtcaaccaacgctgtcgggaaaatgactatatacagaaaattacaagacctcagatggaatggtggctaagatattgaaataaataaattatttttggcacacgactgcagggcacgcccacacacacacacataggcacccacttttggccaccacgtgaatgtttcgtggtctcgagtgtcgcctggtaacaaattcggtttcagttttcccgaattgaatggtgatgccatggttatgatgagagtatcagcaaataatccatctccgataagtagctacctttggctcgttttcccacttgggtgttatttatatttatattctcggaatttcttgccaatgatgtcgctggattgttttagacaaaagattgcaaaaagaattgcttttctcgtgaggttttcaatattattttatttttttccctcttatttttggcagcagcaacgcgttgatgacgtcaaactacgccttgcctgtgtaagagtgttcgtcaagggggaggggttaaaaatggaagggggaatgggaagaaggcaggttggtcggcaagatggaaaaccgcacgaagattattgaaaattgaagcaatatgtggaaattgcttaacagcgtcgaagtgtatgtcgaaagcggctgcttctgttctcggtacttttattcttattttcacttgctattatttttaaatattttcatctcatatgcgcagtcatctttcgtactgaactttttactttagcagttgtctgttcagtgtggatactcatgtatgtacacaatatacatatatcatgtgtgcagttgcaatttgtatatttacggaaataaggagaagaaaacacagcaaaattttaagccaaataaggtatgagcaccctacctgaaatgccgaaataataaactaaaacttagtaaattatatctgataatctggccgaagtaatggcactttcaggtgcttcctattccgattaattttaaagacttaaccagaaaaaatcgctgctttccccttctgacaatctcctcggagagtaaaatgcaatttaaatgcaaatgcctgactcgccgcatcgaactgaattcgaaattaaagagcagacatttgcatgggaatgcaaaaatgaataggaaactaatgcgaccagcgtccagactccagagattcacccaggaagctggcagccgactgcgacgacagccagagcttttcatttatttattggccagtcaacgaaccattttcgccccccatttttcacccaaccgttttttttttttgcccttttccattttacagcgaatgaattttccgccgacactcacctttcttgggcgtctcgttgtcgccgccaccgcgttcaccatcctcggatagctgctgctcgctgatctgctccacgtccagcagctccgatgaggatatatcggagcgttcgtcattgggttccagggaattcttatgaagattaaatttgtggcacacttcaaaggcttgtcccacggtgcgaacgatgcgcatcgcctgagactgcaaaagacgtagagatggtaaaggaaggggattaatttaattgcattatggataccacacagagtggcggcgccactaagatataacaattccacccagccacttcccccccaccgatgattctcccactgacagcaattaagcagctactgcatattacgcatacgccccgttgttgcattgaacccacctccggatcgcttgtcgcacagccgcaggaaattgcatcctttgtgcgattattgcataaattatcacagtccgctatcgctaagccaaccctgcttcgctccaagggtgagctgcgacgcctctgtctcgcctgccgctgttcgctgagtatgagtggtagtatttggtcgccggcaataatgggttcccggaacgaaagcttcttgcgcggcttatcggttttggggcgttccaacataatgctgccattagcattgccacctccaccgccgccactgctcaggctggagctgctctgctgatcgctgagactcttgcgccgctgcagctgatgacgctgctcggatcgctggtggagaagatgtgcccgtcggagcgcctccggcgatgcttcatagtgatcgccgggtaatctcttaaacttcaaccgcgccttcagaacatctccattcgattgggcagcattggatgtggaattgctggccttgtgactggacttggccacgggctgctccttctttataatgtacaccgtattctcatcgtcattgaagagtatgtgcttgggcttgtggtctatgtaggtgtcatctatgaaacgtggcggttgactcacaggacctcctcccgtcgcaggagccatctcccgctccacacagccaataagttctcgaatatccaagcttttgttgcgcgacaggtgcttctgtttctttttgtgcgaaggaacgggagattgtggtggcttatccttaagctgcagatttttatctcccaccaggatatcacggatgagaccaccgccactgcggaaaatgttcttgtgatagtgcacctccgaggatttctctgcaggggtaaccgtggaaacagaggcctgctgttccgccggctgactttgaaccttggtcatgttgaccttgctgcgacttcgcgtccagggcaggaaatcaaaggccttggttatgggactacgtggaactacgtgggcggagctgtccgcatggcgctgcttgtgcggagcagccatggctagggtcttctcgtgcttcatggccacaacaggcagctggacagagttcggtgatccgcgaaaagtatccgcaatccgcaaggtcgttagctcgccaatttgtcactgttcacactaagttcaatgctgttcaatgctgtattttcttcactgttttcaatcgaccaattagttggctattaatttcataattgcttagggttctgcggctgcctcccttgatccaggttattcacacaccgccgatgcgccatttttcacacctgccaggtgctatatgcattgtttatgtttctctttcgccttcaggctgttgtttttgatgccgtttcttttgcgtgttcatttatttgtgtattgaattatttgcaacttttcatgttgcctacatatcggcaaaaatatataaatattattatttttggttattttgccgaatatttctgccgcgtgcacgtccgcgatttttcgtttcagaacaccatcccctccaaaaaatacaaaaactgtcaatctgatgtgggtattgttatggtaagtcagcgggcgaaatttatgtcaatcagcaagcgaatgacttgcatcggtttgctgtcaagtgaatcagtgcctagttgcagttttataagcattgaactttgaaggtccctcatatataggattatacagatcataacaaaatatttcactaaacttgtttgaataaaaacaaatatttggtagcaattttatagagattattctttttccctttacttttacctactttttcataagaaacataacaaattgaatcaacaatatgtaaaagaaatatgccatcagtcacaaaacattttggcaacacttgctaaacattttctattactaattaaggctgatctgccgtataagtttgtggtttcgactttcaggagaatcccggccagaacttggccaccacttgagcactttgaagggctacttcagtggcagcaggttgagcactcgcccgaaacgacattaacaacacatcaatttgaattattttgacaagcagtgacagcacttgttgcgcaagttggcaaacaaatgaagcgaagcatgcttacaacacgttcaatatttggtgatttgtgggatacaaaaccaactcggccatttaacagagctttcaaggtgattttacaagaggcgtcgaatcgtctcactttgccgctttatcagccagttcaatttttcgttccagcattgcgcatacgccacgtgcgccatggaaatctgtcttaacgaaggtgccaactgattgtctatctcgactgaatgactaaatctacacacatacatatttctccctcgcgtgtggcttgtgcaatttcgcataaatcaaattgaaaactataaaaagtaaacggataaagtgtgtggcaatttacattcgttacagcgaaaccagaaagagaacttaaataaatatgaacgagcgaaaaagaatattgcgtggcattttcgtggaaaactacttgaaaatttatggcgttaagaatgacttttgttagctctcgttttatgtatttatttgaattttaattttcattttacccagcacagcaatcaaatcactggcactgccactgccagtttgtttgtttttaccgggctcgttcgcctgtcataagggaaaatttttacagagaaaatctttgtgtctggcctggtattttagcaccgtttttaatggcaatgccattgcctctgggttgccctgatatacccgtgccatctggccagtgtttactgtggccataagtcgccggtggtcacgatgtggggactcgtagcattcggaggcagaagccacagaagccacttccgcagctgcagttgaccacagttggccacagtttaccacagggaaaactgcagctcgtaaattctgcacattgtcacgtggtccagatgggtgggcatgttgctactacgagtgtacccctctgctaatgaagtactcattagtcatgcagggtctgcggcacttgaaaattcagtttacacacctcgacgagaacaaacgatacgaaaatacccaaagaatataaacttaagtatttataattcggcactcgaacaaagcgagaaacacctgcacaccgcacaacctgcgtcttttgcactcttcgttgttcgattttagaaatactttaaagtaggctattaaaataatggatctattttggctttaaatgcaaaaaaataaaaccaaacgaagcgaaaagaaacgaaacaaaacaaaggaaagcgagtccgaatgtcgatgggggcagccatttttgggaatatgaaaattgaaagaaggaaaaatgaaataataaggcacgttgtggttttccccgagccaatggctttgccaaatccaacagacaacaggtaaatttaaaatatttcaccattttctatgaactattcgaaacaaaacttgagaacaaagttatgtttatgaaaattccatttatatttcgtgtttatttgggaattttcagctgtcaaattagctttagcttgtttattatactaatacgaaatatagatataagtaaataagcgaaaggaatcgtaaatatttcagccataatatcacgtgtgcgttcgagttattggccataattctatttatttataccagcccccataatttccgtggactgcctgtagtgcgagttgctcattaacaactaatatgcataaacagtaagtttttggagaagtgtacgtcactgagttaagtttggccacgaatgaatgaatataatgaatgtactcaagaaggaatatataaactacttttttttcacaatcttgtagcctggtgctaaaatcgtatcactgcccgcactttgcaaactttttcgagtggcttgtgttgcggctttcctctg

SEQ ID NO: 5798 - DNA, 2439 bp, DROSOPHILA
aatttacgagctgcagttttccctgtggtaaactgtggccaactgtggtcaactgcagctgcggaagtggcttctgtggcttctgcctccgaatgctacgagtccccacatcgtgaccaccggcgacttatggccacagtaaacactggccagatggcacggctgcctgttgtggccatgaagcacgagaagaccctagccatggctgctccgcacaagcagcgccatgcggacagctccgcccacgtagttccacgtagtcccataaccaaggcctttgatttcctgccctggacgcgaagtcgcagcaaggtcaacatgaccaaggttcaaagtcagccggcggaacagcaggcctctgtttccacggttacccctgcagagaaatcctcggaggtgcactatcacaagaacattttccgcagtggcggtggtctcatccgtgatatcctggtgggagataaaaatctgcagcttaaggataagccaccacaatctcccgttccttcgcacaaaaagaaacagaagcacctgtcgcgcaacaaaagcttggatattcgagaacttattggctgtgtggagcgggagatggctcctgcgacgggaggaggtcctgtgagtcaaccgccacgtttcatagatgacacctacatagaccacaagcccaagcacatactcttcaatgacgatgagaatacggtgtacattataaagaaggagcagcccgtggccaagtccagtcacaaggccagcaattccacatccaatgctgcccaatcgaatggagatgttctgaaggcgcggttgaagtttaagagattacccggcgatcactatgaagcatcgccggaggcgctccgacgggcacatcttctccaccagcgatccgagcagcgtcatcagctgcagcggcgcaagagtctcagcgatcagcagagcagctccagcctgagcagtggcggcggtggaggtggcaatgctaatggcagcattatgttggaacgccccaaaaccgataagccgcgcaagaagctttcgttccgggaacccattattgccggcgaccaaatactaccactcatactcagcgaacagcggcaggcgagacagaggcgtcgcagctcacccttggagcgaagcagggttggcttagcgatagcggactgtgataatttatgcaataatcgcacaaaggatgcaatttcctgcggctgtgcgacaagcgatccggagtctcaggcgatgcgcatcgttcgcaccgtgggacaagcctttgaagtgtgccacaaatttaatcttcataagaattccctggaacccaatgacgaacgctccgatatatcctcatcggagctgctggacgtggagcagatcagcgagcagcagctatccgaggatggtgaacgcggtggcggcgacaacgagacgcccaagaaagagcacttggccataacgcccgatctgaaccacacgcagccgcagcggccgaaccacttggatataatgccatcgcattcgagtctacgcaaatcgaacagcctgctgtgcgatgtggacgacaagtcgccaggctcaccttcctcgccgcgctctgagatcactcagctgaaggaccagctggaggcacaggctctgcagacgcgccaggctctgggtcaactgatgctggtgcgggagcagctcatctcggagaccaatgcgcgcatcgaggcacaggcgcgcacccaacaattgctgcagcagaaccgcgagctcctggagcacctggcctctttgggggcctacaatgagcagcagacagccggactcacgtcggccaacatcggaatggcgccacaggtgaatcaggagctgttgaatcgcctgcaggcactgaacttgaatgccaatcctggccagagccagccaacgccctcggccacggcgcacaactccttcttctatgtgaatcccttgtcctgcacaccggccacgccaaacaacaatgctggcggagccggaggtttcaatttcctaacctcaccggcagccacgggaacactgaccccctcaccgttgggcaccatgaatcggaattcctttgccgggagttcgtccttgaacgaggatatacgcctgagcatcgagcagaatctgaataatctggaggagcaactcaaggcggcgctatcctcaacggcgaaagtggcccgatggttccaacaactaccctggcacaccgcatccttgtcccgtccggagagcggcttcgtttccggcgattcgcgttcggagaagtatcaggaggatcatttctacggcggcatcgcaaaggagacggatgatttatgcgatgagttcctgctggtggagggcagcagcaccatttggacaaagctgagcgccaaaaagcgtcgtaaattgctcggcatgcggctgggcaaagtgacaacgttctga

SEQ ID NO: 5799 - protein, 769 aa, DROSOPHILA
MATVNTGQMARLPVVAMKHEKTLAMAAPHKQRHADSSAHVVPRSPITKAFDFLPWTRSRSKVNMTKVQSQPAEQQASVSTVTPAEKSSEVHYHKNIFRSGGGLIRDILVGDKNLQLKDKPPQSPVPSHKKKQKHLSRNKSLDIRELIGCVEREMAPATGGGPVSQPPRFIDDTYIDHKPKHILFNDDENTVYIIKKEQPVAKSSHKASNSTSNAAQSNGDVLKARLKFKRLPGDHYEASPEALRRAHLLHQRSEQRHQLQRRKSLSDQQSSSSLSSGGGGGGNANGSIMLERPKTDKPRKKLSFREPIIAGDQILPLILSEQRQARQRRRSSPLERSRVGLAIADCDNLCNNRTKDAISCGCATSDPESQAMRIVRTVGQAFEVCHKFNLHKNSLEPNDERSDISSSELLDVEQISEQQLSEDGERGGGDNETPKKEHLAITPDLNHTQPQRPNHLDIMPSHSSLRKSNSLLCDVDDKSPGSPSSPRSEITQLKDQLEAQALQTRQALGQLMLVREQLISETNARIEAQARTQQLLQQNRELLEHLASLGAYNEQQTAGLTSANIGMAPQVNQELLNRLQALNLNANPGQSQPTPSATAHNSFFYVNPLSCTPATPNNNAGGAGGFNFLTSPAATGTLTPSPLGTMNRNSFAGSSSLNEDIRLSIEQNLNNLEEQLKAALSSTAKVARWFQQLPWHTASLSRPESGFVSGDSRSEKYQEDHFYGGIAKETDDLCDEFLLVEGSSTIWTKLSAKKRRKLLGMRLGKVTTF

SEQ ID NO: 5800 - DNA, 3639 bp, DROSOPHILA
tcaatacttatttatatgtgtagtctcatttccgtaaagtactggatttcgattttgatttcaattcgttttgttgtgttctcggtttcgttggctcgactttctaaatgctaattgaaatgaacttaaaagtgggcgcgtcacactcaacaagtcatcaacttcctggatagcatgaacaaagggtattgcgttgataattcttaaacagtttaactaaactgaagcgtttactcacaagtcgtaagtgaggtgccttgcatatcaaatgagacaacattttcggtttagcgatctactgacagggcttaaatgagtgtgatatcatatcacaagtcgatctcagacagtatacgtttgttatatggcatcaggttgtctatatgtgtgtgttcatatgaatgcaatttgcattttaagcacccttgtttgtttgagccacacaaaaatgatttgcaaaactttttatggtctccagacttcgcggttacttgatcatttggcctaaagcaggcagagtcaattcgcacctttgttggcctctggctaaaaatggtcaaatctaaggtcgaaattgtgtgagaaatgagtgattatactgctggctctaagtgtctagtatttattcttagaaaatattgtaatgatgtggaatcaaaagatggttcacattcgtttagattcataaaaatcaagttttcctttcgcttcaggttctgttaatagacctctcattacagcgagtatataacaggttttacttttcttctaaggtctagaggtaaataaaaacattgacgcgtaaacagtaaatggatatggcctataaacgttaatagtcttcatttcttaatgtaattaagcgcttagcacgccggacaggcgaagaaaatgggcgatactcaattaggcccgtgattcagcagcagtcggcgttgattttatacatatatataaaatgagcatgcgatgagatcggtggctcagttgctgatcgtcgttcgtagcttaaagtactagcttccaagagctacgcgcggaaaatctggaagctaaccacttgaaattgacagcaattgcgaggaaaagtggtaaattggcgtacatctagaggggttttccagaatgattgactctaataagggagcaaacagaacttctcgtagtcaaaacaaaattaagtgcttctatttataaatattaaatccattacaagtgcaagctaagatttgtatctcgtacaaaagtcgccttgtgctgtcccagttgtaattgccgacttaacgttgttttgtgattttcgtgagatgatttgcattcaaggccgatctttcgtattttatttttttttgctccaactggcccaactgcaaccggtttttggccattaccactcgagtgtgttatcaaacaggccaaagctcttgaactcggccggcccggttcgaatttagttgaccagcaattagcgacctctcgttaaattcgtcttacttttcttacaattagccacaacaacatcatcagaatgaagctgagcttaggattatttgtgatcttcgccgctttgatcggcttcacgtcgtccacggatgtgagtcagtgcccgaaatgtaagtaaaaactagataaatttaaaatttaaagtaaacagcacaattaaaatgtcgatgaactataataaaataggccacactcttgccttaattaacttgaagctttgaaagtgaatagatgtttaattagagattaatcttttttaagataagctctgtcgtaaatgaataataataacattttaacgttgtgggttataaatgtactttgtttattacttcagcttacttactatatttttaggaatccaatttacacttaactaggtatcatttataattttatgttaatttgatttgagaagtttttaactagttttgtttttagtcgaaacaactccaaattttgttttatttattgttgattcattttgtataaaaccgatttatcttctttcgctcagccaaatcgaaggccctagctgccggtgacgtctccatttccaattgccccaagagcaagtgcatcctgaagcgcaacacggaggccagcattcagatgaagatccggccggagcgcgacttccaggagctgacctccgacatccagggcattatcctggacgtgccgctgccgttcccaggatattacggcaccagcgcctgtccgcacatctacgacgaggctggcgagaagaaggtgggctgcccactgaaggccggccaggtgtacacctacaagaacagcttcaagatcctgcccgtctacccgaccgtcagtttggagatccactggggattgggcgataagcatggggatgcggcctgcttccagatacccgccaaaatcaaggcttaaaatacaaatgcggacaagtgcactcaatgttagcttttattagtggtaattcttaagatcgtatctgcgtatctgcatatgcttagtttagggattaagtacggttaagtgaacgaaaacgaagcaggccattattgcggcatccagccagtgacgcaatatggccaaaggattccactgatcggctcagtaagtctaataataaaaaaccacaacgaattctacatgtttagtgcgcctgctccgcgatctcttctaccgactgcgttaattgatttaaattgatttctttttttttttgttaattgatgcccggcatgcaatgatctcgcgtgtgataaatatcgttttatttcgcttttccctctgttcttctggcttagctagcgtgttatctgcataatttcaatttggcaattggcctcggaatgttcacttcgttagctcgtagcccgagtagttctcattgtcggcatcgatttgggcctgcagagcctgctgcagtttcctccaactctcggctgccgcatcgtactgaccctgaccgcccctgccacgcccctgctgctgctgatcctgcaactggcgcaattgatagcggtgctgccgcatcagctgcgcccactttaggccaccgattcgccgatcctccgattctcgacgacttataatggctggagcagccaggggtatgttgttggcactattcgcattcgtatttctgttgctgtcgtcatcgttgttgtcgtcgtcctggttgttctggttgttgttgttgttgttgtacagttgctccaccacgctatccaagccatatgaatttggcaagggatgctgttaaaaggtaaaacaaattaaattttaaaatgaaggcagtagtaaaatttaaactaattaattccttctatactcaaaggtcattctcaatcttacctgtttagcatctatgaccgccttcccgccggaccgcttgccatgagctgtggaatacataaacatgagtcacgactcctgggccagttgtgatgatgaactgctcccgtcagagcttaaccggcgagccacttacctccccaacacgaatgtccgtattccaggcaggaacctgaaagtatgcaacattttttccaatttagtataaatcatcatcagtttgccgcagctctaagactttgtgcgcaagtaaatttgctagaaacgcagccaggtgtcagaaaacctaca

SEQ ID NO: 5801 - DNA, 814 bp, DROSOPHILA
ttcgtagcttaaagtactagcttccaagagctacgcgcggaaaatctggaagctaaccacttgaaattgacagcaattgcgaggaaaagtgccacaacaacatcatcagaatgaagctgagcttaggattatttgtgatcttcgccgctttgatcggcttcacgtcgtccacggatgtgagtcagtgcccgaaatccaaatcgaaggccctagctgccggtgacgtctccatttccaattgccccaagagcaagtgcatcctgaagcgcaacacggaggccagcattcagatgaagatccggccggagcgcgacttccaggagctgacctccgacatccagggcattatcctggacgtgccgctgccgttcccaggatattacggcaccagcgcctgtccgcacatctacgacgaggctggcgagaagaaggtgggctgcccactgaaggccggccaggtgtacacctacaagaacagcttcaagatcctgcccgtctacccgaccgtcagtttggagatccactggggattgggcgataagcatggggatgcggcctgcttccagatacccgccaaaatcaaggcttaaaatacaaatgcggacaagtgcactcaatgttagcttttattagtggtaattcttaagatcgtatctgcgtatctgcatatgcttagtttagggattaagtacggttaagtgaacgaaaacgaagcaggccattattgcggcatccagccagtgacgcaatatggccaaaggattccactgatcggctcagtaagtctaataataaaaaaccacaacgaattcta

SEQ ID NO: 5802 - protein, 159 aa, DROSOPHILA
MKLSLGLFVIFAALIGFTSSTDVSQCPKSKSKALAAGDVSISNCPKSKCILKRNTEASIQMKIRPERDFQELTSDIQGIILDVPLPFPGYYGTSACPHIYDEAGEKKVGCPLKAGQVYTYKNSFKILPVYPTVSLEIHWGLGDKHGDAACFQIPAKIKA

SEQ ID NO: 5803 - DNA, 4545 bp, DROSOPHILA
ttacacacgtacacacaatcacatgggagctgttaaaaccctggtttccaggcttttgcaaaatgaaaatgcaatttttgcactttctgaagatgcctgtgctccttgttcaattcccattgctcaacgcgcaaaactcacactcacaaggaatctcattgtcattggctaagtgtggcttgcctgtgtgtgtgcatgtcgtggcagaaaatattgtacaattttttttctgtttgaactctgttcaaattcaagttgtcgcagcagcatgttttatcgcaggcccgaaacttttccgcagggctagcctcacatgaccgcctatcttttgactgctttttcactcacgtgattagaaatctaattaaaagcaattcgctgctctgtggcctcttcgggttactgctggctgctgcttaaaagcgcggatcggatactgaacaccaacgagttattatgctttgcttttataaacgttagtcacgggggcggattttcggcgatagttgtgccagcgctgccacctgatggacgtcaaaatgcactaacaatgtttccactagagccaatacaattaaagcattgctttcacaccgattttaaaaggatgcacgaaattgaagaacataagcacatcaaaattaatattttattttatatttctgatagcttggtcaattcgttcatgaacttgtatggaaaacatctttttgtaccatagaaaaattcaattgctcgaactaaatgggtcccaagaacggtattagctattataaaatagcttacaaaacgttttttatagtacgtataatgtaacaaattcatattttatttacacttttttttagaaatattggtttctatggagcttttgaacaaagaatacgtttatgcaaaaactctttgtataaaatgcctagtgtaagccccattattgtgcacacactaggcacacaaagttaaaattaagcccgaaaaaattatattccccttcatttttggaattaaaatatttaaaacgtttaattatacatatttaaaactatttcaacacgttttatgaaattaattatagaaattaatattacatagtcggtatatctacactgttccttctacggcgcactctagtatttctccagggcccgcgatagcagagtgttcatgttggttagcagcatgcggggatcctcagccaaaccggcgcccaccattgcgtttgcaaagagctgcttggcgataagttgggccagatccttgtcgctctcacggagcttgttaagcttcttgatgatggggtgcctaaggtaaggaaaaatgcaaaataagaaagcaacgaaagaaacgtgaggagcaggactcactttgggttgatctccagttctggttgaagcagggcaaatcgattctgttctggcacctggtgactctgggtgcgaatgaagtggcgagcggcagccatttcctctacggtgattacacagggatgggtgtctagacgagtggtggcttttactttaataacctgccccctgagctcctcctccagccagggaatcaaagtgtcgagctctgagcgcagcagactgccctcgccaaagtcggtggtcgctgttgtctccttggactcttcgcgcatctccttctccacggaaacgagttttttgcttttgaacttgcccagctgcatgagcaccagctcatcatagggttcgtagcagaagagcaccagctcgttgcgcttcttcagactctcgtagtagggcgaggactcggcaagaacgcggttgggtgctgccaagtagtaaatattctgctgttctgcgggaacggcgttgtagtactcctccagcgacatgcgcccactggcggtctccgacttggaggattcaaaacgcagaagtttagctatttcttctttctcggaggcgtcgctggaggttacaattccttccttcaggaaaagcccatagtcccggtagaaggcctcgtactcttctggctgcttcttggaccgctcttgcaggaaacggataacgcgggtggaaatcacactggacagtttgcgaatcaggctgctgttctggagcagctcgcgactcaggttgagtggaatgtcctcagagtcgacaacaccctttacaaaacgcagccacttgggcagcagatgctcagtcttggactgaataagcaccttgcgggtgtaaagagccacaccggtgtttccgtcccgagacatctcgaataaaccaggctttccttcggggaagtagagcagtgcatggatgctcaagggtacgtcagcattatagtgtaaggtgaagcgcgggacatcgaagctattgctaatgaaccgatagaagtcatggtgctgctccttgctgatgctttgtggctcaagaagccacagaggcttgatctcattggcctgctttccgttaagcaagatgggtgagcccacaaagttgctgtatttcttgattaccgccttgatcctctcctcgtccgcatattcacggcaatcggtctttaaatgaagcacgattcgcgttcccaactcaacgtcaggcacctcttcgatctcgtaggttccactgccatccgtggaccaacgcagtccgggtgcattaggcacagccgccctcgtgaacacctccaccttattggcgacaatgaaggaagagtaaaagcccacgccgaactgaccaataatgttcgaggatgcctccgagctggctccctgctgggtccccttcatctgctccaggaacttcttcgagccgctgcgtgcaatggtgcccaggttgctgaccagctcctccttggtcatgccgatgcccgtgtcctggatgattagctgcatcagtggcttgtcggtggtgatacgaatctccagaggccggtcctttccagccagattctcgcctccagcgctcaacgaggtgtaccgaaatttctccagcgcatcgcttgcattcgaaataagctcgcgcacaaagacctcgtggtcggagtataaggaacgagccacaatgtcaagtagctggcgcgtctctgcctggaactcatgcttgtccaccactgatcctgatgcctgcttggtctccgtggagtagcgacggagcgagagagctgcaagtgaaaagatgagtgttatgtaaacataagaatccctccggggagccggttgcttatattcagtgcttaccacccggcgaatgctgcgatccaatggtgatattgaacgctgctggggcggatcggtgactctgcctcaacacttgggcacagcgaccgaggcggcacgcctggcccagcactcccatcgctcgtacagacatcttgttgttttaatgttttgcccaactttaatgttacccaactacgaagtttgttccagcgcacatgtgtgcacagtgtagccaaatcaatcgattgtaagtattcgataatagtaaactggtaaaaccctactcataacggtgttttcttccaaatttctgggctgtaatgaattttggactcaaatgcttagttggtttgaataagagttactacatgtaatggagagttcagtttcatcacattattcagctcaaaactgaagcaaactgccagctgactagttctctaaagatttcgatcagcaagagagagagagagagatagagatgtttcaactgtgaacaacaaaccgtaaattctgaaggaattaagaacagattacgtttcattgtttagccaatgtagattggatgctgatttttgagttatgaaataacaaatgtcttcaaagaagacagtaaataaaagaaagttaaatcaaatccaatattgaaagacatcgatacctcatatcgatatacggtccaattgctgacagccctgctcgtgaatgcaactctgctgtagcgcgtcagcgtcgcgttgtaatttttgttgagttttttaaataattttaattagcatctgcgtgtcttactattagaatatcatgtgttaagtgtttcccattcacgccaccacacaaaaagatccaatcatgagcgccaccaccatcgacaacgtacgggtgctgcttcagtcgctgcctgctgccgccgtaaacagcgccactcagccgggcgatctacagacgccgggcaagattgcggccccagcgactccccttcgcgccaagaatcccgcccaattacagatcatgccggagaaggtcgaggagatgccgccgtcacctccggaggagttctggagggacctgcagcagtttcacgaacgacgcgggtgagttgccgcggctctcctgtatttggagacgacctaacccactttccctctgcccaaacagcactccattgacacagcccgccaggatcagcggtaagcatgtcgacctgtacaagctgtacaacgaggtaaccgaacgaggcggctttaataaggtgaccatgcgggacgagtgggacgaggtgtacagcgccatggagacattgcgggagcgctgcgttaacggaacggctagtatcaagcacatctacagacgct

SEQ ID NO: 5804 - DNA, 2407 bp, DROSOPHILA
ttcaaaccaactaagcatttgagtccaaaattcattacagcccagaaatttggaagaaaacaccgttatgagtagggttttaccagtttactattatcgaatacttacaatcgattgatttggctacactgtgcacacatgtgcgctggaacaaacttcgtagttgggtaacattaaagttgggcaaaacattaaaacaacaagatgtctgtacgagcgatgggagtgctgggccaggcgtgccgcctcggtcgctgtgcccaagtgttgaggcagagtcaccgatccgccccagcagcgttcaatatcaccattggatcgcagcattcgccgggtgctctctcgctccgtcgctactccacggagaccaagcaggcatcaggatcagtggtggacaagcatgagttccaggcagagacgcgccagctacttgacattgtggctcgttccttatactccgaccacgaggtctttgtgcgcgagcttatttcgaatgcaagcgatgcgctggagaaatttcggtacacctcgttgagcgctggaggcgagaatctggctggaaaggaccggcctctggagattcgtatcaccaccgacaagccactgatgcagctaatcatccaggacacgggcatcggcatgaccaaggaggagctggtcagcaacctgggcaccattgcacgcagcggctcgaagaagttcctggagcagatgaaggggacccagcagggagccagctcggaggcatcctcgaacattattggtcagttcggcgtgggcttttactcttccttcattgtcgccaataaggtggaggtgttcacgagggcggctgtgcctaatgcacccggactgcgttggtccacggatggcagtggaacctacgagatcgaagaggtgcctgacgttgagttgggaacgcgaatcgtgcttcatttaaagaccgattgccgtgaatatgcggacgaggagaggatcaaggcggtaatcaagaaatacagcaactttgtgggctcacccatcttgcttaacggaaagcaggccaatgagatcaagcctctgtggcttcttgagccacaaagcatcagcaaggagcagcaccatgacttctatcggttcattagcaatagcttcgatgtcccgcgcttcaccttacactataatgctgacgtacccttgagcatccatgcactgctctacttccccgaaggaaagcctggtttattcgagatgtctcgggacggaaacaccggtgtggctctttacacccgcaaggtgcttattcagtccaagactgagcatctgctgcccaagtggctgcgttttgtaaagggtgttgtcgactctgaggacattccactcaacctgagtcgcgagctgctccagaacagcagcctgattcgcaaactgtccagtgtgatttccacccgcgttatccgtttcctgcaagagcggtccaagaagcagccagaagagtacgaggccttctaccgggactatgggcttttcctgaaggaaggaattgtaacctccagcgacgcctccgagaaagaagaaatagctaaacttctgcgttttgaatcctccaagtcggagaccgccagtgggcgcatgtcgctggaggagtactacaacgccgttcccgcagaacagcagaatatttactacttggcagcacccaaccgcgttcttgccgagtcctcgccctactacgagagtctgaagaagcgcaacgagctggtgctcttctgctacgaaccctatgatgagctggtgctcatgcagctgggcaagttcaaaagcaaaaaactcgtttccgtggagaaggagatgcgcgaagagtccaaggagacaacagcgaccaccgactttggcgagggcagtctgctgcgctcagagctcgacactttgattccctggctggaggaggagctcagggggcaggttattaaagtaaaagccaccactcgtctagacacccatccctgtgtaatcaccgtagaggaaatggctgccgctcgccacttcattcgcacccagagtcaccaggtgccagaacagaatcgatttgccctgcttcaaccagaactggagatcaacccaaagcaccccatcatcaagaagcttaacaagctccgtgagagcgacaaggatctggcccaacttatcgccaagcagctctttgcaaacgcaatggtgggcgccggtttggctgaggatccccgcatgctgctaaccaacatgaacactctgctatcgcgggccctggagaaatactagagtgcgccgtagaaggaacagtgtagatataccgactatgtaatattaatttctataattaatttcataaaacgtgttgaaatagttttaaatatgtataattaaacgttttaaatattttaattcc

SEQ ID NO: 5805 - protein, 691 aa, DROSOPHILA
MSVRAMGVLGQACRLGRCAQVLRQSHRSAPAAFNITIGSQHSPGALSLRRYSTETKQASGSVVDKHEFQAETRQLLDIVARSLYSDHEVFVRELISNASDALEKFRYTSLSAGGENLAGKDRPLEIRITTDKPLMQLIIQDTGIGMTKEELVSNLGTIARSGSKKFLEQMKGTQQGASSEASSNIIGQFGVGFYSSFIVANKVEVFTRAAVPNAPGLRWSTDGSGTYEIEEVPDVELGTRIVLHLKTDCREYADEERIKAVIKKYSNFVGSPILLNGKQANEIKPLWLLEPQSISKEQHHDFYRFISNSFDVPRFTLHYNADVPLSIHALLYFPEGKPGLFEMSRDGNTGVALYTRKVLIQSKTEHLLPKWLRFVKGVVDSEDIPLNLSRELLQNSSLIRKLSSVISTRVIRFLQERSKKQPEEYEAFYRDYGLFLKEGIVTSSDASEKEEIAKLLRFESSKSETASGRMSLEEYYNAVPAEQQNIYYLAAPNRVLAESSPYYESLKKRNELVLFCYEPYDELVLMQLGKFKSKKLVSVEKEMREESKETTATTDFGEGSLLRSELDTLIPWLEEELRGQVIKVKATTRLDTHPCVITVEEMAAARHFIRTQSHQVPEQNRFALLQPELEINPKHPIIKKLNKLRESDKDLAQLIAKQLFANAMVGAGLAEDPRMLLTNMNTLLSRALEKY

SEQ ID NO: 5806 - DNA, 3350 bp, DROSOPHILA
ttcggtgcccctttgggaatgaaaggctcgccttcagatcgtctcctccggtgaatgacaaaagtcgaaggcgttggattaatttgtggccacggtccactcaagttctcaagttctttcccatccttcctggcacaatctcctccagtccgataaagcgtttagctgtgctcgtcgttgccactgataaatcgctccgtttgcagatgggctttcaacgctcgtagcactgcactgcgagaaattgtgtgctactccttgtatttcacatgtatgcagtgactgggctacaactttgccacctgtaaaacttctttctttccgtgtgctgaccatttcattacgcgtacgagtattgatgatcggctgtcgaccaaatgaccaaactttgagataagaaaagaccccaaccccaggctgaacggatgatgccccaagacccacgaaacgtgatacctgagaaaatgcaaccgttcgtcggcgagataagccgccgaagaagcttctccattgaaaaggcattaaggcattacctgggcttcgtaataagcggtcggtaggtgtgaatatgccgagaaatgtcgacgataaagcgtaaagtttaaaattttaattaagcaagagctttggcctgactcttccagaggaactggaaataaaaggtgagcggagaagctgctgcaggagctgtcggctttcgagcagctttaaggattgcagcttaagtcggtctgcctaattgaatttctgccatcgtatttggggggcgaggaggcgtgtcctcacatttcgatcccagataacttaaagcgttaagcagttgatatcacaacaacgagagtggagaactggatattaacttccttatcgctcgtggccttggccacatcagctcaccgagtcatcatcaggtgtcatgatggactgactattaagtgtagatgttcctagatggttgagcatattgaaatttcagttaatatggtttattatttcgactttattgtagatcatccgccaggtacttttcgggatcgtaatacgaggtcatcactatgcgcccgctgaacttgcgaccactcaacgccttaagggccttctgcgaatcctccacggattcgaactggacgaagaccttgccacagccccgcttcggaaattgaccgatgggacgcggaatcttgatgctgcgaacctcgccgaacttggcgcactcctgcttgatgtccgtgcgaatgtcctcgaactcctcgtcgtccagcagctcctccggccgcaccatgttcagcaggcagagagtttcggtaggtgagccaggatcttgtagtgtggatatgcccggtacctgaagaacggttggtaagtggccggggaatgcgttctttccgcctggaatagatctctggaccaccagcctgcgatcccccagcagcatgccgtgcaatccagctatggcgtgatcggtaaccgagggatcgcagtactcaaagaaggcgaaacccttgttcaggttcgtgttggtatccatcaccagattcagtcctttcagttctccaaacgactgcagcagttccttgacctgatcctgattcaggcaggtgggcaagccacctacgtagatcttattgggggaatcggggacaatagtggtcacaggaagggtaacagccggttgttgggctacattgatggcagggaccctgaatgacctgtagctctccattgcagagactgaaatcgagggcactggctgatagtcgtgtggccgtcttatcttcaaggtttgtccacggaagaccatcccatcgaaattcaaggcctggctggcctcgtcaatggatcggaattccagaaaggcaaagttcttctccagattcgtttggcaggtcagcacagcattgccatccatgtagtgcgagctttttgcttcaaatcccagagccatgatctgatgattgaagaactgcatcatctcctcatccgtaactccgaatggaatattacccacatacaggcggcgagcttgtcgagtgatcatcgaaatcgcggcggactcgcccccgtgtacgccatcggaaagaatcctcgaggcaatctggccgctggccagcatggccttgtactgttgcggagtcaggtggttataaccctctggtggaatgtcccaggaggagggaggccgactgaaacgtcgctgcaatcgcgtcctctctgtgtaaatggtatccgaacgggtgggccgggatcgagtaatggattgcgaacggaaaggcgaacgcgaacgtgaacgtgaacgtgaacgcgaacgcagagcattccaagaacgattcatgggccgaaaacgtctcatacttttcagctaaaatcaccgaacaccaggccttgttggtgaactaaaatgaaatcacaataaaagctactctgattaaaaagttcagtgtgacaactgaaggaatcatcgataacgagcaatgtgaccgcacttaatcgacataatgtaacgtaaatttaatttcttgtctaagtctagcaaattaaaaaattctctgcaatccggcaaatttgttcattcagcattcacatctatcatttaatgtattcgatgccaatggcggggagcttgaatcaaaaaaaaaaaaaaaaacaattaagtcgtttatcatacatcatccggatagttttcagctttcattgtgcctcgttatatctttcgacagaaaaacgtatctacatacgtatctgcgggtgcatttccagcgaataatcataatcatcataattttcgttaatatcgccaatcaattataattaattggcaacggctcgcccgcaggccgtataaatagagaagaagcaatttgttcaggccatgctttttgggttcgttttcggagctgcgtgtgtctccatcgcgatgtgtggtcctccgagcccagcttcccgcaggggatgagtcggggataccatcctcgccacattcctcggaaacgcgacaacgacttcatttggaactgaggggcggctcaattaattcagaaaggcgacacaataaaactgtcaactcaaatcggacaaaagagggatttcaaactttaggggaatactattctattcaccgtaaatatcctgcttgcataacgatgcacagaacggagtgtttgaacaaggtaagaaatcaatttgaataaaatgcttgacttttccctcagtgcattcccttctacacgtcaccattccacacataaccccctataaagaactttatcgaacccagaaaccaagtgataatttatgtcccgatcctcgatcatcgactacaccgcacctcctttgtggaggctctcaggtat

SEQ ID NO: 5807 - DNA, 1350 bp, DROSOPHILA
atgagacgttttcggcccatgaatcgttcttggaatgctctgcgttcgcgttcacgttcacgttcacgttcgcgttcgcctttccgttcgcaatccattactcgatcccggcccacccgttcggataccatttacacagagaggacgcgattgcagcgacgtttcagtcggcctccctcctcctgggacattccaccagagggttataaccacctgactccgcaacagtacaaggccatgctggccagcggccagattgcctcgaggattctttccgatggcgtacacgggggcgagtccgccgcgatttcgatgatcactcgacaagctcgccgcctgtatgtgggtaatattccattcggagttacggatgaggagatgatgcagttcttcaatcatcagatcatggctctgggatttgaagcaaaaagctcgcactacatggatggcaatgctgtgctgacctgccaaacgaatctggagaagaactttgcctttctggaattccgatccattgacgaggccagccaggccttgaatttcgatgggatggtcttccgtggacaaaccttgaagataagacggccacacgactatcagccagtgccctcgatttcagtctctgcaatggagagctacaggtcattcagggtccctgccatcaatgtagcccaacaaccggctgttacccttcctgtgaccactattgtccccgattcccccaataagatctacgtaggtggcttgcccacctgcctgaatcaggatcaggtcaaggaactgctgcagtcgtttggagaactgaaaggactgaatctggtgatggataccaacacgaacctgaacaagggtttcgccttctttgagtactgcgatccctcggttaccgatcacgccatagctggattgcacggcatgctgctgggggatcgcaggctggtggtccagagatctattccaggcggaaagaacgcattccccggccacttaccaaccgttcttcaggtaccgggcatatccacactacaagatcctggctcacctaccgaaactctctgcctgctgaacatggtgcggccggaggagctgctggacgacgaggagttcgaggacattcgcacggacatcaagcaggagtgcgccaagttcggcgaggttcgcagcatcaagattccgcgtcccatcggtcaatttccgaagcggggctgtggcaaggtcttcgtccagttcgaatccgtggaggattcgcagaaggcccttaaggcgttgagtggtcgcaagttcagcgggcgcatagtgatgacctcgtattacgatcccgaaaagtacctggcggatgatctacaataa

SEQ ID NO: 5808 - protein, 449 aa, DROSOPHILA
MRRFRPMNRSWNALRSRSRSRSRSRSPFRSQSITRSRPTRSDTIYTERTRLQRRFSRPPSSWDIPPEGYNHLTPQQYKAMLASGQIASRILSDGVHGGESAAISMITRQARRLYVGNIPFGVTDEEMMQFFNHQIMALGFEAKSSHYMDGNAVLTCQTNLEKNFAFLEFRSIDEASQALNFDGMVFRGQTLKIRRPHDYQPVPSISVSAMESYRSFRVPAINVAQQPAVTLPVTTIVPDSPNKIYVGGLPTCLNQDQVKELLQSFGELKGLNLVMDTNTNLNKGFAFFEYCDPSVTDHAIAGLHGMLLGDRRLVVQRSIPGGKNAFPGHLPTVLQVPGISTLQDPGSPTETLCLLNMVRPEELLDDEEFEDIRTDIKQECAKFGEVRSIKIPRPIGQFPKRGCGKVFVQFESVEDSQKALKALSGRKFSGRIVMTSYYDPEKYLADDLQ

SEQ ID NO: 5809 - DNA, 3404 bp, DROSOPHILA
taggttcacacgtgaaataggtatgggaatattcaattgacttaataaaaaagttaaaatctctctctagtttttctttgtcttcattggaacattacctacgagttcaactttgcttatactagatttgtgaattcacctgatccaattgtggcacttaccaatcaactgaagcacttttcaactgataacgattttttttttttgcatgccaaatataaacatatgtttggcaggataagataggaaagtcaagtgccttggcccccatggaacgcattttgttatttatttacgactcggtttaccacttttaactaacttccatctaaaaatcacagtaatttgaaaatattgggtcaaatccggaatgtattgcccttttctaatcttattttaataccactttgctccattatattggcgtttgaatccgagacttttaaatttttttcaattttttgaaaaaaaatcatgatgttaccccttatcaaaaatgcaaaaattgacaaaaaattaattttcgcaatttaattggaaagtgacacagaaagttagtagttgcactcagctgccaaaaaacaatcattcttgtgtgtttgtgacacatatgacaattaaaggctacaaaaatatctttttaaaactggttcatggttcaattgttttttgtatcttaacattttgtaattaccaatattgggtttacagaactggtgcaagtcttagctatcttactttgttcgtcggtcgatagatttctggttgttgtctgagataattgtgtgtggtgaattttaatgggttggcgctctataggtgaaaaaggctggtttaaaatcaaaaaatttgctttctaaaagatgtttactattaacggcaataatagtttatggtattcgtgtattagtggtattagtatatggtatttatgcactatactatacacatcccattttaaattccttcaccctgaacccattccaagcaaaagactggattggtgttactaatttaatgtgtgcacaatcaatcaccagacaactgcgccgtcggagatctttttgtggaagtcgtagagactggggaagacatgatctcgatcgatgtcctcgccgtatttcttgaccagatatgcgtagctcttctcgtgcaccagcgccgagtgccagcccagttccttggcggccagataatcagtggtgggaccatccccaatgtgaaggcactcctccggcttgaggttcttcagacccgacttctccattgccttttgaaagatttgggggtcgggcttctcggcctgcacctcgtacgagttaattgcaaagtccaggtactgatccagcttggtgttctgcagcagagtcggcagccgaggatcgaagttggctatcacacccagcttgcacttctccggcttcaactccttgcggagctgctgaaggagttccacgctgccgttgcatggctgccagcaaatggaggttttgtatagctcaattaggtggttggagaagttgtgcagcttctcgtcgggaatggccgctccactctccgcaaaagttcctgcagggcgagtgtcagttattagttagtgtttctgtatctataaatgatcaactcaaaactactcttgtgttgtgaaatagagtttataacagttctaattaacaagaaattagcaggtacgcttgtgtgatctttgcattaaaagagaagttttcattaatctctaatctttcgagcgcaatcgttgttgacgtctttaacttttagctaatgtgcctaatatgttttcatatatgtcactttgtaaggaagatagtaatcatttatttttctaaattaaatcataaaaatagttgtttcgtgatcagatttgcttttgctatctactaagaggtatttctagcaatttttcttgagagaagttgcggatactaagacctctagtagctgttgcgccaaatgcactttggaacaacccggaatgtttatcaccgagcagacaaatactttgcgggcactcacctgctatcagcttacgccaccattgctgccattccatctggggattcgtgtcgcgcccaaagttgggataatcgcggttcatcttgtacctgaaaggacgggcagttcagttggagcattcaccacaaaatgtctgtgcctcctaccagttggccttgaagttcttggccagctcgttgttgtcgcatcgggctccgaacagggctccaatctcgccgtactgcttgccgggagtggttcggaattggagcagagtgttggtcacatcgaaggttatgaggcgaaagcggctgaggctgcgcattttgcctgaaatctctgaaatgccgctcgagaactcttgactttcgactctcgtcgaacgttggcgactgaaatcagccggcgtactacgtgagctgggggcattctgttattgttttgtacgaaagccgatccgcttcgttatcaacagcagctggtgcccccagattccgattccgagggcttcgtatggaatcgaatcgaattgaatcggacctcggagcatcgaaacatacatacatacatatgtttgtgtgtgccgagccggattaaaatgccactttatctttagcgagtgcgctgcggttatctctcgtttgtcaaattagtatcgatctgcaatctgcactgattacacgccaaagcaaatactgttaagcgagataagaacatttttcttatcgcttttcttaccttttcatttgtgctctttgtaaaacaatgcttctgagcataaaacaaagtaaaacttgcttctgagtgttaaacaattctattattattattatttaactgaaaaacttaattatatggcattttattttagcttaaaaatacaaataaacaaagtaacaaaatttcgttaaaattattgcgccacctggcggtccactaggtgggagtctcggcttaagttttctgctaaatacagagttctgttaaagctgtagttatattatttccaagtagatggcgccacgaccacgcacaaagttggcggtatattcaaatacgatttctccgaactgaaaatatttttaaaactaggttgtgcacttagtccctaaaactattttaaaaaattttaatttcctttgtaaattactacaactgttatcattgaataataatgggctttcctttaatgattcaatcgctgataagagtaacttaattataaagaaattccacaaattattttgggagcaccctatctgcgttgtcattggccaattccattcgatttggctataaataatacacgaatttaacgacttcaggtcggatttctttggaaagggatcctgaaattccgtgcattccgcttgtcaaattgtcggtttgtt

SEQ ID NO: 5810 - DNA, 882 bp, DROSOPHILA
cgccaacgttcgacgagagtcgaaagtcaagagttctcgagcggcatttcagagatttcaggcaaaatgcgcagcctcagccgctttcgcctcataaccttcgatgtgaccaacactctgctccaattccgaaccactcccggcaagcagtacggcgagattggagccctgttcggagcccgatgcgacaacaacgagctggccaagaacttcaaggccaactggtacaagatgaaccgcgattatcccaactttgggcgcgacacgaatccccagatggaatggcagcaatggtggcgtaagctgatagcaggaacttttgcggagagtggagcggccattcccgacgagaagctgcacaacttctccaaccacctaattgagctatacaaaacctccatttgctggcagccatgcaacggcagcgtggaactccttcagcagctccgcaaggagttgaagccggagaagtgcaagctgggtgtgatagccaacttcgatcctcggctgccgactctgctgcagaacaccaagctggatcagtacctggactttgcaattaactcgtacgaggtgcaggccgagaagcccgacccccaaatctttcaaaaggcaatggagaagtcgggtctgaagaacctcaagccggaggagtgccttcacattggggatggtcccaccactgattatctggccgccaaggaactgggctggcactcggcgctggtgcacgagaagagctacgcatatctggtcaagaaatacggcgaggacatcgatcgagatcatgtcttccccagtctctacgacttccacaaaaagatctccgacggcgcagttgtctggtgattgattgtgcacacattaaattagtaacaccaa

SEQ ID NO: 5811 - protein, 260 aa, DROSOPHILA
MRSLSRFRLITFDVTNTLLQFRTTPGKQYGEIGALFGARCDNNELAKNFKANWYKMNRDYPNFGRDTNPQMEWQQWWRKLIAGTFAESGAAIPDEKLHNFSNHLIELYKTSICWQPCNGSVELLQQLRKELKPEKCKLGVIANFDPRLPTLLQNTKLDQYLDFAINSYEVQAEKPDPQIFQKAMEKSGLKNLKPEECLHIGDGPTTDYLAAKELGWHSALVHEKSYAYLVKKYGEDIDRDHVFPSLYDFHKKISDGAVVW

SEQ ID NO: 5812 - DNA, 9456 bp, DROSOPHILA
aatttgtttaatttgttcgttacgttgtgtttttttattgctgttgagttgggcttaaacaaattcgttaggctgaaacgcgttttgtcatctatgtatgtaagttttcatttcattttctcacttgcttgtctagggagggactttgttctgatctttgtctttagttatattaactaacttcgattggagtggcgtgcttagcgtacttagctggcttttgtttaagctttacaatcgctggttactttgtatttgaattctctctctctctctgactcgacaggtgttgcatttccacttgctggtttcaaattttcttaaatatttattcgttgtatttgaagaaattctcgtgggcccttcctctcggctttctgtccctcatgctaatgtccctgttaagatcttagagagtctatatttaagtgtagtgccgaaggataggtaatggttaacatatgtatgaaagtggctaggcgaagtttaactgggcaatcgaacaaatggtaatggagaataaaaggtttacttgttgtattatgcatacaccatttatttttagcaaaagttttacattagatttatgaaacataaacacgcgtatgtcttatttattttgcttttctgttttcctttgtttggttttctttcgcatctagctgccttctcattctgcattgtctatttgcaagtggtttgactataagccaaacgcctctatctgtttactcattcagttctgttttcgtatcgcttttatacatttatttatagcttaaatatttgtcaagtttgttttcattctttggtggtttggggcttctatgcctgcaaattgtatttttactctttgtttaaaaatatccgtagagtatgcgtttcctacacctcaaacaaaaacttaactatagcattatcttttctgtattcccttttcctcatggaagcttttttcttcgggagagtcgactagacagtttaaaagtgcattaacgaaagatgtaagttctacattaaattgaatgtaatcttaaaagaataatgggagcataagcaaaaaaaaaaaaaccatttcagaacttagtcaacgtaagaaattatggttacattatttcactgaaaaaacaaattcataactcaaaacgtgaacaattctgttatttcgcgcaattcaaacttatatcaataaaccaaaaactgagtaatcgttgcctaaaattacaaaggatccgtgaaatggactgatgacaaaccaaagtgaactttaaaagaaccaattcgaccaggttggcatatagccattgttgccgttactgtttttgttgcccgaacctccgccggctgagttggccgacattcccagacccatgccgatggttcctcctccattacgctggtttgtcgagttggccgagccgttgctggatggcgttgcggcgctgttggccacattggtcaaaaactgggcgaactcctgctgcagctgcagctgctgctgcaacaactcgtattggttctggggcttgttgtaaataaatttcgtggatgtcttcaggatgttgttgtttgtcgacgacgacgatgacgaggaggatgcggctgtgccggtggctccagcatctccgctggacgccgagtgactgctgctactgctgttggtggcagcagttgcggccaagtcccccgttgttgcagcagtgctgctcgctaatctcttaggtggcgccattgattgttgcttgttgctcgtggaggctggcttctgtttgctcgtgttgctagtgctattgttgatgttgtgctgcctgttgttgctgctgtggttaacgtatttgccaagtggaaaggctgctgcactgcagccgttgctgttgttactattattgttgatgctaccgatgttgctgtggtggtgatgattatggaggactagaccattggccgccagagctgccgccgccgcattggcattgacaacagcagccaacttggttaataattacgtttgcttgttcttgttggtcttaaagctgacctgaagcactcggttgccaagtgtgtagccgttcagcgactgtatggccaggacagcctcttcgtaattcgtcatggtgacgaagccaaagcccttgcacttgttgctctgcagatcacgaatcacctggtcaaagatcataagaattcagtaattttcaaaatttactggtaattcgacctaggaaagcacgaacttccaattgaattggtactcaccttaacagattgcactgctccgaagggcccaaacagttgccacagcacgttctcctcggtatcgggcgccaggttgtagacgaaaatgcaccagccggagctggcaatggtgttgccttggatcatgccattagtgatcaggtcactggtcaacggtgaatatcgcgagattacagagctgtgatgcgaattgaagttagttcgattacaatgtcttacagcaatatctttcgattcatttagtgtacatataaatctattcctgacctgtatcggcccgcattggggtggatggcagctgcagcggcggcggctgccgctccggcagcagcgttggccggaaatgctcgtccgccacgcgtattttggggcgctatataggctgccaaaggctgcatgctgttcttattgctgctaggattgttggcgaacttgacggttatgggttcggtggaattcttcggagtggtgccgttcagctctttaatggcccggtcggcctcaaatcgctgatcgaagcgtataaagccaacgcccttggagagacctgaaatcaagtcgcatgtcatcatatgcaaatagagttcgtaaattttatgcaggccatatgtgcagcgagtgaaaataacttcttagttatgcgcaagatatgtacatatttttaagccatgcgttactaacttttgatgagtgtggtttaatgtgcgcgatgctattttaatatttacccagagcgttctaataaacgtctggtctaaataagtataacataataagtgttacttcatgatcgatgaacagcaataaaaaatagtgaaacataggaaaataaaaataaaaacatacccgcagcatgttcatcttatttggtaatacatgtaaaagtaaaagtgtaaataaaatttgcattaattataattcatggagaatatattgtgtagcgccagcaaatatagaaacaaaagtgtgctaaaacccattgactaaaattaattgagcaaacattttttaatagattttagattggacatgcattcaaaagagactacaaccccgataaccgaagacccccttcaaatagtatttaagccatcgtattctaccatatattcttgcctcttaggatcacaactcaccagtgatattatcacaaagaatacgcgaggttatgatcttgccgtatggactgaacaatgattccaaatccgactgtgtcatattttttggaagacccgatacatagagattggcacccttgatgctctcggagctggggcgtgcaatggagaccttgatggttttgttctgcagcctgaggccgttcaatgcgttgattgccttttccgcatcctcctgcttcacgtagttcacgaatccgtagcccagactttgtcctgtaacgattggatcggatttaatatatgcaactatcatttataatcattttgcagctatcctacctgtcaccttgtcgcgtatcaacttgcagctctccacctcgccaaaactgacgaacaacgaacggatctcgtcctgcgacatcgtctgtggcaagtagttcacaatcaaattggtcttggggtctggctcattattgttgttgttgtttgcagtggcgttattgttattgttgttgttggtattattattattattgttgttgttgctcgcagcattgtttgctgtggcctggccgacggccgcatttgtcgtggatccggcacccgctgcggcagtcgtggtcgcagtggtgcccccattggtttgggcctgactgttggtcacattgttggccgtagccggtcctccagcggatccggtggtgcttcccacgccgctggcaccgcccgcgccggatggttgctgctgctgctgctgaacggctgtctgaccctcgaccatcttgcgaacgctgctgctgaaaggatttgctggttaataatcagctgtttctacagacttagatctagcgattgaatcactttgcaggacttaaaattttgatataatgctatcgatgcggagaaaactaataccacaaagttctacgaacaagagctttgagtgctttgagatattaactaaatggaggattctgtgctattaatttaaccgcaattgttaattggaaggtgatcaactttacagctttcttcttcgaaaacttgttcaatagacagaaatagagatggcgcgtaaatcaaataagtggctgtagatataatactgctgtgaagtctgcaataaaaagtaatgattagttgaagcttcagcccgtaaattcaacccctacttgcccctttcagatgcacactcctagcaacggcagtggattaaagatagtccgctgcccgttcttggctcctcctactatagcctagttaaaagcgccacaccaacgatatccactacgaatgagtaatgtggtatgtcagaaggattactgaaagagaaattaagagaatcgaaatacaaagttacaataaaaatcaattgttttaatttaatttaaatgaaatgcgggcctgcacttcttggaaatgggggaaaataccaagagtaaacatttcgagcaaacccatacaaatgtcgagggctctttgcctctgcggttggcaaatttgctggctgacttggctaacaggcaggctgactgactggctggtaaatgcaaatagggccaaaatacacgagcagcattgactggaaaatcgattcaattaaatttgccccccttaagcgaattgaaggcctacggataactattcttgaattgggcttttcactttcacttaatgggaagaaagcatactcaattgggggattgtgaaaaacctgaatgagcaagtaaaacccatagctgcaaaggtgttattgtttatagcttaaaataaccaactgacgtatggtttctttccttaatgtgtggttgtttgccgcgttcttttagcgtatctgcttcttgttaaccaaacaataaattggccaaaagcagacaagtatttttagcccacattcaaattggcctttataattgtggcacgcaattagtaagactttacgattgaatacactggaagattcttagttaaaaaaaaaaaaatatgcatatgacggagcattgaatgaaataatataaaatacggtggaaaacctaaaagttaagtttcaaaagatttacgtttattgatcaagccatttatgcttcttattccacaagtattattctttctcatcggctatgaaatcaggtacagaatgttccaccttcaattgagttttcacaacatgtctgagcagtttgttgcattcaacgccgcaaatcgtgcgaaaaagttatattttaaaaataaacaatcggttggatggcgcgacggtgtgaggagacgcaggagcgtagaattgcgccgctgcgtagccggcgggattatattttcgaaaatatttctgaggctacaacgatctggccgatctgatcgcagctgatgcgagagatgctgacgttatgtgtttgaggttaagtgtagcttgttaccagcgactcagggaaatgcaaaaatattggaatatatgttcggattacataaagtgagaagagatttccgacattacctttgatttctgtacggggaaaatcaaatgaaactggttgctaatcagtagattcctacgcgattacgaaacaattttctggcgatgtttggttttatatttttaataataaccgaacgagaaagcgctccacaaaacataaggcgagacaaacggaagagttgcactcattcaaatagaaataaccgaagcaaataatatctggaatattattgatcaatttgtgttgatggtgtgtgccgtttgaaaaatgaaaaaccaagccaaaccgaaacgtgaaactaattcgtaataacaataataataaggaaataaaaccgaacggaaagtagaaaagaacgcgttcctgcaactcaacagaacagaaataaactgatttgccgagcggcgtggaaattatttttatgccccaccgacgagggcaatcgtactgctgcctcatgtccaagaatcgggagagcagagccccaagagctacaagagagcgccgcttcttggccagaaacagaattcgtcattgtcgagcgctcttcgcccgctcggggaagagaaagccacccgatgggaatggatcaaacttacacggctatatgttttcctacagcacgagcacatatatccgcaaggtggattcctcagatgctcgacggcggaggtaatttataattggattttgcgcaaacatacacacttacgtgcacagtatttctataattgcgttatgggaacttcttttaaatcgaaattcgacagagtatctgcttgactccaaagttacgaatgcatttctggttccaaagacagctgcgcataatcggggaaatctgttttgcaaagcagttgctcaaataagccgccttccggtcatggtaagtgcgtttgtcctatctactatttaataattaaccgtaaactaatgtgtacattaatatgttaattaaaaaactgtaccatatattagacctcatagactgcatcaatatagaatcagtttttttacactctttaagaatatctgacactcctttaaatttcttaaactttttggtagctcctgaagtccttttctgttttcagtcaaccgaaggaagcttcctctttcctcctctttcgattcacgcccccaaaataagggggcgcaaccattaattttcattcataaatagttggaaattgtttccggctaattgatggatttgatggcacatacctatgcagacacacacacacacacgcactcacacttacgaatactggaagaatggggaagaagtgttcaaagggcaggaacaaaacaaaaaagtgacacaccttggcaaaggcaaaggcagcggatgaaaggagagacagagagagagagcgagcgaaggagttctggacaagtaacgggtcagcaaagtagaggaacttataaggacggcggctgaggccgtatgcatttgatttgggtgcggcaaaaataaacaggatatatgggcggagagatagagcgggagagacagtgagagcgcaggctgcagcgaaagcgcagcagtcagctgagcgcgccacaagatatgcaatggctattgagcgccacagagagagaatgggagccagagagcgagcttaactgcaagctggcgtcgtcgtcgacggcaactgcgctgcctaagcagggccgtctcgaaggggtccctccgagatcaggggctccaataatctctcagaaatcctactacggaaattaaagaatttcttttaaaataaataaatccgataattgcactagaaaatttcaagtcttgtaacaagttctcgaacttctaccatttgaaaatctacatctaatcaagggaactttgtgccacatttgtacgaactagctttaaggaaacttttatatggaaaacaggtcaataaatcattatttttggggatcgactccctctgaagaaaccgctcctgtgcggcgttttttaggttaaatggcggctgcaggcagcgaaatgaaaactgcgatgccggcgctgcacgaaacgcagctgcatggacttctgtgtgcttgtgtgtgtgtgtaggcggcaaatatatatcagagtgtagagaaattgagatttcgccgactgcaagccgccccattgagctccgttttactattcgcacacatacgaatgcaggcgaaaaatcgactttgggtgtgggcacttttgcaaataaaatggtgtaactgtaactgtaactacatatccgtagcattcttctctgttcgcttacatttattcgccagcgccgcaaagcatacaacaccgattttcccaactcgactcgaaagaaaatggttctggaactgggactggaaaatgttcttcgttgcaaatgatgtagtttcaatttgaaaactgaattgagcacgcacacactaagggttttcgaactgatttcgatactgattcggattccacactacgtgcaattggacacacgtacatgtatatgtgtatgtgggcgtagttgcgtgagtatgcaagatgtgtgtattttgataccgatatacaacaattcagaaacgacgacaatacgacgagaatcaaaaaacacaacttgctgccggagagtgcaagaactaaatgattaaagtgttcgattgccgccaggataactgcagccaggacccgtgacagcgctgccgcgccgcagtccgcggccccagcggcagagctcctcctctcctccaattggcgtacagttgagcacggccctgcagagggcgggaggggggcggtggcgaatgcacagcataactgcgtagttttgctctcgcatgcacagtgggacaaattcaaacattgagcgcgaactttaacccttctactttcttgtgttgcaaatatagataataatattagactgacctgacatatgctaaatatgtattgttatatccaaaatgttgttctattttatttgaaataatggatttcggtcccaactaaactcaaaagacaacctatgcaacaatttgtaaatgtatagaaataagtaaatgcacctgacacgtttcaggataagcttaaatgccattgcacatcagtgagatgcagaagtgctgttttattttcaatatacagcttgggcacagttgcaccattgtaccatgcgagaagtaacggtcgcgaagaagaaggcaaataataaaaagctgcagccgcaagttgcgcagcctgcaacagctccggcaacataacggtactcgttcgctcgctctctctttctcctggctcggcacttaaccgatgtaccctacatttggcttcgcaaaacataaacaaggaaatgcagccgtgaacacgaaacgaattgcggtaggttctccgttcggcaaagagcgagctccaaaagaggcgaagagagccggggctcgtaagccggccgcattgctgttgttggagctgagagagccagcacggcacccaaacaaacacttaagcaacaacaacaacggctgctgactgaagggaaggtgccagaggggctttaaacccaagagcgcaagctagaaagagcatcagagagagagagagcaaggcaggagcgtaggacgagctc

SEQ ID NO: 5813 - DNA, 2872 bp, DROSOPHILA
agcaagttgtgttttttgattctcgtcgtattgtcgtcgtttctgaattgttgtatatcggtatcaaaatacacacatcttgcatactcacgcaactacgcccacatacacatatacatgtacgtgtgtccaattgcacgtagtgtggaatccgaatcagtatcgaaatcagttcgaaaacccttagtgtgtgcgtgctcaattcagttttcaaattgaaactacatcatttgcaacgaagaacattttccagtcccagttccagaaccattttctttcgagtcgagttgggaaaatcggtgttgtatgctttgcggcgctggcgaataaattaatccttctgacataccacattactcattcgtagtggatatcgttggtgtggcgcttttaactaggctatagtaggaggagccaagaacgggcagcggactatctttaatccactgccgttgctaggagtgtgcatctgaaagggacttcacagcagtattatatctacagccacttatttgatttacgcgccatctctatttctgtctattgaacaagttttcgaagaagaaagctcagcgttcgcaagatggtcgagggtcagacagccgttcagcagcagcagcagcaaccatccggcgcgggcggtgccagcggcgtgggaagcaccaccggatccgctggaggaccggctacggccaacaatgtgaccaacagtcaggcccaaaccaatgggggcaccactgcgaccacgactgccgcagcgggtgccggatccacgacaaatgcggccgtcggccaggccacagcaaacaatgctgcgagcaacaacaacaataataataataataccaacaacaacaataacaataacgccactgcaaacaacaacaacaataatgagccagaccccaagaccaatttgattgtgaactacttgccacagacgatgtcgcaggacgagatccgttcgttgttcgtcagttttggcgaggtggagagctgcaagttgatacgcgacaaggtgacaggacaaagtctgggctacggattcgtgaactacgtgaagcaggaggatgcggaaaaggcaatcaacgcattgaacggcctcaggctgcagaacaaaaccatcaaggtctccattgcacgccccagctccgagagcatcaagggtgccaatctctatgtatcgggtcttccaaaaaatatgacacagtcggatttggaatcattgttcagtccatacggcaagatcataacctcgcgtattctttgtgataatatcactgatgaacatgctgcgggtctctccaagggcgttggctttatacgcttcgatcagcgatttgaggccgaccgggccattaaagagctgaacggcaccactccgaagaattccaccgaacccataaccgtcaagttcgccaacaatcctagcagcaataagaacagcatgcagcctttggcagcctatatagcgccccaaaatacgcgtggcggacgagcatttccggccaacgctgctgccggagcggcagccgccgccgctgcagctgccatccaccccaatgcgggccgatacagctctgtaatctcgcgatattcaccgttgaccagtgacctgatcactaatggcatgatccaaggcaacaccattgccagctccggctggtgcattttcgtctacaacctggcgcccgataccgaggagaacgtgctgtggcaactgtttgggcccttcggagcagtgcaatctgttaaggtgattcgtgatctgcagagcaacaagtgcaagggctttggcttcgtcaccatgacgaattacgaagaggctgtcctggccatacagtcgctgaacggctacacacttggcaaccgagtgcttcagttggctgctgttgtcaatgccaatgcggcggcggcagctctggcggccaatggtctagtcctccataatcatcaccaccacagcaacatcggtagcatcaacaataatagtaacaacagcaacggctgcagtgcagcagcctttccacttggcaaatacgttaaccacagcagcaacaacaggcagcacaacatcaacaatagcactagcaacacgagcaaacagaagccagcctccacgagcaacaagcaacaatcaatggcgccacctaagagattagcgagcagcactgctgcaacaacgggggacttggccgcaactgctgccaccaacagcagtagcagcagtcactcggcgtccagcggagatgctggagccaccggcacagccgcatcctcctcgtcatcgtcgtcgtcgacaaacaacaacatcctgaagacatccacgaaatttatttacaacaagccccagaaccaatacgagttgttgcagcagcagctgcagctgcagcaggagttcgcccagtttttgaccaatgtggccaacagcgccgcaacgccatccagcaacggctcggccaactcgacaaaccagcgtaatggaggaggaaccatcggcatgggtctgggaatgtcggccaactcagccggcggaggttcgggcaacaaaaacagtaacggcaacaatggctatatgccaacctggtcgaattggttcttttaaagttcactttggtttgtcatcagtccatttcacggatcctttgtaattttaggcaacgattactcagtttttggtttattgatataagtttgaattgcgcgaaataacagaattgttcacgttttgagttatgaatttgttttttcagtgaaataatgtaaccataatttcttacgttgactaagttctgaaatggtttttttttttttgcttatgctcccattattcttttaagattacattcaatttaatgtagaacttacatct

SEQ ID NO: 5814 - protein, 673 aa, DROSOPHILA
MVEGQTAVQQQQQQPSGAGGASGVGSTTGSAGGPATANNVTNSQAQTNGGTTATTTAAAGAGSTTNAAVGQATANNAASNNNNNNNNTNNNNNNNATANNNNNNEPDPKTNLIVNYLPQTMSQDEIRSLFVSFGEVESCKLIRDKVTGQSLGYGFVNYVKQEDAEKAINALNGLRLQNKTIKVSIARPSSESIKGANLYVSGLPKNMTQSDLESLFSPYGKIITSRILCDNITDEHAAGLSKGVGFIRFDQRFEADRAIKELNGTTPKNSTEPITVKFANNPSSNKNSMQPLAAYIAPQNTRGGRAFPANAAAGAAAAAAAAAIHPNAGRYSSVISRYSPLTSDLITNGMIQGNTIASSGWCIFVYNLAPDTEENVLWQLFGPFGAVQSVKVIRDLQSNKCKGFGFVTMTNYEEAVLAIQSLNGYTLGNRVLQLAAVVNANAAAAALAANGLVLHNHHHHSNIGSINNNSNNSNGCSAAAFPLGKYVNHSSNNRQHNINNSTSNTSKQKPASTSNKQQSMAPPKRLASSTAATTGDLAATAATNSSSSSHSASSGDAGATGTAASSSSSSSSTNNNILKTSTKFIYNKPQNQYELLQQQLQLQQEFAQFLTNVANSAATPSSNGSANSTNQRNGGGTIGMGLGMSANSAGGGSGNKNSNGNNGYMPTWSNWFF

SEQ ID NO: 5815 - DNA, 6101 bp, DROSOPHILA
ccggcctctgccgctgacagtgagtcacgctctgcgctctctgagatcgagatcccgccaccagtttgcgccaagtagtgttcggatgcgcttgcccgctatatgccgtatatcgctgtaccatcacgctcacacgcacaaatagatcgttcggtcgcgtttctgttgtttttgttgttcttgcgtcggcatcgaagagatatattatttgtttatttcatcctcgtccatcggctgccccgcgacgattatgaagaaatctgatttggttggaatgcgaatgtctgtctgagtgtcgctctcccgctcgctcccgctgacggatcgaatcggaccggatcgtatcggatcggtatgtgtggcgtctgggagcgggatacactggctacccacactactctactccccgtacccgactaggtgatgcgtccgcttagatatttctctagcggaagtgtgtcgacgagtgatcaacaacatccattggccacatccttttgcgttggagattactcagtagtgaactttgaaccgccagaggaaccgtgtgtttggcatccgtgccagaatccgtggtagttttccatatctgctttaccaagaatttcaaataaacaaaaaaaagtttcgccttaaatgattcaaatggtgctgtgaagaaatgtatgtgttgagacaccttaaaaaatgataaacattcaaaaggatcaaatagctaagcaacaaaaagtggttaaagaataagtaaatgtaaagttttcaatggatgtgattcacgatggccaacatttacatgaattactcacaatattgtcctcaaataaagataaacaattttgtagtctccagagtgtaacatccaattactcacattaatattttaatcgcttactctaaaaaagtgttccctgtacatttttacataattttacataattttatatctaatgcctacttatgccacttaactgatgtcaaatattttttcttgttaatttgtagataacaccgcttaaaagcaattccagtggcttccactaacccactgatacggatccgctgaccgggacaattccttacacactgtggctgcatgtccaaaatgaaaatgctcccagtacagttatcattgaactcgctgaatcccggcatctggagcgatgtgctgtggcgctgtcccccagcgccgtccagccagctggcggagcttaagacgcaactgcccccatccctgccttccgatccgcgcctctggagccgcgaggatgtgcttgtcttcctgcggttctgcgtccgcgaattcgatctccccaaacttgactttgatctcttccaaatgaacggcaaggcgctgtgcttgctgacgcgggcggactttggtcaccggtgtcctggggcaggagatgtgctccacaatgtgctgcagatgttgatcatagagtcccacatgatgcagtggcacctgcctaatagtccagtgacgcccaccagtcgttatcccctgtcgccgcacagccatccgccgacgcccacgtggccaccgctgaatgctcctcccgagaacagtcccttccacagttctgctcacagtctggcaggccaccattttatggcgcctaactcggttacgctgagtcctccgccctcggtggattcccaggcgagtagtcctccccaggcaccttaccaaaatggaggagccactggagcagcaccaggatcagcaggaggatcagcaccagctgcaggaggagccacaaacaccagcaatcccacgtcgtcgagtgccagcagcaccggcagcaatggctcccagccgaacattatgcccatgaagggtattagcagtgccagcagtaatcactctgattccgaggaggagtactctgagaccagtggtggagtgagcaagatgccaccagcaccactgtcctacagcacggccagtccgccaggaacacccatactgaaagatattaagccgaattggacgcaacagctcacgaatagttttgtgaactcatggtcccagcagcagcaacagcagcagcagcaacaagctgctgcagtggccgcagtagctgctcaggcgcagcagcaccagttgcagcagcagcagcagcaacaacaattgccccagaagctgaccctggataatactgctggtccagttgtgacccctgctggaggatccatctccgcacctaccacgcccagttatatgtacaaagcaaagagggagttcttccccgagaattctgagcccaatacaagtaagttgttaagagaagttgttacccgaacaaggactaacctttattcttatgtgtttattgtagatggccgcctgttgtgggacttcttgcaacagctgctgaacgatcgcaaccagaagtacagcgatctgatagcctggaaatgccgcgatacgggagtcttcaagatcgtcgaccccgccggactggcaaagttgtggggcatccagaagaaccatctgtccatgaattacgacaagatgtcgcgtgccctgcgttattactacagggtaaacatactgcgcaaagtgcagggcgagcgacattgctatcagtttctgcgcaatcccacggaactgaagaacatcaagaatatatcgcttttgcgtcaatcgacaccggcgaatggcaatggcggcagtccatcaatgccacagggtagcagtcaggcacctggaagtccggctggccaaaactggaatccccagcagcagtcccagcagcaacaacaatcaccacagcggcccgcctcgcgtaatggtcccatgagcctgcccgccgttgcagcggtagcagcagcggctgctgcggcctatggtccaccacccacatcgccgctcttcatgcacgccatcaatggagccttccactacctttcggcggcggcagctggtccgccacccaattcccctgccctaaacacaccatccgctgttggaggacccgacaagttccagttccatcccctcaagctggagaatggctcgggatcgggttcggaaagcgctggcgaggatctgaagcccacggacctcagtgtgagcagcaagagcactgctaccagcaacgaggactgttatccgtaagtggattgcaatcatcgcaatttaaaatcataaagctaatcacgcgtttgccctgcagactcattcgcaacgctgacggcctgacgaccatcaagttaatacgatacaacgaacaccaggtagccgcttcgccagcggggcagtcccctaagcacgatgaccagcaggcaggcgcctccaatgccagcagctcacccaggcccatggatcaggccagtgaacaggcacagccagtgccgatggaaagcgattgcaatggcggcgagtcggaggactccttccgacacatgcagcagtaggaggagaagtgtcctgagacaatcaccgcactacatccatcttccactccctcctgaacacacacaacattacctgagctaaataatgtgggaccagcacaacaagcgcacagacacatagacagacactctgctggataaaattctggatgcctttcggttaggatgggtcgcttagaatgcaatcgaaacggaaaactcattattgaagattgtgtagcaatttcatttcgaaatttaagagaaattatgaaaaccatcttgtatttctttcttacacaaacttgatattcaatattcaattcaattcaattcttgatcaaaggcttcttctaaccattgctgctttatactttctttgcggctgtcaaacgacctttccgactttctgtacatagaaatcacatctgcataaaccaacaaacaatcatacataaatacatttattttatacatcaagcgtatttattaagctaagctaagcaagagcagagtgcatgtaatttcgttgttgtaagtagatttcttgagccggcgcagcgcagccttcgattatgtgccaatttctacatttatcaaacaaaaacataaacaaaaatatgcctaaccataatcaatcgtataagtaataagtagcgaataaggagtagaaattagccagtagcttagaccgtaagtgttgccacctttgagctttacaaatgttgcctcaacaatggtttcaaatttatgaaaacgaaaaaaaagaacaaaaaacaaacaaatattgttaaaatctaaagagagaatgtgaaggaaatatgaaatttgaattgttgtcgaaattgttaattaatatacaaatcagcatagaaagagtttttgtatacaacaagacaaattgatttcgtgtgataacaacagaattatctttgattcacattggctgaatgctaacgaaaccagagcagttccaaaaagccatcctgcaacagtttggcgatccttcgtgcgaggatgggtctgctcttgcttcaagatcagcctggaaaaagagctttcaaaattcaatttcaattgagcccctagccctagatacactgcaacaagaaacacggatagaaaaacattggcttccattttaatatagcaatgatgatacacacaagcatatatgtatacacattagttttctattgctcttaattttatttttattatttgtacgctagtttaagtggctgcaatcgctgtggcagcaaatgaaggtgttcatttaagcattaacaactttagtttgtaaaacgcttacgatcttaccaccacacttccacaacccaccaccacccacaacgcactcacccgctaaaaacacaatgaaacaatagaaaatgtacatttgaagcactttattaattacattaaacggaatgaacagagttaggagaagatatcatcgctgcacgttcatacaattagcctgtagtgcaactgtaattattaattattgtgtagatctacgctaaagttaattttctatttgtttttcgtacgccttaagtttaaacaccgccaatagctaataattagcactctagtgtcgccacaatacctgttcttccattgaaaacgttatctttcgatcaatacataatttatatatgtataaaaaaggaaacaaatttatatgcaataaataaattgaaaactgaaatccaagatcccaaggatcgatcgccttcatctttctcgggactgttatatactgggctacatttgtttaaggatttcgtttcgatcttttctgcaatcgtgcaattcactgtggcgttttttgcgaagatttctaaaatcttgatttgtgtaaaattacaaatgtagaattggtttcaggcggttatcctaggatacatagttaaacttttttttttagataaactcctgattgtccaaaaactctcgaatcatatttctgcaggacttaagcaaggtcctgttgcagtttcgctccttactgggaattggagtcctcgtcttggccttgactatcgacttgttgctcactgaagtctcggatttggccggagtcagggatctgcggaggatgtgcgatggtatggagcgcttcttcagcggctggctggcgactggcggacgaacagtctgatcttttggcgtcgtgttgtcagcaactgccggcggtggagtcggggaacaggactccgtgtaggttataatgttattgcacacttgtcgatcgtattggtagcggagcaacaagagagccgcagccgcctccagttccagagcactgtggttggccatggctacgtcggctgcgtcggaatctcttactggcgagggagtcgcctgtttgcgtttattcaacatgcggtacttcatgattagactgtcgagaaggaactgatgtcctgcttgtctcagggcaaagtttatatatcccaaggatgtacctgcttatgggccacccgttctcgggctctacctaccaattggtcggtaatccgagtggccctaataagtaaccacctttggcacaagaagtcaggtaggatcctacttcagcgaaaataatatttcgcgaattttattgatcctcgctatattcagctaatccagcctaaaaccctaaaccaggtgctcgtcttttataaggcagatggtttagtcaaattctggga

SEQ ID NO: 5816 - DNA, 3973 bp, DROSOPHILA
agataacaccgcttaaaagcaattccagtggcttccactaacccactgatacggatccgctgaccgggacaattccttacacactgtggctgcatgtccaaaatgaaaatgctcccagtacagttatcattgaactcgctgaatcccggcatctggagcgatgtgctgtggcgctgtcccccagcgccgtccagccagctggcggagcttaagacgcaactgcccccatccctgccttccgatccgcgcctctggagccgcgaggatgtgcttgtcttcctgcggttctgcgtccgcgaattcgatctccccaaacttgactttgatctcttccaaatgaacggcaaggcgctgtgcttgctgacgcgggcggactttggtcaccggtgtcctggggcaggagatgtgctccacaatgtgctgcagatgttgatcatagagtcccacatgatgcagtggcacctgcctaatagtccagtgacgcccaccagtcgttatcccctgtcgccgcacagccatccgccgacgcccacgtggccaccgctgaatgctcctcccgagaacagtcccttccacagttctgctcacagtctggcaggccaccattttatggcgcctaactcggttacgctgagtcctccgccctcggtggattcccaggcgagtagtcctccccaggcaccttaccaaaatggaggagccactggagcagcaccaggatcagcaggaggatcagcaccagctgcaggaggagccacaaacaccagcaatcccacgtcgtcgagtgccagcagcaccggcagcaatggctcccagccgaacattatgcccatgaagggtattagcagtgccagcagtaatcactctgattccgaggaggagtactctgagaccagtggtggagtgagcaagatgccaccagcaccactgtcctacagcacggccagtccgccaggaacacccatactgaaagatattaagccgaattggacgcaacagctcacgaatagttttgtgaactcatggtcccagcagcagcaacagcagcagcagcaacaagctgctgcagtggccgcagtagctgctcaggcgcagcagcaccagttgcagcagcagcagcagcaacaacaattgccccagaagctgaccctggataatactgctggtccagttgtgacccctgctggaggatccatctccgcacctaccacgcccagttatatgtacaaagcaaagagggagttcttccccgagaattctgagcccaatacaaatggccgcctgttgtgggacttcttgcaacagctgctgaacgatcgcaaccagaagtacagcgatctgatagcctggaaatgccgcgatacgggagtcttcaagatcgtcgaccccgccggactggcaaagttgtggggcatccagaagaaccatctgtccatgaattacgacaagatgtcgcgtgccctgcgttattactacagggtaaacatactgcgcaaagtgcagggcgagcgacattgctatcagtttctgcgcaatcccacggaactgaagaacatcaagaatatatcgcttttgcgtcaatcgacaccggcgaatggcaatggcggcagtccatcaatgccacagggtagcagtcaggcacctggaagtccggctggccaaaactggaatccccagcagcagtcccagcagcaacaacaatcaccacagcggcccgcctcgcgtaatggtcccatgagcctgcccgccgttgcagcggtagcagcagcggctgctgcggcctatggtccaccacccacatcgccgctcttcatgcacgccatcaatggagccttccactacctttcggcggcggcagctggtccgccacccaattcccctgccctaaacacaccatccgctgttggaggacccgacaagttccagttccatcccctcaagctggagaatggctcgggatcgggttcggaaagcgctggcgaggatctgaagcccacggacctcagtgtgagcagcaagagcactgctaccagcaacgaggactgttatccactcattcgcaacgctgacggcctgacgaccatcaagttaatacgatacaacgaacaccaggtagccgcttcgccagcggggcagtcccctaagcacgatgaccagcaggcaggcgcctccaatgccagcagctcacccaggcccatggatcaggccagtgaacaggcacagccagtgccgatggaaagcgattgcaatggcggcgagtcggaggactccttccgacacatgcagcagtaggaggagaagtgtcctgagacaatcaccgcactacatccatcttccactccctcctgaacacacacaacattacctgagctaaataatgtgggaccagcacaacaagcgcacagacacatagacagacactctgctggataaaattctggatgcctttcggttaggatgggtcgcttagaatgcaatcgaaacggaaaactcattattgaagattgtgtagcaatttcatttcgaaatttaagagaaattatgaaaaccatcttgtatttctttcttacacaaacttgatattcaatattcaattcaattcaattcttgatcaaaggcttcttctaaccattgctgctttatactttctttgcggctgtcaaacgacctttccgactttctgtacatagaaatcacatctgcataaaccaacaaacaatcatacataaatacatttattttatacatcaagcgtatttattaagctaagctaagcaagagcagagtgcatgtaatttcgttgttgtaagtagatttcttgagccggcgcagcgcagccttcgattatgtgccaatttctacatttatcaaacaaaaacataaacaaaaatatgcctaaccataatcaatcgtataagtaataagtagcgaataaggagtagaaattagccagtagcttagaccgtaagtgttgccacctttgagctttacaaatgttgcctcaacaatggtttcaaatttatgaaaacgaaaaaaaagaacaaaaaacaaacaaatattgttaaaatctaaagagagaatgtgaaggaaatatgaaatttgaattgttgtcgaaattgttaattaatatacaaatcagcatagaaagagtttttgtatacaacaagacaaattgatttcgtgtgataacaacagaattatctttgattcacattggctgaatgctaacgaaaccagagcagttccaaaaagccatcctgcaacagtttggcgatccttcgtgcgaggatgggtctgctcttgcttcaagatcagcctggaaaaagagctttcaaaattcaatttcaattgagcccctagccctagatacactgcaacaagaaacacggatagaaaaacattggcttccattttaatatagcaatgatgatacacacaagcatatatgtatacacattagttttctattgctcttaattttatttttattatttgtacgctagtttaagtggctgcaatcgctgtggcagcaaatgaaggtgttcatttaagcattaacaactttagtttgtaaaacgcttacgatcttaccaccacacttccacaacccaccaccacccacaacgcactcacccgctaaaaacacaatgaaacaatagaaaatgtacatttgaagcactttattaattacattaaacggaatgaacagagttaggagaagatatcatcgctgcacgttcatacaattagcctgtagtgcaactgtaattattaattattgtgtagatctacgctaaagttaattttctatttgtttttcgtacgccttaagtttaaacaccgccaatagctaataattagcactctagtgtcgccacaatacctgttcttccattgaaaacgttatctttcgatcaatacataatttatatatgtataaaaaaggaaacaaatttatatgcaataaataaat

SEQ ID NO: 5817 - protein, 732 aa, DROSOPHILA
MSKMKMLPVQLSLNSLNPGIWSDVLWRCPPAPSSQLAELKTQLPPSLPSDPRLWSREDVLVFLRFCVREFDLPKLDFDLFQMNGKALCLLTRADFGHRCPGAGDVLHNVLQMLIIESHMMQWHLPNSPVTPTSRYPLSPHSHPPTPTWPPLNAPPENSPFHSSAHSLAGHHFMAPNSVTLSPPPSVDSQASSPPQAPYQNGGATGAAPGSAGGSAPAAGGATNTSNPTSSSASSTGSNGSQPNIMPMKGISSASSNHSDSEEEYSETSGGVSKMPPAPLSYSTASPPGTPILKDIKPNWTQQLTNSFVNSWSQQQQQQQQQQAAAVAAVAAQAQQHQLQQQQQQQQLPQKLTLDNTAGPVVTPAGGSISAPTTPSYMYKAKREFFPENSEPNTNGRLLWDFLQQLLNDRNQKYSDLIAWKCRDTGVFKIVDPAGLAKLWGIQKNHLSMNYDKMSRALRYYYRVNILRKVQGERHCYQFLRNPTELKNIKNISLLRQSTPANGNGGSPSMPQGSSQAPGSPAGQNWNPQQQSQQQQQSPQRPASRNGPMSLPAVAAVAAAAAAAYGPPPTSPLFMHAINGAFHYLSAAAAGPPPNSPALNTPSAVGGPDKFQFHPLKLENGSGSGSESAGEDLKPTDLSVSSKSTATSNEDCYPLIRNADGLTTIKLIRYNEHQVAASPAGQSPKHDDQQAGASNASSSPRPMDQASEQAQPVPMESDCNGGESEDSFRHMQQ

SEQ ID NO: 5818 - DNA, 5484 bp, DROSOPHILA
tatgagctggtgtccacatccttatcgggacatcgtgtttggtcagtgaacaaaaagcccgctccgaacgactcccgtgggcactgttgacttgccactgcaatggaatggctcacccagtttgcgtggtgctggtgtggggttgtgaacatgatgcaccgactgatccagatatccacgatgcgcaaataagacattaaattgatggtgttgatcgaacgcaaccagatccacattcaatcggcatccagttgggtcgatcgatgaatccgcacttcaacgcccagctaaactggtcagcaaattggcaattgctcgtttttggtagttataaaattggtataaaattgtattttaatggtgaaacaagggactcactaaataataaaataagaataacacttggaaaacatttacaacatttatacaaaagttagtttgggatgaaagtcggtttgtgtcatatggcagctacattaggtcgttgatccatttgtaagacgaaagaaacagagtgattaatacaaatttatattgtcttcgcttacaaaggatttaactaagcaaaaatcaatagaatattaagtaaataatttcggagggactaaagtactaagatctaaggtctttggctaaaacaaaaaaaaccacaaaatggctggcgagtgtcgctgctgctaatgggcattaaaattttcacacatttccctcaaatggagaactacgtgccagccacccgagatggcgagccaatcgccaatcgaatgcagcagacagcaggcgtaaaaacaattaatacatataacgtgcgatcggggcaaatcgagatcaacgcccagccgagctcagtttggacttcccgctggtggagatccagatctgggcttatttgcctcgctatttgcttggtttacataagcgacactctctctctaatcgaagtgcattaactaacgcagcaataaataacaaattaacacatggagaaccataactgaaactagactcgtgacacacgaccccataggatccagagactttggtgggcagacagcagggcgaaggccccggcaatcacataggtcagcctgtagatggccgcctggcagtacagtaaaaccacgccggccagaatgtagaatgcaatcgatagcatccagtatccctgactgcaaagcatttagcattttaaagataatataatatagtaatgaaaatttttcaattaccatttctgtggagctcgcagctggagaagcaaactcagtgaggccaaaactacgatgctgggatacaagctcggatccggcaggttaatgccatgcctgaagaaaaaaaaaacagagcggaaattcagctcaagattatcttcgaaaggttagaaaataattaccggcgactgcgcaaccaagccaaactgcttggagcattgagcagcagttgcacgaatagcatcagcagcagtgtgacatgaaaggagaaattctgcaggccaacacaagcctccggctcttcctcctcctgctgctgctgcttctgttcatcgttctgcttcagcgcattctgttcttcattctgctcctccgttgcatcttcctgttccgtcactgcagagggctttccacgcaccaaattagccgccttctgccataggaaatcctccagataatccttgtaagcattcgagagcatcagaaagtagaagacaaaggccaggagaagacccactccgctgcaagtgcccatggccgtggcaatagttagtataccgtacgtaatgggcaagtgggtcatgatcgagatcatcacattggaggttgcctgggaaaggcgcgttatacgcagggctaggcggtagaaggcgttgccatagagcgtcagggccaaccaagtgcccagcgtggccagcagggacaaggcaatggccgcacagtggataacaatggacacattgatgctgtagtccaatggctctggctccggaaacacacggctgctgatgatgagcttctttaggaggcgacatgctgaaaatgcattaaatatggattaatatgagtatgctaaatacagtggtgcaaacaaacctgtgacaatatagagcgatgtatactgcaggtaacccacataaggacgcaggctacgaaatgtgcccacgtcgtaaaaggtctcaacttgttttctcagcacaatcagcaacacgcagaccaggtgcgccggcaaccagccgtagaattccagaacaagccgagatagtgccgatgaataggagtactcatagctggaagagcacataaatcagagtgagatgggtttacactactgaactaagtgtgagatgaaagttacctgattcgatagcggcaggttggatctagatatagctccagtgtcacaggattgagcgtggtgttataatgtctgggcactagtgtaggcacatttacatacaattggggcttctgatcaaacgatctgaaaagataaatcatacgaatttaataccacaaggcgtaaaatcgtatatcaaactgacttgagtgtttggaaacgttcgaagcccgctgcccagggaacgcatattctcgcagttaccctatactcgggattaatgcactgcagcggctccacaatcacccgaatgctctggtatggatccaccatctcggagatgcgcactcgatggtgcagcgtgccctgaagagtctcgtttatcaatggcagtttggccattgtgtaccagcgcggcatcttgatgtccgtcacccgctctttaggatcgtagatgtccaggttgtagccgattcgcttggcgctcggcggtaggcgaacgagcaaatgggtccagtgaacataggtcttgcgcaggttgtgcagatcgagaagagcaatgctgcgtggctcgcgatcttcgttgggcagccactggacgaggtgcatcagggaggtagccttttcgctgtgcaacaattaattatacaaactatctcaacagactactctgttcacttaccaataaagctgtcccgtcttattgttgtcctctgcggagcatccgaacaaccagtcctcgtcatccacattcaaggcctcgatggccgcctttctataacgctcctgtcgctgcaagccaatcaaatcgaagaaggtgcccttgaggccgttcgtgaagtacttatttatcaccagacgccgctcctcgtgccaatttccagcagctccgaatcgcacagtattctgctgacgccttcgaggcttctgtaagtatatcatttgtatttactagtgcttagaatacaatgcaacttaccacaaaggtagacaatgccgtctgcaagttgcgctgcttgttggtgccaaaggcgatcgatgagcgatcctcgcgtacataggctacactgaagagaaacctattgatggcctgcatgaactgcaagcaccacacggccgacagatggtcacagctcagactaactttgggtatagctgatgtctgaaaaacaggaataaaaataaatgcgaattcagccggacaagcagaataatttaactaccatggcatgcagatcgttgaaccgggagctggtgagtccaggtcgcaccagcagatccctattgccgccacccgtggaaataagcaacacattgtccagccgcgccgagctgtcctgactggccatgcgctgcacacttggtggtcgctggtgcaggctgtcgcagacatttgtggtcatcgtgggcactgtggcagtccgcagcttgctcagcacagcgtccgtttggtcgtagaactcctccagttgggtatccagattgagcaccggctgatccagcggcgtagatatgctaataattgtattgatgtgctgaccaatggccggatcaactagcactgactgcgctagcttgccgcccatggagtggccaatcaacacgatggagggctgctccgtgcgaccctcgtaaatcgagaggatggtccgaatgcacagcttcagatagctttgttggcggtgcagatagccaccgtacagagcggacaactcctcgtcgtagtcaatggtgtagtagtccaaatgtatgcccgcatcgttggacattgccttacggagggcgacagaggctagagaacgcacctgtttgtaggagccggcgttgccgggcacgaagataaccggagcacccgtcatccggcgcttaagcggatccagcggctgtcgcagtccctcgtagtaataatacagcgcgtagtttggatactggtcgccatccctaactcccactttctgcaaaccaagtataatcagcgattggtgggccgatcttttcaagaagcgaatcgtactcaccgcaaacatgggctcgccgaacatgtatgtcatccggcaggcattgggctccacctcgacgtgcaagcggaacaggccgtagatgaagcagcagatggagccgatcactaggagaacagcgcagttccggaacataaacatcctgggcttttagtttttcatatctgtttatgtcttgttttgttatcatccattcgatatcaggcgatgcaaagttccgcgagttatcgatagcttatcgggtatgtacttgttaatggtgtgcaagccgcccatgaataaaagtatcgtttaagttgcttatccatgacatgatattgaaattataaacatatatactgtaaaatgatcagagctacgtacaataacatttaattgtataacactagcttttcaaaattttgttggataaaatttctgtgaaacaatagtttacgaaaactacgtacaaaatgcatagaattgctcatagtcctgagccctaaatacaagagaatattttaacgagctactaaaatagtttgtaaattggcttacataaacatgagaacagctattaatggatgaactaaagttctttgctcaatgcgaaaaagtattatgcaaaaaccgagtaatttggcttgatcagtgtctcgtgatttcgagtcgtgattttttagaacccgttcactgctgtcgcagttgcgctcatctccaatctctcgatcgccacacacttgcacataaacacctatgtatcgagccgaatcgtgttgttgctttgcctagttgatcattcagttggcgtacgcgtgcgctgtgatccgccgatctgatctaaaccgatcctccagattcagacgaagttatttgattcggataccggaattgtcaacaaaaggcagcggcgccggcgtcagtatcattcattcgaatttctaagctggctcgtaactgttagtgtgtgcgtgtgagccagcctgctttctgagcgtgtgtgtgcgcttaattcgcgtgtgcgtgcgcatgtgtgtgcatgtttgtgtctagcctggctctattgttgttgtttcaggtgtgggtaagaagcagaaaagacagtttgtgccctagcaataacaaaaacaaggcgagagagagacattgtcgccgc

SEQ ID NO: 5819 - DNA, 2937 bp, DROSOPHILA
atgttccggaactgcgctgttctcctagtgatcggctccatctgctgcttcatctacggcctgttccgcttgcacgtcgaggtggagcccaatgcctgccggatgacatacatgttcggcgagcccatgtttgcgaaagtgggagttagggatggcgaccagtatccaaactacgcgctgtattattactacgagggactgcgacagccgctggatccgcttaagcgccggatgacgggtgctccggttatcttcgtgcccggcaacgccggctcctacaaacaggtgcgttctctagcctctgtcgccctccgtaaggcaatgtccaacgatgcgggcatacatttggactactacaccattgactacgacgaggagttgtccgctctgtacggtggctatctgcaccgccaacaaagctatctgaagctgtgcattcggaccatcctctcgatttacgagggtcgcacggagcagccctccatcgtgttgattggccactccatgggcggcaagctagcgcagtcagtgctagttgatccggccattggtcagcacatcaatacaattattagcatatctacgccgctggatcagccggtgctcaatctggatacccaactggaggagttctacgaccaaacggacgctgtgctgagcaagctgcggactgccacagtgcccacgatgaccacaaatgtctgcgacagcctgcaccagcgaccaccaagtgtgcagcgcatggccagtcaggacagctcggcgcggctggacaatgtgttgcttatttccacgggtggcggcaatagggatctgctggtgcgacctggactcaccagctcccggttcaacgatctgcatgccatgacatcagctatacccaaagttagtctgagctgtgaccatctgtcggccgtgtggtgcttgcagttcatgcaggccatcaataggtttctcttcagtgtagcctatgtacgcgaggatcgctcatcgatcgcctttggcaccaacaagcagcgcaacttgcagacggcattgtctacctttgtgaagcctcgaaggcgtcagcagaatactgtgcgattcggagctgctggaaattggcacgaggagcggcgtctggtgataaataagtacttcacgaacggcctcaagggcaccttcttcgatttgattggcttgcagcgacaggagcgttatagaaaggcggccatcgaggccttgaatgtggatgacgaggactggttgttcggatgctccgcagaggacaacaataagacgggacagctttattgcgaaaaggctacctccctgatgcacctcgtccagtggctgcccaacgaagatcgcgagccacgcagcattgctcttctcgatctgcacaacctgcgcaagacctatgttcactggacccatttgctcgttcgcctaccgccgagcgccaagcgaatcggctacaacctggacatctacgatcctaaagagcgggtgacggacatcaagatgccgcgctggtacacaatggccaaactgccattgataaacgagactcttcagggcacgctgcaccatcgagtgcgcatctccgagatggtggatccataccagagcattcgggtgattgtggagccgctgcagtgcattaatcccgagtatagggtaactgcgagaatatgcgttccctgggcagcgggcttcgaacgtttccaaacactcaaatcgtttgatcagaagccccaattgtatgtaaatgtgcctacactagtgcccagacattataacaccacgctcaatcctgtgacactggagctatatctagatccaacctgccgctatcgaatcagctatgagtactcctattcatcggcactatctcggcttgttctggaattctacggctggttgccggcgcacctggtctgcgtgttgctgattgtgctgagaaaacaagttgagaccttttacgacgtgggcacatttcgtagcctgcgtccttatgtgggttacctgcagtatacatcgctctatattgtcacagcatgtcgcctcctaaagaagctcatcatcagcagccgtgtgtttccggagccagagccattggactacagcatcaatgtgtccattgttatccactgtgcggccattgccttgtccctgctggccacgctgggcacttggttggccctgacgctctatggcaacgccttctaccgcctagccctgcgtataacgcgcctttcccaggcaacctccaatgtgatgatctcgatcatgacccacttgcccattacgtacggtatactaactattgccacggccatgggcacttgcagcggagtgggtcttctcctggcctttgtcttctactttctgatgctctcgaatgcttacaaggattatctggaggatttcctatggcagaaggcggctaatttggtgcgtggaaagccctctgcagtgacggaacaggaagatgcaacggaggagcagaatgaagaacagaatgcgctgaagcagaacgatgaacagaagcagcagcagcaggaggaggaagagccggaggcttgtgttggcctgcagaatttctcctttcatgtcacactgctgctgatgctattcgtgcaactgctgctcaatgctccaagcagtttggcttggttgcgcagtcgccggcatggcattaacctgccggatccgagcttgtatcccagcatcgtagttttggcctcactgagtttgcttctccagctgcgagctccacagaaatgtcagggatactggatgctatcgattgcattctacattctggccggcgtggttttactgtactgccaggcggccatctacaggctgacctatgtgattgccggggccttcgccctgctgtctgcccaccaaagtctctggatcctatggggtcgtgtgtcacgagtctag

SEQ ID NO: 5820 - protein, 944 aa, DROSOPHILA
MTYMFGEPMFAKVGVRDGDQYPNYALYYYYEGLRQPLDPLKRRMTGAPVIFVPGNAGSYKQVRSLASVALRKAMSNDAGIHLDYYTIDYDEELSALYGGYLHRQQSYLKLCIRTILSIYEGRTEQPSIVLIGHSMGGKLAQSVLVDPAIGQHINTIISISTPLDQPVLNLDTQLEEFYDQTDAVLSKLRTATVPTMTTNVCDSLHQRPPSVQRMASQDSSARLDNVLLISTGGGNRDLLVRPGLTSSRFNDLHAMTSAIPKVSLSCDHLSAVWCLQFMQAINRFLFSVAYVREDRSSIAFGTNKQRNLQTALSTFVKPRRRQQNTVRFGAAGNWHEERRLVINKYFTNGLKGTFFDLIGLQRQERYRKAAIEALNVDDEDWLFGCSAEDNNKTGQLYCEKATSLMHLVQWLPNEDREPRSIALLDLHNLRKTYVHWTHLLVRLPPSAKRIGYNLDIYDPKERVTDIKMPRWYTMAKLPLINETLQGTLHHRVRISEMVDPYQSIRVIVEPLQCINPEYRVTARICVPWAAGFERFQTLKSFDQKPQLYVNVPTLVPRHYNTTLNPVTLELYLDPTCRYRISYEYSYSSALSRLVLEFYGWLPAHLVCVLLIVLRKQVETFYDVGTFRSLRPYVGYLQYTSLYIVTACRLLKKLIISSRVFPEPEPLDYSINVSIVIHCAAIALSLLATLGTWLALTLYGNAFYRLALRITRLSQATSNVMISIMTHLPITYGILTIATAMGTCSGVGLLLAFVFYFLMLSNAYKDYLEDFLWQKAANLVRGKPSAVTEQEDATEEQNEEQNALKQNDEQKQQQQEEEEPEACVGLQNFSFHVTLLLMLFVQLLLNAPSSLAWLRSRRHGINLPDPSLYPSIVVLASLSLLLQLRAPQKCQGYWMLSIAFYILAGVVLLYCQAAIYRLTYVIAGAFALLSAHQSLWILWGRVSRV

SEQ ID NO: 5821 - DNA, 3967 bp, DROSOPHILA
catgcgatttccaagatcacggcgttaccggaaactaaactaatttgttgtccggaggatgatattccggccacaaagggaatcacagtcagagtaccacgttcagctgatgagcccgataaggtcacgtttcaacttttaaaagaccagaatagcgaccttctgtcgaagacttgggaatttggccgtataagccagaccaaggatggcaaggtggtagtaataagctgtggcagtaagtcttacaacctggtgcagaagaagggcttttgccttagctaccgttttaaccagctcaattgccgcgagataagtggcaaggaggccctcaaggcggttcgcagctcagaggctaggtccaccgccgagttatctgaaattgacctaaccgaagaggacggcgaagagttcatttctcatcttgatctgaccgttgtggacgaagtgaagggagatgatgatgatgaaaatgagaatgagatgactgaagatcatgatgaggtggaagaggcagctgaagagcaacacgatgatgtggagttcattgaagaggagccgggcgagaagagcaatgatgtagaggtcactcctgaagcggagggcgaggagtgcgaagagcctcatcaggaggaagagaattgcaacgctgaggtggttaatgaagacacatgctccttgtaagcaagccgatgggtaacgggattcatggtaacgaaaaacttccttgatttataaaatgtgctttatatatctaactcttttcttcttcaatacaataggaacattttaaactgaataacacaccctaaacatatttgacatacgaaatgacatgacaacggaacaaggacagcagtatcgtgcagcttcacaagtgaattctcactgcaatatcagttcatactgcctcaagtcgacattaaccataaggatttcatattataaaatacaccaaagaaatatgtaatatacttctcaataaacactcactaccacatttaaaaactgttttttatttaatgtgtcacatattaaacatgatcgggaaatctcatgtgtaattttgcaacaatggaaatacgaacgttaaatatcgtaaaagacgaaacagcgtttacatacatgcgagtcataccaacaatcgtcttatcactactacttaaggatttcgaatcccatcgtcattggagaatattacattttaaaatacattggttaagatgcatggcacgcatttcttctggcacaagcgaactaggaaccggcgctggtcacagatcgactatcctccgacttggagtcaactggcccatttccccgcttcactgaaaactgcatgtagtcctcacgcgtggctgcctcatactcttgcaccaggcagtcaacagtttcgcgagattcgtccagctcattgaggtcgtccttgaagatgtcctcgcgtcgaaactggtcaagaaaggcgccgcgcttgcgaagcttgtcatactggttgagagctcgctcgaaaagcgagcaaatgctggtgtggttggccagcatcagtccggacactcgatggttgctctgcacgtagggcgatgagcgggaaagggctacctggatagaggtggggccccagggaatgaactgggccatcttgcggtcgcggatgcgctgcagtgacttgtgcacttgagtgggatccacctcgccctggataatgtttagaatggagatgtagcagtgatgatttgacttgtcgggaccagtggacaccatcatgttcttgggctgcaacagacgccgcattacatctagaacagtagtctttcgcacattaaccagctgctgggtatggatatccgaatcgctagtcagcggcgtgtagcctgtcatgagaaaatgcagctggggcgtcgggattaaaggagccgtcagcccaatgagattgttgttcatgtaggatggatacctcagcgtagtggtgctgacgctcattatggtggagaccaggttgttgatctgcgaaaagctgggattctgaatgtgcaagcgatcgcaggcaatacgattaagagcagtgttgtccaggacaaccacactgtccgcagccgtagtcaaacgtttcagggtgagcatggagttgtatggctgcaccactacatcactgatctcgtcctgattgggaaacacactgaatgtttggataagtttcttgggatagcggtccgccaggcgctccatgataaaggagcccattcccgatcccgttccgccagcaatcgaatggcaaagtataaagccctccaacgaatcgcttccatctgcctcacggtcaatgatgtcgaatacctcttcttgcagcttttcgccctggctatagcctgaggcccagttgttgcccgcaccgcctccgtgcttggataggtacacattttccggattgtagagctacgggagttaatagtaggtttggcgcaaaaaattaaaagttatttagagaggactcaccttggagtagaccgagcccattatggtattgatcaccctcggttccaagtccaagagcaccgcgcggggtatgtagtggtcgtcgtccgcctggtagaagaacacatccttgcggtccaagccatcattggcaaagtcctccagcacgccgctaggggagatgccatgctccaggcacaatcttttccagaactcaaagccaactgcgtttaaacgattttagcaatgcagatggtactcgtcctgatttcagaaacctactttgattgccgcactgcccaagctgcaaagtaattatttcacttggcattgtggtgtgttgtttccggccagaatcgtcaagtgaagtttcgcgtttaaggtcgaattagtcgaaataaaataaaacacaactaaaagatcgtcgaattataacaaaatttttaaaaaatcccacagcggggacgtactttgtaattttaagaaagtccagtgttgataacaccgcagcgtttaatggcgtcctcatttgaaaggtggcgcagtgtgccctctgttataaaatatatatgattacttaagacctttattgtgaattaaataaataaaaataaacattacatttttctactttgtattttggaaaggcaaaaaagtgttggaaatctaagactatgagttagaaagatcgaaacatgtcatgaatatcaatctaatagttcaatactaagcttaacttgaatataattttctataagaaagtttttcaattaggttattgagctccacccattttgtactactaatgacgtcgaactatttgtactactagtgacgtcacaatgtgcaatatttgctccacagtcgtgtttttccaaggaaggcacacaaatagtgttgtaagcagaccaaagtcaagccgaccggcttgcaaaaatcgcgttgcccgcgcagttttctttttgttgatatcgggtgctgaaccaagcgacagtggctctgcaaaacaagcaaaagaaaaagctggaaatctgtggaagtaaatacaagtcatttttgagaacctatcagtccgagcagtagaactccataatgccgcgtgtcaaggccgtgaaaaaacaagcagaggcgttggcatctgaacccactgaccccactccaaatgccaatgggaatggagtcgacgaaaacgcagactctgccgctgaggaactcaaggtgccggcaaaaggaaagccgcgcgcgaggaaagccaccaagacggctgtatctgcggaaaactccgaggaagtcgagccacaaaaggcgcccactgcagccgcgcgtggcaagaagaagcagccgaaggatacagacgaaaacggccagatggaggtggtggccaagccgaagggacgcgccaagaaggcaactgcagaagcagaaccagaacccaaagtcgatctaccagctggaaaggcaactaagccacgtgccaaaaaagagcccactcctgctc

SEQ ID NO: 5822 - DNA, 1849 bp, DROSOPHILA
caacactggactttcttaaaattacaaagtacgtccccgctgtgggattttttaaaaattttgttataattcgacgatcttttagttgtgttttattttatttcgactaattcgaccttaaacgcgaaacttcacttgacgattctggccggaaacaacacaccacaatgccaagtgaaataattactttgcagcttgggcagtgcggcaatcaaattggctttgagttctggaaaagattgtgcctggagcatggcatctcccctagcggcgtgctggaggactttgccaatgatggcttggaccgcaaggatgtgttcttctaccaggcggacgacgaccactacataccccgcgcggtgctcttggacttggaaccgagggtgatcaataccataatgggctcggtctactccaagctctacaatccggaaaatgtgtacctatccaagcacggaggcggtgcgggcaacaactgggcctcaggctatagccagggcgaaaagctgcaagaagaggtattcgacatcattgaccgtgaggcagatggaagcgattcgttggagggctttatactttgccattcgattgctggcggaacgggatcgggaatgggctcctttatcatggagcgcctggcggaccgctatcccaagaaacttatccaaacattcagtgtgtttcccaatcaggacgagatcagtgatgtagtggtgcagccatacaactccatgctcaccctgaaacgtttgactacggctgcggacagtgtggttgtcctggacaacactgctcttaatcgtattgcctgcgatcgcttgcacattcagaatcccagcttttcgcagatcaacaacctggtctccaccataatgagcgtcagcaccactacgctgaggtatccatcctacatgaacaacaatctcattgggctgacggctcctttaatcccgacgccccagctgcattttctcatgacaggctacacgccgctgactagcgattcggatatccatacccagcagctggttaatgtgcgaaagactactgttctagatgtaatgcggcgtctgttgcagcccaagaacatgatggtgtccactggtcccgacaagtcaaatcatcactgctacatctccattctaaacattatccagggcgaggtggatcccactcaagtgcacaagtcactgcagcgcatccgcgaccgcaagatggcccagttcattccctggggccccacctctatccaggtagccctttcccgctcatcgccctacgtgcagagcaaccatcgagtgtccggactgatgctggccaaccacaccagcatttgctcgcttttcgagcgagctctcaaccagtatgacaagcttcgcaagcgcggcgcctttcttgaccagtttcgacgcgaggacatcttcaaggacgacctcaatgagctggacgaatctcgcgaaactgttgactgcctggtgcaagagtatgaggcagccacgcgtgaggactacatgcagttttcagtgaagcggggaaatgggccagttgactccaagtcggaggatagtcgatctgtgaccagcgccggttcctagttcgcttgtgccagaagaaatgcgtgccatgcatcttaaccaatgtattttaaaatgtaatattctccaatgacgatgggattcgaaatccttaagtagtagtgataagacgattgttggtatgactcgcatgtatgtaaacgctgtttcgtcttttacgatatttaacgttcgtatttccattgttgcaaaattacacatgagatttcccgatcatgtttaatatgtgacacattaaataaaaaacagttttt

SEQ ID NO: 5823 - protein, 475 aa, DROSOPHILA
MPSEIITLQLGQCGNQIGFEFWKRLCLEHGISPSGVLEDFANDGLDRKDVFFYQADDDHYIPRAVLLDLEPRVINTIMGSVYSKLYNPENVYLSKHGGGAGNNWASGYSQGEKLQEEVFDIIDREADGSDSLEGFILCHSIAGGTGSGMGSFIMERLADRYPKKLIQTFSVFPNQDEISDVVVQPYNSMLTLKRLTTAADSVVVLDNTALNRIACDRLHIQNPSFSQINNLVSTIMSVSTTTLRYPSYMNNNLIGLTAPLIPTPQLHFLMTGYTPLTSDSDIHTQQLVNVRKTTVLDVMRRLLQPKNMMVSTGPDKSNHHCYISILNIIQGEVDPTQVHKSLQRIRDRKMAQFIPWGPTSIQVALSRSSPYVQSNHRVSGLMLANHTSICSLFERALNQYDKLRKRGAFLDQFRREDIFKDDLNELDESRETVDCLVQEYEAATREDYMQFSVKRGNGPVDSKSEDSRSVTSAGS

SEQ ID NO: 5824 - DNA, 2696 bp, DROSOPHILA
tatgttaaattaaatatgtttttttttttataattaaatacgtttattcagacgattacttgttatttcgacactgctttttgtggcgcagaatgtcgatcgttgtcagtcgcaactccctcttgcaggagttgcagtaatagccgccggaggagtgcgaactggagctactggctacctccgttgaggactctgtgctcgttgttttcgccgtgcggctttcctgcgccttgcgacgcttgcatttggatcggtgcaccagctgctccagcacatcgaactcctccagctcgaaatcgcagcgcgtacactgccatggctctgcccgtagagtcgcatccatggccgtcgtccactgctgttcggccaagcagctgtacaccacgtgctccgatacgttgaggccgcccttttcctcgttcggtgtcatgggaaagtcgacggcaaaggggttctccttgagctccgcgagtcgcgcggaaggtgcctgatgagtgtagagcctcttgatgtcggcgggaagcagtcggcgtatcgcatacgccacatccagcgccatatagtccacaagatcttgccacagcgcgctgctcctatcgtcacttgaatgggaaggtgattcctgtttgcttttgaggtctgcaaattggacagcattaagtacatacgtattagataactaagctccatttactaagaatgccaagaacaacaagcattttctataactgaacagttcaaatatcgacaattgtatatgtaaatacctaaaaaaaaaaacgtttttaagcatatgtcgttcccatcatttgattgttacaataataactgctttaaaatattatggtgaaaaatctttgaacctgaatacaccacttgcaggaaaggtgtggtgaacagattgcaaggcgagagtgttctcacccggcagagtggccagaccgctgaggtaagatccgttagccccattcggatatctaaatcacaattgtttaagaagaaaacttgcaaggcgaggaaaaaaacatatattggtcactatgtttcgagtgcattgcaacaagtgtttccgtcatcgcaaaactgatccagccgtgcccttccacttgacccagtgccggcacgtgatctgcggcccctgtttgggccaatcctcgctagaaaagaactgcccgctatgcggccaggtgctcaaagcgatccagatcaaccgggatatgccaactagcgtggccaactacttcgcggatcccctgcgattccagcagatctaccgcaagatctccaagttccaagcggaccagcgagcatcggacaacctgggtttctaccgtcagttgcagcagctggagcaaaacaagcgccagctggagggcttttgcaagatggaggcgcagctgaaccagaaggtcgtggaggaaaagaagcgaatcgctgaattgcgcacctacatcgcttaccacgagaatgcgcagaggatgacgaggcgccggcacagtgcaggtgagagattccatacgccggagttcaaggaggcctggaacacctctatcagcacttcggacaaatcgccgtcggatatgccttctgatagctcccgccggtccgcggacttggatacccagtcaacgcggagaagatcttttggcagcgacactaaaggctttcgtctttagtcactccaattacttgtataattttttataggaattctaagactataaccacttctaacgattcaattaggttttgaccttccagaagattcccaatataaagaaccagatagattattaagttgcgcttaaggtactaattatcatccgtattctattactattactattcaaatcgagacgttccactactcatgtgcgggatatgataaccataaacggaaatataacaatctactttagcttacaaaactcaaaaatccccctagtagttttaataattccaaccaatctggggagcactcaccatccagcttgtcgtaaagcagtctgctccaacgtcggcgcaactcgatggcccgtcttaaaagctccataccgctgccgggcatgggcagatccagtcccagccagccgtcgcaggcgatctgtgtgatgcccgcgttcgtgtcaatggcgaagctgaagagcaatagcgtctgggcagccggcaggcggatgcagttaatcagatagggcttggcggtctccagcagcgacctgttgtagtacgtagttttttggggattagtatggcgctgcaatttcgtacagacgcacgcactcactggtaacagagcaactggtggcgcttgctgagcggaagcttgggcgtgtagaagtctggcttgggcagcagatcgctttcggtcagcttaagcagctcgaagtgcttggcgaattgcgagtttgggtgctgcagcacgaagggcttgagccgcgtgtggaagaactgctgaccaccacccttgcagtagttgaactcgtcgctgatggccagctgtggatagaaaccgctgccgagcagcagctttagcagcacaacgacgctgtgtcggtcgagccgcgacgaacgctccagcagcgccaactgtcgaggatcgaaccgcagccggaagtccacgtccctcatatcgtcgccctgcgcctcctcctgctcctcctcgtcctccgctacccgtccagcgctctgcttgagca

SEQ ID NO: 5825 - DNA, 696 bp, DROSOPHILA
aaaacttgcaaggcgaggaaaaaaacatatattggtcactatgtttcgagtgcattgcaacaagtgtttccgtcatcgcaaaactgatccagccgtgcccttccacttgacccagtgccggcacgtgatctgcggcccctgtttgggccaatcctcgctagaaaagaactgcccgctatgcggccaggtgctcaaagcgatccagatcaaccgggatatgccaactagcgtggccaactacttcgcggatcccctgcgattccagcagatctaccgcaagatctccaagttccaagcggaccagcgagcatcggacaacctgggtttctaccgtcagttgcagcagctggagcaaaacaagcgccagctggagggcttttgcaagatggaggcgcagctgaaccagaaggtcgtggaggaaaagaagcgaatcgctgaattgcgcacctacatcgcttaccacgagaatgcgcagaggatgacgaggcgccggcacagtgcaggtgagagattccatacgccggagttcaaggaggcctggaacacctctatcagcacttcggacaaatcgccgtcggatatgccttctgatagctcccgccggtccgcggacttggatacccagtcaacgcggagaagatcttttggcagcgacactaaaggctttcgtctttagtcactccaattacttgtata

SEQ ID NO: 5826 - protein, 211 aa, DROSOPHILA
MFRVHCNKCFRHRKTDPAVPFHLTQCRHVICGPCLGQSSLEKNCPLCGQVLKAIQINRDMPTSVANYFADPLRFQQIYRKISKFQADQRASDNLGFYRQLQQLEQNKRQLEGFCKMEAQLNQKVVEEKKRIAELRTYIAYHENAQRMTRRRHSAGERFHTPEFKEAWNTSISTSDKSPSDMPSDSSRRSADLDTQSTRRRSFGSDTKGFRL

SEQ ID NO: 5827 - DNA, 3178 bp, DROSOPHILA
tacatttccatatgtatgtagatacatatattgctatacatatatgccaccacgcacaaaccactgtttgtttctatagacttaagacttgagtaaataaagtcattgtcactgatgaatatttgttagtaatattacttatgcgttcacccacacctacaaaggaagtgataataaacacgcgcacacacacatgcgtcagagggaagtgggtgcttcgtatgcaggttgcttaccgaaagagttcagaaagtcggtgattctctttatgctggcagttatcacttcgatatactccctgttcgcccagtcctggtggatctgcttttggatcgcctctctgtgagccccactcatctttatttattcctattgtttctgttcgttttaattgtgtttatctagagatgagagatgggttgggccggaacaattattgtcaaaaatttggaactatcgataggcatacaattaccgtgttcaccgtgattcattgagatcaaatttttactccaacaagaaattttaatggtgttttacaacactccctaagcactactatttaaaaattacgcgggaaagtgcgatgaaagaaataacttaatatttttgtctgccaactatagcgtgtaaatatgaataataaaataaaggtaaataataaaagtattggggtagacacagccgaatatataaagaaacttatcgccgcaatatacaattgtatatcgcaatatacatagatatattcgaatttgcgtttgctatattttatattaaccgtgggttagttttcgatgttttattgttttaaatgatatttattaaggaattactgcaaaccagcaaagtatgtacccattttgcggtccgattccgcgtgttccaatcggaatgagccgagcgaaacgatagctattgatgccactcacgcacacgcacacatagataaactaggtggccccgtaaactacagtgtttttcatttggtaaacaaaaaatggactttatcgacgacttcatcgaagaatacaaaagcaatccgtgcttgtggaaggcggactcggcggacttcaggaaccgcagccgccggcaggaggcctacgcgaagctcatcgaggtggccaccaagcacggggagatgtacaatgtggagcgaacaaagcaaaagataaacaatctgcgctgtgcatttcgtcatcagctgaggaaatacaacgaggtcaagaaaaagggcgagaagtacgagccctactgccccaagcgccgctacttcgagtccctgatgttccttaaggacgaggagatccccgccgacaagaagttcaagcgcgagcagtcggtctgcctggacaactccatgcagctaggggcgccagagaacggcgacgagtattccgacgccgagagcctgcacaagcccccaaagccgacggcagactcgatcaagatgtcacccaacaacagcgccaacgaattctgtgccaacatcttcgaggaggccgccgccgccgctgccgctgaccccgttatcagtattaaaacagtcaacaacgccaacagccatgccagtggcgctactatcaaggaggtcgaaatcgtggtgcctgctaacaacaggctgctgtccgcccgcagaaaatccgtgcccgactccataaagtctccgcctggcgactccgaatcgccgcagtgcaagcgcatcgtcacccagaaccaaacgaaactgatcagtaatcagagcccgagccagaaagccaatcacataacacggaaaaggtcctcctcggtctcttcgcagatttcggaggacaacgagccgcctccaggtaaattccgagcggacatttccaccattgactttgagcgcctcttttcgctggccctaaagagtgcggacagccagctggacgaccacttctccaacttcgggaaaattatcgcacacaagcttcgctccatggacggaacacaggctatctacgcggaaaagatcatcgccgatgtgctgtaccagggccagatgaaaatgctgtcctcgctgagtatacaccagtttatgggcgtggacaatgcaacagtttacctagagagccacagtaaatgatggcctggcccctttaaagacgtacttttagagtttatgtaataataagatgtaaagagacagtcatgtgtacaaagccatgttttatttaaaggagggattcctttcagccgcctaatccttagaaaatcccctaagctacgaaaccaaatgctaggaatgatgtcgagactagtttattatattcgatgcatgagaataacatttaaatgccatttaggcactgtcgtacttccttagaagcatggcccatacgtccgggtatctagtttgcagaaatgtggtcagcttttgcgctttttgagcctgttgtggggagcagttcctgcatttcctggttataacttctggcagggcagctgtaagaaccaaattcgaaataattacattttgggctctttaccaattggcgaagaacttgaaaagaactttggacttaaaatgatgttgtatctgaacgaacattaaacgaatatgtttattacctttgagttgaagtcccagttggtcgcattcgctcttgcccaggatgcacataatctggcggctgaccaccacctggttgttcagcagcttgttaatgtttctctcatccgcttggacactcgatgaaatgagaatgataagaaaaataaaattaacgaccaaagaaatcactcggtttttatttaaaagtagcatcctttctgaacgcgagacggtatagtataactgaatgtggagcagaaactgtgtatctgtatcccgcagatattcgtgcatgcgcaaaggagctggacttcgcaaaatcacggaaagggtaatgattgctaagcactgtgattacaatccgaatatctgatgagatgccacgtactctatatacatggcaatctttcgtatatgatagcattccttcaaattggctatcttggtattctattcagttgtaagcatctgagatatgttcaaagcatttttgtacccaatttgcaatgggcagcccagaaagtaagtcagcacctgctgttccatgcgataagaaggtaaataaagagctttcaatgtttttgcgttgtgcttaaaagttat

SEQ ID NO: 5828 - DNA, 1073 bp, DROSOPHILA
atggactttatcgacgacttcatcgaagaatacaaaagcaatccgtgcttgtggaaggcggactcggcggacttcaggaaccgcagccgccggcaggaggcctacgcgaagctcatcgaggtggccaccaagcacggggagatgtacaatgtggagcgaacaaagcaaaagataaacaatctgcgctgtgcatttcgtcatcagctgaggaaatacaacgaggtcaagaaaaagggcgagaagtacgagccctactgccccaagcgccgctacttcgagtccctgatgttccttaaggacgaggagatccccgccgacaagaagttcaagcgcgagcagtcggtctgcctggacaactccatgcagctaggggcgccagagaacggcgacgagtattccgacgccgagagcctgcacaagcccccaaagccgacggcagactcgatcaagatgtcacccaacaacagcgccaacgaattctgtgccaacatcttcgaggaggccgccgccgccgctgccgctgaccccgttatcaaatccgtgcccgactccataaagtctccgcctggcgactccgaatcgccgcagtgcaagcgcatcgtcacccagaaccaaacgaaactgatcagtaatcagagcccgagccagaaagccaatcacataacacggaaaaggtcctcctcggtctcttcgcagatttcggaggacaacgagccgcctccaggtaaattccgagcggacatttccaccattgactttgagcgcctcttttcgctggccctaaagagtgcggacagccagctggacgaccacttctccaacttcgggaaaattatcgcacacaagcttcgctccatggacggaacacaggctatctacgcggaaaagatcatcgccgatgtgctgtaccagggccagatgaaaatgctgtcctcgctgagtatacaccagtttatgggcgtggacaatgcaacagtttacctagagagccacagtaaatgatggcctggcccctttaaagacgtacttttagagtttatgtaataataagatgtaaagagacagtcatgtgt

SEQ ID NO: 5829 - protein, 333 aa, DROSOPHILA
MDFIDDFIEEYKSNPCLWKADSADFRNRSRRQEAYAKLIEVATKHGEMYNVERTKQKINNLRCAFRHQLRKYNEVKKKGEKYEPYCPKRRYFESLMFLKDEEIPADKKFKREQSVCLDNSMQLGAPENGDEYSDAESLHKPPKPTADSIKMSPNNSANEFCANIFEEAAAAAAADPVIKSVPDSIKSPPGDSESPQCKRIVTQNQTKLISNQSPSQKANHITRKRSSSVSSQISEDNEPPPGKFRADISTIDFERLFSLALKSADSQLDDHFSNFGKIIAHKLRSMDGTQAIYAEKIIADVLYQGQMKMLSSLSIHQFMGVDNATVYLESHSK

SEQ ID NO: 5830 - DNA, 8155 bp, DROSOPHILA
tcggttccgaagtagcttcttataacttctaatttgttgggattttacaattttttttgttggatttttctggtagatttcgtgttgctaatgtggttgttgttggtatgagtttcatttgcaacattcgtctacggtttttgggttctgcttgcacgacttttgttgtgggtattcttgtttgttggtttataattttgctactacaatttcttgttaatattttatacataatatatatttatatatataatattttctttactatacaataacagcggaaaaagtgtgtgttgtggttgttgatttgcagtattttttagtttgtcgcattacattcattcacatgatttgtattgtttcgtacgttttataacaactttctcgtgttaatatgtataattgtttatgatttcttgttcttgtttatatatatatatatattctgtatatattatgtatatcaataccgtaattgtttgcattaccatctgttcttatcacaaaaaatcataattatatatataatttattattattaatttttaatatattattcttagaattgaacaataattaaaaataaacgtaggacttagttacattttgtatgtgtgtgtgtgtgtgttggttttgtgtgtgtgtgtgtgaatgattgcatgtagttggtttccgcagttgacgataaagtattgccaagcgtccgcttgccgtccgaaatccagaggcaccactgtactgggcttccacccccaccaccaaagaagggggcggggcgcgcccaaacagcggcaatcggacaagagcggtacgttgccgcaccggatgacatcgggcggtagcattgatgttgtggttgctgcttgtttgtttgttgttttggccctttcgctaaatttgttgatctgaattggttgcagccgcgtcaggctcaatgcaaatgtacaaagtttcttctgacaattgttggttgttgatttctttacaattttttctttttgtttaacgaactttacatatacactaaacattatttaataataataatggaaaaaacaaataacaaagagcacacaaaattgtggagcgcaaaataaaaagtaaaagagcaggatttcttgatatagcaaaaatcataattattacatctttatgaacttaattgcaaattgttttcctcgtgtttaagactgattttgaacggaaaataactaagctaaaccacgcgccagcgaatcgaggtaaactgaacaacaggtgcaaatcggcggccaccaatgggcagtgcgtggcggagatcctgcagtccggcaggactggttttggttgttctccctatgtacaaacggtccacgccgggcttgcaccgcacacgcactgttgtggtttttgcttgttggaagttgcatgttgcacgttgctcattggcttgacacaattttacctgctcctcttgaagctgctgctgatgttgatgtggctgctgttgaccgctgggcgccgtttgtctatctgttgttgttgtgtgtttgcattgattgatttatttcgtgtacaggtaaatggccacaatcaagccgtagagacccaacacttcggcgaagatgagaatcaggatcatgcccacgaacagtctaggctgctgtgctgtgccacggacaccggcgtctcccacgatgccgatcgcaaaaccagctgccagaccagagaagcccaccgccagaccggctcccaagtgaatgaagcccctggacattgacatagttagtaagttgaatcgtacgaggtagacaatcaataattacctgtatagtgagtactttgatggctcttccagcgcgccggcaataagcacagccaccaccagaccgtaaatggcaatgatacccgccatgaccacaggaatgatggatttcatgatcagttcaggccgcatcactgacatggcagcaataccggtaccagacttagcagtgccataagcagcgcccagggctgatgaagaaaatcaaatgcataacaattagttttgggcaagcttttctatcacaaacatattaatgtggcagttttctagtgatttgaccaggatttatcccatagctacacctaaatacgatatcaaggaatcgcccattatattggacttcaagcgcgattttctaattatgccagaacatttaacattatgatgtaactcttaaatttgtcagccattcgagcgctggccaaccgaatactcttcgatacccttgctccaactttggccgcgggcgtaacagtttgcagtcacatgatcgcttttaactgacgttgtttgtttcataaaaaaaaaccccaaagtccctccacccgcaaaagtgccactcattgcccagagttgagtttcagctggagagcaataaaactcgctccgctcacattccaaatcgcctctccccgcaaatcggcgggttttattactcgctctctctctctctcgaaaagtcgggcaaatattgataaggccgagctgaagtacatagtataaacggcaggtttccgaggggggccagctgaactcggatcggtatctatcgagcaggcaggtgggcagaataacccagtggcgagagattcagcttattttgtgtatcgatggggcattaattgaagtacaaaaccagtttcatgtgacggtcaactgaacgttcgtgtgttcgtgagagactaataaatcgaattaagccgcacgcacaccaccaactcagctgagtgttcagatatatgggtgtattcaaagctggcggagcgggagagcagatatccaccgagtcatgtgattcgatgttaattacttactttccgcctcgagccaagaattgctgatattcgatttggaagacagcagcgcacttcgggaacacataaagcgcaccgccgaatcgaatctaccaataatcaccataacttatgggcagttctgctcttgatcaatgtcggctggcgactatctacgtcactaaacaggaaaatgatgggaaatgcccatgataaaaaccagaatgaacttgaacaagcaattggttagagccacaatagatatctacgcgcctagcaccagcacacagaaatctgtgaggtcgaggttgtcgtcacaaaagcacgaacacacatcctcaaaaaagcagattcctctcaagcacaagtacagaaatattctggtgcgtttgtggcccgtattgcgtgaaatggcattaacattataaacatttatttatcattgaaagcctaacataggctgttgacccagtactttctccgattgcttacaacacgtggttttcctagactatatgcacaaacaaatgcatagctatcgtattatattgataagtaggaacaaattcttgggcataaggtttccttcaaaacacaacagaaaagtggaactcatcgtttagaatttcagaactatttgtttatatcgttgtattggctactgtgcagcaacagcgtatactgcgccattgatgttttttcggcattattggcgccgcattcaaatcgcagaaattattcgaaagtgccgaaatggcattgacttttttcgccttttaactgcctgtagagctgctgtgcattttaagttattgcacacacacacgaaccagtacaaggcatttatcaagaaacagacggcatcgcagacgcttctgtgggcgttgaaatttaaacaatatagcaaataatcggtcgaaagaagaagagaacaacaacaaatgccagcacatccgaagataattataaaacaggggagataccaagagacgggctggcaaaacactgtaccgaaaaaaacccagcaaaacaaaaacaaatcgaaggcgtcacagttgagtgagcagaaatcaaagggaattgcgagcgatgcaaatagtggcgagctttgggatgagacaggttgtagtcagaaataagtgcacttcggacatatgtgtagcgcagcaggtgtgtttgtttttctaatctctcctgcgagcgagaagaatttgaacgggaaacggaaaataagataagataagataagcgcccactgtattctaggctgtaccatgaaaacagctttgacgttcattgattaaaatgcaatacgaatgaaaggcatgagctcactcacacagcagcatccctgttgccgagtcaatgtgtgcgctcgtttaagtcggggattacaatggtggggcctggccagtgtggcatgtgccgatatgatgaaaattcatcacatgtggcagcaaattatgcgttagtataaccgcctttacataatttactagaccaactaccattctatgtatatctgctactattcccgctactgcgattgcgcaggcaaacgtgcgagtgtgtgtgtgcgtcctcgagtgtgttggaggagctgaatgtcattgtgtgaaggattttcgtggcatttgggtatttttagcccagtgcgaagcgaggatgtggaccagcattccaagtggcgacaagtgctgataaagcgcagctgaaagcaacgcccattgttcgcagtgcagtgactcagtcatcgcatctgtcatcgaaaaagacaaatgcatttgccagctgaaagagagtgagagctggagaaataagtaactggaactctcattcgtcggcactcatgtgatcgtcaagcggcgttgccagatcaccaggccagttagcgctgataaaaactggaaattgatttatgctgttgactctaattgcataagcagtctttaagtcagataaatttactcattgggtgatgataatggggcaggtaaacaccacaggaaaccttattgtttactatcaaattgaaatgtcgggtgtacggtgttaagcgcaaatcacaagacattacagggtaacatgacataagaattgcgtcacaatttgatggaaagcggtgtgggggtagcctaaattagctctcataagcagcagcgcgtgctcggttttttttttttttttttttttttttttcatataatgccttaagttcgtcttgcgacaatcgcttgggaacttgctatcttatcatggccaactgaattggtaaataagccacttatcagtaaggtaactgagaatgagtggtcttgataagcccctgaaaagatcgtcagctaaccatgtgatgtgggctaaaaagtcgattgatcatgcacccaacgatttgggcatgtgattaacgacgatcatttacattgggtcatacataagttgtctgctaattgggctggagaagatatcgataggaaaatacttcatacttctttcgcgccttaacaaaaatatttgttgtcttttatgtgatttttctttggcatgcaattcccgacaactattgttcgttgttcgaacaataaatattgaatcataagtagtcagttaattgggtttacaaagagcgaaaggcgagggttttatgttcttcaatagggtttctagtccattgtgtgcccaagctctaaccaacaagatgaaaagaaaaaactttaatatggcaacacttcccaacggtcttgtgactgttgtgagaaaaggaaagcgcgcttcataaacttcaccaaacacagtaactttgctcgctctcacacacacgcgctcaatggcatcgagtccgagagagtgcgcatcgctcataagagcgaagcgctcacatgagtgtgtatgagtaatgccgtttttagcatgctgaaaaagcgaaattttttttttcaacttggccactgcgaaattaaaattgctaattcttcacgttgtaaaaagggggaatactattcgtttcaaaatcgagtttgccaatccaaagagttttggatattctgcttgtcacgcgcatgcatatgagcaccttaatccctatgtgtgagtaagcccgtgtccgtacaccgttttcgtacacttgccgctatttcccgttactaccacctacagaagccagtacgcccacacgcttatccccgcatttcctcttcttcttctaccctttacgccacacaaatgttcgatttttcacagcacgggcatggcatccttattctagtcagatttaaacttacccgagaagatgatggcggaggcggctcccataactccgaagaaggggccatagatggggttgtcgctgctcacttcagaagacattttgctttgtttgttgtgtgttttttaggctacaaatgatgagaaatcgaaattttagttcgttttgctgctgctgtggtgattgcactatagtttttattcggcgttttgcacagatgaatctgaatgttatgcgcgctcgttatatgtatgcgttgcttcaagtcgaaacaaagtatttttattatatgtacaatatatgtgctatatacgtggggttttacgctgctctgcgaccaatgctgctgcgacgacgaacgaattgcgagtggccgctcacggaatattcttaaatatactttttaatcgagagttggcaagtcggagcgagtggccaacaacgaaaactgggagagagcagcaagagagagtgagattgagcgagaggccactcgtcggattattgcgcttgtgtggagtgtgacctgtgtgcatgtgcatgttgtcatgtgcttgtgtgcgcgcgagagtgagcgcatgacaggcacacatcacggatagtaagtccaattggcaatgacaacggtctggaaaattacacacgtacacacaatcacatgggagctgttaaaaccctggtttccaggcttttgcaaaatgaaaatgcaatttttgcactttctgaagatgcctgtgctccttgttcaattcccattgctcaacgcgcaaaactcacactcacaaggaatctcattgtcattggctaagtgtggcttgcctgtgtgtgtgcatgtcgtggcagaaaatattgtacaattttttttctgtttgaactctgttcaaattcaagttgtcgcagcagcatgttttatcgcaggcccgaaacttttccgcagggctagcctcacatgaccgcctatcttttgactgctttttcactcacgtgattagaaatctaattaaaagcaattcgctgctctgtggcctcttcgggttactgctggctgctgcttaaaagcgcggatcggatactgaacaccaacgagttattatgctttgcttttataaacgttagtcacgggggcggattttcggcgatagttgtgccagcgctgccacctgatggacgtcaaaatgcactaacaatgtttccactagagccaatacaattaaagcattgctttcacaccgattttaaaaggatgcacgaaattgaagaacataagcacatcaaaattaatattttattttatatttctgatagcttggtcaattcgttcatgaacttgtatggaaaacatctttttgtaccatagaaaaattcaattgctcgaactaaatgggtcccaagaacggtattagctattataaaatagcttacaaaacgttttttatagtacgtataatgtaacaaattcatattttatttacacttttttttagaaatattggtttctatggagcttttgaacaaagaatacgtttatgcaaaaactctttgtataaaatgcctagtgtaagccccattattgtgcacacactaggcacacaaagttaaaattaagcccgaaaaaattatattccccttcatttttggaattaaaatatttaaaacgtttaattatacatatttaaaactatttcaacacgttttatgaaattaattatagaaattaatattacatagtcggtatatctacactgttccttctacggcgcactctagtatttctccagggcccgcgatagcagagtgttcatgttggttagcagcatgcggggatcctcagccaaaccggcgcccaccattgcgtttgcaaagagctgcttggcgataagttgggccagatccttgtcgctctcacggagcttgttaagcttcttgatgatggggtgcctaaggtaaggaaaaatgcaaaataagaaagcaacgaaagaaacgtgaggagcaggactcactttgggttgatctccagttctggttgaagcagggcaaatcgattctgttctggcacctggtgactctggg

SEQ ID NO: 5831 - DNA, 1138 bp, DROSOPHILA
tccgatccgcgcttttaagcagcagccagcagtaacccgaagaggccacagagcagcgaattgcttttaattagatttctaatcaccctaaaaaacacacaacaaacaaagcaaaatgtcttctgaagtgagcagcgacaaccccatctatggccccttcttcggagttatgggagccgcctccgccatcatcttctcggccctgggcgctgcttatggcactgctaagtctggtaccggtattgctgccatgtcagtgatgcggcctgaactgatcatgaaatccatcattcctgtggtcatggcgggtatcattgccatttacggtctggtggtggctgtgcttattgccggcgcgctggaagagccatcaaagtactcactatacaggggcttcattcacttgggagccggtctggcggtgggcttctctggtctggcagctggttttgcgatcggcatcgtgggagacgccggtgtccgtggcacagcacagcagcctagactgttcgtgggcatgatcctgattctcatcttcgccgaagtgttgggtctctacggcttgattgtggccatttacctgtacacgaaataaatcaatcaatgcaaacacacaacaacaacagatagacaaacggcgcccagcggtcaacagcagccacatcaacatcagcagcagcttcaagaggagcaggtaaaattgtgtcaagccaatgagcaacgtgcaacatgcaacttccaacaagcaaaaaccacaacagtgcgtgtgcggtgcaagcccggcgtggaccgtttgtacatagggagaacaaccaaaaccagtcctgccggactgcaggatctccgccacgcactgcccattggtggccgccgatttgcacctgttgttcagtttacctcgattcgctggcgcgtggtttagcttagttattttccgttcaaaatcagtcttaaacacgaggaaaacaatttgcaattaagttcataaagatgtaataattatgatttttgctatatcaagaaatcctgctcttttactttttattttgcgctccacaattttgtgtgctctttgttatttgttttttccattattattattaaataatgtttagtgtatatgtaaagttcgttaaac

SEQ ID NO: 5832 - protein, 159 aa, DROSOPHILA
MSSEVSSDNPIYGPFFGVMGAASAIIFSALGAAYGTAKSGTGIAAMSVMRPELIMKSIIPVVMAGIIAIYGLVVAVLIAGALEEPSKYSLYRGFIHLGAGLAVGFSGLAAGFAIGIVGDAGVRGTAQQPRLFVGMILILIFAEVLGLYGLIVAIYLYTK

SEQ ID NO: 5833 - DNA, 3799 bp, DROSOPHILA
tattctttgtcgttttaaaatatgcatatccccttttcctattctagtttaagcaatttgttgttcttacctcctggccaccttctccttgtggatatgcaccgtctgggcgatgtggttcatctgggactccatctcgccgagctgctgggcctgaagctcgaggagctgcatgtagctataggcgagcgtgttaatctggtaggccacgctggccagcgactgggtggtgtagttcttggtggcctccagggccgccttcttgttgtccgcgcggtagtaggtgtcctcgcagtagtcggccacccgctccaggttcgtgtagctgtcccgcagactctggcggccatcggggatctcggtgcgtatcagagaggctagttcgtccatgatgttctcgctggccatgggggtttcggtcaacatgggtgtggatgctgcgggcaaacgggaaacgaaaacccaattaaattcctcgcttttccgcacttttcacgcccgtaaacatttggggcgtgggctggcctctgccgacgtcgacgcccagctgctccagttgatcgctggagcggtttaatcggacgaatctcgcgtgcactcactttattgactatgcgattgcacaacagatgcttttccgggctagttgctacgttttaaatgcagttaaatgcagtttttcattacattttccgtgaaaaaagaaagaacgctggcctgtgctgcaaagtactggagcttgaagaatttttcaacactgtatcagtgcagacacatttggtattatttttgaaatgtatgttctataaaacagagtgttaaaaattttcccaaaatttagttataaaaatagcattacagtatctttttaattaataattcttttttttttacacatttaaagccgctttgaagtgattgccaatcagaatcggtacatatttcccggtttagtatttccctactcgcgctttgcggtcacactggttgtgagtaatatattttttcggcaatattaattttagctgttgtccaaatgtctcaccaaacgggtatccgaggtttgttatctttgggaaccacctaatccgcatccttagaacaccctttgtattttcagccaacgagcagctggccaaggtgttcggcaaagcgaagaatggtaaatttcgcgtgataaaagtttcgatcgagaatggtgagtggatttaatccagaaacgtatatacacaagatatatactaggcatacgatttgataacgaacccgcatccgttttcaccccgccccaaattacagagcagcttagttgcggcgccacggcggagacgaaaaaggattgggagcgcgactacgacaagcttataggtcccctactggaaaaggatgtgccctgctatattctctatcgcctggacgccaagatcccgctgggctacagttggctacttatcagctggacgccggacacggccagcatccgacagaagatggtatacgcttccacgaaggccacgttgaaaacggagttcggatcagcatacatcacagaggagctgcatgccaccactctggatgagtgcacgctggagggctatcgccggcacaagcaggatttcgcagccccagctccattgaccagcagggaggaggagctgaaagagctgcgaaagacagaggttcacactgagatcaatacgaatacgcggcaccaaactctgggtgggatcaattgcccgctgagcgaggcaaccgtggctgccgttcaggatttggtgcgcggcaagcacgactaccttcagttccgcatcgatctggaggaggaacagatccatgtttcgcgtgcggccaaagtggagctcgccgatctgccgaagcaagtgcccgaggatcatgcacgataccacctcttcctgtttcggcacacgcacgagggcgactactttgagtcgtacgtgttcgtctactccatgcctggatattcctgctccgtgcgcgagcgcatgatgtactcaagctgtaaggctccttttctcgacgagctcgcggcccttggcgtggaggttgttaagaaggtgagttgatatgaatgcgagtgggtgtggctgcgctaatagcactaaagattagggctataaaaagcaaaagcagggtatatattgtttgtgatttatttattgctttcaaatcgccacattcactatacttttgattcacgatctctagaaatattttgaatcataattagggcgaatgtctcacttttcacttgaaatagaaatctgtaaatcataaataatgagtaattttaaatcatactaaatctgattcatgtttctaacaacgttttacatttcagcttgaaatcgacagcggcagcgagctgaccgaagccttcttgcaggacgagctgcacccaaagaagattctacaccgaccggcttttgccaagcccaaggggccaccaaaccgaggcgccaagcgcctcacgcgtcccaccgcagaggactaagtctgaatcccgatcccaccgagtcaattctgtttatcgcccttctacgtactgtttcctagcagagcatttaatttattgtatccaatcgtttatttcttttgtgttgtgtctatcccgtgtctatatgtgtccgtacgtcagtcgatatctttagaggcactaggcatcaactgaaacatcgcatagcagccgccaaagtgggcttccttaaatgtattcttgtctatgtaactttagatggacatatatgcaatttatttaaattaaaaaaagtaactaagttcacactggcgtcttctttaagtcctcaggactcacttgatcgtgtccagcgatacatgttcggatgttttctcgtcgtgggccttgaaaagctctgggttttcgtcctctgtcagttttttgaacgcctgttgaatgttttcgtcgcgatcgagtcgccatttgtactgccagtagcgaacctcttccatcgaggtccctgatgctttcatcagcagcagcgacgtcacaccagccacgccgcccaagaaacctccaatgattccacctgccgccatgccccgcagaccaagactcactttgtaaagcgagccggtgatggaaccagcggccaagtattcgtagattgaggattttccacggtacaccgacatacaagtgatgatgccgctgtaaggaacacatttttgtatcacacagatacagatttgaattcgtgttgctgaacttacaagtaggatgtggtaaaaagtcccactcgccagccccatttgaagccgcctttggcaaagttgactgtgaattgatcttgcagctttttctgtaattatgattaaaaacttgattataacatatttaaatgataatacgtagatacctaccttggcatcaaagtgcgatttaaatgctgtggcctggttgttctccatgaaattcatgtaggccacgcgcgattgtgtaactccgccgtaaatagctccaataaggaatcctaggaagccggcctggtaaaccgagttaagctcggaggatatgctgccaaactcgctatttaaatgtttatgtacggtcagtagattttagtataaatggaattcttagttttcctactcgattgtaaacatttgcttgaggcgctccagtcctgtttcctctggtggtttactggccagaaaggccttgtatgttttgttttccttatcgactatttcatctgcggcgccttcgaatgttggcaggatgcctgcgatcagaaaccggcgtcctttccacagaaaattc

SEQ ID NO: 5834 - DNA, 1355 bp, DROSOPHILA
attttttcggcaatattaattttagctgttgtccaaatgtctcaccaaacgggtatccgagccaacgagcagctggccaaggtgttcggcaaagcgaagaatggtaaatttcgcgtgataaaagtttcgatcgagaatgagcagcttagttgcggcgccacggcggagacgaaaaaggattgggagcgcgactacgacaagcttataggtcccctactggaaaaggatgtgccctgctatattctctatcgcctggacgccaagatcccgctgggctacagttggctacttatcagctggacgccggacacggccagcatccgacagaagatggtatacgcttccacgaaggccacgttgaaaacggagttcggatcagcatacatcacagaggagctgcatgccaccactctggatgagtgcacgctggagggctatcgccggcacaagcaggatttcgcagccccagctccattgaccagcagggaggaggagctgaaagagctgcgaaagacagaggttcacactgagatcaatacgaatacgcggcaccaaactctgggtgggatcaattgcccgctgagcgaggcaaccgtggctgccgttcaggatttggtgcgcggcaagcacgactaccttcagttccgcatcgatctggaggaggaacagatccatgtttcgcgtgcggccaaagtggagctcgccgatctgccgaagcaagtgcccgaggatcatgcacgataccacctcttcctgtttcggcacacgcacgagggcgactactttgagtcgtacgtgttcgtctactccatgcctggatattcctgctccgtgcgcgagcgcatgatgtactcaagctgtaaggctccttttctcgacgagctcgcggcccttggcgtggaggttgttaagaagcttgaaatcgacagcggcagcgagctgaccgaagccttcttgcaggacgagctgcacccaaagaagattctacaccgaccggcttttgccaagcccaaggggccaccaaaccgaggcgccaagcgcctcacgcgtcccaccgcagaggactaagtctgaatcccgatcccaccgagtcaattctgtttatcgcccttctacgtactgtttcctagcagagcatttaatttattgtatccaatcgtttatttcttttgtgttgtgtctatcccgtgtctatatgtgtccgtacgtcagtcgatatctttagaggcactaggcatcaactgaaacatcgcatagcagccgccaaagtgggcttccttaaatgtattcttgtctatgtaactttagatggacatatatgcaatttatttaaattaaaaaaagtaactaagttc

SEQ ID NO: 5835 - protein, 343 aa, DROSOPHILA
MSHQTGIRANEQLAKVFGKAKNGKFRVIKVSIENEQLSCGATAETKKDWERDYDKLIGPLLEKDVPCYILYRLDAKIPLGYSWLLISWTPDTASIRQKMVYASTKATLKTEFGSAYITEELHATTLDECTLEGYRRHKQDFAAPAPLTSREEELKELRKTEVHTEINTNTRHQTLGGINCPLSEATVAAVQDLVRGKHDYLQFRIDLEEEQIHVSRAAKVELADLPKQVPEDHARYHLFLFRHTHEGDYFESYVFVYSMPGYSCSVRERMMYSSCKAPFLDELAALGVEVVKKLEIDSGSELTEAFLQDELHPKKILHRPAFAKPKGPPNRGAKRLTRPTAED

SEQ ID NO: 5836 - DNA, 3204 bp, DROSOPHILA
ttctcgttccattttcgaaaccaaccttacggcgctatcttgacccgacgcacatgcatctgcggctcagctgtttcgaacttcgaaaacatttgcctccgcgtttgatttgattgctgcggattaattacaaaataaccacgaaataatggatagcgagctgaacggatcggaacttggcaccaaggaattttgggagtccagctacaaccgggagatacgaaactacaagagccacggcgacgtgggcgagatctggtttgacgaaagtgcccaatggcgaacgatcgactggctgcttaacgaggagaagatcgacaaggaggcgagtcgagtgctggacctgggctgcggcaatggcatgttcctagtgggcctggcaaatgaaggcttcaccggagacctgaccggcgtggactactctcccaaagccgtcgagctggcgcaaaacattgcggaggataacaagctgagcatcacatacaaggtggcggacttaacccagccgcagaacgagctgggccaatttgacgtggtgcacgacaagggaacctacgatgcagtcagtctttgtccggataatgccaaggagaaacgtgctctctacctggacacggtggaaaagttgctgcgaactgctgacagcctgtttgtaatcacgtcgtgcaattggaccgaggacgagctggtggatagctttgccgagaagtttgtcaagtactataccattcccacgccgacctttaagtttggcggcaaggtgggcaatgtggtaacctcaattgttttcaaaaggaaaaaggaataaacatgttgtatctcaaagtgaataacttttttctccgggaaagctggttggactggacacttttatacaaatatacttattataaaaatatttataataacacattaaaaatcaattattaaaatcctacattataaaaaatataataatccattacattttaaaatgaagttcatgctggaatagaatttgttagattgcgctcttttttcgacaaacaggagagccaagtggcaccacttgctggaatggaatggcctgctcctcggcgaaggccaggaaatcaatgccgtaatgctgtatcagttttgtggtcatgactacatcagcctctgcctggtgagcactaagtgctggtatcttaaatattctcgtgtagagactttccaaattataaactccgcgggggggatagcgtttgttctcggcacacttgcatccactgaacagctggcgtcgtgacctaaactcatcgggtttccgcttgggaggggtctgctcctccaagtcatcctcatcgccgtcgcgtaataacttacgcttggcgaatgcctctgtaggctttaaaattggacgatttggagtggtttcgtttctggttcgccaatcgatgttcacgaccgcttctggctccttgaggcaagtttcagtattctgtttgggtttcagctccggaatgatttcctgcacatcgttgggtactttcaactgactggtttctttttgttgtgtgtcgtcaatctccatgaaggcgcgcagtgagtcaacacaagtcagggattggggaagctctatgtttagtttctcaaatgcctgcctcagaatgggaaaatcgaagccccaaccattgtgagccaccaggcaaaccggactcggcaagtgctttagaaaactgacgatgagttgcgcggcatccgtgtctagctgggactcccgctccagcaagtagttgctcagacctattgggtgataaaatcattatgtgaatgactcacgggtgcattttgcagctaacctgttattctctccgcttccgggtccactaccatggacggctggaagagcacattcaatttgtgcagcacccgcggtgccgctggcagctcctgctgctcatcctggtcctgctccttctttttcttcttaaggagcgcggcttcaaaggcgtaaatgcacaactccgtaatgctcactcggttgttcctgtaggcaggcaagttggtggtctctaggtccagaacggcaaatgtggaaatctttggctgctcctccgcgtgctccgcaactgcatcgttcggagccattaagagcgcaactggtggctaaaagtgcatgtacatagtatgtacatatatttcgttttattcaaaatgtttgaggaccaacacggagttctcattacatttgccaacactactgttgccttgaaaacatagagatggcacagtgaactatcgtgacaaacttataaactcagtgtgtgcactaacagaattgttaatttaaaaaaaagacggttgaaaaatataccagattattgcccaatctagtcaactataataaatgattggcaagaaagcgcgctggcaatactaaacttaaatttgacactaggctcccgtgtcacgcaaagcaggccaggatttgctgtctctaactcagcggatgaattacacctaattcctcacttttgcagcaaacgtcgacaagtgcagttaacattttgtgtgagtattagaactaactagaataattagaaaatggaggccacctaccgccaggaacgggaatggctcaatgcccgcgctcccatgaatggcaatagttccgccaactatggcccttatcgcggctatgacggctttttcggccaattgggccaatcacagatcccaaatcagacccaaatgggtcaaactttgaacggctctgcctcctggtcgttcccctccatgtcctctgactaccaccaatcccctgctgccccgcaggccaactctaactggagccgcgaaagagtcaactggaacaacgaaatgcgtcgcgacccctcgtatcaagctgagccaggcaacaccatcaatcgctcgtggcccggcaacggcggcccttccgacgggagccattggcccactccgaactcatccatgcaggtgacatcgggtgaaaggggactgccggaacacattcgcaaggagctatcgctccttggccccgccaagcgcaagtggttctttcgctatctggacacgggcatcagcaatgaaaaggcccttatgaaggcctcggaaagacgcaccagtccggtacgttctgagtggtacgacaagtcagtttcggctgaccgcggacgcaggcgtccggagcagccgatttcggatgatcgcgttcgcaag

SEQ ID NO: 5837 - DNA, 1148 bp, DROSOPHILA
agaactccgtgttggtcctcaaacattttgaataaaacgaaatatatgtacatactatgtacatgcacttttagccaccagttgcgctcttaatggctccgaacgatgcagttgcggagcacgcggaggagcagccaaagatttccacatttgccgttctggacctagagaccaccaacttgcctgcctacaggaacaaccgagtgagcattacggagttgtgcatttacgcctttgaagccgcgctccttaagaagaaaaagaaggagcaggaccaggatgagcagcaggagctgccagcggcaccgcgggtgctgcacaaattgaatgtgctcttccagccgtccatggtagtggacccggaagcggagagaataacaggtctgagcaactacttgctggagcgggagtcccagctagacacggatgccgcgcaactcatcgtcagttttctaaagcacttgccgagtccggtttgcctggtggctcacaatggttggggcttcgattttcccattctgaggcaggcatttgagaaactaaacatagagcttccccaatccctgacttgtgttgactcactgcgcgccttcatggagattgacgacacacaacaaaaagaaaccagtcagttgaaagtacccaacgatgtgcaggaaatcattccggagctgaaacccaaacagaatactgaaacttgcctcaaggagccagaagcggtcgtgaacatcgattggcgaaccagaaacgaaaccactccaaatcgtccaattttaaagcctacagaggcattcgccaagcgtaagttattacgcgacggcgatgaggatgacttggaggagcagacccctcccaagcggaaacccgatgagtttaggtcacgacgccagctgttcagtggatgcaagtgtgccgagaacaaacgctatcccccccgcggagtttataatttggaaagtctctacacgagaatatttaagataccagcacttagtgctcaccaggcagaggctgatgtagtcatgaccacaaaactgatacagcattacggcattgatttcctggccttcgccgaggagcaggccattccattccagcaagtggtgccacttggctctcctgtttgtcgaaaaaagagcgcaatctaa

SEQ ID NO: 5838 - protein, 351 aa, DROSOPHILA
MAPNDAVAEHAEEQPKISTFAVLDLETTNLPAYRNNRVSITELCIYAFEAALLKKKKKEQDQDEQQELPAAPRVLHKLNVLFQPSMVVDPEAERITGLSNYLLERESQLDTDAAQLIVSFLKHLPSPVCLVAHNGWGFDFPILRQAFEKLNIELPQSLTCVDSLRAFMEIDDTQQKETSQLKVPNDVQEIIPELKPKQNTETCLKEPEAVVNIDWRTRNETTPNRPILKPTEAFAKRKLLRDGDEDDLEEQTPPKRKPDEFRSRRQLFSGCKCAENKRYPPRGVYNLESLYTRIFKIPALSAHQAEADVVMTTKLIQHYGIDFLAFAEEQAIPFQQVVPLGSPVCRKKSAI

SEQ ID NO: 5839 - DNA, 7913 bp, DROSOPHILA
ttttctgcccgtttgtttgtgctcccgtccaggtgaaggttaagtgctccgagctgaggatcaaggacaagaaggaactcaccaagcaattggatgagctcaagaatgagttgctcagcctgcgcgtggccaaggtgaccggcggagctccctccaagctctccaagatgtgagtatgccgcggcacaacgacaagcgtcacgaactaattccggtgttttgtgcatttatgtgcgttcttatccatacagccgcgttgtccgcaaggccatcgctcgcgtctacattgtgatgcaccagaagcagaaggagaatctgcgcaaggtcttcaagaacaagaagtacaagcccctggatctgcgcaagaagaagacccgcgctatccgcaaggccctgtctccgcgcgacgccaaccgcaagaccctcaaggagatccgcaagcgctccgtcttcccccagaggaagttcgccgtcaaggcctagaatgcatccagatactccgactgtctatagtgcgcgttaagggttcttcggtacaatgaagaagaaaaactaaataaaatcttttttttaaagtgaaaatagcgatgcgtgtttgattttgtgaccgaaaaaacgcgagtggcacatggctttggccatgggttcatggaaattagttaaaaaacaaaaaaacaagtgccgcattccctgttctacatatgttagtcggatccaatgggatctacttaactacttgtggtccttaagatcattatagagcaaaaacgttgagttagcgccttgtagaagtaatggcaaatcttaagttcaatctttaattcagccttctttgaatatgcaaacttgaaaaacaccagaattctcaattggtctacgtatatgtatttaattcgattgtctttgatgtaagcacggccatacatcgtaaataattatgaactaacaagtaataagtaggtaattgatatgaattacaagctctcgactgcgagctcgatcatactgaatatgtttggcacatttggttaatactattcttctgcacagcgtgaaacagcggcgtgctgcggatgacgcccgacagctccttggagttcttgctttggtgatagtttctactcggcatcggcgacaacggttcgccccagaacttgagcagcgcaaagatcttgtagtaggccactctgaaatagaagatagattcgctattagcagctaaacccgatagcagccaaaactgccagcaaacttacctgtagttgcgattgctggccgcatagatgatcgggttaatgacactggaagcccaggccatcacggaggcgatgatgtgcagccaggggtacgaggtattgcgctcgtcgtccaccacattggccagcattagcggcaggaagcagacgaggaagcacagaaagatggtgaccatcatgacggtcagtcgattgtcttcgcgcgccttgcgcgtgcatgtggtggtcatgtaggatccgccgccggacgacgaggagcccttggccgctgcgatctggaagttatcgtggttgcgaatcttctttttctggtgcagcaccgtaatgtagatgcacgagtacgaaacgatgatcaccaggcaaggcagcaggaagccgatcacgaacagcgtcttcttgatcgatcgcccctccttcttgagtattgtgcaggagaaggtggcctcgtccaggcccatctcgccccagatgcccaatatgggcggcagctgggaagataaaaaccgattagttgaatgtgtgcacacaaatcgaagacgccttacttaccaacagcagaaaggagacggcccaaacgaacaacagctgcagggttatgaacttaggcttatatatctgcgagtagcggctgtggcaagcgatgagtatatatctgccaggggattagggtgacggttgcggattagcttgcgacaatgcggactagacttgggcctacctgttcagggtgatgcccaccatgctgaggagtgaaacagccacattgccatagaagatcaccggaaagatcttgcacaatgtggtaccaaaagtccagctctgtcgttggaatcgagcaaattataatcattcactaattgtatattacattcacaggtataatgactcacctcctggaagaatcgcactgcggtcagtggcaggctgaaggagcagaagagcaggtcggagatgcttagcgaaatgacgaaggcggttgtggcatgctcccgtatcgtggggctcttgagcagcgccagcagggtaatcaggttgcctgtgcggcaattcagcatagagaaacaggttagctaatcgaggagctgaatgtgggatgccaattactcaccaagaacgccgatcgtcacaaagacacaggcactaatggccgcgaataatgtcgccgaatgcgggtagatcgattgcgtggcggccgccggttcatccatctgcatgtctgcgtcctgaaagtagcccgttgccatgcccatgtcctgatccattctgcgggggaaacaagcaaacgatgtgattagccaatttcaattacttatttttgaacaggaaaaggagctgtatcttttaaattggttgcattcaaatcgcttatgctaatcctattgtttttttttttttaatttgttagcccgtatcatgagtaattaaaaaggaagttaatagccggatgtagacaactcaatatgcatccgcttggttatttgaaaacaattaacttatgaagagaaatgaatgaaattaccattcctaattgcccagaagcatgatgcttttgttaagaagggattgttaagaatttaactatctaaacgaactaatgtgtacatttctgtgctccgcgataaaggaaatgtaatcagcaaaatcaagtttcaggcgcgtggaaaatctgtgaatgaatgaacgtacgagtaatacaaaaagataactaatcaccgctttgcggatgcaatagcccagttttgtcgtcggtgacaccgagtaaaaacccgatccgatcgacgggattagcgaggaagtctgcgtactcccaccagcttatcgcatccgagacatttgatttatgtaaacggattttgttataagatttctgccgagccaagctggccaactggcgaatcgtaatgatcgagccggtttgcacgccatttgaattcacatttgtacgaattttttttttatcaaaagttcgagtttttcaccaatttcctcatcaaccgagcaaggcaaacggctttgaataatatggtgttatatatacatatatcaaatcgctgctgactgcgtgattgatggccccaagattacatattatcgaatcaggattcagaaggagatcaatgtcaaatgcggacaggaacatgagagacgcctgttatgcgcaattaaaaatttgggtttaattgctgtggaaactgttgttggtggcatcttaagttcctgtttaacaacatcaactacttatgtacgtagaagcgtttaagccatttgcatacagatgagaactggcttttgtgctaatcagccaagatgactccgatgatgatgactcattacctgaccagttttcgctgctttcttttcaacaactacttgtatatgtattgtatccaatagcaatacattggatttccatggtctagtcacgtattatcatttaattgacgccaagtcgtgttattgttgagctatcgagttcagctcaaacatttcttattcccatgaataagccggcaaaaatatgcaatctatgaaagttaatataagcaaaccttactttgactcaataccaatgcactttgtgtcgataggttcacgcaattgaggcgattattccgataacccaagcgattgactgttcccgtttcgattccaattgaaatttggaaatgtacaatagttttgctatatgctgtcaagtacgctcttatcttctctgggttttcttcagagtttcgaaacgcttcttcttttttttgtttttttttttttggaatctcgtattttggaaggggctcccctctggaatttgttacactgtcgttatcattgcgaacaagcggcccgaagctatcagcgactttaacatttacaatgcacttttttacgaccaattaaatgtacattttcctttcttcgcccgttgataagcgaacgcgatgtggcgcaggcaatgtgttgctcttgcgacacaaacgcaatcaaaatggattcaatttcgctttttcccagtgaaacgaagaacgaaccgaccatcatgatatgctgctctgcatgttgcgtattgaatcaatgacaatttcaattaagccgcccgttcgtcatgcgttttcgtgggcttcgaaatgctgataacgctgctgtcctccaactgctttgcatgtggacacaattccatttatttaattcttttatttggatcggttaaattaaaaagcgccttgttacgcatttaacgttgtttccggtgcgtggtggtttcatgcttctgggaacggcaaatgggtttaggattgggaacccctcatcatccgtccaaatatggggagttcaaggaatggaggggggagggggggagggggcggagcagcggtccgctttcatgcatgatcaacatgtgtgtttgttttccaactctatgtgagttgtttcagttcttttcggtctcctcggttctactcagttcgttcttactttctggcttttgtttccgaatagggggagcgcatcgggccgcaactggaaatggaaatctgaatatgcatcccggagcatcccgtccgaaatgagcaccatgcgccatgccgtttcgtttaattccctacccataaatgcgtgtccaaacagcagagggcatttcaagaggtccaactattagctatgtgcatatataattctctagatatattaattcagctaaagtgctaaccgcgagtgtgccgccagttgcccctcaacagtttgcaacgatgatgatggcacagatatcagagataacactcagatcgcgcccctcacaagtatgctcattatgtacattcatatgtacatatgtacacacagctaagcacataaggaatacgatatgcgctatgtacatatatacatatttacatcaaagtcttatcagcctcgggttcccaccgtccaaaaaaaaaggcggaacgaagctttataaataatcaatcaacaaatatttacaatcaagtatttatgtagcgggcggaaagtcgaatgcaaataaggttagacgcatttgtacatatgtattttcttaaagggttcctctgatcaatatctgcccgtttttatctagccccgtttataaggctgtgaatgccccgattgtgttggtcgtgatatcaattaaatcggcataatctcatgtcatctttttaaacattatgatagataaaatgtattataacgactctaattacattgggattaaatgggttttcggaaaatacctatgcagtaaatcaaatttaagatcaatgtgcagttatttggggtttcttgagttaggacctctgttttaatattgagaattactcgatattatcttccgttttattttattttctgatcgtgtcggtgcacgagaaatacatatttcccacttttgttgcatttcgctgactaatcgaaagctaaataccaaataagtttccgatatggggggtatgtatgtacatacatacatatatagtacgagtatatataatatacactgaataagcccgagcatacatatgtacatatgtagatagtgcacatgtgtattgtggatcgttttggagctgggtttttctttgcttttcgtcgtttttaagagacttgagctgaatgagtcgctaccaactgttgcggtgggttaaagggtggggggagggggcgaatggggatgggggatgaagatgatgattcatgcagctgatgtttggacagggaagaaagaaagagcgaaagagaaagcaaatcggaagcggcggtatcaaacaatctgtttaaataacaacaaaagactttataagcctgactttcatttccatttccaatttatttttcccaagtctggctcattttgtgcaaataaacaaatgactcatttgtttaaaaattcgatgagactcaaggaatgtcacattcacaaaaattttcaatttgaaatctgaaaagattcaacagcataagcaaatgaatttaagattgcgatatttgggtattatccttaattggctggctgcctaatgtagatttgtttttctcggtgtaccgatgcatcctctttgcccatccacttctttctcccctctttgctgattttttttttttttgttttgtgagagggtggaattcgggatttgggatgtgagcgagaaggatggccatattttgaattgtggaaacagccgttccattatcgttccattacaaatgcacacacacacacacacacacgcgcgcgtgcagtttgcgcttctctgtgtgtgcgtttggaccaaatgcaataacaataaaaacgcgcaactcaaattgttaacaaaggtaaggccgtttttttggccggatttggattctggtcttgaaagagaaacacacacacacacacacgcacgcaaaaaaccaacgaaaataataacaaaacaacaactcacccgaactcgaacccgtttcactgttttccgcttattataaatttatacttcgtttggcgtttcttaaatgctttcgaattgcattttggatttgacattaaatcgctccgcgcagcacagtaacaaaaataaacggaacaaaataaatacaaccagccgattctggccttctcacaattccgacttttgaattatcgaaacagaagcgctgcttgggccaactaagccaacttaactaaccgatcgcagagcgcaaagtgtcgtattttcactgtcgtcaattaacaacagcggcaacaagaacaacaaacgaaatgagcggctgggctacagttttttagtccgagcgcgatcgaacatgttggctgcctggcaacaagttcgatgcgaacttttctattgatctaagaaatcggcgttctatcgattgacgcgctgcgcaggcgcctatcgatttttgaaattctaagcccgccttaaaggatatttgtagaaaagtagcttgcaaagaaattaaattccttgaaataaaaaagaaatttagtactctcgttctatactcacttctattcacttgcggttagttagttagtttttaatgccacatttttatgatgatgactttttttcagctcatctatgcgcaatcaattttgcgccaagcgacagctgcacatagtttcttttgaccaagcaatcatttatcatataattttccaagtagtagtgccaagttcataactgatggagtgtgctgccaatttgcatgttgtggagccattcagtttcaaggtcgcgctaattaaatactcgttacaagtgatgccaaatgtataaatatttgaacagaacgtattaaattaatattatccactaagagcactattttaaattcttaaaaaccagatgcacgtcaaatagatgtacataaaaagtatatttacttacaaatatcatacacggacctgttttattcctcatcactggccattagttgataacatgtggacttctatgatatcctgctgcatttttgccgtttagtcaggatttagagcttgtacacaatgcgacagctgaaagggcgaaatcggtgcaatcgtgctgttcggcatctgaaagttcagggcaagatgtggttgaaaaatcttaaaagcggtttggaacaaattcgaggtgaatctatccaaatcgttagaatcccatgagtacgttcatc

SEQ ID NO: 5840 - DNA, 1399 bp, DROSOPHILA
ggcccaagcagcgcttctgtttcgataattcaaaagtcggaattgtgagaaggccagaatcggctggttgtatttattttgttccgtttatttttgttactgtgctgcgcggagcgatttaatgtcaaatccaaaatgcaattcgaaagcatttaagaaacgccaaacgaagtataaatttataataagcggaaaacagtgaaacgggttcgagttcggaatggatcaggacatgggcatggcaacgggctactttcaggacgcagacatgcagatggatgaaccggcggccgccacgcaatcgatctacccgcattcggcgacattattcgcggccattagtgcctgtgtctttgtgacgatcggcgttcttggcaacctgattaccctgctggcgctgctcaagagccccacgatacgggagcatgccacaaccgccttcgtcatttcgctaagcatctccgacctgctcttctgctccttcagcctgccactgaccgcagtgcgattcttccaggagagctggacttttggtaccacattgtgcaagatctttccggtgatcttctatggcaatgtggctgtttcactcctcagcatggtgggcatcaccctgaacagatatatactcatcgcttgccacagccgctactcgcagatatataagcctaagttcataaccctgcagctgttgttcgtttgggccgtctcctttctgctgttgctgccgcccatattgggcatctggggcgagatgggcctggacgaggccaccttctcctgcacaatactcaagaaggaggggcgatcgatcaagaagacgctgttcgtgatcggcttcctgctgccttgcctggtgatcatcgtttcgtactcgtgcatctacattacggtgctgcaccagaaaaagaagattcgcaaccacgataacttccagatcgcagcggccaagggctcctcgtcgtccggcggcggatcctacatgaccaccacatgcacgcgcaaggcgcgcgaagacaatcgactgaccgtcatgatggtcaccatctttctgtgcttcctcgtctgcttcctgccgctaatgctggccaatgtggtggacgacgagcgcaatacctcgtacccctggctgcacatcatcgcctccgtgatggcctgggcttccagtgtcattaacccgatcatctatgcggccagcaatcgcaactacagagtggcctactacaagatctttgcgctgctcaagttctggggcgaaccgttgtcgccgatgccgagtagaaactatcaccaaagcaagaactccaaggagctgtcgggcgtcatccgcagcacgccgctgtttcacgctgtgcagaagaatagtattaaccaaatgtgccaaacatattcagtatga

SEQ ID NO: 5841 - protein, 386 aa, DROSOPHILA
MATGYFQDADMQMDEPAAATQSIYPHSATLFAAISACVFVTIGVLGNLITLLALLKSPTIREHATTAFVISLSISDLLFCSFSLPLTAVRFFQESWTFGTTLCKIFPVIFYGNVAVSLLSMVGITLNRYILIACHSRYSQIYKPKFITLQLLFVWAVSFLLLLPPILGIWGEMGLDEATFSCTILKKEGRSIKKTLFVIGFLLPCLVIIVSYSCIYITVLHQKKKIRNHDNFQIAAAKGSSSSGGGSYMTTTCTRKAREDNRLTVMMVTIFLCFLVCFLPLMLANVVDDERNTSYPWLHIIASVMAWASSVINPIIYAASNRNYRVAYYKIFALLKFWGEPLSPMPSRNYHQSKNSKELSGVIRSTPLFHAVQKNSINQMCQTYSV

SEQ ID NO: 5842 - DNA, 6339 bp, DROSOPHILA
ggttccgttcgtagttgaccggcggataggcgtactcggcaccgccatcctgaagcaccaggatgggcatgttgggtatcacgtccaggatgctgtcgatcgatgccttcagatcctgctcaaagttgtagtggccatagaacacgatggtgatggacttgcgtatgtgtttgttggcattgcgcagcttctccttgggcgacagcttggcggcctttggcggttcctctgccggctgagattcaccggacagagccctacttatccgccgccagagcagcgtgttccacgtgtaatagagaaacaccagattggccagcagaaatccgagcagcagcagcttgaccagacgcagtcggaacaccttcatggcgagtgtgcaggatgtgctcgcgattcgctagattctgatgttgtgtgtatctgtatctgtttgtccacccgggtatctacactgcaactacatgaccgcgttcttcatcagcacatccttccaaggatgattgttgctcatactcaatgtgcaattggcttgactgaaggactcatttaactttttattttccgcttttcgagaactttgtttttgtgcctattcctttttcttcggctatgcgcaaataccgatttcctaccccgcggaaaagcgctttcagctcgaacagctgatggcgccggagctggaaaaacggatgaaaagcttcctcccaggatatgtgaccgtatatcatgccatttttaagagctttccactacgcttttcccgcgcaaaaaggacaaaatcatttttttttttgtaaaacattaaaagcgattgttctctttaattcaatacagtataaaatatttttctgagaaaatgtttatcaggtaagtgtgcttaatgaagttattgtagttttctccacacaaacattaaattttcgaataaaattgtggatgggacatctgtgagacccttcaaataatactgacttttaagcgatcaaaactagaatgactactttcccatgccggcgaagagcagcgggaagggcacctcatcggtggtcaggatctgcggagtcggaggacgcgcctcgccctcggaggtgctattcagccagtaggtggtgaccgtgcccttgccctttagctcgacatcgccgcgctgctccatttggaaggtgccgaacttgtccaggatggccttggtggccgaggacacatgtatcttgcccggctggccagtgctctccattctcgacgccgtgttgaccgtgtcgccaaacaaacagtagtgcggcatcttcttgcccacgactccggcgcacacggaacccgaatgcatcccaatgcgaatctgtatcttgtattccggtttatggcggagattgaaggagctgactgctcgtaggatgtccagggccattagagcaatctcgcgggcatgcttgtcaccattgggctccggcaatccagaaaccaccagataggcatcaccaatcgtttccactttgtagacgtcgtagaagccaatgattcggtcaaatgtgctatacaagtcattcaggaagttgaccacgtccatgggactgctacgggcgcacagttcggtgaagccaacgatgtcactaaagtatatggtcacgctgctgaactcctccggctccacaagatcgccggccatcagttgctgggccacaggacgcggcaggatttggtagagcagctcctccgtacgctgcttttccaggctcaactggcgggttttctcctccacgagactctcgagattgttggcatactgctccatgcgattcagtagatcatccattagattctcacagaagcctctgcaggtgtttaaaattgcttataactaagataccaagataagataccaaggacacttacttcattatggtgcgaatattactgcgtatggtggagaaagtgggccgctcctcctgattgtctgcccagcacttctccattagctccagcagatcaggtggacactcgcgttctctgatgagcggacggaatccattgcactggcgcaccttgtgcaggatcgtgtgaacgtccatctgctggcgcgcctcctggtagggtccaccacggttgacgatctcctccagaataatgccaaaggagtacacatcgccgcgctgcgtggctggacagcaaccaggtatggtggtcagtggaagcagttcgggagcaatccacaagagctctgcaataatatgcaccactcagtaaaaggaaactgatttgatgtctttggaactcactgaggtagtagttctgatcccgcacaaaatcagagggcgtggtcagcgttctcagtccaaagtcggagatcttgagaacgaatcgtccgtctatcaggcaattgcaagacctcagctttccatgggcagccacatcgctattgtgcagatagttcatgcccttgacaatgtcgtggatgagagacatgcgaaagttccagtccaactcgatggcctcgttctccagcacatccttcagactgcccctcgagcaatattcggtgaggatgagcacggtgggtcgcggcagatcgatgcaggcgcccacgaaacgcaccgtattctcgtggctcacatcccgcgcctgcttgatctcccaaaggagctgcggcgtcaggtccaccttcttcacgttcaccttcttgatggccacccgttcgcccttgaactggccaatggtggtgtacacttgcggcggcagcgacgtgaagctggctatcgatgcgcgtcccgaatggataccgaactgctgcagcgatatgttctccacatccaggcgctgcaagcctcccttcgaaccaaacatgccgcccatctcgatgaggacatcatcgggtcgtacgcgccaggacatattattcagctccttgctgagcttcatctgcctgaaatcagtgccagtataaataaacaaaatattgatactacgtggagtaacttacttttgcagaagacagatgaccagaaaaacaaggcccagaaaaagaagcaatccaaacacggagtacataatggtagaaactgtcataaggatatataatataatatataataccgatgtcttatattcgcggatgtatcttacagtttccgacacagtctgtagaattgcccaggaagccacagggtggcacatccggcggtggctcctcacgaccaccaggccaatgtatcttcttgccatgaacagccgaatatactctgcagaaaatagtaaaataattatgctacctttccttgaaacttcgctgagatactcttacttgtgaacaccggaataatgggccacaacggagaactttccattgatgggatccagatcgagaatggagtaatcagcatcccggtcaccgttgtcgtcgatgcgcacgtgccccgtgataccttcgaaggtgcgattccacatccgcctggtgatgttgaccccatcccggatgtcaccaccctcggtgagggtctcgttcaaggccattcccagcaggtagacgccatcgtagaaggctccaataaagaagttcacctcctcgccctcgccaaacgtgtagttgtaatcgtagagcgcattctccctcacattgtcggcaaagtcctggaacttgggacttgtcggctgcaggagactgactctcaggagggcttcgtatgccttccgcgccttggcatcgtgctcatccttcatctcccaacccttgtcgccccagtattcgctctgaaagatttccacgtccaggaacacccactcgccattggtcatgcccaggctgtgggctgccaacatgaattttcgcacaagaacgccgcgaaccgacaggatgaccactgacgaggaaagtttaaaacctgcgtatataatcgtataatctacctaatcttacctctggcatacatgctggcgtcctttagatagttttcgtacacctcctcctcgttgccgttgagctccttgacgaagctcaagagtccctcctgccgcagaccgtactccagattcttgcccaccgtccacgagaagagctccgatctgtccaccagcagggcaacgtgattccagttgaactgccgaatgacgctggcaaagaccaggatgaggcggcactggcagtaggacatccgggtgagcgtcgggtacttggacttgtccttgaacatgccctgcaaggagcagcagccgaacaaaccggaaaaccaggccagagattaaatgttatttaatttaaactacaatccatgaacttccccgcgcaaaacttaccgtattctcattcttccacttgtgtatccttcccaggattccggaagtgaccgtcagctcaccttccgaggaaggcggctagcagcaggtgggcgaaatagggggagattgccatttgtcaataatacgggcaaacttaaatgcaaattaaagagcgggccaaaaggcatttaattgccaatgtcaagagtacgaccagcacaattaagctggctaaatgtgattacttctggatgtggcacaagggtatgtggattagtctgaagctcaggctggaggccacattattaaaagcggcgtgctgcgtgtcctgacacgcgacttggatattctggccctgaatccgctgctctcacctgatctcccatgccggtgatgatgggcttgttccaataggcggccaaacgtgccaccggctcaagggcaaaggcgcaggctggtccaataaacgcgattacgtcgtcctggaagtacatgtccgcagccagtccaggagcccgagcacccgaacaggatggatagctaacataaataagaacttgataggtggtggtacgagtagaactcacagaattagatgtaccaaccttcccttctttttcagtagtgttatgttgtgaggcttcaggaaaaccttgttaatctcatccaaggccaagtcaacggccggtccacaacgctccagatcgaatggagaatctagtccaattgatgagccattaaatctgaagccaactatcagagcactcacccaaatgagaagccatcagaacgccaacgttatagacacgcattgtggagcccatttcgcccacctcagtgtatctagaaagctgcgtagacttggattccctgctcctctcgtacattctttgctctaggcccgcatcactggcattgagccccgccaaggaagtagtggagtccaaactaatatccttgttcagatcatcccaggttatatcattgcgcctgggattcggatgggcactaaagcagttgacgtacatcaggaagaagaagtggatgctgatcccaagcagatgcatttcgtggagtctaactattaaacacaaaatatccaataagtctggacctaagtggctaacttagctgtaactagatacaagaacaaatatttgttcttttgaagaatttgtctaaattaggtaattattagcaaaatattgcatttgctccttaaaattacattacacattcaacaccttaactttttaaattactaaatttaaaacagaattgcgacattaattctcttatagcccatgcagtatgaatattaaatcccattcactgacttaatatccttttgaacccaaaaatctgtccagatcttcaaattcgccgagcagcacttgagttttaagggtcacatataaatttgaaattaattcaaatagcactaaggggtaatgagttgcgagtaattatccatttaaagctttaaaatgttccacttctttgctgtactcctttaaatttaaagtccttaaagcagtccaaatatttaatgttttgtagaagcactttttaaggtttatttgactaaaaaaacacactttgcacaaacacttcactttatccaattgtattaccggaagtcacgaggggaaagatggcccgaagcacgataatcgagtgaaccagtggccacaactgttggtccttttatatccgcaaggacctctgctcggcaaaactcgtcctgcagcccgaatgccggcagccaatgagagtcctgcaaatcggcgggcaaatgacttcgtctgcacggaaagtgaatctctaggttaggcgaacaaggttttatggcctcacttgttgctccttggccaaatctgaatggtaatcgcttggaaacgccgtcgcgtgccgccagcaattaatgcgtctctttggtggcactcgtgtagactgctttaagacgatgctgccttaatacgcccggtgtttagtgaacccaaatctgatagcccagggaaaaggcatttcaaaggggggaaaacaattaccaaagtcgtaagcaaa

SEQ ID NO: 5843 - DNA, 3231 bp, DROSOPHILA
atgcatctgcttgggatcagcatccacttcttcttcctgatgtacgtcaactgctttagtgcccatccgaatcccaggcgcaatgatataacctgggatgatctgaacaaggatattagtttggactccactacttccttggcggggctcaatgccagtgatgcgggcctagagcaaagaatgtacgagaggagcagggaatccaagtctacgcagctttctagatacactgaggtgggcgaaatgggctccacaatgcgtgtctataacgttggcgttctgatggcttctcatttggattctccattcgatctggagcgttgtggaccggccgttgacttggccttggatgagattaacaaggttttcctgaagcctcacaacataacactactgaaaaagaagggaagctatccatcctgttcgggtgctcgggctcctggactggctgcggacatgtacttccaggacgacgtaatcgcgtttattggaccagcctgcgcctttgcccttgagccggtggcacgtttggccgcctattggaacaagcccatcatcaccggcatgggagatcagccgccttcctcggaaggtgagctgacggtcacttccggaatcctgggaaggatacacaagtggaagaatgagaatacgggcatgttcaaggacaagtccaagtacccgacgctcacccggatgtcctactgccagtgccgcctcatcctggtctttgccagcgtcattcggcagttcaactggaatcacgttgccctgctggtggacagatcggagctcttctcgtggacggtgggcaagaatctggagtacggtctgcggcaggagggactcttgagcttcgtcaaggagctcaacggcaacgaggaggaggtgtacgaaaactatctaaaggacgccagcatgtatgccagagtggtcatcctgtcggttcgcggcgttcttgtgcgaaaattcatgttggcagcccacagcctgggcatgaccaatggcgagtgggtgttcctggacgtggaaatctttcagagcgaatactggggcgacaagggttgggagatgaaggatgagcacgatgccaaggcgcggaaggcatacgaagccctcctgagagtcagtctcctgcagccgacaagtcccaagttccaggactttgccgacaatgtgagggagaatgcgctctacgattacaactacacgtttggcgagggcgaggaggtgaacttctttattggagccttctacgatggcgtctacctgctgggaatggccttgaacgagaccctcaccgagggtggtgacatccgggatggggtcaacatcaccaggcggatgtggaatcgcaccttcgaaggtatcacggggcacgtgcgcatcgacgacaacggtgaccgggatgctgattactccattctcgatctggatcccatcaatggaaagttctccgttgtggcccattattccggtgttcacaagcagatgaagctcagcaaggagctgaataatatgtcctggcgcgtacgacccgatgatgtcctcatcgagatgggcggcatgtttggttcgaagggaggcttgcagcgcctggatgtggagaacatatcgctgcagcagttcggtatccattcgggacgcgcatcgatagccagcttcacgtcgctgccgccgcaagtgtacaccaccattggccagttcaagggcgaacgggtggccatcaagaaggtgaacgtgaagaaggtggacctgacgccgcagctcctttgggagatcaagcaggcgcgggatgtgagccacgagaatacggtgcgtttcgtgggcgcctgcatcgatctgccgcgacccaccgtgctcatcctcaccgaatattgctcgaggggcagtctgaaggatgtgctggagaacgaggccatcgagttggactggaactttcgcatgtctctcatccacgacattgtcaagggcatgaactatctgcacaatagcgatgtggctgcccatggaaagctgaggtcttgcaattgcctgatagacggacgattcgttctcaagatctccgactttggactgagaacgctgaccacgccctctgattttgtgcgggatcagaactactacctcaccacgcagcgcggcgatgtgtactcctttggcattattctggaggagatcgtcaaccgtggtggaccctaccaggaggcgcgccagcagatggacgttcacacgatcctgcacaaggtgcgccagtgcaatggattccgtccgctcatcagagaacgcgagtgtccacctgatctgctggagctaatggagaagtgctgggcagacaatcaggaggagcggcccactttctccaccatacgcagtaatattcgcaccataatgaaaggcttctgtgagaatctaatggatgatctactgaatcgcatggagcagtatgccaacaatctcgagagtctcgtggaggagaaaacccgccagttgagcctggaaaagcagcgtacggaggagctgctctaccaaatcctgccgcgtcctgtggcccagcaactgatggccggcgatcttgtggagccggaggagttcagcagcgtgaccatatactttagtgacatcgttggcttcaccgaactgtgcgcccgtagcagtcccatggacgtggtcaacttcctgaatgacttgtatagcacatttgaccgaatcattggcttctacgacgtctacaaagtggaaacgattggtgatgcctatctggtggtttctggattgccggagcccaatggtgacaagcatgcccgcgagattgctctaatggccctggacatcctacgagcagtcagctccttcaatctccgccataaaccggaatacaagatacagattcgcattgggatgcattcgggttccgtgtgcgccggagtcgtgggcaagaagatgccgcactactgtttgtttggcgacacggtcaacacggcgtcgagaatggagagcactggccagccgggcaagatacatgtgtcctcggccaccaaggccatcctggacaagttcggcaccttccaaatggagcagcgcggcgatgtcgagctaaagggcaagggcacggtcaccacctactggctgaatagcacctccgagggcgaggcgcgtcctccgactccgcagatcctgaccaccgatgaggtgcccttcccgctgctcttcgccggcatgggaaagtag

SEQ ID NO: 5844 - protein, 1076 aa, DROSOPHILA
MHLLGISIHFFFLMYVNCFSAHPNPRRNDITWDDLNKDISLDSTTSLAGLNASDAGLEQRMYERSRESKSTQLSRYTEVGEMGSTMRVYNVGVLMASHLDSPFDLERCGPAVDLALDEINKVFLKPHNITLLKKKGSYPSCSGARAPGLAADMYFQDDVIAFIGPACAFALEPVARLAAYWNKPIITGMGDQPPSSEGELTVTSGILGRIHKWKNENTGMFKDKSKYPTLTRMSYCQCRLILVFASVIRQFNWNHVALLVDRSELFSWTVGKNLEYGLRQEGLLSFVKELNGNEEEVYENYLKDASMYARVVILSVRGVLVRKFMLAAHSLGMTNGEWVFLDVEIFQSEYWGDKGWEMKDEHDAKARKAYEALLRVSLLQPTSPKFQDFADNVRENALYDYNYTFGEGEEVNFFIGAFYDGVYLLGMALNETLTEGGDIRDGVNITRRMWNRTFEGITGHVRIDDNGDRDADYSILDLDPINGKFSVVAHYSGVHKQMKLSKELNNMSWRVRPDDVLIEMGGMFGSKGGLQRLDVENISLQQFGIHSGRASIASFTSLPPQVYTTIGQFKGERVAIKKVNVKKVDLTPQLLWEIKQARDVSHENTVRFVGACIDLPRPTVLILTEYCSRGSLKDVLENEAIELDWNFRMSLIHDIVKGMNYLHNSDVAAHGKLRSCNCLIDGRFVLKISDFGLRTLTTPSDFVRDQNYYLTTQRGDVYSFGIILEEIVNRGGPYQEARQQMDVHTILHKVRQCNGFRPLIRERECPPDLLELMEKCWADNQEERPTFSTIRSNIRTIMKGFCENLMDDLLNRMEQYANNLESLVEEKTRQLSLEKQRTEELLYQILPRPVAQQLMAGDLVEPEEFSSVTIYFSDIVGFTELCARSSPMDVVNFLNDLYSTFDRIIGFYDVYKVETIGDAYLVVSGLPEPNGDKHAREIALMALDILRAVSSFNLRHKPEYKIQIRIGMHSGSVCAGVVGKKMPHYCLFGDTVNTASRMESTGQPGKIHVSSATKAILDKFGTFQMEQRGDVELKGKGTVTTYWLNSTSEGEARPPTPQILTTDEVPFPLLFAGMGK

SEQ ID NO: 5845 - DNA, 9847 bp, DROSOPHILA
cacagcaattagtcgacatcgtcgacaaggacagcagtagtaggtgcgtatccctcagataatttagtaactccccccgccccccgcccaccgcctcctgcccaaggataaattacaatgggcaaattgtgatgattcagtcgacgcggcgcgcaagtcttcctgttgctcgtaaataagtttcagattcaggatgatacaaaacaaattattttccgccgcccaggggcatcattccacattctttatgccaatctttttgttttctttgatttttttttttttgtaattttttttgtctctggaaatacggtgtaacagctgaaaataacaaatacgcataaattaattatgcaaacttaattgtcgcgcgcccgcgaaactcgctaactcgaaaaggggtaaaaatacaattggaataagcgcaatattaacatttaattcgatgccaaagtgattgcagcagattgaaaaaaaaaaacggaaggcgggcgcaaaaacacctgtgcccgattaatgcaaatattcataatatcctcgaaattgcaagactttcaaatctcaggcccccttatgaatatgaaattatggaactttttgtggcaaaattctttagaggatctcagttttagtctctgccccccaaaaaatatgtacatatgtacgtacttgatctaaatctttgagttccttcaaaaaggatatatataaggctgtttttctgaagcccagagtttggaactgctgactcaaagccatgatgaaatacacttacgccaagaggtgtcctctgaatcattcgaatcgggaatagcttaaccgcttgttgctaggccgcctgatcggctccagagagggcccactgtagctcatagtcacactcttctctttcgtgggcaaaaacaacaattattagtcatgtttgttttgaattgcctggtgaagagcgatccgatccgattttgttgtctattgaacacccaattcggaatttctcgcaatgccgattcgaatttgttatatttacgctctctgggcggcgacttttgtttttatttcccacattcgcacatcatcttcaattgaaagtggtcaattaattgaaatgtttgtgcagcgatcgcaagaagcgcacaaatgctgctacgttcaattgaagatgcggatcggaaagatgtcgaaagatactcgactcggtgggggaaataaaaaaccgattcgaacgagtttcgagcacagcgcacgcagtttgattaacattcagcaacaacagccagtccagtgtatgtacatacatacatatatgaacagataaatgtgcatatagaatatacttgtgggcaccctctatatgtaggaaatgaaatatatgtatgtatgtatgtataggcccatctgtgttcgttggcactggttggttattgtttgtagattaaactcagacatggccacatatgtacgccccaaaattgaacttagcgaaggcagcaaccatttgacctttagtctggatatcaatcatgggcctcttaacgttacgattctatgcctatacattcaattttaatgggtattattacgatcgtaattaagctgtccctcgtctagcataattttcaattggccgtgttcgtttcgtgacaacaatgtctaattaaattaattgtgggcggcttaaacaaacggctagttagcaaatattaagcgaaaacgagaaccgaacaaagaacacgtaccgcaacccaatgacatccaatcttttgtgtggctcttctgtgggtcagaggtgcgataatttgccaaacgaagctagaaaccagaaattagcgtcaagttacgactacgtccgtactaatcgcccattatgcaaggcccccaatctgcacttgactctggtgagagtcacgtcgtcttcgtggaagctaacaatcttggatttcaaagcgtttacgcttgttcgcgatctttcggcgcgcataaacatcccgaaaacagatgactaactcccaccaaagtgtggctaacaattaagcaattagacaacgttgatcgactttatggcagatattcgtttttcgcatgatacaatgcgaaatgagctcctctaattgcatcactttcaaaaccctattaaatcgcggctcagttcgattatattccctctcaatattgattttgaaaataccgatacttggtttcaattttttgtaagtcacatggccagcttacacgatcattgctcgctgtgatcgagtatcagtatcagtatcagtaatcgccgtgacaacaatacgtataatccatatatgtatgtgtgttcaaactcacgcgctatatgtaacaatatgaacaataatgataatgccgctattaagtctcaagtataattcttttgatcacttaagccgatgcctgctgccgttaattgttcgcaaaaagggattcgaaattgaattttcgaattctcgtcgggtttgtcacccgatcggccagttacgtttaagttcagttatcgttatgcgattatcattatatttgtgcttgaaacttgactcacctgaactgttttcttttttttcttttttttttttgggagggggatcaaggtagatcacgtgccacttacgatttgaggatttcttataagcatcgtaaaaataatctctgcaccttatagttcattttggagagtaagttaaaaattctgtcattttcggggtcacaaacttgtcttgtgggacattttagtaattttggctatgatccaaataagtaattagtttccttgtttatagatacatatggttcatttctaaattcaccatagtgcaatatttgggaaatgcttaattaaaataacttttgatctctgaaggaattcaatcgtatcgaggtcaatcgaggctgatcatttcttgttttgatttgctctcttcggcgttatcatttaattgatttgcaattgctggccgcacttggtcgatgatcacaatttgaatttcaattagcgagcgcgcgcgcgttcacagcggaacgctgggaatggagcggccaggcagtgaaaacggtaaaaagggggaggggggcggtgggcgggtgataagccgcgttccactgtcgcccgttccgcggatgcgatttctgtgtatttaagcggccgtcgaacgccgctcagatactttccaccgcttgaagtgcacgaacgttgatcgaaataccgctcacagtaccgccgacgtaccgcttaaccgctcgcaaaatcgcatttaccaaagattcgcagagaatagcaacaagaagtacatcattacttgtatttttttatatttttttctttgccttaattgtatcgatttcgatgccctttgccattcgcccactgtgtgccagccaacggttttaatgttttcgccagtttgcaagaattgccaagcctcgttgagaactccgcgcaatacgaacgccaagatccactataagcaaaaacacaaacagtccactttcagctgacgagcaattttctaaaatttaattcacaaacaatacgaagtataaataaacaaacaccaaacaagtgcaaaataaaacagaagtacagagatatacagggcgtagccgtgcagtaaaaacaaatatttaacggtgcaaaacaaacatattttattcgaataaaaagaatacaaccagccaattgccaaacaaacaataagacccgaaaaaacagcggtgcaaatcaacccaaaagatctcctggccaataacgagtacaattcaaaaaataagaaataacagccaacaggtaatggaatgccaatcatgaaaagcaaagttcgcgcaaaattagcagacttaccaattagcaaacccaatattctaaacggaaaaatgttcagaaatagcagtggaaaataaagcgggaattatataatttaagttatgaatacgcattagtgaaagaatgaacctgagtatttggagcagacatcattgttatattaaagacttagtaaacaacttaacttaagagtctcgttttgctcacagttacgttttaaaaacaatccaagcaatttatctgagtcatttttgcattttttgcactggctcggtaatcgattgagtggttcaattctcacaaatgttttgttgaaaatctgtagttttgcgggttcattcagacttcgtaccccgccatttcccacatcatctggctgaagtgccccaaagtctacagccgggtctccgttttatgtgctaattaatttcagatatgcaaaggcgcaaaaaacaaaaacaaaaacaaaacaaaaaaaaaaagctacgtgcaccataaacggaccacccaatcccccatttccctgggcatccgacacatgcagcggatgacattggggcatcgagtataaataaaactagggaccatttcaagtccggggtattccattcacacgcagtttttccagttgcgctgctttaattgcgcttgaaaaagacaatcattctaatgcgacttgttaaacagcaaaactggaagcgagtgcgtttttatggcgctacgtatatacatattatatgtacatattatatgtgcatagcatatcagagttattacacctgtacagtcttactccaatggatagaatgtttttcgagtcgtattagagccaataatcatggttcaactcaaaagtttatgggagcaaacttaacgagtgaactaagcggttgaaaactgcatttaatatgcttacaaatatattgcgcgtatttcctaaatgactgacctactaggtctccagagcggtgagactgtacttttgatggggggggaaatgaattgggaatgggaatgggaataagatcgggaatagatctgggaatggcacgaaggccaggtgaagggccatgtggcactggcttgcggaagcgtaggcgtttaattatcgtccagggcataaatcagcatatattcataataaaacatggctaattgctggcgattatcgttgggcaagcgattgagagtgcggaacggaacgcagtggcaatgaaacacagcaaagcacccagccacccacaagtgacgaatgctgacagctacacaacgcaaaagggcctgattgtggtttcatatcaatgagcaagtgatcctgccaatatgttatctcaaaacgtgtaaagatttcatcgctctcttgagagtgagaaaaagatagtattattatgacttgccttcaccagcatttctcgcagtgcattcgccgttgcgcttttggttcctgttctccttcattgcacatgcgtacggccggttcagtttcaggttcaatgcgattgcgattgcaacacgaatcattcgttactgatgtacatttgtaattgttgttgcttctgcctaatgaataaagtgaaagattggcgcgataaattgtgaattgaattcaatattcgcaaatttcttaattagtcagctgttcgagcggaagaagcttatgctcgctttgatttacgtttatgtttaatggagtgccccaccaaacaattaggtctatgctcgaaaatcggcactgatgcgtgggcaaaacaattataattagtataaagttaatttcaaaaatacccctaaatatgtggtggctaaatattgttatagctatatttttaaaaacccaacccagcttgaccagtagtagtgacattcaaatacgcaacgaagacagctatccaattatttattaataaaattgtcgacccaaatgggggttttttcacgccttcggcacttacggttaatttcagtgcccgcgactatttcgggcataattttttattaatcaattacgatgtcgcttgggcgcgacgaacagatcgttcattcattctgctcaattgccgcccaattgcgttaaattaacccacttttctcccccatgtcgaaacaatcgatcgatagaacgatcgatctgtggttagcaaatcgataacactcgccatctccttccttctctcattgcagaccgctaagcgaggcagacacaactgtacccatctaagcagagcttagagcaaaaagccaacaaaaaaccccgacaagtaaacccaatttcctttttgctacgcgcacaagaagccaacaaaaccctgaactatagaatggtagaaggtgattccgcaaagggcaaaagcgaatgtaagtaatatagatttaactcacaattctttacgctatccattcgaataatggatatttgataataccataagcaatttgaccccatgtttaaccacctacttgcagtctataatgtagaagctggactacaaccgaactacaaccagagcgcagcaagcaaccaagcaagcaaccatcccactggccaggccaacgcaccagccaccggaaacgcgacttcgcacatcgacaaccgagcgatcatccagccgtactccttgggcaccggacccaagcagccggagtatcaatttgcggcggacaatcgcggctacgagccggacagccatgccaatggcaagcagcaggacgtagagcgggacgcccccgatgggggtcacgggggtcacgggccgcccggcaaggggggcaagggtggtaagggacgcaagaagtccgtacccttgccggaacccactgccccaatagtcgccaatttcgagagggccatcgaattgtgcggctatggcaagttccattatatactgctggccatctgcggattggtcagcacgtccgaggaaatggatgtcatatccatgtccttcattctgccatcggcggagtgtgacctggatttgaatacggagaccaagggctggctgaactcgatcatcttcatcggcatgatggtgggcgcttacttctggggcagcatcgccgatagctttggccgcaagaaggtcctcatcgtcatctcgttcatgaacgccttctgcatcgttgcgtcgtccttctcgcagacatactcgttcttcatgctgttccgcttcctcaatggtgcagcgtaagtatctgacattcaactaaaattaagccataacaataggcaatcgatgtggtgataccaccgctccatgcagccatgtatcatcatcgatcgctgatcgatctgtggatcgagtgacacacgggcccggacccgggggcaaggtgttaattcaattacttctattatgaataacaacaaaatatttgagtcaaaatatcgtgactgtttatgctaattaaagactcgaatcccgccagtccgatcgaaatgcccaaaaaaaaaaaaaatgtaacgaacaaccaaatgcctatcgaatttgccgctagtaaatgaaaaatctcagctcaggccttggccccctggcttttgggttacattgacgcttagtcaccggtttaccccaatgctcacccatatttaacaatatattttgtattttttgccgatcgtttgctaattaccgcaccgaactgacaacaattatttcgcaatattttcattttcgagtgctaaatgatactacaattttggttcaccattttccatagaattcgaaaaaaaaaaattgtcgtatatttgatgtccttttgtagagtttagtaaacgtggcgtatatgtaatatacgatttggcaaattgcgtatactcactgtgtcaatctgcgattataacattatttatttttatcccattttcttgcagtttgggcggcagtggtcctgtgatctggtcgtacttcgccgaattccagcccaaggcgaagcgcggctccatgctgagcttcatggccgccttctggacgtttggcaatctgttcgtggccagcttggcctggctgatcatcccgcgaacgattggcttcaccacgccgtacttcacatacaactcgtggcgtatctttctgctggtctgctcactgccctcgttcctcgtgggattccttctcttctatctgcccgaatcgcccaagtttctgctgacgcgcggcaagaaggatcgcgctctggccattttccgtggcattttcgtaacgaacacgaaacgccgtccggacgagtacatggtctacgacctggaagtggacgagaagctgctggagagcaatggcaatgtgaagaacaaatatagccgcatgatcagcggaatggttgaccacagtcgcgccctgttcaagtcgcccatactgcgtttcactatcgtttcgattacgatcaactttacattccacattggctactatggcctgttgatgtggttcccggagctcttcaatcgcttcgaggagtacgagaaggcattcccagatcagtcggccggcgtttgtgctgtcacagactatgtggtcaacctggccaaggagcaaagcaacaatggtacctgctcatcggatataccgcaatcggtgttcatggaatcgctgatatcactagcctcagcgctgccggccaatctgctggccattctgggcatggacatgctgggcaggaagttcttcctaatcgccggtaccatgaccgccggcatctgctcggcgttgatgtactttgtgcgcagctccgttcagaacctggtcgtatcggccattttcagtggtgccatttcggcggccaatgcagcgctcgactgcctcatcaccgaagtattccccaccaagctgagagccaccggcgtggccatttcaatggtggccgctcgcttgggcggcatcattggcaacatcgtgattgcccagctgctggacaactactgtccatcgcccacgttcatcgtgtcgggtctgctcatcggcggcggtctcatgtgcctcctgttgcccaatacgacgcgcaaggaactcaattaagcagctaatcaattcccaacgatagccaaccagccaaaaaaaaaacaccccatagaatcttctgctttaactgctagtctgcaaggtcttgtttcgagtcatgatactatggtttataatggatcatagatattaacttcaggtcaagacctttttgggctagataagttcccctttgaacaatcaacaatagttaacacaccgcccaaaaaaccacccgcgacccacaagtaatttccatttgccccattccgccagaggatcgggcattatctgtgtatatatggtatgtgtgtgctacaatacacgattatttgtatcgtcagtaattatttaacgatagcgataacgattttcattgtgtgtctaattttaaacgaccctttaccccctttactccccctttccctacccactacaaatatctatcaatctattggaatttaaatgaaccaacaaaatgaaatcagaaatgggcgaaagaaaagtcacaacgagaacaaaccttatcacaaggaaaataagaaaatttggaaactaatacatacaaccattttggaatgcggattggcattctttcgcccaattatgataagcaaagaaaaccccaagccagcgagaagatatagcaggtaggatcgatagcaatcgatgtatatgtattgtattgtacgatatgtagagaataatatatatatatttggcaagcgccggcgccggctgaagcagcagcagagggactgagtaacggtaacggtaaagataaggggctaagcgccggataatcaaatggaatcaaagatactatcgcaccgttctcgttccgctgctgtccgttattgttgttattattgctattattattaatgcattcaatgtaaaacacatacgtatataactttatctatatattaaacatacatactatatcaaaaagatattttttttttgtttttttttcgtcatgtaggaccaaagcacaggaagtgaaagaatattt

SEQ ID NO: 5846 - DNA, 2130 bp, DROSOPHILA
atgccgattcgaatttgttatatttacgctctctgggcggcgacttttgtttttatttcccacattcgcacatcatcttcaattgaaagtggtcaattaattgaaatgtttgtgcagcgatcgcaagaagcgcacaaatgctgctacgttcaattgaagatgcggatcggaaagatgtcgaaagatactcgactcggtgggggaaataaaaaaccgattcgaacgagtttcgagcacagcgcacgcagtttgattaacattcagcaacaacagccagtccagtctggactacaaccgaactacaaccagagcgcagcaagcaaccaagcaagcaaccatcccactggccaggccaacgcaccagccaccggaaacgcgacttcgcacatcgacaaccgagcgatcatccagccgtactccttgggcaccggacccaagcagccggagtatcaatttgcggcggacaatcgcggctacgagccggacagccatgccaatggcaagcagcaggacgtagagcgggacgcccccgatgggggtcacgggggtcacgggccgcccggcaaggggggcaagggtggtaagggacgcaagaagtccgtacccttgccggaacccactgccccaatagtcgccaatttcgagagggccatcgaattgtgcggctatggcaagttccattatatactgctggccatctgcggattggtcagcacgtccgaggaaatggatgtcatatccatgtccttcattctgccatcggcggagtgtgacctggatttgaatacggagaccaagggctggctgaactcgatcatcttcatcggcatgatggtgggcgcttacttctggggcagcatcgccgatagctttggccgcaagaaggtcctcatcgtcatctcgttcatgaacgccttctgcatcgttgcgtcgtccttctcgcagacatactcgttcttcatgctgttccgcttcctcaatggtgcagctttgggcggcagtggtcctgtgatctggtcgtacttcgccgaattccagcccaaggcgaagcgcggctccatgctgagcttcatggccgccttctggacgtttggcaatctgttcgtggccagcttggcctggctgatcatcccgcgaacgattggcttcaccacgccgtacttcacatacaactcgtggcgtatctttctgctggtctgctcactgccctcgttcctcgtgggattccttctcttctatctgcccgaatcgcccaagtttctgctgacgcgcggcaagaaggatcgcgctctggccattttccgtggcattttcgtaacgaacacgaaacgccgtccggacgagtacatggtctacgacctggaagtggacgagaagctgctggagagcaatggcaatgtgaagaacaaatatagccgcatgatcagcggaatggttgaccacagtcgcgccctgttcaagtcgcccatactgcgtttcactatcgtttcgattacgatcaactttacattccacattggctactatggcctgttgatgtggttcccggagctcttcaatcgcttcgaggagtacgagaaggcattcccagatcagtcggccggcgtttgtgctgtcacagactatgtggtcaacctggccaaggagcaaagcaacaatggtacctgctcatcggatataccgcaatcggtgttcatggaatcgctgatatcactagcctcagcgctgccggccaatctgctggccattctgggcatggacatgctgggcaggaagttcttcctaatcgccggtaccatgaccgccggcatctgctcggcgttgatgtactttgtgcgcagctccgttcagaacctggtcgtatcggccattttcagtggtgccatttcggcggccaatgcagcgctcgactgcctcatcaccgaagtattccccaccaagctgagagccaccggcgtggccatttcaatggtggccgctcgcttgggcggcatcattggcaacatcgtgattgcccagctgctggacaactactgtccatcgcccacgttcatcgtgtcgggtctgctcatcggcggcggtctcatgtgcctcctgttgcccaatacgacgcgcaaggaactcaattaa

SEQ ID NO: 5847 - protein, 709 aa, DROSOPHILA
MPIRICYIYALWAATFVFISHIRTSSSIESGQLIEMFVQRSQEAHKCCYVQLKMRIGKMSKDTRLGGGNKKPIRTSFEHSARSLINIQQQQPVQSGLQPNYNQSAASNQASNHPTGQANAPATGNATSHIDNRAIIQPYSLGTGPKQPEYQFAADNRGYEPDSHANGKQQDVERDAPDGGHGGHGPPGKGGKGGKGRKKSVPLPEPTAPIVANFERAIELCGYGKFHYILLAICGLVSTSEEMDVISMSFILPSAECDLDLNTETKGWLNSIIFIGMMVGAYFWGSIADSFGRKKVLIVISFMNAFCIVASSFSQTYSFFMLFRFLNGAALGGSGPVIWSYFAEFQPKAKRGSMLSFMAAFWTFGNLFVASLAWLIIPRTIGFTTPYFTYNSWRIFLLVCSLPSFLVGFLLFYLPESPKFLLTRGKKDRALAIFRGIFVTNTKRRPDEYMVYDLEVDEKLLESNGNVKNKYSRMISGMVDHSRALFKSPILRFTIVSITINFTFHIGYYGLLMWFPELFNRFEEYEKAFPDQSAGVCAVTDYVVNLAKEQSNNGTCSSDIPQSVFMESLISLASALPANLLAILGMDMLGRKFFLIAGTMTAGICSALMYFVRSSVQNLVVSAIFSGAISAANAALDCLITEVFPTKLRATGVAISMVAARLGGIIGNIVIAQLLDNYCPSPTFIVSGLLIGGGLMCLLLPNTTRKELN

SEQ ID NO: 5848 - DNA, 4463 bp, DROSOPHILA
ggtgaggaggtatactgaggtgtgttcgagccaggctggttggagttctggaacacgatggactggttgccggctggcgaggattggccggcgggcgggtacggattcccggccgagttgtacggcaggccgccctgcgcgaagccgctctggttgctcccgtccggattgaggaccgccgaattggacgcgggcagcattgatccgccctcggagaccgccttccagctgccgtcgtcaatgttcgcttgagaagtcatcgtattgccagcgttcaaacccctacgattcatgcctgtggtcggttctatcgggcattcgcgtcggcctgtgaatggagaggaatccattagtttgaacccattattatttcggcgttttgggggtttcgggttcggtatatttttatggtgcccatgcgtatgtgtatgcacttgtctgtatgtcgcactgcatttacaaaatatgtgtgtacacacacacacttttcacggcccgttcgcgttcgaaatggaaaacgctgcgaagggccggatcggccggatttcagtgcaggcagactgctcccgtatacgcaccttgcaaaaggcatacaatattttaattcttaaagcacaaacacatataaatgtatctacaatttaagaaaactgattggcctccaccgatagttttgccatcgctttccaaatagcagatttcgataggtgagaacgcaagcgtgggtttgtctcgcgtttggaatgaacggaaaaacgacctatcgcctggagggttttcatgttcttgaacaaattttttgtatgacgttaaataaaactaacgattcaagactgtttctcatagtttgtttttagtttcttcgaaatctcataccacccttaacgtattgtacatcaattgccacatataccctctaaataattgattaattgtaaagaaaaacctatcgaccgactcaagcagattccatttccattccgtttcactttgtcccacgccgcacccttgacttaataatttagtatgtgccgtgccgtaaaaatttgtaatcaaaatatggttgtaagactgttgctttaacgtcggtagtttattttatatttatgtaattttggcctgtgacactgcaagcccgtggtgtgatgcgaaagtgttcgatttttatatactagagtacgtgtttaggtatgttatttataaactgcattaatttcgcacatcttccagtgtccgttgaatggtaaacatatttttcgccattgaataatcagaaataagcggaaacttattggccaacagccgacgaaatccctctgcttatttccaagggcttgtgaaaatgtgcttcgctatgcagttatatatgcacattcctgtgtatgcatgtgtgtgctgcagtgtgcgtttcctacactctaaaaaatgttctttcccttgcagagcgagaaaaatgtcaaccgagagtttgaacagtttgagcgacaaggaactgcacaggaagctaatccagagcggcttccccagcactccggtgacggaaacaacgcgagcggtcctcatcgagaagttgagaaagcacacgcgagccgacaagctgaaaaagaggagcaacaagtacgtgctgtactccaaggagcagcaagagtcgcccccatttccacagtaccaccagtaccacgccccacaaccgccccaaaactacgccaatggccttgataacaataacgacctggaccagaccggaggctcctcagcttacaatcgcagtctcgatgagagcgactcaagcccgcttcagttgtccgcctccaaaatgtacgccccaccaccggttgtggcttccaattacgatggagactgctcgccgcacagcttggggttaaatggcaaatacctgcagccatgctccatgccgtacgccatagacacgtcgaataactatggcaaaccgagcggaaaagctaagttatctgacggaggcgtggtaaatagactgctcagctttcgggataccacgatccagcggaagttcaactatcccactggccaggcgtcgagaatcccgctcaggaaagaaaggctaactcggttcgctttgtcggaccttaaatccttcatcaggaatcccgacatcaggccctatgtaataccacgagtgctaatttcgctgttcttaatatttttgacaataatcactgtcctctatgtgggcaagaggttcgagcagagccccatcgataaggccgcactgaagtatacattatgtaaccccaacgatatgcaaatgatcagcgaaaaggtgaattgcatcgaaaaagattcgctaaggggtgcgctggacatgagcgaggaactctttaggcatctgaacgagcgagccaggctccatcactgcaaagacgccaatttgtcgcccgctttggaaataggagagtttgtgcgggaaatggtcagcaacccaaagactcacaggggaaatctgcacagcaacttgatggctgccaaatatttgattaccgagaatccgcagtggagcatccaagtggtggattcaacgaagcaccttggacagacctcgcacttcgagctttctgaacccaatctgccgctcaagtgcattgtgttgaagaaagttaccaggtttttcaccgttatcggtgcacttctcttaatagtcgctggatttctcatcgtgtacgtcgcggtagtaatataccgagttaagcagaaggaagccctgttggcggtcgatcagttccaaaaggacataataaacgagctaatttacttgagctcccagtccgagagtcccgaggtagttattaaccagctgcaggagaagtttctgccggccaagaagcgctcaaagctcttgtcttcttggaacaaggccctcaagcagctggagaaaaacgatagccgtgtgctgttcggaatggtgaatcgtgacgggaaggcaatgcgcacaattgcgtggaacaggaacgttgacaaaaaggatgtggggcttgttaagaagtggcagagtcccgccttcgataactcgaacaagattgccaacccgccgactccctgcctgaagattaggcacatgttcgactcctcagaggtggatcaggccaatctgaagcagtccatcgtggagtcgatcatcgagaaggtcggcacgcgctgcaagatctgcgatgtccagctggacgtgcagtcctgctgcgtgtacatccgctgcgccagcgaggaggacgccggcacgattcacaaagagatcaacggctggtggttcgacaagcgcctgatttcgattaaattcttaagactggaacgctacctgagccgtttccccaagccctcggccgagccactttactttcacaccaacgaggcagccaacactcactcataaaacacacaactctacattagatacttaagttattaaatgcgaatttgttttacatgtacagctggagttgtcgtatttaatcgatttattatgaactagactttaaaacttaaaatctgctaaacactaccactacttagctagggagttggacgacagagcgctttccccagtttccaagtgtttgataagccggtacagggtagcagcctccttgattttgctgaaacccacgcagaaggcttcgatttcaatgaatagttcctggaaaataacaatagaatagtcactaagcacagtcgaggaaatggtagtagcgcataccctaacgttcacaatcttgttcctaatcaaggactgcagaaatacgcaaacgagtcgcaccaggcgagactgcatgtacttgtccttgactgtttcgcaagtcgagatgcaattgctgatgtataggtgaataaactcagtgggcaaaggtccggaggtggttagtctggaatgagagctcgagcatgttaaagaagccttcaatactcgatgtttggattcctaccggttgaccacctccatggagtgaagtgttatgtccatgttgaccaacacgttgaagtattcagttatgtcggaggtcgtcatcagtcttagcaagatctcaatggagatgagaggattgctttccacgagcagaggtagctgagatggaagcaatggataagacatatatctagcaatgttttcggttcttaccttgtccggggtcagtccatattggcgcgcaatgtccgtgttctgcttcagcaggtcgtcgaagaggatgtgctggttctggaggctgagtggctggagaaaagcctgctcgatgaggtgctttatgttgggggtaatgtagttggacttgtcgtagatgatctccaccttgtcgctgttcgactggtttatccagagcagctcgtcctcgaagtccattaggggcggggcgatggacagaaacatgctggtgcgctgattttaatttacaattattattattttccttgcaattttgtaaacaattttagtg

SEQ ID NO: 5849 - DNA, 2208 bp, DROSOPHILA
ccgcacccttgacttaataatttagtatgtgccgtgccgtaaaaatttgtaatcaaaatatggttgtaagactgttgctttaacgtcggtagtttattttatatttatgtaattttggcctgtgacactgcaagcccgtggtgtgatgcgaaagtgttcgatttttatatactagagtacgtgtttagagcgagaaaaatgtcaaccgagagtttgaacagtttgagcgacaaggaactgcacaggaagctaatccagagcggcttccccagcactccggtgacggaaacaacgcgagcggtcctcatcgagaagttgagaaagcacacgcgagccgacaagctgaaaaagaggagcaacaagtacgtgctgtactccaaggagcagcaagagtcgcccccatttccacagtaccaccagtaccacgccccacaaccgccccaaaactacgccaatggccttgataacaataacgacctggaccagaccggaggctcctcagcttacaatcgcagtctcgatgagagcgactcaagcccgcttcagttgtccgcctccaaaatgtacgccccaccaccggttgtggcttccaattacgatggagactgctcgccgcacagcttggggttaaatggcaaatacctgcagccatgctccatgccgtacgccatagacacgtcgaataactatggcaaaccgagcggaaaagctaagttatctgacggaggcgtggtaaatagactgctcagctttcgggataccacgatccagcggaagttcaactatcccactggccaggcgtcgagaatcccgctcaggaaagaaaggctaactcggttcgctttgtcggaccttaaatccttcatcaggaatcccgacatcaggccctatgtaataccacgagtgctaatttcgctgttcttaatatttttgacaataatcactgtcctctatgtgggcaagaggttcgagcagagccccatcgataaggccgcactgaagtatacattatgtaaccccaacgatatgcaaatgatcagcgaaaaggtgaattgcatcgaaaaagattcgctaaggggtgcgctggacatgagcgaggaactctttaggcatctgaacgagcgagccaggctccatcactgcaaagacgccaatttgtcgcccgctttggaaataggagagtttgtgcgggaaatggtcagcaacccaaagactcacaggggaaatctgcacagcaacttgatggctgccaaatatttgattaccgagaatccgcagtggagcatccaagtggtggattcaacgaagcaccttggacagacctcgcacttcgagctttctgaacccaatctgccgctcaagtgcattgtgttgaagaaagttaccaggtttttcaccgttatcggtgcacttctcttaatagtcgctggatttctcatcgtgtacgtcgcggtagtaatataccgagttaagcagaaggaagccctgttggcggtcgatcagttccaaaaggacataataaacgagctaatttacttgagctcccagtccgagagtcccgaggtagttattaaccagctgcaggagaagtttctgccggccaagaagcgctcaaagctcttgtcttcttggaacaaggccctcaagcagctggagaaaaacgatagccgtgtgctgttcggaatggtgaatcgtgacgggaaggcaatgcgcacaattgcgtggaacaggaacgttgacaaaaaggatgtggggcttgttaagaagtggcagagtcccgccttcgataactcgaacaagattgccaacccgccgactccctgcctgaagattaggcacatgttcgactcctcagaggtggatcaggccaatctgaagcagtccatcgtggagtcgatcatcgagaaggtcggcacgcgctgcaagatctgcgatgtccagctggacgtgcagtcctgctgcgtgtacatccgctgcgccagcgaggaggacgccggcacgattcacaaagagatcaacggctggtggttcgacaagcgcctgatttcgattaaattcttaagactggaacgctacctgagccgtttccccaagccctcggccgagccactttactttcacaccaacgaggcagccaacactcactcataaaacacacaactctacattagatacttaagttattaaatgcgaatttgttttacatgt

SEQ ID NO: 5850 - protein, 650 aa, DROSOPHILA
MSTESLNSLSDKELHRKLIQSGFPSTPVTETTRAVLIEKLRKHTRADKLKKRSNKYVLYSKEQQESPPFPQYHQYHAPQPPQNYANGLDNNNDLDQTGGSSAYNRSLDESDSSPLQLSASKMYAPPPVVASNYDGDCSPHSLGLNGKYLQPCSMPYAIDTSNNYGKPSGKAKLSDGGVVNRLLSFRDTTIQRKFNYPTGQASRIPLRKERLTRFALSDLKSFIRNPDIRPYVIPRVLISLFLIFLTIITVLYVGKRFEQSPIDKAALKYTLCNPNDMQMISEKVNCIEKDSLRGALDMSEELFRHLNERARLHHCKDANLSPALEIGEFVREMVSNPKTHRGNLHSNLMAAKYLITENPQWSIQVVDSTKHLGQTSHFELSEPNLPLKCIVLKKVTRFFTVIGALLLIVAGFLIVYVAVVIYRVKQKEALLAVDQFQKDIINELIYLSSQSESPEVVINQLQEKFLPAKKRSKLLSSWNKALKQLEKNDSRVLFGMVNRDGKAMRTIAWNRNVDKKDVGLVKKWQSPAFDNSNKIANPPTPCLKIRHMFDSSEVDQANLKQSIVESIIEKVGTRCKICDVQLDVQSCCVYIRCASEEDAGTIHKEINGWWFDKRLISIKFLRLERYLSRFPKPSAEPLYFHTNEAANTHS

SEQ ID NO: 5851 - DNA, 2450 bp, DROSOPHILA
ttcagcaagcgtgtcgcattagcatcgcgatagttcaactaaaaatatagcaacattgttgtttggtttgttcaatacttataaacacgaaaagcacccaccgagtgacaagaggacgaacagttttcgaattgttctcttctaacagcttttcaggctcctgagagcggcgaaccatctctgccagctgcttgatcacagaacctacaaactctgcatcccagtagtcttggctcttagtccgatccttgttatccttgcgaagttcaacgcactcctgatagcatctgatcaggctgccatagcattcgaatagaagcttgttgctggaccgcagggcatcctggagcagctcagagctgagaaccatgggcagacaatcttgaacagaaatgggcgacccccgcggaccacgaaagatgaagagggtccttggtatgtaaagcattgtcccacttgcaccaactcacctactcctacttcctgtaatggagcgggtggtagatcggagaggaagcgccgctcagagtgcagttatgtcgggcttgttgttgctcaatgcaaagatgagttcagtttaaaccgttaaacacgagaacaaaaaatggagcaaagcagcgaccacaaatttacggggataaccccacgaagagattggcaataaactgctacagtgttcagaaattcgcaattgcaagtaagaatcgattggcaaattaatcgattttgtgatttactgattttggcattttgaatggggtcaagtcagcttgtttcccgcgatcggtctcactattttactgtcattgcaatttggaaattttaagggttctgattgcacttctcgctgacctcaaacaaatcaagtaaatattcttttttttttgctgttatatgtcacgttccatcgaagctgatggaagagcggcgtccttgaggtgtctaaccctgaactggaaatctccgttttgctatttattttgcagagaagacaatcaaaatgcttttcgatggcgaaaccggcaatgggcaaggtcagggccagaataccctgaatccattggggccaggccaggaggagcccgccctatgcgagcagtactatctgctgggcgatggttccatcattctgcgcaaccattccatcgacttgtcgaatccgcccctgaaatcgcgctgctgccagctcccaacactcatccacgacatatgcgtcaactgcgtgatggatctctgcgaggagtgtggctactcctgcggcgagtgcgccaagtttatttgccgcaactgcgtgactttattgtgagttaagtcccagaaggaagaagcatccccctagggaaacccgttagtttaaaaatcaatcgaccatcatcttatttccagtggtaatcgaattgaagaagaggaggatccgctgtgcgagcactgccagatgttcctcagctagggcatcaaacaatcaagcaaatgtcaaatgtattacgttttaaagaatatagagctatatagtatttaacattaggcaaaaatctttgatctattcttcgttagcgctgtgcgagtactgccagatgttcggcttcacacaaacaagcactcagcaaggtcacagtgcttgttaaattttaagttctgaagcagtacaaattttggacaactcaatcatttttatatttctatatttaaagagttggtatttcatataaatataaaaaaaaatttacaggtgtactcgttccttgtctctacctacaccttgcccctaaatttgtggtacttctcgtgatccttcaccaatccttcgtacatcctggcgccggcctcattgctggagcgtaggatgaagtgtccggcacggtgatcgcaaataccgatcagttcatggcacacgcgcactatgtggaccttgatctggggaaaatcgtattattagtcaaagtaagcccactataaaaatatatatactacgtggacgcatagaataaaaaaatggcaattattactccttaaagaatatagaaccatatacttcttaacacgaaacaaaaatcgttgatctattcttcggaatgctgcgaaacttgaattttgacttcgacttggccaatggcgttcccttaacgtaaaacacaccttttcgaacagcgtcgtgggcctttcggttgctaccatttggcgaatggtgaagataagcaggaagggtgcgactctcttcacggccagtgcctgcgtggcgcgcactgtggccattacagtagccagtttcagacccaagtccgccaaaccatccagctccgtttcacttatgtcctgtgtctgctttctttccgcccgatagccaacgacggcctggatgagatcctggcaaaggacactgagctgggctgctcggtctgacatcaggttactgtgttgttttaacagcacaatcaggttgtctgtgagtg

SEQ ID NO: 5852 - DNA, 366 bp, DROSOPHILA
atgcttttcgatggcgaaaccggcaatgggcaaggtcagggccagaataccctgaatccattggggccaggccaggaggagcccgccctatgcgagcagtactatctgctgggcgatggttccatcattctgcgcaaccattccatcgacttgtcgaatccgcccctgaaatcgcgctgctgccagctcccaacactcatccacgacatatgcgtcaactgcgtgatggatctctgcgaggagtgtggctactcctgcggcgagtgcgccaagtttatttgccgcaactgcgtgactttatttggtaatcgaattgaagaagaggaggatccgctgtgcgagcactgccagatgttcctcagctag

SEQ ID NO: 5853 - protein, 121 aa, DROSOPHILA
MLFDGETGNGQGQGQNTLNPLGPGQEEPALCEQYYLLGDGSIILRNHSIDLSNPPLKSRCCQLPTLIHDICVNCVMDLCEECGYSCGECAKFICRNCVTLFGNRIEEEEDPLCEHCQMFLS

SEQ ID NO: 5854 - DNA, 4663 bp, DROSOPHILA
tggtaacgacgtcaggaactagtgattcaacggaaggcggcaaaacagttgtcttagcaaccagcgaggccaagccagcggaatcagaggtagtagcacagacggttgtcccacctgctgtcgtaactacaggtcccagcagcagttctttggttgtcagtcagagcgtctacgctgcttctggcccgaatgccaaccccacgccctctcccatgcccgtggatgcaaattggttgtacatctgcgactggcggaactgtccccgcaagaaattcaagtctcttaacgagctgcagtaccacgtgtgcagtgtccactgtccagatcaccttgattctgatgccgacatttattgtcagtggggcagcggacccaacttctgcgacaacagagcgcgcaaacggtactcattgatgacgcatctgattgaccggcacctgacaacggagaacttgcgcgccagtgtgcaacgtcgcctggcaactgggattcacaatgtggcgcccacccaggctcccgtgaccatagtgcgcaacgagggtcatgcccaacgattggcgggaggcgctactggttcaccttcgggtcctgcttcagcggttccagtcgttggcagcgccgcaatgcaagctatgaaccgacacacgactgattacacgaacgctaaagagctgatggacgaaaatgagggtccagtcaccaagagcatccgtctgacagcggcgctcattatacgcaacctggtcacctactcggctacggccaagagaagcctgaaacgctatgagtcacgcttggccaatgtcgcctttagcaatgtggaggctagcggagtgctctcccacatcatgtacgaattgagccagtaagccgatatagcttaccatcaatatgattatttaactgacttgtaagaacgacactaaaaaaatgtgaaaagcaaaccataccttgtttgtctaaatgattcataccatatagcaccaaaatatgggagattcgggagtaagattttaatttgacttctacaattctacgaggcttagaattaaagagctatggtggacattatcagatatactcctggttagcaaataaacgttttgaattaatcgttcaaaacatactttgatttacattgttcttataaaatattaattaacacatctgagttataatccgttaaaagaatccgaaccgaagagtccgctaaatcttcgtgtactacagtgaaacactttttatcgcctaacgtaagatattagaatgggatgaaatcaggttcatcatacaatagcttctccgttcttcaaaaagttttcatcgtccaaaatcgtatacttgttgctcctgtacgtgtccaattcaaaaatgtacttcttgccgcagtccttcattagcttgtggataactggcttgatgttctcgatgcccgcgatactggccagttcattgtagtagacaaactgaaattacagataaaagattgttttatatatgttctctgcttgtaaaagtctttaacaaataagtctacataagctaatatttttaatttcttatacagggtattgtgaacactcacctgtcgctcgcccatctgatgtgctttcttctggttgcgcacgccgcagccccaccgctctccgatctcctgctccagatcggcaatcatctgctcccgggagggaaacttccgctgacctgtgaagaacttcagcgtgaagcgcacctgcatgtcgaagatgtgggtgggaatcacgttgaagggcaggcccacaaaggccatggtcgggtggttgatgttgatgcagtgcttccacagtggctgcacgaagttgtctatcacctggacacccacatcggtgctgaggcaggggaatgtgtacttgtagccggtgcagaacatcacgtggtcaaagctctccgtgctgccgtccgtgaagacggctccatcctttgtgaagcgtttcacatccggcttctgcgttacgttgcccatgaatgctgtgttaggggtcgtggaaaggtggtggcttaggaagacctgcttggcagccaagcgaacatggttggtgatgtccatgccactggggccggcgccaatgatcagcacacgcgcgtctgtaagaaaaacaatttagccggtaaatgttttggtgccaaataggtttttgcgcagataaattaaatggaagtggggaaacttagacagtctctgtttggtttaacacgctagtcaacgatcatgtaacatatatcatggatggctcatgtagtaaagcttctatcattttataaaacaaaagttttatgtggatatataaacctttcaggatttaaaagatcaccgaatcctaaccgtgcaatgcaacaccaaatgcagtattctattctatatcaacaggtttaagattttagttcagttgttactataaaatttctgatatatatacactgctcttaaaaactacaatggttggcatctttccaaaggactctcccgatctccgtcttacttttctatctacaatctgataagtagcgttttgagatctcccacagtgccagctatcagcagttaagcacgtgctagaggagctcgaaattggcacagacccactacacttattataattatgtcacacagccgtcaacaacattatctgcagtcgagggccgagttgtttatggggaaaacaagagtgggactccgtccagacggcgatggaggcgaagtccgaagctttggcctgactgatttaagatacagacgggagcgctctaatctcacctttaaacttatctgccttgcggtagaggtggctgtgcatcttgttgccctcgaacagatctaatccctcgacttccgggaggtccggttccgtgtagtgcccgttgcagacataaacgaagtcgtagtagactgggtcacaggtatccgtgctgtggtcccatacgtagacctggaagtgatcggagaaggccccgtgagatcgattagtatttcgccagtcgaacaaacaagtcacagtgatggaaaactggttccaaaatacgtgacgtcgctaccaacctcccagtcgtccaagcgaggacgcactcttatcacctcgtgctggagcttgatgtgggcctttagcttgaagtgttccgcgtaggagcgcagaaattctagcacctggttggaggtgatgaaagactcggtgatatcgtcggggtacgagtagtccggatagcccatgacctcctttggaagattggtgctgaaaccgagtcgcaaatcagaaatcttacagctccatcatatactcgatcacctaccgcaggccttcgtacatgctgctgtgcacctcgtcgtactcgtccttgggcatttcctcggagaaaatccatgttcctccgatttcggtgcctcgttcgtaggccaccgcatccagacccgcttccagggagttcttcagcgcgcacaaccccgctgttccagctgaaaagaaaaaccatatatgcatttgtggcacatatctctggaaagatatgagcatcacctcctattacgcaaacacgacgcttgtccactgaagttttgatcattttgggattcccaattggtagcaaattttaaaagtttctttttcctctaacacgtctaactcctcgcctgaccaacgactaactgaggggctcgagctcccagcgatataatagacccgggaaggcgtcactatgtgcgctacagtcgagtgtgctgggttgtttgcgagagccatgccgctgataagtcgcttccctcatcacggcaataacagactagcatgggcctgaggaaccctaagggtaaggagagttcgacagtcggtttcatccaccgacccgtgccttatcactcgcggttgccggtgacataacagagacgctggcgacggcatcggccgttctgaaagcgtctggaatccgccgtcagccgatcgggattacagtcaagcctcactaagagaaacttatgggctagtcttgctgattccgcggaatatttcggaagaatactcgttgatagaaaaaaaaatatgataaatttaccaattcctaatacaacataagaaatttacaatgagtctaaacaatggatttgtttctaaaagttattcatgtccggaaattacgactgtaagtaaggaacatctggctgctggtcggcatatgaaccgatcctcagcttccacaaggggctcactgataacgctatcaattgagatttggtggagatttacatcacctaacccggagtcactgtgtcagttcagtttaacagcctatttgagcttttaattatcagctgcccctccaccacagcgaacgcaaatgaatatcatcagcgactggaatataattaatttcattcaattacaaaaactctgtcgatggcaacaatgttgcagtccgcagtgaagcctacggaaaagtcattgctgggggtggtgcacatatgtgtgtatgtacatatgtggctggggagagagacaaatattcttagaaacgggtgtggggaagccaagtagtggaaaatgtttgcgctgtgatagtagaattgattaggttgatactctgccggattccaattaaacataagcatgctttgacagccccatgctgaccatcaaga

SEQ ID NO: 5855 - DNA, 1645 bp, DROSOPHILA
aggcgaggagttagacgtgttagaggaaaaagaaacttttaaaatttgctaccaattgggaatcccaaaatgatcaaaacttcagtggacaagcgtcgtgtttgcgtaataggagctggaacagcggggttgtgcgcgctgaagaactccctggaagcgggtctggatgcggtggcctacgaacgaggcaccgaaatcggaggaacatggattttctccgaggaaatgcccaaggacgagtacgacgaggtgcacagcagcatgtacgaaggcctgcgcaccaatcttccaaaggaggtcatgggctatccggactactcgtaccccgacgatatcaccgagtctttcatcacctccaaccaggtgctagaatttctgcgctcctacgcggaacacttcaagctaaaggcccacatcaagctccagcacgaggtgataagagtgcgtcctcgcttggacgactgggaggtctacgtatgggaccacagcacggatacctgtgacccagtctactacgacttcgtttatgtctgcaacgggcactacacggaaccggacctcccggaagtcgagggattagatctgttcgagggcaacaagatgcacagccacctctaccgcaaggcagataagtttaaagacgcgcgtgtgctgatcattggcgccggccccagtggcatggacatcaccaaccatgttcgcttggctgccaagcaggtcttcctaagccaccacctttccacgacccctaacacagcattcatgggcaacgtaacgcagaagccggatgtgaaacgcttcacaaaggatggagccgtcttcacggacggcagcacggagagctttgaccacgtgatgttctgcaccggctacaagtacacattcccctgcctcagcaccgatgtgggtgtccaggtgatagacaacttcgtgcagccactgtggaagcactgcatcaacatcaaccacccgaccatggcctttgtgggcctgcccttcaacgtgattcccacccacatcttcgacatgcaggtgcgcttcacgctgaagttcttcacaggtcagcggaagtttccctcccgggagcagatgattgccgatctggagcaggagatcggagagcggtggggctgcggcgtgcgcaaccagaagaaagcacatcagatgggcgagcgacagtttgtctactacaatgaactggccagtatcgcgggcatcgagaacatcaagccagttatccacaagctaatgaaggactgcggcaagaagtacatttttgaattggacacgtacaggagcaacaagtatacgattttggacgatgaaaactttttgaagaacggagaagctattgtatgatgaacctgatttcatcccattctaatatcttacgttaggcgataaaaagtgtttcactgtagtacacgaagatttagcggactcttcggttcggattcttttaacggattataactcagatgtgttaattaatattttataagaacaatgtaaatcaaagtatgttttgaacgattaattcaaaacgtttatttgctaaccaggagtatatctgataatgtccaccatagctctttaattctaagcctcgtagaattgtagaagtcaaattaaaatcttactcccg

SEQ ID NO: 5856 - protein, 429 aa, DROSOPHILA
MIKTSVDKRRVCVIGAGTAGLCALKNSLEAGLDAVAYERGTEIGGTWIFSEEMPKDEYDEVHSSMYEGLRTNLPKEVMGYPDYSYPDDITESFITSNQVLEFLRSYAEHFKLKAHIKLQHEVIRVRPRLDDWEVYVWDHSTDTCDPVYYDFVYVCNGHYTEPDLPEVEGLDLFEGNKMHSHLYRKADKFKDARVLIIGAGPSGMDITNHVRLAAKQVFLSHHLSTTPNTAFMGNVTQKPDVKRFTKDGAVFTDGSTESFDHVMFCTGYKYTFPCLSTDVGVQVIDNFVQPLWKHCININHPTMAFVGLPFNVIPTHIFDMQVRFTLKFFTGQRKFPSREQMIADLEQEIGERWGCGVRNQKKAHQMGERQFVYYNELASIAGIENIKPVIHKLMKDCGKKYIFELDTYRSNKYTILDDENFLKNGEAIV

SEQ ID NO: 5857 - DNA, 8355 bp, DROSOPHILA
cacaatcttgttcctaatcaaggactgcagaaatacgcaaacgagtcgcaccaggcgagactgcatgtacttgtccttgactgtttcgcaagtcgagatgcaattgctgatgtataggtgaataaactcagtgggcaaaggtccggaggtggttagtctggaatgagagctcgagcatgttaaagaagccttcaatactcgatgtttggattcctaccggttgaccacctccatggagtgaagtgttatgtccatgttgaccaacacgttgaagtattcagttatgtcggaggtcgtcatcagtcttagcaagatctcaatggagatgagaggattgctttccacgagcagaggtagctgagatggaagcaatggataagacatatatctagcaatgttttcggttcttaccttgtccggggtcagtccatattggcgcgcaatgtccgtgttctgcttcagcaggtcgtcgaagaggatgtgctggttctggaggctgagtggctggagaaaagcctgctcgatgaggtgctttatgttgggggtaatgtagttggacttgtcgtagatgatctccaccttgtcgctgttcgactggtttatccagagcagctcgtcctcgaagtccattaggggcggggcgatggacagaaacatgctggtgcgctgattttaatttacaattattattattttccttgcaattttgtaaacaattttagtgtgaccgcgttgaggggttcttaagaacaatctgcacatgagagtgggccatctgaaaaatgatgtatgcaaatgtgcgcctaagggtgttaggttacacacttgtcaaaaaataaaaattaaaatatgaaaacagttcaatatttatattaaagcctgtttcaaagcttccatcgttccgaatcagagcagttgcacagacttctgcatgcgttagccattgagccctagcgcctgcactctggtcacactgcaactgttgcacggctgcaaatcgcaaagcaaaataaaatgcaccgcgcttgaattatccattttatggacagaaaaaaccttcacacacgaacagagaaaaatggatcgcgggaaaggaagcggctccaaccgatcgcagaagaaggttccgctgggcggagaactctttgcgctcggcaagagcgtacgcgatgactccaagtcgaagatcctgcccattaagggcatgtcgtcgtcggaccgcaagcgtgaagcctccaccgcactggccagctcgagcaagcggttccgcggcaacctgaaggacgcgggcgccccggacatgtcctccggtagtagtcagtgcgagacgtgggagcaattcgccgttgactgcgatctggataccgtggtcgagaccatatacgcggctttggagcagaacgacagcgaaactgtgggccggcttgtatgcggcgttataaagcagacaacgacgagctcctcgcgctccaaggtggacaacattgcccttctggccctgatctacgtggccaaggtacagccgagtatattctgcacagacatagtggcctgcgcgctgctttccttcctgcggcgggaggccaacgtgaaaatgaggtacaacaccaacctgcacattctgttcgccaatctgctgacccggggcttcatggagatttcccagtggccggaggtgctgctccgcatttacatagacgatgcggttaacgagcgctactgggcggacaatgaactgtgtgccccgctcgtgaagaacatatgcgcagcctttaaaacccgcacgccccacatcagtctcctccgctgggatgtgagctcgtccctgccttctggtcaagcacacagagacagcatgactgtggacgacgattccggggacaattccacacagagcttggatgcaagtcccttaaataccgaatcggaaccaattcccgacgctatgtgcaccactaaatcaagattcagcgatgctgtggtgcagaagcatgtcagcgatgccattcgcgatcagctcaacaagcgacagcagcaggataactacaccagaaacttcctaaagttcctgtgcaccacttctggcattgcagaggtacgatgtctgagcatttcccgcctggagctgtggatccacaacggaaaactggtcaagttcgcccagcaattgctctcgtacatctgcttcaacatcaagggacgcaacacacaggacaacgaagtgctcttggtgctggtgaagatgcggctcaagacgaagcccctaataaaccactacatgtcctgcttgaaggagatgatttttctgcagccggaaatcttgagtaccgtaatgaaactggtcgtgcaaaatgagctatccaacaccaggaatccaaacaatatggggatgctgggtaagagaaacaaattttttcttaaattaaaatcataattcttaatttgaaacttttccagccacaatgtttcaaacatctgctgatcaatcagctgccactctggctgagatttaccaggaattcttgcttcagcgggacgattgcctgcgcaccctgcgcgttttcttacgggagcttgtgcggatgctgcgcttcgatgtgaacctggtcaagttttgcaagacgtttctcagtgagcgggaggatctgactcctcaaatcgaaatgttcgagtttaaggagcgaattttcaactccatggtggacattgtgtgtctctgcatgtttctgtcggccacgccacaagctagggaagccagtttgtccctgaaaaccaatcgggacaccaaaaacaaccatgctctgctcaagctgtacaatcagatgtcacagattcagttggacacagtgtcctggatgtacgaaacagtacccacgctcttcaagattccggctgcggagtaccaccaggcgctgcacaagctgctactgctggacagtccggagcagtattcgcgctgcgatcagtggccgtcagagccggagcgaggagcaatcctgcggattatctctgagacgccgattcacgaggagaccctgctgcgaattatattgattggcatcaccaaggatattcctttctctatcgcaaacacctttgatgtcctgctgctggtcataaagcgagtttccgggatgaaggctaccaatattccggcggtgcaggccaacaaattcgacatcatcgacttcctgttcagcatgtcagagtaccatcatccggagaacattcgcttgcctgcggagtacgagccaccaaagctggccatcatcgccttctactggaaggcgtggctcatattgcttatgatatccgcacacaacccctcctcgtttggagccttctgctgggaccactatcccacaatgaagatgatgatggagatttgtataacgaatcaattcaacaattcatcagccaccaaggatgagttgcaggtgcgtgcttaattatataaacaaactggcggtgctacaataaagatttttcagataataaccatggaacgggatcacattctgcagttcgagacgtacttggctgcccaaacatcgccgcatgctgttatcactgaggaaactgcgattctaatcactcagctcatgctgatggacccgatgggcactccgcgcaaagtgccctccatggtcctagatcagctaaagttccttaatcagacctacaagcttggccacttattctgccgctgccgcaagccggacttgctgctggacataattcaaaggcagggcaccacgcaatccatgccctggctttccgacttggttcagaacagcgagggcgatttcagccatctcccagtgcaatgcctgtgcgagtttctgctgttcaacgcgcacatcatcaacgaggagaatagccgcgatgccgagttagtcaatttcctgagaaacctgatatttgacggcaatcttagccaccaaatcgtttgcgagcttttggactacatatttagacgcttgtcgtccacggtgaagcaatcgcgagtcgccgctctttcgggtctgaagataatcttcaggcactctggcgactttgaaaacgaatggctcctgaagtcgctccagcaaattccgcacttctacgaggtgaaacccttcataattccccagctgcgagctgcctgccaggtggagaattgcccggaactgattatggcgtacattcagttcatcactgcgcacacgctcaacgatccggtcaacgaaatgctggatcatgtcatcgatatggcgcagctgattgtagagcgcagcacaatgtttcagcacattatcatttcgcaggaggactacgactatgtgcccgacgagaaccgcattcagactctgaagtgtcttttcgtcatgttcaacaactatataattaagctaagggaataccacgaaccgtacgagtggaccgagtatccggacctgctgatggttcagtttgacgatggagtacagctaccgctccacataaacatcattcacgccttcattatcctgctcacctattccaacagcaacatgcccgaatcgatacccattttggactattggtttccgcccggacgaccagcgcccgtcgcctttctgcccagcatgccgcaggagcaggtgcaactgctgcccgactggctgaagctgaagatgatccgctcatcggtggacagactaattgaggcagctctcaacgatctaacgccggatcagatcgtgctctttgtgcaaaactttggcacgccggtcaactcgatgtccaagctgctggcaatgctggacaccgctgtactggagcagtttgatctggtgaagaatgccattctgaacaaggcctatctggcccagctaatcgagattcagcaggcgcggggtgctaagaatgggcactacaccgtacaggccttggatctgcattcccactcgcagactgtgccagatctgcccaagatcagtgtggttattcaggaggccgttgaaattgatgattacgattcttcagactcggatgatagacccactaacttcctggccaccaaggaggtagcccaaaccattctcacgcagcccgaccagttgactgagtcgcgaagtgactgccgatccttgattcaaaaactgttggacatgctagcaagcccgaacagcaatagagcggatgtggttaacgccataacagaggtgctagccgtgggttgcagtgtcacgatgagccgtcacgcctgcacatttttaaggactttcttcagctgcatgctgcacagcgacaagtatcacatactggagaacgctctccaaaagaacttaagtatgtttaagcacacattcgccgactccagtctgctgcagaaatccgaactctatcatgagagcttggtgttcatgctgagaaactctcgcgagatttatgcgcagcagtttaaggcgaataccgccttggtggcacgaaaacggatcgtccgggcgatcgtccaaagcttcgatcagaccaaggacagcaagaccgtcgccaagtccaagagcgaccagctcttccacaacgggctcttcatcgactggctgtccgaaatggatcccgagatagtttccactcagctaatgaaggagcgctttctgttctcaaagtcctgcagcgagtttaggttctatctgttgtccctgatcaaccaccaaaccaactgggacacgatcgaaaggattgccgagtacctgttcaagaatttccatgaagactacgactacgccaccgtcctcaactacttcgaggcactgaccaccaatccgaagctgtggaagggacgcgacaagtacatgtcgaagaacgtacggccggatgccttcttcatgctgaggacttctgaactggagccgttctcccacttcatccttcacgaagggctttccgaggtcaagctggacagcaaaaactatgatttcaagctctgctcgcgaatgaacctactgtttaagctcacagagaagcgacgagacctcatggtcaaggtaatggagcacgtggagaaaagttcggtgtccgactacttgaaactgcaggtcctccagcagatgtacatcatgtatccgcgcatcaagtttctgaaaccgggcaaaaccggcgagcaggcgtacaaattgcagaatctgaagggctgccaggcggacaaggtgtccaacaatctgatcacctgcttgggcagtctggtgggcaaaaaggactttgaaaccctgtccacggacaccgagctgctccttcgcaagctggctgcctcccacccgcttctcttccttcgccagctgggcgtgctgtcgtccattatgcaaggtcgggcccagctcagcatgaaggccctgcgcgaggagcaccacttccaccgatttgtacagatcctgaggacgctggagctgctgcaaccaaccatctttgaggaggcgtacaagaacgagatccaaaacacgctgtcgtgctacttcaacttcttcaagcaccacagcaacgtaaaagaggcctgccaaatgctgaacaagtttgtgcagatgctccaagcctacatcaactacaatccctcaagtgctctgctcttcatcgaacagtacgtgggcatcctgaaggaacttgcagccaagtacacctcactaggcaaactgcaggttttggtccaggccgttgccctgctgcagcacaagtcgcactcggcgacggaattggacgacgaggaagttaagtacgagtacgatctggatgagcatttcgatgtaaagccatcggccagcaagcccgtggtaacagaggatcccatcgaagtgaatccgcaaacacccatcgatccaagcagcagtaggggtcccttatcggttctaaccttgggctcgtacagccggtcgaactacacggacatatcgccgcacttcctcgatctggtcaagatcataaagcagtccaacacggaggacgtggtcttgggtcccatgcaggagctggagtgcctcacttccaagagatttgtgttcatcaacgagctgttcgaacgactgctcaaccttatattctcgccgagtgcccagatccggtccatcgccttcatcatactgatcaggcatctgaagcacaatcccggcaattcggacatcaacctgtgcacccttaacgcctacattcagtgcctgcgggacgagaactcctcggtggcagcgacggccattgacaatctgccggagatgtcggtgctgctgcaggaacacgcaatcgacatcctaacggtggccttctcgctgggcttgaagtcgtgcctgaacactggccaccagattagaaaggttctccagactctagtgatccagcatggctattaagcgttcggtctataagttagaaccgtcatcatatgtacaatgtaatctttgctccttataataaagtgtattctgcggtacgagatttttaccacagcggaaacgcgacttggtcaagttaaatatttcattctttatttctactgaaaatacaaattatgtagaaaattctcatacaaattggcgatctcaacaggatacgtgtttccatcgctgtttcatgcatgccttgtttgttaaatgcaatgcacagtgctcgtacagtttattggcggtcggtggcccggagtttctcctcgacggcttcccgggaggcttcggaaagatcagtggcttgtatatacttttggacgcccacgagcgacttcttgagagcatcgaaggagctggagtacaacatcttcttcttgacctgtgggtgtgtgatatcgaaatgagttctgcgccattacttggcaactggctattcacataccttggcagtatcgggacaccacgacataaggaacagcttttgcttctttgaactctcagaggtgccttgacactggtgcatgtactcgaaatcgaacagtccgtacctgtgcaagcgaatagatgttaaattaggttagtttcgatgggtctgggtgtctctaaccggcggaacttaccggcactctccaggtccgcatttctggatatcttctagaaactggtcgtactcggcgttgcgatctgccacagtctccacatcaatctgcttttcatcgcgaatgtaaaagatgacatagcgatgctttttgtccttctttatttcctcgtatgtagtcttgcagacatcagacacagttacaccagaagcctttagagagagagaaggtagagatgcaaatcagagaatgtattttgaatgttcaatgcgcgccaaactgtcaaccaagtgtgtgtgcatgtatgtgatacagggtgctctctttgcgtttccccaagtattcccttaaaacaaatgttcatgaag

SEQ ID NO: 5858 - DNA, 6207 bp, DROSOPHILA
caaagcaaaataaaatgcaccgcgcttgaattatccattttatggacagaaaaaaccttcacacacgaacagagaaaaatggatcgcgggaaaggaagcggctccaaccgatcgcagaagaaggttccgctgggcggagaactctttgcgctcggcaagagcgtacgcgatgactccaagtcgaagatcctgcccattaagggcatgtcgtcgtcggaccgcaagcgtgaagcctccaccgcactggccagctcgagcaagcggttccgcggcaacctgaaggacgcgggcgccccggacatgtcctccggtagtagtcagtgcgagacgtgggagcaattcgccgttgactgcgatctggataccgtggtcgagaccatatacgcggctttggagcagaacgacagcgaaactgtgggccggcttgtatgcggcgttataaagcagacaacgacgagctcctcgcgctccaaggtggacaacattgcccttctggccctgatctacgtggccaaggtacagccgagtatattctgcacagacatagtggcctgcgcgctgctttccttcctgcggcgggaggccaacgtgaaaatgaggtacaacaccaacctgcacattctgttcgccaatctgctgacccggggcttcatggagatttcccagtggccggaggtgctgctccgcatttacatagacgatgcggttaacgagcgctactgggcggacaatgaactgtgtgccccgctcgtgaagaacatatgcgcagcctttaaaacccgcacgccccacatcagtctcctccgctgggatgtgagctcgtccctgccttctggtcaagcacacagagacagcatgactgtggacgacgattccggggacaattccacacagagcttggatgcaagtcccttaaataccgaatcggaaccaattcccgacgctatgtgcaccactaaatcaagattcagcgatgctgtggtgcagaagcatgtcagcgatgccattcgcgatcagctcaacaagcgacagcagcaggataactacaccagaaacttcctaaagttcctgtgcaccacttctggcattgcagaggtacgatgtctgagcatttcccgcctggagctgtggatccacaacggaaaactggtcaagttcgcccagcaattgctctcgtacatctgcttcaacatcaagggacgcaacacacaggacaacgaagtgctcttggtgctggtgaagatgcggctcaagacgaagcccctaataaaccactacatgtcctgcttgaaggagatgatttttctgcagccggaaatcttgagtaccgtaatgaaactggtcgtgcaaaatgagctatccaacaccaggaatccaaacaatatggggatgctggccacaatgtttcaaacatctgctgatcaatcagctgccactctggctgagatttaccaggaattcttgcttcagcgggacgattgcctgcgcaccctgcgcgttttcttacgggagcttgtgcggatgctgcgcttcgatgtgaacctggtcaagttttgcaagacgtttctcagtgagcgggaggatctgactcctcaaatcgaaatgttcgagtttaaggagcgaattttcaactccatggtggacattgtgtgtctctgcatgtttctgtcggccacgccacaagctagggaagccagtttgtccctgaaaaccaatcgggacaccaaaaacaaccatgctctgctcaagctgtacaatcagatgtcacagattcagttggacacagtgtcctggatgtacgaaacagtacccacgctcttcaagattccggctgcggagtaccaccaggcgctgcacaagctgctactgctggacagtccggagcagtattcgcgctgcgatcagtggccgtcagagccggagcgaggagcaatcctgcggattatctctgagacgccgattcacgaggagaccctgctgcgaattatattgattggcatcaccaaggatattcctttctctatcgcaaacacctttgatgtcctgctgctggtcataaagcgagtttccgggatgaaggctaccaatattccggcggtgcaggccaacaaattcgacatcatcgacttcctgttcagcatgtcagagtaccatcatccggagaacattcgcttgcctgcggagtacgagccaccaaagctggccatcatcgccttctactggaaggcgtggctcatattgcttatgatatccgcacacaacccctcctcgtttggagccttctgctgggaccactatcccacaatgaagatgatgatggagatttgtataacgaatcaattcaacaattcatcagccaccaaggatgagttgcagttcgagacgtacttggctgcccaaacatcgccgcatgctgttatcactgaggaaactgcgattctaatcactcagctcatgctgatggacccgatgggcactccgcgcaaagtgccctccatggtcctagatcagctaaagttccttaatcagacctacaagcttggccacttattctgccgctgccgcaagccggacttgctgctggacataattcaaaggcagggcaccacgcaatccatgccctggctttccgacttggttcagaacagcgagggcgatttcagccatctcccagtgcaatgcctgtgcgagtttctgctgttcaacgcgcacatcatcaacgaggagaatagccgcgatgccgagttagtcaatttcctgagaaacctgatatttgacggcaatcttagccaccaaatcgtttgcgagcttttggactacatatttagacgcttgtcgtccacggtgaagcaatcgcgagtcgccgctctttcgggtctgaagataatcttcaggcactctggcgactttgaaaacgaatggctcctgaagtcgctccagcaaattccgcacttctacgaggtgaaacccttcataattccccagctgcgagctgcctgccaggtggagaattgcccggaactgattatggcgtacattcagttcatcactgcgcacacgctcaacgatccggtcaacgaaatgctggatcatgtcatcgatatggcgcagctgattgtagagcgcagcacaatgtttcagcacattatcatttcgcaggaggactacgactatgtgcccgacgagaaccgcattcagactctgaagtgtcttttcgtcatgttcaacaactatataattaagctaagggaataccacgaaccgtacgagtggaccgagtatccggacctgctgatggttcagtttgacgatggagtacagctaccgctccacataaacatcattcacgccttcattatcctgctcacctattccaacagcaacatgcccgaatcgatacccattttggactattggtttccgcccggacgaccagcgcccgtcgcctttctgcccagcatgccgcaggagcaggtgcaactgctgcccgactggctgaagctgaagatgatccgctcatcggtggacagactaattgaggcagctctcaacgatctaacgccggatcagatcgtgctctttgtgcaaaactttggcacgccggtcaactcgatgtccaagctgctggcaatgctggacaccgctgtactggagcagtttgatctggtgaagaatgccattctgaacaaggcctatctggcccagctaatcgagattcagcaggcgcggggtgctaagaatgggcactacaccgtacaggccttggatctgcattcccactcgcagactgtgccagatctgcccaagatcagtgtggttattcaggaggccgttgaaattgatgattacgattcttcagactcggatgatagacccactaacttcctggccaccaaggaggtagcccaaaccattctcacgcagcccgaccagttgactgagtcgcgaagtgactgccgatccttgattcaaaaactgttggacatgctagcaagcccgaacagcaatagagcggatgtggttaacgccataacagaggtgctagccgtgggttgcagtgtcacgatgagccgtcacgcctgcacatttttaaggactttcttcagctgcatgctgcacagcgacaagtatcacatactggagaacgctctccaaaagaacttaagtatgtttaagcacacattcgccgactccagtctgctgcagaaatccgaactctatcatgagagcttggtgttcatgctgagaaactctcgcgagatttatgcgcagcagtttaaggcgaataccgccttggtggcacgaaaacggatcgtccgggcgatcgtccaaagcttcgatcagaccaaggacagcaagaccgtcgccaagtccaagagcgaccagctcttccacaacgggctcttcatcgactggctgtccgaaatggatcccgagatagtttccactcagctaatgaaggagcgctttctgttctcaaagtcctgcagcgagtttaggttctatctgttgtccctgatcaaccaccaaaccaactgggacacgatcgaaaggattgccgagtacctgttcaagaatttccatgaagactacgactacgccaccgtcctcaactacttcgaggcactgaccaccaatccgaagctgtggaagggacgcgacaagtacatgtcgaagaacgtacggccggatgccttcttcatgctgaggacttctgaactggagccgttctcccacttcatccttcacgaagggctttccgaggtcaagctggacagcaaaaactatgatttcaagctctgctcgcgaatgaacctactgtttaagctcacagagaagcgacgagacctcatggtcaaggtaatggagcacgtggagaaaagttcggtgtccgactacttgaaactgcaggtcctccagcagatgtacatcatgtatccgcgcatcaagtttctgaaaccgggcaaaaccggcgagcaggcgtacaaattgcagaatctgaagggctgccaggcggacaaggtgtccaacaatctgatcacctgcttgggcagtctggtgggcaaaaaggactttgaaaccctgtccacggacaccgagctgctccttcgcaagctggctgcctcccacccgcttctcttccttcgccagctgggcgtgctgtcgtccattatgcaaggtcgggcccagctcagcatgaaggccctgcgcgaggagcaccacttccaccgatttgtacagatcctgaggacgctggagctgctgcaaccaaccatctttgaggaggcgtacaagaacgagatccaaaacacgctgtcgtgctacttcaacttcttcaagcaccacagcaacgtaaaagaggcctgccaaatgctgaacaagtttgtgcagatgctccaagcctacatcaactacaatccctcaagtgctctgctcttcatcgaacagtacgtgggcatcctgaaggaacttgcagccaagtacacctcactaggcaaactgcaggttttggtccaggccgttgccctgctgcagcacaagtcgcactcggcgacggaattggacgacgaggaagttaagtacgagtacgatctggatgagcatttcgatgtaaagccatcggccagcaagcccgtggtaacagaggatcccatcgaagtgaatccgcaaacacccatcgatccaagcagcagtaggggtcccttatcggttctaaccttgggctcgtacagccggtcgaactacacggacatatcgccgcacttcctcgatctggtcaagatcataaagcagtccaacacggaggacgtggtcttgggtcccatgcaggagctggagtgcctcacttccaagagatttgtgttcatcaacgagctgttcgaacgactgctcaaccttatattctcgccgagtgcccagatccggtccatcgccttcatcatactgatcaggcatctgaagcacaatcccggcaattcggacatcaacctgtgcacccttaacgcctacattcagtgcctgcgggacgagaactcctcggtggcagcgacggccattgacaatctgccggagatgtcggtgctgctgcaggaacacgcaatcgacatcctaacggtggccttctcgctgggcttgaagtcgtgcctgaacactggccaccagattagaaaggttctccagactctagtgatccagcatggctattaa

SEQ ID NO: 5859 - protein, 2042 aa, DROSOPHILA
MDRGKGSGSNRSQKKVPLGGELFALGKSVRDDSKSKILPIKGMSSSDRKREASTALASSSKRFRGNLKDAGAPDMSSGSSQCETWEQFAVDCDLDTVVETIYAALEQNDSETVGRLVCGVIKQTTTSSSRSKVDNIALLALIYVAKVQPSIFCTDIVACALLSFLRREANVKMRYNTNLHILFANLLTRGFMEISQWPEVLLRIYIDDAVNERYWADNELCAPLVKNICAAFKTRTPHISLLRWDVSSSLPSGQAHRDSMTVDDDSGDNSTQSLDASPLNTESEPIPDAMCTTKSRFSDAVVQKHVSDAIRDQLNKRQQQDNYTRNFLKFLCTTSGIAEVRCLSISRLELWIHNGKLVKFAQQLLSYICFNIKGRNTQDNEVLLVLVKMRLKTKPLINHYMSCLKEMIFLQPEILSTVMKLVVQNELSNTRNPNNMGMLATMFQTSADQSAATLAEIYQEFLLQRDDCLRTLRVFLRELVRMLRFDVNLVKFCKTFLSEREDLTPQIEMFEFKERIFNSMVDIVCLCMFLSATPQAREASLSLKTNRDTKNNHALLKLYNQMSQIQLDTVSWMYETVPTLFKIPAAEYHQALHKLLLLDSPEQYSRCDQWPSEPERGAILRIISETPIHEETLLRIILIGITKDIPFSIANTFDVLLLVIKRVSGMKATNIPAVQANKFDIIDFLFSMSEYHHPENIRLPAEYEPPKLAIIAFYWKAWLILLMISAHNPSSFGAFCWDHYPTMKMMMEICITNQFNNSSATKDELQFETYLAAQTSPHAVITEETAILITQLMLMDPMGTPRKVPSMVLDQLKFLNQTYKLGHLFCRCRKPDLLLDIIQRQGTTQSMPWLSDLVQNSEGDFSHLPVQCLCEFLLFNAHIINEENSRDAELVNFLRNLIFDGNLSHQIVCELLDYIFRRLSSTVKQSRVAALSGLKIIFRHSGDFENEWLLKSLQQIPHFYEVKPFIIPQLRAACQVENCPELIMAYIQFITAHTLNDPVNEMLDHVIDMAQLIVERSTMFQHIIISQEDYDYVPDENRIQTLKCLFVMFNNYIIKLREYHEPYEWTEYPDLLMVQFDDGVQLPLHINIIHAFIILLTYSNSNMPESIPILDYWFPPGRPAPVAFLPSMPQEQVQLLPDWLKLKMIRSSVDRLIEAALNDLTPDQIVLFVQNFGTPVNSMSKLLAMLDTAVLEQFDLVKNAILNKAYLAQLIEIQQARGAKNGHYTVQALDLHSHSQTVPDLPKISVVIQEAVEIDDYDSSDSDDRPTNFLATKEVAQTILTQPDQLTESRSDCRSLIQKLLDMLASPNSNRADVVNAITEVLAVGCSVTMSRHACTFLRTFFSCMLHSDKYHILENALQKNLSMFKHTFADSSLLQKSELYHESLVFMLRNSREIYAQQFKANTALVARKRIVRAIVQSFDQTKDSKTVAKSKSDQLFHNGLFIDWLSEMDPEIVSTQLMKERFLFSKSCSEFRFYLLSLINHQTNWDTIERIAEYLFKNFHEDYDYATVLNYFEALTTNPKLWKGRDKYMSKNVRPDAFFMLRTSELEPFSHFILHEGLSEVKLDSKNYDFKLCSRMNLLFKLTEKRRDLMVKVMEHVEKSSVSDYLKLQVLQQMYIMYPRIKFLKPGKTGEQAYKLQNLKGCQADKVSNNLITCLGSLVGKKDFETLSTDTELLLRKLAASHPLLFLRQLGVLSSIMQGRAQLSMKALREEHHFHRFVQILRTLELLQPTIFEEAYKNEIQNTLSCYFNFFKHHSNVKEACQMLNKFVQMLQAYINYNPSSALLFIEQYVGILKELAAKYTSLGKLQVLVQAVALLQHKSHSATELDDEEVKYEYDLDEHFDVKPSASKPVVTEDPIEVNPQTPIDPSSSRGPLSVLTLGSYSRSNYTDISPHFLDLVKIIKQSNTEDVVLGPMQELECLTSKRFVFINELFERLLNLIFSPSAQIRSIAFIILIRHLKHNPGNSDINLCTLNAYIQCLRDENSSVAATAIDNLPEMSVLLQEHAIDILTVAFSLGLKSCLNTGHQIRKVLQTLVIQHGY

SEQ ID NO: 5860 - DNA, 2958 bp, DROSOPHILA
atggataaataagaaaatcatcgagtatatcggtgagccggagccgacgctagtggactttatatgttccaaagtgttggccggcagcccgcctcaaagcatcttggatgatgtgcaaatggtgagtagtttgaagcgatacgatacgatacgataaccactaccattctatgaactaatccaaactctatccctctcgctctgtttcaatgtttcaaatcttcaggtactcgacgaggaagccgaggtctttgtggtgaagatgtggcgtctgctcatttacgaactggacgccaagaagagcggccttgcggggaagtagtaaggagatgggagagatgcccgtcgtgcgcatcactggggaactgggcgggagcaggtgcggatccgaggtatcgatggaggagcaacagcgtgaagttagattctaagttactcttacggaacctatgcgattacaaaaatgtacataaggggcgtgctccgggaattgttgcggccaaatgtccagctttgttttctaagcatccgtcgcgtgcaagggatttacaagaaattgatgaatagcgagcgagccaatcgtgaagaacagcttcattgatttctaaatccaccttgttagcgttaattaataaatattaatcatcgataattgtaaatataaaccgaactcacttataaatttacaccaccagatgcaatagaaataaaaaaaatcgcatagcccatgtacatttcagttggtcactaatccaattctccactttatttgttgcgtttgtgaacgcaaatggaaaactatcatcatgtcaataaaataatgaaaagaaaatgctgaacttgacttttgactggtcgcagacgaaatgcaagcagatggacaataagccgtacaggaatattagaaggatagaatttaaaaaggattctgactgatctgcaaaccctgcaagctaagtgaatcgatagccctgctcagattggagtacacgattgaacgttaaggttgattgactttatgctagtgatattgaaacgattaaataaatacacgatataaatttgacaaaagcacgcataacattcgaaatcaacagtaacacgtagacgcgcttgcctccagatcccgatcgctggcgatgtccagaccggcggaggcattgccattgttgaagtattcggaggagacgatctgcaaagcggatgtggataattggaaacacgaatgccaagtatttggttggtagctagctcaccttctccaccacatctttgaacacatcgctgacgaactgatcgcatttggctgaggtctcgatgaagagcgccctgtgcttcctggcaaactttcgaccctcctcgcgatccacaactcgctcctcgtcgatcttgttgcctaccacaatgatggcaatgttgggattgtcgctgtagctatccagttcagccagccaggtttccagcttgaccaggctgtccctgctggtgatgtcgtacactagaatggcgcccagagccttccgatagaaactgggcgtcaggctgcggaatctctcggcgcccgccgtatcccacagggccaccttgtagtctatgccgtccacctgcatcactttgctcttgaagtccatgccaatcgtgacgtcatggttctggtcgaacttgttctccacgaagcgacgtatcaaactatgatgaaatgataatgaaagttgatgagtgatgcaagcttttggtaatatacgcagtggaattgctccatggacttgggactgcacctggacttgcccacgccgctttccccgatcaccagcagcttgatagcccgatcagccattgtgtggtttgagctccgcttaatgcttatcactactgttatttacttaaaacgataagaatattgccaattgtattatttatgtagattatctggagtaagtgagtgcggcgttgccaccttgctgctttgtttacattctcacgatagagatggaccactgtaacagcagccttgccagaccgccacttcgatctagtggtgacctgtggccgtaatctggctacttttttgcacacacatttagcttcttaaaataatttaattccacccttttaacaaaaccgatcgggtcttgacttaggaggactaactatatttaaaaaaataattctgttgttactaccataataaacgcgcaatgaaaactaaaacacgttaagcagatcaaattttgttgccacataggtaacagtgcgttccttatattgttgtataaaaattaattaaaaaaaaaaaattaattataaaaaataattataaaatatcataaatttaggattccttctgcgctcaaaatagttggtgttataattattttatataaacgtttaaattatataagaaataattttcctcgaaaaataattccgaaacgcgtaatgtcttaattttatagctctctaaaatggtattatttagcttttcattggcattagcaaaataaaaaagtaaatattgtgattgaatatttttgcaatcgtagtaatttgatttatctattttaatgacggactcggaaccggttcgatatcagcgttgccactggttcgacgctcgaagttacaatagtgccaccaccaactagttctttcctccaagtcccatctttcttttttgacgtgaccagcgagaaaaatggttggtattttgtgagcgaaaagatttctaacctattttacaacgaaacgaacaattaaaagccaaagtaatggctaaaacgcgccccaaattactgccgttcatggtgttaacacaaaatgcgattaataatgcagtaccacgctagttgagacgcgcaacgctagcacactattttgtgctcacccctagcacctctgcttcttcttctttccttttcttttcgccgcgtttccggagaggttgcgttaagccacgtg

SEQ ID NO: 5861 - DNA, 805 bp, DROSOPHILA
ggtggcaacgccgcactcacttactccagataatctacataaataatacaattggcaatattcttatcgttttaagtaaataacagtagtgataagcattaagcggagctcaaaccacacaatggctgatcgggctatcaagctgctggtgatcggggaaagcggcgtgggcaagtccagtttgatacgtcgcttcgtggagaacaagttcgaccagaaccatgacgtcacgattggcatggacttcaagagcaaagtgatgcaggtggacggcatagactacaaggtggccctgtgggatacggcgggcgccgagagattccgcagcctgacgcccagtttctatcggaaggctctgggcgccattctagtgtacgacatcaccagcagggacagcctggtcaagctggaaacctggctggctgaactggatagctacagcgacaatcccaacattgccatcattgtggtaggcaacaagatcgacgaggagcgagttgtggatcgcgaggagggtcgaaagtttgccaggaagcacagggcgctcttcatcgagacctcagccaaatgcgatcagttcgtcagcgatgtgttcaaagatgtggtggagaagatcgtctcctccgaatacttcaacaatggcaatgcctccgccggtctggacatcgccagcgatcgggatctggaggcaagcgcgtctacgtgttactgttgatttcgaatgttatgcgtgcttttgtcaaatttatatcgtgtatttatttaatcgtttcaatatcactagcataaagtcaatcaaccttaa

SEQ ID NO: 5862 - protein, 197 aa, DROSOPHILA
MADRAIKLLVIGESGVGKSSLIRRFVENKFDQNHDVTIGMDFKSKVMQVDGIDYKVALWDTAGAERFRSLTPSFYRKALGAILVYDITSRDSLVKLETWLAELDSYSDNPNIAIIVVGNKIDEERVVDREEGRKFARKHRALFIETSAKCDQFVSDVFKDVVEKIVSSEYFNNGNASAGLDIASDRDLEASASTCYC

SEQ ID NO: 5863 - DNA, 4904 bp, DROSOPHILA
tggataagtttcttgggatagcggtccgccaggcgctccatgataaaggagcccattcccgatcccgttccgccagcaatcgaatggcaaagtataaagccctccaacgaatcgcttccatctgcctcacggtcaatgatgtcgaatacctcttcttgcagcttttcgccctggctatagcctgaggcccagttgttgcccgcaccgcctccgtgcttggataggtacacattttccggattgtagagctacgggagttaatagtaggtttggcgcaaaaaattaaaagttatttagagaggactcaccttggagtagaccgagcccattatggtattgatcaccctcggttccaagtccaagagcaccgcgcggggtatgtagtggtcgtcgtccgcctggtagaagaacacatccttgcggtccaagccatcattggcaaagtcctccagcacgccgctaggggagatgccatgctccaggcacaatcttttccagaactcaaagccaactgcgtttaaacgattttagcaatgcagatggtactcgtcctgatttcagaaacctactttgattgccgcactgcccaagctgcaaagtaattatttcacttggcattgtggtgtgttgtttccggccagaatcgtcaagtgaagtttcgcgtttaaggtcgaattagtcgaaataaaataaaacacaactaaaagatcgtcgaattataacaaaatttttaaaaaatcccacagcggggacgtactttgtaattttaagaaagtccagtgttgataacaccgcagcgtttaatggcgtcctcatttgaaaggtggcgcagtgtgccctctgttataaaatatatatgattacttaagacctttattgtgaattaaataaataaaaataaacattacatttttctactttgtattttggaaaggcaaaaaagtgttggaaatctaagactatgagttagaaagatcgaaacatgtcatgaatatcaatctaatagttcaatactaagcttaacttgaatataattttctataagaaagtttttcaattaggttattgagctccacccattttgtactactaatgacgtcgaactatttgtactactagtgacgtcacaatgtgcaatatttgctccacagtcgtgtttttccaaggaaggcacacaaatagtgttgtaagcagaccaaagtcaagccgaccggcttgcaaaaatcgcgttgcccgcgcagttttctttttgttgatatcgggtgctgaaccaagcgacagtggctctgcaaaacaagcaaaagaaaaagctggaaatctgtggaagtaaatacaagtcatttttgagaacctatcagtccgagcagtagaactccataatgccgcgtgtcaaggccgtgaaaaaacaagcagaggcgttggcatctgaacccactgaccccactccaaatgccaatgggaatggagtcgacgaaaacgcagactctgccgctgaggaactcaaggtgccggcaaaaggaaagccgcgcgcgaggaaagccaccaagacggctgtatctgcggaaaactccgaggaagtcgagccacaaaaggcgcccactgcagccgcgcgtggcaagaagaagcagccgaaggatacagacgaaaacggccagatggaggtggtggccaagccgaagggacgcgccaagaaggcaactgcagaagcagaaccagaacccaaagtcgatctaccagctggaaaggcaactaagccacgtgccaaaaaagagcccactcctgctcctgacgaagtgacgtcttcaccgcctaagggacgcgctaaggctgagaaaccaacgaatgcccaggccaaaggacggaagcgaaaggagctgccggcagaagcaaatggaggggccgaggaagcagcagagccgccgaaacaacgggcaagaaaggaagcagtaccaacgttaaaggagcaagctgaaccagggacaataagcaaagagaaggtgcagaaagctgagacagctgccaagcgggcacgcggaaccaagcgtttggcagattctgagatcgcagctgctctcgatgagccggaagtggatgaggtgccgccaaaggctgctagcaagcgagcaaagaagggaaagatggttgagccatcgcccgagactgtaggagattttcaatcagtacaagaagaagtggaatcgcctccaaaaactgcagctgcacccaagaaacgcgccaagaaaacaaccaatggtgagactgcggtagaacttgagccaaagaccaaggcaaagcccactaaacagcgcgctaagaaggaaggcaaggagccagcacccgggaagaagcagaagaaatccgccgataaggaaaacggtgtagttgaagaagaagccaagccctctactgaaaccaagccaggtgggaaactgtcaaatcaatgtaaatgatgaaaccatgattaactatctttaatccgcagctaaaggacggaaaaaggctccagtcaaggcagaggatgtcgaagatattgaggaggcagcagaggaaagtaaaccaggtgggcacattgtcaacaataactttaatatcaatgccacgctaatcatattctatttgcagctcgaggccgaaaaaaggcggctgcgaaggctgaagaacccgatgtcgatgaggagagtggatcgaaaagtatgttagcggagcaatccggctgcggtggagctgccgtattaaaaagcttgcaaaccatgctcaacttttgttttccagccaccaaaaaagccaagaaggccgagaccaaaaccactgtaacattggataaagacgcttttgccttgccagcagacaaagaattcaacttgaaaatctgcagctggaacgtggccggtctgagggcctggttgaaaaaggatggtctgcagttgattgacctcgaggaaccagacattttctgcctgcaggttagctatcaaagctatccacacaaaattgaaaaacactaataattccatatattttaaaggaaaccaagtgcgcaaacgatcagttgccagaggaggtgacccgactgccgggatatcatccctattggctgtgcatgccaggaggctatgccggcgtcgctatttacagcaagataatgcccatacacgtggaatacggcattggcaatgaggagttcgacgatgtcgggcgcatgattacggctgagtacgaaaagttttacttgatcaatgtgtacgtgccgaattcaggccgaaagctggttaacttggagccccgcatgcgctgggaaaagctcttccaggcgtacgtgaagaaactggacgctctaaaaccggtggtcatctgcggcgacatgaacgtttcccatatgcccattgatctggaaaacccgaagaataacaccaagaatgccggcttcacccaggaggagcgtgacaaaatgacagagctgctgggcctcggctttgtggacacgtttaggcatttatatcccgatcgcaagggcgcctacaccttctggacatacatggccaatgcgcgagcacgcaacgttggatggcgtctggactattgtctcgtctcggagagattcgtgcccaaggtggtggagcacgagatacgcagccaatgccttggaagcgaccactgcccgatcacaatattcttcaatatataagatgtacacttcgtttgtgtttaaatgtacttctggattcgtcattattactttgtttcctctccatatatggtttttattgtatttgattatccatcgctgtagaaattgtacgtccctatctaatcatttcaaaatgccattactctattacattctgtcatagatccaccatcaaaattcgtatttttttaataaagtgagctactgccccacgttcgaactttgtgctcaaattattggccaaaaacggttggatttaaatttttaaaaatcgctagaggtgatataaccggtcgacatcgataaatgtaatcgcttgcctatcgggtcgaaccgaagcaataactaattcccgccaattttcgagcagaactcgatttattttgcgggaaatatatacatacattatttttgcgaaatggttttaacaccaacgaaagatgggcccgaccaggagagcatgccgttgccggccgacaatggggagtcaccaagtaaacagcaggcccctgtcaatcgggatgagatgcactacttggatcttctgaggcacatcatcgcaaatggagagcagcggatggaccgcacggaggtgggcactctgtccgtgttcggcagtcagatgcgcttcgacatgcggaactcctttcctttgctgaccacgaagcgcgtcttcttccgcgcggtggccgaggagctgctgtggttcgtggcgggcaagacggacgccaagctgctgcaggcgaagaatgtgcacatctgggatgggaacagctccagagaatttctggacaagatggggttcacggggcgagccgttggggatctggggccggtgtacggcttccaatggaggcatttcggggcgcagtacggcacctgcgacgacgactacagcggcaaggggatcgaccagctgcgccaggtgatcgacaccatcaggaataacccctcagaccgtcgcatcatcatgtcggcttggaatccactggacatcccaaagatggccctgccgccgtgccactgcttggcgcagttttacgtctccgagaagcgcggtgagctttcgtgccagctataccagagaagcgcagacatgggcctgggcgtacccttcaacatcgcctcctatgccctgctcacccacatgattgcccatgtgacgggtctgaagccgggcgactttgttcacaccatgggcgacacacacgtctac

SEQ ID NO: 5864 - DNA, 2638 bp, DROSOPHILA
taatagttcaatactaagcttaacttgaatataattttctataagaaagtttttcaattaggttattgagctccacccattttgtactactaatgacgtcgaactatttgtactactagtgacgtcacaatgtgcaatatttgctccacagtcgtgtttttccaaggaaggcacacaaatagtgttgtaagcagaccaaagtcaagccgaccggcttgcaaaaatcgcgttgcccgcgcagttttctttttgttgatatcgggtgctgaaccaagcgacagtggctctgcaaaacaagcaaaagaaaaagctggaaatctgtggaagtaaatacaagtcatttttgagaacctatcagtccgagcagtagaactccataatgccgcgtgtcaaggccgtgaaaaaacaagcagaggcgttggcatctgaacccactgaccccactccaaatgccaatgggaatggagtcgacgaaaacgcagactctgccgctgaggaactcaaggtgccggcaaaaggaaagccgcgcgcgaggaaagccaccaagacggctgtatctgcggaaaactccgaggaagtcgagccacaaaaggcgcccactgcagccgcgcgtggcaagaagaagcagccgaaggatacagacgaaaacggccagatggaggtggtggccaagccgaagggacgcgccaagaaggcaactgcagaagcagaaccagaacccaaagtcgatctaccagctggaaaggcaactaagccacgtgccaaaaaagagcccactcctgctcctgacgaagtgacgtcttcaccgcctaagggacgcgctaaggctgagaaaccaacgaatgcccaggccaaaggacggaagcgaaaggagctgccggcagaagcaaatggaggggccgaggaagcagcagagccgccgaaacaacgggcaagaaaggaagcagtaccaacgttaaaggagcaagctgaaccagggacaataagcaaagagaaggtgcagaaagctgagacagctgccaagcgggcacgcggaaccaagcgtttggcagattctgagatcgcagctgctctcgatgagccggaagtggatgaggtgccgccaaaggctgctagcaagcgagcaaagaagggaaagatggttgagccatcgcccgagactgtaggagattttcaatcagtacaagaagaagtggaatcgcctccaaaaactgcagctgcacccaagaaacgcgccaagaaaacaaccaatggtgagactgcggtagaacttgagccaaagaccaaggcaaagcccactaaacagcgcgctaagaaggaaggcaaggagccagcacccgggaagaagcagaagaaatccgccgataaggaaaacggtgtagttgaagaagaagccaagccctctactgaaaccaagccagctaaaggacggaaaaaggctccagtcaaggcagaggatgtcgaagatattgaggaggcagcagaggaaagtaaaccagctcgaggccgaaaaaaggcggctgcgaaggctgaagaacccgatgtcgatgaggagagtggatcgaaaaccaccaaaaaagccaagaaggccgagaccaaaaccactgtaacattggataaagacgcttttgccttgccagcagacaaagaattcaacttgaaaatctgcagctggaacgtggccggtctgagggcctggttgaaaaaggatggtctgcagttgattgacctcgaggaaccagacattttctgcctgcaggaaaccaagtgcgcaaacgatcagttgccagaggaggtgacccgactgccgggatatcatccctattggctgtgcatgccaggaggctatgccggcgtcgctatttacagcaagataatgcccatacacgtggaatacggcattggcaatgaggagttcgacgatgtcgggcgcatgattacggctgagtacgaaaagttttacttgatcaatgtgtacgtgccgaattcaggccgaaagctggttaacttggagccccgcatgcgctgggaaaagctcttccaggcgtacgtgaagaaactggacgctctaaaaccggtggtcatctgcggcgacatgaacgtttcccatatgcccattgatctggaaaacccgaagaataacaccaagaatgccggcttcacccaggaggagcgtgacaaaatgacagagctgctgggcctcggctttgtggacacgtttaggcatttatatcccgatcgcaagggcgcctacaccttctggacatacatggccaatgcgcgagcacgcaacgttggatggcgtctggactattgtctcgtctcggagagattcgtgcccaaggtggtggagcacgagatacgcagccaatgccttggaagcgaccactgcccgatcacaatattcttcaatatataagatgtacacttcgtttgtgtttaaatgtacttctggattcgtcattattactttgtttcctctccatatatggtttttattgtatttgattatccatcgctgtagaaattgtacgtccctatctaatcatttcaaaatgccattactctattacattctgtcatagatccaccatcaaaattcgtatttttttaataaagtgagctactgccccacgtt

SEQ ID NO: 5865 - protein, 679 aa, DROSOPHILA
MPRVKAVKKQAEALASEPTDPTPNANGNGVDENADSAAEELKVPAKGKPRARKATKTAVSAENSEEVEPQKAPTAAARGKKKQPKDTDENGQMEVVAKPKGRAKKATAEAEPEPKVDLPAGKATKPRAKKEPTPAPDEVTSSPPKGRAKAEKPTNAQAKGRKRKELPAEANGGAEEAAEPPKQRARKEAVPTLKEQAEPGTISKEKVQKAETAAKRARGTKRLADSEIAAALDEPEVDEVPPKAASKRAKKGKMVEPSPETVGDFQSVQEEVESPPKTAAAPKKRAKKTTNGETAVELEPKTKAKPTKQRAKKEGKEPAPGKKQKKSADKENGVVEEEAKPSTETKPAKGRKKAPVKAEDVEDIEEAAEESKPARGRKKAAAKAEEPDVDEESGSKTTKKAKKAETKTTVTLDKDAFALPADKEFNLKICSWNVAGLRAWLKKDGLQLIDLEEPDIFCLQETKCANDQLPEEVTRLPGYHPYWLCMPGGYAGVAIYSKIMPIHVEYGIGNEEFDDVGRMITAEYEKFYLINVYVPNSGRKLVNLEPRMRWEKLFQAYVKKLDALKPVVICGDMNVSHMPIDLENPKNNTKNAGFTQEERDKMTELLGLGFVDTFRHLYPDRKGAYTFWTYMANARARNVGWRLDYCLVSERFVPKVVEHEIRSQCLGSDHCPITIFFNI

SEQ ID NO: 5866 - DNA, 6020 bp, DROSOPHILA
agtattcgtagattgaggattttccacggtacaccgacatacaagtgatgatgccgctgtaaggaacacatttttgtatcacacagatacagatttgaattcgtgttgctgaacttacaagtaggatgtggtaaaaagtcccactcgccagccccatttgaagccgcctttggcaaagttgactgtgaattgatcttgcagctttttctgtaattatgattaaaaacttgattataacatatttaaatgataatacgtagatacctaccttggcatcaaagtgcgatttaaatgctgtggcctggttgttctccatgaaattcatgtaggccacgcgcgattgtgtaactccgccgtaaatagctccaataaggaatcctaggaagccggcctggtaaaccgagttaagctcggaggatatgctgccaaactcgctatttaaatgtttatgtacggtcagtagattttagtataaatggaattcttagttttcctactcgattgtaaacatttgcttgaggcgctccagtcctgtttcctctggtggtttactggccagaaaggccttgtatgttttgttttccttatcgactatttcatctgcggcgccttcgaatgttggcaggatgcctgcgatcagaaaccggcgtcctttccacagaaaattcattttttaagcgtgttaaataaccaagtaaaacgagtacaacaatctcagctgtttgccggtctgttagtgttggaaagtgtgcgtgtcattggtgttggcaaactctcggtttaattgtttttaatttaaatgcgtttgttattaataaaattatattattataataatttaagttacatactcatttagttgttcatatatttttttcttatatcattcacacttttaaatttattttgttgccaaaaacaattttattgtgtttacaagtatttgctataactttatgaactgcaccttgtgctttgcttttgccgtttaccaacacagcacaacgccgctaatcgcgttgtcggcaaacatttgttgtgaaattttctacgtttttacaatttaattcattgcaaatccaatttattgttatttacttgaacgcataaagtgcttctgcactttagaaaactgaaatcatgatgtacgacaacgaggaaggtgagtaaaatgaattgcgaaaatttgtgcatgcacgttggcgtgtaccaaaattaatatggcggctggagcgctagggctccgcattgttagcaatgaatttcaatggtcaaataacatcttgcagaactgtacgaggaggagaatgccgaggagatctctcacgagctgtggcaggaagcctgctggatcgtgattaacgcgtacttcgacgagaagggcttggtgcggcagcagctggacagtttcgatgagttcattcagatgtcggtgcagcgcattgtggaggattcccccgccattgagttgcaggcggaagcgcagcacacatccggagaggtggaaaccccgcccagattctcgctgaaattcgagcaaatctatctttccaagccaacacattgggaaaaggatggttcgcccagtcctatgatgccgaacgaggcccgcctgcgaaatctaacttactccgctcctctctacgtggacattacgaaaaccaagaatgtcgagggcctggatcccgtggaaacgcagcatcaaaagactttcataggcaagattcccatcatgttgagatcaacgtactgtttgctatcacagcttactgatcgtgatcttacggagctgaacgagtgcccgttggatcccggtggctacttcatcatcaacggctccgagaaggtgctaattgcccaagagaaaatggccaccaacacagtgtacgtgttcagcatgaaagatggcaagtatgcctttaagactgagattcggtcgtgtttggagcacagttccagacccacgtctacactgtgggtaaacatgatggcaagaggatcgcaaaacataaaaaagtcagccattggtcagaggattattgccatcttaccgtacatcaaacaggagatacccattatgattgtgtttcgagcattgggcttcgtggccgatcgcgatattctggagcatatcatctatgacttcgacgatcccgagatgatggaaatggtgaaaccttctctggacgaggcttttgtagtccaagagcagaatgttgccttgaatttcattggagctagaggagcacgtcccggagtcacaaaagacaagcgtataaagtacgctaaggaaattttgcaaaaggaaatgctgccccacgttggagtatccgatttctgcgagaccaagaaggcatactttttgggctacatggttcaccggctgctcttagcctctttgggcaggagagaactcgatgatcgagatcactatggaaacaagcgacttgatctcgctggacccctcctggccttcctcttccgtggtctgttcaaaaacctgatgaaagaggtgcgcatgtacacacagaagttcatcgatcgcggaaaggacttcaaccttgaactggccatcaagactaatattattactgatggtttaaggtattccttggccactggcaattggggcgaccagaagaaggcgcatcaggcgagagccggtgtctcccaggtgttgaatcgcttgaccttcgcctctactctttcccatttgcggcgtgtgaattcgccaattggcagagacggtaaactggccaaacctcgtcagttgcacaatactctttggggtatgttgtgtcccgctgaaactcctgagggagcagctgttggtctggtgaagaacctggcgctcatggcttacatttctgtgggatcacaaccttctcccattctggagttcttggaggagtggtctatggaaaacctggaggaaattgctccttctgccatcgctgatgctacaaagatctttgtgaacggctgctgggtgggcatacatcgtgatcctgagcagctcatggcaacgcttcgtaagttgcgtcgccagatggatatcatcgtgtcagaggtgtctatgattcgagacattcgagatcgtgagatccgaatctatacagatgctggtcgcatttgtcggccacttctcatcgtggaaaacggatcgctgctgcttaaaaagactcacgtggagatgttaaaggagcgagactacaacaactacagttggcaggtccttgtagcctctggagtggtggagtacattgatacccttgaggaggaaacggtcatgatcgctatgtctccctacgatctgaagcaggacaaggattatgcttattgtaccacatacacacattgtgagatccatccagccatgatcctgggcgtgtgcgcgtccattattcccttccccgatcacaatcagagtccgcgtaacacctatcaaagcgctatgggtaagtttatgagtattcattactgttctacttgaaatactaatccatttataacgtttttttcatcttttataggtaagcaagctatgggcgtttatattaccaacttccacgtgcgtatggacacactagcccacgtactttactatccgatgaagccacttgtgaccacacgttccatggagtacctgcgtttccgagaactaccagctggcatcaattcaatcgtggctattctctgctacactggctacaaccaggaggattctgtcattctgaatgcatccgctgtggagcgtggattcttccgctctgtgttctaccgatcatacaaggattcggagaacaaacgtgtcggtgatcaggaagagaacttcgagaagcctcatcgcggcacctgccaaggaatgagaaatgctcactacgacaagttagacgatgatggaattattgccccaggaattcgtgtatctggcgacgatgtggttattggcaagaccattacccttcctgaaaacgacgacgaactggacagcaacacgaagcgtttctccaaacgagatgcctccactttcctgcgaaactctgagacgggtattgtggaccaggtgatgcttacgctcaacagcgagggctacaagttctgcaagattcgagtgcgctcggtgcgtattccgcagatcggcgataagttcgcttctcgtcacggacaaaagggaacgtgcggcatccagtaccgtcaggaggacatggccttcacatgcgagggattggcacccgatatcattattaacccccacgctatcccatctcgtatgacaattggtcacttgatcgagtgtctgcagggaaaactgggatccaacaagggagagatcggtgatgctacacccttcaacgatgccgtcaacgtgcaaaagatctccaccttccttcaggagtacggctatcatcttcgaggcaatgaggtcatgtacaatggccacactggacgaaagattaatgctcaggtaaattgcttaactttcaacttgcaataatcttaaactaatcagtcccttaactacaggtcttcctggggcccacctactatcagcgtcttaagcacatggtggacgacaagattcactctcgtgctcgaggccccgtccagatcctggtgcgtcagcctatggaaggtcgtgctcgtgatggtggcttgcgtttcggtgagatggagcgtgattgccagatctcccacggcgccgctcagttcctgcgagaacgtttattcgaggtctccgatccgtaccgcgtacacatctgcaacttctgtggcctgattgccatcgccaatctgcgcaacaatacgttcgagtgcaagggctgcaagaacaagacgcagatttcccaggtgcgactcccatatgcggccaagcttctcttccaggagctgatgtcaatgaacattgcgccgcgcctgatggtcacctaatcagatcggtatccgcaaccggaccacataatagccctaagctaaatgctagcagttaattattaaattaccataattgtgacaactcaattatgtgctttgtgtggcattttctattattcccggaactggagcgaatacctgccgagcatttttaaagacgcgaacgtgccacaagcgtattttgggcgaaagtctgcacgggttcaagagctgttagtggaatgtgatttatttgcttatttgtaataagttattttgctcacaaacttttcttgagagggcaaatagggcattgaaaggttttggtattatttgtgattaaatttttgttggcaatttagttgtcaatccctgtacgttttaggacatcaaataatctgcgttctgactctttatttgctccaatttttctttggtaatcccctaacaaagtccattatccagcaaaataccttcgccctaagcgtatcctaaattcggttttttacatagaaagcctttccattcgcatttatttttttgccaagcttttgttgccttctttgattttgacgtaatgctttggcccgcggtctgtgacgcccagtgacaaaagggattagttctttgttgtcggatgtggattgtgtgcggtggagaaggtggtggagctgtagccacagccgccaatcgactgacagttattaattgccacttgacgtggctccgacggaacgagcagcatcggcccaaccgaactcgtgtcgctgccaatgctgataccaatgttggggctgatggccaagaccatgctgacacccatcagtcagcccgcctgagcccggcttatgagtaattgaaattgcgtgtaaatccgcgaacgcgaagtggcgccgcgataagagagttcagttcagagcaacaaaaaaaaaaaaaaagcggaatgaaacactccacttgggcacgcctgaggtatttatttatagcatcttaaaaataacttattttactccttttttatcgccaacaaccggtgtctctgctcatttatcaccgttgctaaaaacactgatggcgtagaactcgggcacccggtaaaccttcag

SEQ ID NO: 5867 - DNA, 3759 bp, DROSOPHILA
cacaacgccgctaatcgcgttgtcggcaaacatttgttgtgaaattttctacgtttttacaatttaattcattgcaaatccaatttattgttatttacttgaacgcataaagtgcttctgcactttagaaaactgaaatcatgatgtacgacaacgaggaagaactgtacgaggaggagaatgccgaggagatctctcacgagctgtggcaggaagcctgctggatcgtgattaacgcgtacttcgacgagaagggcttggtgcggcagcagctggacagtttcgatgagttcattcagatgtcggtgcagcgcattgtggaggattcccccgccattgagttgcaggcggaagcgcagcacacatccggagaggtggaaaccccgcccagattctcgctgaaattcgagcaaatctatctttccaagccaacacattgggaaaaggatggttcgcccagtcctatgatgccgaacgaggcccgcctgcgaaatctaacttactccgctcctctctacgtggacattacgaaaaccaagaatgtcgagggcctggatcccgtggaaacgcagcatcaaaagactttcataggcaagattcccatcatgttgagatcaacgtactgtttgctatcacagcttactgatcgtgatcttacggagctgaacgagtgcccgttggatcccggtggctacttcatcatcaacggctccgagaaggtgctaattgcccaagagaaaatggccaccaacacagtgtacgtgttcagcatgaaagatggcaagtatgcctttaagactgagattcggtcgtgtttggagcacagttccagacccacgtctacactgtgggtaaacatgatggcaagaggatcgcaaaacataaaaaagtcagccattggtcagaggattattgccatcttaccgtacatcaaacaggagatacccattatgattgtgtttcgagcattgggcttcgtggccgatcgcgatattctggagcatatcatctatgacttcgacgatcccgagatgatggaaatggtgaaaccttctctggacgaggcttttgtagtccaagagcagaatgttgccttgaatttcattggagctagaggagcacgtcccggagtcacaaaagacaagcgtataaagtacgctaaggaaattttgcaaaaggaaatgctgccccacgttggagtatccgatttctgcgagaccaagaaggcatactttttgggctacatggttcaccggctgctcttagcctctttgggcaggagagaactcgatgatcgagatcactatggaaacaagcgacttgatctcgctggacccctcctggccttcctcttccgtggtctgttcaaaaacctgatgaaagaggtgcgcatgtacacacagaagttcatcgatcgcggaaaggacttcaaccttgaactggccatcaagactaatattattactgatggtttaaggtattccttggccactggcaattggggcgaccagaagaaggcgcatcaggcgagagccggtgtctcccaggtgttgaatcgcttgaccttcgcctctactctttcccatttgcggcgtgtgaattcgccaattggcagagacggtaaactggccaaacctcgtcagttgcacaatactctttggggtatgttgtgtcccgctgaaactcctgagggagcagctgttggtctggtgaagaacctggcgctcatggcttacatttctgtgggatcacaaccttctcccattctggagttcttggaggagtggtctatggaaaacctggaggaaattgctccttctgccatcgctgatgctacaaagatctttgtgaacggctgctgggtgggcatacatcgtgatcctgagcagctcatggcaacgcttcgtaagttgcgtcgccagatggatatcatcgtgtcagaggtgtctatgattcgagacattcgagatcgtgagatccgaatctatacagatgctggtcgcatttgtcggccacttctcatcgtggaaaacggatcgctgctgcttaaaaagactcacgtggagatgttaaaggagcgagactacaacaactacagttggcaggtccttgtagcctctggagtggtggagtacattgatacccttgaggaggaaacggtcatgatcgctatgtctccctacgatctgaagcaggacaaggattatgcttattgtaccacatacacacattgtgagatccatccagccatgatcctgggcgtgtgcgcgtccattattcccttccccgatcacaatcagagtccgcgtaacacctatcaaagcgctatgggtaagcaagctatgggcgtttatattaccaacttccacgtgcgtatggacacactagcccacgtactttactatccgatgaagccacttgtgaccacacgttccatggagtacctgcgtttccgagaactaccagctggcatcaattcaatcgtggctattctctgctacactggctacaaccaggaggattctgtcattctgaatgcatccgctgtggagcgtggattcttccgctctgtgttctaccgatcatacaaggattcggagaacaaacgtgtcggtgatcaggaagagaacttcgagaagcctcatcgcggcacctgccaaggaatgagaaatgctcactacgacaagttagacgatgatggaattattgccccaggaattcgtgtatctggcgacgatgtggttattggcaagaccattacccttcctgaaaacgacgacgaactggacagcaacacgaagcgtttctccaaacgagatgcctccactttcctgcgaaactctgagacgggtattgtggaccaggtgatgcttacgctcaacagcgagggctacaagttctgcaagattcgagtgcgctcggtgcgtattccgcagatcggcgataagttcgcttctcgtcacggacaaaagggaacgtgcggcatccagtaccgtcaggaggacatggccttcacatgcgagggattggcacccgatatcattattaacccccacgctatcccatctcgtatgacaattggtcacttgatcgagtgtctgcagggaaaactgggatccaacaagggagagatcggtgatgctacacccttcaacgatgccgtcaacgtgcaaaagatctccaccttccttcaggagtacggctatcatcttcgaggcaatgaggtcatgtacaatggccacactggacgaaagattaatgctcaggtcttcctggggcccacctactatcagcgtcttaagcacatggtggacgacaagattcactctcgtgctcgaggccccgtccagatcctggtgcgtcagcctatggaaggtcgtgctcgtgatggtggcttgcgtttcggtgagatggagcgtgattgccagatctcccacggcgccgctcagttcctgcgagaacgtttattcgaggtctccgatccgtaccgcgtacacatctgcaacttctgtggcctgattgccatcgccaatctgcgcaacaatacgttcgagtgcaagggctgcaagaacaagacgcagatttcccaggtgcgactcccatatgcggccaagcttctcttccaggagctgatgtcaatgaacattgcgccgcgcctgatggtcacctaatcagatcggtatccgcaaccggaccacataatagccctaagctaaatgctagcagttaattattaaattaccataattgtgacaactc

SEQ ID NO: 5868 - protein, 1176 aa, DROSOPHILA
MMYDNEEELYEEENAEEISHELWQEACWIVINAYFDEKGLVRQQLDSFDEFIQMSVQRIVEDSPAIELQAEAQHTSGEVETPPRFSLKFEQIYLSKPTHWEKDGSPSPMMPNEARLRNLTYSAPLYVDITKTKNVEGLDPVETQHQKTFIGKIPIMLRSTYCLLSQLTDRDLTELNECPLDPGGYFIINGSEKVLIAQEKMATNTVYVFSMKDGKYAFKTEIRSCLEHSSRPTSTLWVNMMARGSQNIKKSAIGQRIIAILPYIKQEIPIMIVFRALGFVADRDILEHIIYDFDDPEMMEMVKPSLDEAFVVQEQNVALNFIGARGARPGVTKDKRIKYAKEILQKEMLPHVGVSDFCETKKAYFLGYMVHRLLLASLGRRELDDRDHYGNKRLDLAGPLLAFLFRGLFKNLMKEVRMYTQKFIDRGKDFNLELAIKTNIITDGLRYSLATGNWGDQKKAHQARAGVSQVLNRLTFASTLSHLRRVNSPIGRDGKLAKPRQLHNTLWGMLCPAETPEGAAVGLVKNLALMAYISVGSQPSPILEFLEEWSMENLEEIAPSAIADATKIFVNGCWVGIHRDPEQLMATLRKLRRQMDIIVSEVSMIRDIRDREIRIYTDAGRICRPLLIVENGSLLLKKTHVEMLKERDYNNYSWQVLVASGVVEYIDTLEEETVMIAMSPYDLKQDKDYAYCTTYTHCEIHPAMILGVCASIIPFPDHNQSPRNTYQSAMGKQAMGVYITNFHVRMDTLAHVLYYPMKPLVTTRSMEYLRFRELPAGINSIVAILCYTGYNQEDSVILNASAVERGFFRSVFYRSYKDSENKRVGDQEENFEKPHRGTCQGMRNAHYDKLDDDGIIAPGIRVSGDDVVIGKTITLPENDDELDSNTKRFSKRDASTFLRNSETGIVDQVMLTLNSEGYKFCKIRVRSVRIPQIGDKFASRHGQKGTCGIQYRQEDMAFTCEGLAPDIIINPHAIPSRMTIGHLIECLQGKLGSNKGEIGDATPFNDAVNVQKISTFLQEYGYHLRGNEVMYNGHTGRKINAQVFLGPTYYQRLKHMVDDKIHSRARGPVQILVRQPMEGRARDGGLRFGEMERDCQISHGAAQFLRERLFEVSDPYRVHICNFCGLIAIANLRNNTFECKGCKNKTQISQVRLPYAAKLLFQELMSMNIAPRLMVT

SEQ ID NO: 5869 - DNA, 2850 bp, DROSOPHILA
attctccaatagtaagacactgaagcacgagggacccaccgccttcttcaagggcggcctgtgccgaatgattgtgattgctcctctgttcggaatcgctcaaacggtctactatctgggcgtggccgagggcctgctgggctatcagaaaaagtagggcggcttggaatgagtgcgcgccaaggcggattgacaagaccgaagcattttaaatgtactctctttgaatattgaatgtgtatgtatatcgtgtttaaatgttgttaaagctgtccatgaatgtaatcgtgaagtctctatagtaagctaaagtaatcgaacgatgcgccagccagcgaagttgttaaagttttccccaatcctcttaaactactcaaacgatgtactacatatgtatttagaccatgtcagaagataactgatgctccaatgacaataagataaagcaaattaatcgctgatataatgtacatttttggttaatatcatagtctataactgttgtgtttggatactctctctatttagtctttatttcccgagcaatccgcagctagccatgaacgttctgcatcaaattgtattagtaatgcatttttctttgctgccaggcgaaatttacttttagtggcattcaagaacatgactagagaaattgtatgctttataaaaaccgtcagaattgaactaacgaaatatactaatgtaaattcaaaattttcgtacaacattaattatttcttggcctataaaaaaaatgttggaacaagttgagcaaaagaaccaagagcaaaaaaaaccacaaaagtttaagttaataagttctaccatatggttaatactacaacctatacttaattgcgaacccatcacagcgtttttccgaaaattataaatggcggcgtcgccggtattattggagtggcatgcgtctatccactggacatggttaagacgcgactgcaaaaccaaacaataggtcccaatggagagcgcatgtacaccagcatgtgagttttgggttttcggtttgggttgtgttttgttattatccgcctaatggagaactctattgccttagcgccgactgtttccgaaagactatcgccagcgaaggctattttggaatgtacagaggctcagcggtgaacatcgtgctgattacgcccgagaaagccatcaagttgaccgccaacgacttctttcggtatcatctggcatccgatgacggggttattccgttgtcacgggctactttggccgggggcctggccgggctattccagatcgtggtcaccacgcccatggagctcctcaagatacagatgcaggacgccgggcgggtggctgctgccgaccgagcggcaggacgagaggtgaaaactataacggccttgggtctgaccaagacgctccttcgtgagcgtggaatcttcggtttatacaagggtgtgggcgccactggagtgcgggatattacgttctcgatggtgtactttccgctaatggcctggataaatgaccaggggccacgcaagtcagatggttctggggaagcggtcttctactggtctctgatagctggactcttgtctggcatgacttctgcctttatggtcaccccttttgatgtggtcaagactcgactgcaggccgatggcgagaagaagttcaaaggcatcatggactgtgtaaataggacccttaaggaagagggcataagtgcattctttaagggcggtctatgtcggataatggtgctagctccactatttggtatcgcgcaaatgttttattttttgggtgtgggcgagaagattctgggcatcgagcgaacgaaatctgtgtaacttataattaaaggtctcttcccccccctcatattaataagaatttttttatccccgagtcgattaagccatgtccgttttatccgtccgtcttctacacaagctagttccccaggtttgaagctatctgtatgaaactttcccaaattggacggctacatcatagaggaattatcctatataaaccaatatttagaatttaatgaaatgaaatgacttctaggagctcaattaacatttaatgtgtgtattttcttattgcatctatacatataatcgataagtaatcttcaagaatcagcccagggttgatttgcagcccatctctctcatcacaatcctttcacctcagctactcctcagtcaccttagatcacatccgctggccggctgttcggagcagccgcattctcagtacccaaatccacgtaacgagcacgataccagcgggccactgcagctcgataccagtcgaggaatagggcctgtcggtagaggatgatacccatttgcaggatgaggaagcccatgatcgtgaccagattcatgtactcccactccatgataatcacaaacacccagatgaagtaaacgcgtaggccatcggccagaagccggttggcgctggacgagtacatcgcaatgtacagtccaatgaagttgtacatggcacatgagatggtgaaggcaatcagagtcataatcaatgagatactcccctgcagagccgcaaagagatcaccccaatcgtcgaaaactgcacgcgaactacagctaaatggatcaatgctcggcaggaagttcatgcaaatggccagcatcgaggtgatgcccaagccgaagattccctgccagccagcagcttgcagtggagcaacattcgaggtttttagctgtttctcctcgcaaacatattgcagtccgtgcagaatttcagcaatgatgatgagtaagtcgccggtcagaatggatttgtagtccgtgtaaggcaacgtgacca

SEQ ID NO: 5870 - DNA, 850 bp, DROSOPHILA
acaccagcatgtgagttttgggttttcggtttgggttgtgttttgttattatccgcctaatggagaactctattgccttagcgccgactgtttccgaaagactatcgccagcgaaggctattttggaatgtacagaggctcagcggtgaacatcgtgctgattacgcccgagaaagccatcaagttgaccgccaacgacttctttcggtatcatctggcatccgatgacggggttattccgttgtcacgggctactttggccgggggcctggccgggctattccagatcgtggtcaccacgcccatggagctcctcaagatacagatgcaggacgccgggcgggtggctgctgccgaccgagcggcaggacgagaggtgaaaactataacggccttgggtctgaccaagacgctccttcgtgagcgtggaatcttcggtttatacaagggtgtgggcgccactggagtgcgggatattacgttctcgatggtgtactttccgctaatggcctggataaatgaccaggggccacgcaagtcagatggttctggggaagcggtcttctactggtctctgatagctggactcttgtctggcatgacttctgcctttatggtcaccccttttgatgtggtcaagactcgactgcaggccgatggcgagaagaagttcaaaggcatcatggactgtgtaaataggacccttaaggaagagggcataagtgcattctttaagggcggtctatgtcggataatggtgctagctccactatttggtatcgcgcaaatgttttattttttgggtgtgggcgagaagattctgggcatcgagcgaacgaaatctgtgtaa

SEQ ID NO: 5871 - protein, 240 aa, DROSOPHILA
MYRGSAVNIVLITPEKAIKLTANDFFRYHLASDDGVIPLSRATLAGGLAGLFQIVVTTPMELLKIQMQDAGRVAAADRAAGREVKTITALGLTKTLLRERGIFGLYKGVGATGVRDITFSMVYFPLMAWINDQGPRKSDGSGEAVFYWSLIAGLLSGMTSAFMVTPFDVVKTRLQADGEKKFKGIMDCVNRTLKEEGISAFFKGGLCRIMVLAPLFGIAQMFYFLGVGEKILGIERTKSV

SEQ ID NO: 5872 - DNA, 3748 bp, DROSOPHILA
cagtcgcagcaccaatcgctagaagggatatgtgtggatgacgtgctagccaggcctccatttccgccggaatatcaggcgttggacgcacaaacgatggagatatctgcgaacagtagggattgtctatagttatcaataagcgtatatttttttttaatctgttttttaaagtgttaatgtacttcaatggtagattttgtaaaaagtcagagtaagcggagatcaaggatcaagtgcaatacggatgcctggcaggcacaaaagtccaccggaaacccagaaagctaaatgaaatgaaacactgtgacgccccgaaagccactgaaaatcgaagaaatgcagctaaaataaaaagataactacgatcgatggtggagatccaactaaacctaatccagaatatgtagcgcgtaaacagagcactaagtagttgtatgtattaactattaattttttaaattagcaaaaaaaaagcaaaaaaaaaacccaaaataacaaataaatctaataagatcgaaacaaaacggtcaatggcagcggtgtatgggatgtatgtgtggtcagccagtggctatcggttatcgatagcaaatgcagaggcgaacgtgtttttgcatgttgcacgtctggcgcgcacatgacgcgcatgacgcgcaccacatccgctggaaattttttccaaaggcagcctttctttctttctattcctactcattacggtagtggttgtcagcgtgcaggtgatggaaaagctctggaggatctgtataaaaatcataattaactttttaaaaatgtgttcatattttttcacatttttattggtttggcaattttctattgatttgcaaaaaatctgttttccactcctagattattcttcgttttactgtttgtcttgcagatttttatcagtagaagcccaaaataacaaataaatctaataagaacaaaacaacacggtcgattggcagcgatgtatgggacagatggtcagctagtggctatcggttatcgattgctgataacatcttttcataaacatgtttacaacgctccacagcgaggatacggaatattcggcagattctgtggagtggctgacacacgatgatgcggcaacgggtttctttgcctgcggcacctatcagttggtccaggaggaggacgagccggcggcggagacttcagccaagcgtccacgcaagggtcgcgtttatttataccagtttgaagaggaaaactgccgcctggagcggctacagtgcatcgaaacgtctgccattctcgacatgaagtggctgccggcctggagcagtgagtgtaatccccacctggccacggtcaactctttaggccagatggaattgtacgagtttctccaggatgcgaagctactgcagaggcgtacgtgttttagcctggcggagcaggattcgtcggaggaagcgccattggcgctggccctagactggcaacatgacgggcagcacatccgactggccatctccgattccaaaggcggcctaaatctattgagctactcatcacagggtgagataatccgcgaacggtcgtggttgtcccatggctttgaggcttggacctgtgcctttgatcgttggtcaccgcacattctgtacagtggtggcgacgatatgctgctcatggcccacgatctgcgcaccaagcagcgtgcgtggaccaaccgggcgcacatggctggagtcacctgtctgctaagtcatccgcggcacgaaaaccatctgctcacgggtagctatgatgagcagttgcgtctcttcgacaccagatcgatgaagcgatcactggcggaactggacttgagcggaggcatctggaggctgaagccgcatcctgcccagcccgatctcatcctggccgcctgcatgtacaccaactttagcgtggtgcagctggatgtcgcggcacctggcctgagtttactgggcgcctatgaggagcataagagcatctgctacggggccgattgggcaccatggagaaacaaggacgatgcgtccttgaccatggccacttgctccttttatgatcacacgttgtgtgtgagtcgcgtggatattaacaaatgaattcgatatctgtatattatgttatgtgactaaaaactaaaagaaaaataaacatttgctggcttatgtttttcaactatctatagtttgtataatagtttgcggaaaaaacagaattgttcatggcatttgggatatcctaagttttccaaaactaattttaaactgccaacatccctggcaggcgatatcgataacgcatgcaatcggctcagccctggtgcggttatcgtaagttctgtcagcgcattttcattcgaagtttgcgaattcagagaagtgaatgaacttgaactgtttagttatggtaagtactaaacgtagagatcctgctaactttataaactcctcattctactccgcacagcatcccccacaaaatccaaacaagttggacgccgaggatagcctggatcaggctatagacaacatcgaagactcaaacgaggccaatctctataagcttatcgagctggaggagcagaatgtggcctgggagaaacatcttgcggaactccaaattatgatcaggcaggtgatggaaaagctcgacaggagtttggtcaaacaggaggcgctggtggcgaaaatgcagaagctgaagaatcagaaagatcaggagggtcaataattattgtaccggaggcgtgcttttggcgttaattttgatttcatttataaatacatatgtaaaatataggtatcacacgcttttccatttgattttctcagagtaacaagtagaaggcttttctcctacgccaccacattctggatccagttgagggcgccgcgaatgcgacgcagccgggcgcgtgccagaaagctgcatatgagcaggtactccacataggcgcgcctattgccacagctggccactggcatcaatccggcgcccatctgtggacgaccctcgcacataatcttagtggtcagcgaaaggagccactgtaggatctgtaaaaaaaaatcataattagcttaaaaggatgctgatgtggtatcaaacactgcgacccacctccggactgttgggcatgccgcccgccttaagccaattggatggggcccagaggaacagctgcaccacatttgccgcaatatccggactgacccgcttggacgggttgggattgaggatgttgtagaccagctgttgcagcagcggcgggcaagcatcgctcattggcggcaattggtcctgtcggtaatcgctgttcctcagcgaaagcgtcatctcaccgcgttcgcgcgccatcccaccgctgctcgaatagaacggattgcggttgccaaagatttcgtaagccagggcaccgcaagcccacagatcggccttgccataattgagtacggcaaacggaccgggcatcgtattgaagatctctggcgccatcaacgccgcattgccgcccttgtcgacgtcgtgcgaaacgtacggcaggcgcaggccatgcaccttgtccgccagacaacagccaaagtcggagagcactagcaccggcgccgcatcgtcctgcagctcgattagcacattatcagactttaggtcacgatgggcaacgccgtgacggctcaaatggttgacagcctcgagcatttgagccagcagcaggatgcgattgcgcgtg

SEQ ID NO: 5873 - DNA, 1354 bp, DROSOPHILA
ctagtggctatcggttatcgattgctgataacatcttttcataaacatgtttacaacgctccacagcgaggatacggaatattcggcagattctgtggagtggctgacacacgatgatgcggcaacgggtttctttgcctgcggcacctatcagttggtccaggaggaggacgagccggcggcggagacttcagccaagcgtccacgcaagggtcgcgtttatttataccagtttgaagaggaaaactgccgcctggagcggctacagtgcatcgaaacgtctgccattctcgacatgaagtggctgccggcctggagcagtgagtgtaatccccacctggccacggtcaactctttaggccagatggaattgtacgagtttctccaggatgcgaagctactgcagaggcgtacgtgttttagcctggcggagcaggattcgtcggaggaagcgccattggcgctggccctagactggcaacatgacgggcagcacatccgactggccatctccgattccaaaggcggcctaaatctattgagctactcatcacagggtgagataatccgcgaacggtcgtggttgtcccatggctttgaggcttggacctgtgcctttgatcgttggtcaccgcacattctgtacagtggtggcgacgatatgctgctcatggcccacgatctgcgcaccaagcagcgtgcgtggaccaaccgggcgcacatggctggagtcacctgtctgctaagtcatccgcggcacgaaaaccatctgctcacgggtagctatgatgagcagttgcgtctcttcgacaccagatcgatgaagcgatcactggcggaactggacttgagcggaggcatctggaggctgaagccgcatcctgcccagcccgatctcatcctggccgcctgcatgtacaccaactttagcgtggtgcagctggatgtcgcggcacctggcctgagtttactgggcgcctatgaggagcataagagcatctgctacggggccgattgggcaccatggagaaacaaggacgatgcgtccttgaccatggccacttgctccttttatgatcacacgttgtgtcatcccccacaaaatccaaacaagttggacgccgaggatagcctggatcaggctatagacaacatcgaagactcaaacgaggccaatctctataagcttatcgagctggaggagcagaatgtggcctgggagaaacatcttgcggaactccaaattatgatcaggcaggtgatggaaaagctcgacaggagtttggtcaaacaggaggcgctggtggcgaaaatgcagaagctgaagaatcagaaagatcaggagggtcaataa

SEQ ID NO: 5874 - protein, 435 aa, DROSOPHILA
MFTTLHSEDTEYSADSVEWLTHDDAATGFFACGTYQLVQEEDEPAAETSAKRPRKGRVYLYQFEEENCRLERLQCIETSAILDMKWLPAWSSECNPHLATVNSLGQMELYEFLQDAKLLQRRTCFSLAEQDSSEEAPLALALDWQHDGQHIRLAISDSKGGLNLLSYSSQGEIIRERSWLSHGFEAWTCAFDRWSPHILYSGGDDMLLMAHDLRTKQRAWTNRAHMAGVTCLLSHPRHENHLLTGSYDEQLRLFDTRSMKRSLAELDLSGGIWRLKPHPAQPDLILAACMYTNFSVVQLDVAAPGLSLLGAYEEHKSICYGADWAPWRNKDDASLTMATCSFYDHTLCHPPQNPNKLDAEDSLDQAIDNIEDSNEANLYKLIELEEQNVAWEKHLAELQIMIRQVMEKLDRSLVKQEALVAKMQKLKNQKDQEGQ

SEQ ID NO: 5875 - DNA, 5787 bp, DROSOPHILA
aaaatgatctagaagatgtgcacatttagagggtttaaatttcctattaacttcacttatattaacttcaatttaagctcacctgttcgtatgcctttgcagcatggaaccaagacttgttgtttttataggcgtcgattgccttcagaaaacactccttgctcttatcataacttttagctattcgatatgcagtggctgcaattaaaaatgtaaaagaaagatacataattgtacaccaatatgtgtgtatcttgcaagttatggatactttgggataatcgttagctgtaattcatagtatttacatatctcattgatgtcacaatgtttttatagatagatactctgggtgatattagtcactcctactttgtgaaactcaccagctttggaatactcatccgcagcactatcgtaatcaggaacccatttcagcatggacaacttcaagctgcaaataaagatgggtgttatttggaaacccctttataaggatatttttgttggggatacctcttctcggcctgcttcaccaggtcctccgcttcggcaatctttttggcagcgattcccgacattttcaaccacttttgtttagcaggaaaaatcaattgtttacgtttgaaaatagtgtgaccgaatgcgagaaggaaaataacaatggttcgaaaatcacggtggtttcgaatctttgaaaaccgaaagcagtacgcatgtctgaaaatttcagaaaagcaaagcctgattacaccgggaaaaaaaagttggtcttataaagcagttgacttcgaaatgaaaatgccatgtatttacatacatctattcatttttttattttatctatgatatttaaaaagtagagtatgtgtaacgaacaagatcgaattgaagtgtttttaattgattgaaaatgattttccactcctgatttctccgcgtgcatgtcatacctgttctgttttgatttgcaagtaaataagaaagtgcattaggtaagaaatcgcagttttcgccaatttcaatctggagtaagtggaaattttggatttattattaagttgtttttaagcgaagatttatttgaatttgcttacgaatccggatattctgagctttgcgaatgtttgattataatttgcaacactttttcgtttctatactttgcagacttaaaaatgtcccacaaatcttgcgtggaactgagcgaaattcgaaaattggataaaatagtgcagcaatgcgagctgtacatgtccaacaacaatattaacgataatgcggccaagaaaccgcctgtgaaggaattcaagcgcaattgccctgcaaaatcgaacaaatttgtggagagggaactcttctcgctcatgtgcaacctgaacaagattgaaaagaagcaggttttcgtttcagatatcctgattaacgccagcatgttcgacgacaagaaggagagtttggcgcggtttccgaaaaacgtgtccgaccacaacactctggtgtaccacaaattcctgaggactcgacccactaacgatgatgaagccctaaagctgaaggctggtggaaaatcgaaggagaggccaggcacgaaaatcacggcagattgcttcttttcgcctcttctattcaaaatcaacaacaaaagggagtgcctgaaaaaagtgaagcccatgaagggggaaaatgctgtcgaaaccaatggtatcccactcgaatccaagccaagtcagcacaaaaagcagaaaagtttcaagaaatgcattaagtgcgacaagaagaagctgtacattaagaactatcaggtgtccgcccggcgggaatgcgatctcctctgctcgtatgatcccttgcgtaaaaataacgccgacctcttccagacccacaaaggcacttcttacgagtgcatgttcaagaacctcaaatacaaccaggccgaaaagccgacggacaacgtgatggggaactcctacgacgacatgctggacaaggaggctctgctcggatcaaaaagcgagccgaaggggcaggatcccaatgacatggtatgcagacatggtatctgaatcagccgattaaagtactatatttattgaattcaaatcatcagattacttccctgggcggaaacatactgctggaccagaagttgcagaataactactatcacaagtggaccctcctgcactactcgccctttaaggctgtgtgggattggataatattgatcctggtgatgtacacggccatcttcacgccgtacgtggctgcctttttgcttggggaacaggattaccagcggcggaacagcaaatacatcaactccgatccaattgtcatcatcgatttgattggtgagcactaatgctgcattttgtgggttaagctatcaatggaacttttcagtggacgttaccttcatcgtggacattataataaactttcgaacgacctttgtcaactcgcaggacgaagtggtcagtggccagcgtggtggagtactcaaatttggaaattaaacaaaccacactcattctaggtatcccatcccggacggatagcagttcactacttgagcggctggttcctaatcgatctcgtggccgccgttccgttcgatttgctcctggtgggcagtgacaccgacgaggtgagagccatctatgcactcctacatggaattgattaatgcctgcactccgcatttcagacaactaccttaataggacttttaaaaacagctcgactcttaagactcgttcgcgtggcccgaaaaatagatcgttattcggaatacggagccgcagttcttattttgttgatggcgacctttattttgattgcccattggttggcatgcatatggtaaactagcctgataatagtcgatttgtttttggaattgcttaactctatttaaggtatgcgattggaaatgcggaaaagtctatcgcttccaagaacatcggttggctcaattcgttggcctacgatattcaagaaccctatttcgacaaccgcactggtggtccctctataaaggtagagtttccctccgtccatctactcgtaatccgcatgactctaaaccgatcctcttgcagtcgcgctatatcacggctttgtatttcacgttcacctcgctcacttccgtgggatttggcaatgtggcaccgaatactgatgctgaaaaggcattcactatttgcgtgatgctcgttggatgtaggcaacatcgatatatttctttaaatacgtgtaatgagacctttaatttcccccctcaagctcttatgtatgcaagtatttttggaaacgtatctgccattattcaaaggctgtactcgggaaccgccagatatcacacgcaaatgctgcgcgttagggagttcattcgctttcaccaggtattgagcacgcacatcctataagtatagaactgagcacctattcctattctgcagataccgaacccgctcaggcagagactggaggagtactttcagcacgcctggacctgtaataccatctgacctccttcctcttccctagcctaatcctctaataatccactgccctttcagatacgaatggcatcgacatgaactcgctgctcaagggattccccgagtgcctgcaagccgacatttgcctgcatttgaacagaaagctattgacgacatgtgccgctttctcggaggcaagtcctggttgcctacggtgagtttgtgtccaagcgaaccagtatggaaaatgaacgagtacttgaacttgcagagcgttctcccttaagtttaaaaccacccatgccccgcctggcgatatcctagtacaccgaggagatgtgctcacctcattgtacttcatagccaggggatccatagaaatccagagagccggcaatattgttgtacttggtgagttcagtgatttcggaccaactgtcgtacataaaattaaactcataaataagacactctctacctcttctttttttctagttgtgaactgtgttctatagagatatagttgcatgctagattttccgtacattcagagtttactttaattactactgcataagaagttatagttcgttggcatttgcaattgataattaatcaaaactcctcttgctcaaggtaaaaacgatatatttggcgaaaatccgtgtatttacccaacggtcggaaagtcgaacggcgtggtgagagcactgacatactgtgatatccacaaactgcacagggacgatttgctggacgtgctggactcgtatccggagttcctggagagcttcgttagcaacctggtaatcacctataacatgagagatgtgagtaagcggacctcgttgcagtgagtgcataactgaacggtggccatatcctgttcctttcaggacgagcactctggcgtcgatatcaagcaccgctacctgagagcaaagtcctccgacaaaatgaggagctctcctgacataccctctataagaatgtaagcgaataccacgttgcgggagaatgctgtcttacgtacttcttttcagagtcgggctgcgttataagaaacaaaatgttaatacttctgtgcataaagttaagaatgataactcccgagaccttaatatctttatagaaaacgaaatcgcaaactatcaccttgacttgttcgataataataattagggctcacttatgctcgctcaatccgaattatcttatttatttgtgcacaagctgttgcgaggctaaagagcgaaaagcaataaaggtcctaaccgaaaatcatggtcttgagttttttaatgaagtacgaaatgatctccagtaggttcagcagggaggcgccgaagaagagtcctgccacacttccgatgccgactgaaacgggattcggcgggattagttccgaagttagccgattgggttggcagcaggcatacctattagatccagcttggtctgggtgacttttcgttcgtaccgcaccgtgggtggagaggctatttgaatttcggtgatctgtgtattattattgtagagtgttccattttcagttatgaccctgccagagaagatgggctattagcaaggatataaactattttggggcctttaccccactagacttatctgctgctccacgcaggatggcaggcaaaccgtactgctaccgacgtactccttaactctggttgcaaacccttctgtaattcgattatcattaacattgacaacggatttcatcggtcaaagtctaagacatagtcacctttaatcaagcaatccgcgtgttgcaatccgcaatagagactttcgtctgcaaaagaaacagggcaatgaagtcacctttactttcatcattcaagtgcctcacgtactgcgatcctttgggttgaatagagagcagtcgcaagttttcatctcaaactcactccggatgatagacatgcaggccgagaagctgcgtggaacagaaaaagaagaagcagaagcaggtaactccggatgagtaactcactcacctactcctacctgtaaggaaacccctcgatggaactctcgctggggaacttgcacttgcgctgggaaatgggctcgtcgatgacaccttcgtggttgtgaatctcctcgacgttgaaggcgtatgttgtggggtcggtggagatggtataggtcaaggaattgaagaagggcagatcctcgggactgttgacgtacatcttagatgatgagcacaagtgttattttgttagctatgtgttagcccagcgaaacgtatccc

SEQ ID NO: 5876 - DNA, 2706 bp, DROSOPHILA
aaatcgcagttttcgccaatttcaatctggaacttaaaaatgtcccacaaatcttgcgtggaactgagcgaaattcgaaaattggataaaatagtgcagcaatgcgagctgtacatgtccaacaacaatattaacgataatgcggccaagaaaccgcctgtgaaggaattcaagcgcaattgccctgcaaaatcgaacaaatttgtggagagggaactcttctcgctcatgtgcaacctgaacaagattgaaaagaagcaggttttcgtttcagatatcctgattaacgccagcatgttcgacgacaagaaggagagtttggcgcggtttccgaaaaacgtgtccgaccacaacactctggtgtaccacaaattcctgaggactcgacccactaacgatgatgaagccctaaagctgaaggctggtggaaaatcgaaggagaggccaggcacgaaaatcacggcagattgcttcttttcgcctcttctattcaaaatcaacaacaaaagggagtgcctgaaaaaagtgaagcccatgaagggggaaaatgctgtcgaaaccaatggtatcccactcgaatccaagccaagtcagcacaaaaagcagaaaagtttcaagaaatgcattaagtgcgacaagaagaagctgtacattaagaactatcaggtgtccgcccggcgggaatgcgatctcctctgctcgtatgatcccttgcgtaaaaataacgccgacctcttccagacccacaaaggcacttcttacgagtgcatgttcaagaacctcaaatacaaccaggccgaaaagccgacggacaacgtgatggggaactcctacgacgacatgctggacaaggaggctctgctcggatcaaaaagcgagccgaaggggcaggatcccaatgacatgattacttccctgggcggaaacatactgctggaccagaagttgcagaataactactatcacaagtggaccctcctgcactactcgccctttaaggctgtgtgggattggataatattgatcctggtgatgtacacggccatcttcacgccgtacgtggctgcctttttgcttggggaacaggattaccagcggcggaacagcaaatacatcaactccgatccaattgtcatcatcgatttgattgtggacgttaccttcatcgtggacattataataaactttcgaacgacctttgtcaactcgcaggacgaagtggtatcccatcccggacggatagcagttcactacttgagcggctggttcctaatcgatctcgtggccgccgttccgttcgatttgctcctggtgggcagtgacaccgacgagacaactaccttaataggacttttaaaaacagctcgactcttaagactcgttcgcgtggcccgaaaaatagatcgttattcggaatacggagccgcagttcttattttgttgatggcgacctttattttgattgcccattggttggcatgcatatggtatgcgattggaaatgcggaaaagtctatcgcttccaagaacatcggttggctcaattcgttggcctacgatattcaagaaccctatttcgacaaccgcactggtggtccctctataaagtcgcgctatatcacggctttgtatttcacgttcacctcgctcacttccgtgggatttggcaatgtggcaccgaatactgatgctgaaaaggcattcactatttgcgtgatgctcgttggatctcttatgtatgcaagtatttttggaaacgtatctgccattattcaaaggctgtactcgggaaccgccagatatcacacgcaaatgctgcgcgttagggagttcattcgctttcaccagataccgaacccgctcaggcagagactggaggagtactttcagcacgcctggacctatacgaatggcatcgacatgaactcgctgctcaagggattccccgagtgcctgcaagccgacatttgcctgcatttgaacagaaagctattgacgacatgtgccgctttctcggaggcaagtcctggttgcctacgagcgttctcccttaagtttaaaaccacccatgccccgcctggcgatatcctagtacaccgaggagatgtgctcacctcattgtacttcatagccaggggatccatagaaatccagagagccggcaatattgttgtacttggtaaaaacgatatatttggcgaaaatccgtgtatttacccaacggtcggaaagtcgaacggcgtggtgagagcactgacatactgtgatatccacaaactgcacagggacgatttgctggacgtgctggactcgtatccggagttcctggagagcttcgttagcaacctggtaatcacctataacatgagagatgacgagcactctggcgtcgatatcaagcaccgctacctgagagcaaagtcctccgacaaaatgaggagctctcctgacataccctctataagaatagtcgggctgcgttataagaaacaaaatgttaatacttctgtgcataaagttaagaatgataactcccgagaccttaatatctttatagaaaacgaaatcgcaaactatcaccttgacttgttcgataataataattagggctcacttatgctcgctcaatccgaattatcttatttatttgtgcacaagctgttgcgaggctaaagagcgaaaagcaataaaggtcctaaccgaaaa

SEQ ID NO: 5877 - protein, 855 aa, DROSOPHILA
MSHKSCVELSEIRKLDKIVQQCELYMSNNNINDNAAKKPPVKEFKRNCPAKSNKFVERELFSLMCNLNKIEKKQVFVSDILINASMFDDKKESLARFPKNVSDHNTLVYHKFLRTRPTNDDEALKLKAGGKSKERPGTKITADCFFSPLLFKINNKRECLKKVKPMKGENAVETNGIPLESKPSQHKKQKSFKKCIKCDKKKLYIKNYQVSARRECDLLCSYDPLRKNNADLFQTHKGTSYECMFKNLKYNQAEKPTDNVMGNSYDDMLDKEALLGSKSEPKGQDPNDMITSLGGNILLDQKLQNNYYHKWTLLHYSPFKAVWDWIILILVMYTAIFTPYVAAFLLGEQDYQRRNSKYINSDPIVIIDLIVDVTFIVDIIINFRTTFVNSQDEVVSHPGRIAVHYLSGWFLIDLVAAVPFDLLLVGSDTDETTTLIGLLKTARLLRLVRVARKIDRYSEYGAAVLILLMATFILIAHWLACIWYAIGNAEKSIASKNIGWLNSLAYDIQEPYFDNRTGGPSIKSRYITALYFTFTSLTSVGFGNVAPNTDAEKAFTICVMLVGSLMYASIFGNVSAIIQRLYSGTARYHTQMLRVREFIRFHQIPNPLRQRLEEYFQHAWTYTNGIDMNSLLKGFPECLQADICLHLNRKLLTTCAAFSEASPGCLRAFSLKFKTTHAPPGDILVHRGDVLTSLYFIARGSIEIQRAGNIVVLGKNDIFGENPCIYPTVGKSNGVVRALTYCDIHKLHRDDLLDVLDSYPEFLESFVSNLVITYNMRDDEHSGVDIKHRYLRAKSSDKMRSSPDIPSIRIVGLRYKKQNVNTSVHKVKNDNSRDLNIFIENEIANYHLDLFDNNN

SEQ ID NO: 5878 - DNA, 2810 bp, DROSOPHILA
acttttcggacctccgtgcagctgtacgcccacaaaaacacccacaccaagccttaccggtgtgccgtgtgcaatcgcccattttcttcgatgtacgccgtcaagaatcacatgcagacccataaggagatcagcagcaaaggaagtgtcggctctggtacgccgaacattaagagtgcggccacctcgaagagccaggcagctgggaagttctattgtaatacttgtggagctgagtacgcacgtctcttcgccctgcgcctgcacatgaagtcggctcacggtttggtggaggagcaggagaatcccgccacctcaactgatgctgcacacgtcgctgagaccgatgattccgagactgcggtgttgatagcggcagccgaggcagatgccgcttacataaacgctgtggtaaacgatgtagacatcgtgggcaccgtacccacctacgaagagtgcgttgtggtgagttactagttctttgtatctcttcccaaacttacctttttctcttcctttattgcagtttgacgtggataacttccacagcgaggaagttattacagattggcttaagtagcagttcacagttttacatccaataaatatttgtctcaaaaatatgttgtaccttgagtattttatttttgcgttagctccccacacattgaaatccatccgcattgatgtaagctaataaacacatttgttttgatgtagaattaatgaaaggaaaagagcatatctaaactagcatatggatgcgaaatggtttatataagttgcacataaaatacaggaatacgaattaaatattgtgtgcaattgtgcaaatgtaaaactttattaggattataactggcgtgtaacaagtaaatatattgctggcgtacaattagaccagccgttgtgttggctgacgacgaacagggatataaacgcgatatttaactacaactaaatgtaaaaccttagactaaaaaaaacgtgtgattggtgtgtagcctaggcgttgaccttgtcctcgtcacccgtagtgtcgtcctcctccacctcgctgttgtcctcttcgcagatctccttcaggacctccaccaaattcttggcctcgtccagttcctggcgcatagtgtccatctcctcctcaagcccctcgatgcgctcgtgcagatggcggttttcggtgagcgagtcctccagcgccagtcgccgctgctcggccagcagcttgtagtagttctcgccgggttcggctgtgctagtgagatcctctgccgtgatgggcttgtcagcattgccaagcggaacggcctcagcatcagtctgggtatccgcatcctttgtggaaatcgcgggcgccgtgtccacgcatttgcgcttgccgtacttgggcgcgacttggacgccggccttcagacgactcagctgatccacgatggaggcgcgccctgaaccagtgaggttctccttatcgtttacgttgccctgcaagggtttcagggtctgtctctgctgcttcaggtgctccttctgctcggcctctgtctcgacttggatgtagaccctggcagcgctcgaagacatcttcggagatgtgtattgtgctttcggtgggtttggttgtcaggcggcagagcgtgtgctacttgcttgtctgttgtttatgcattaatttgtgcgcaacgcttcacagttttccattcgttgtaatggccgccaaaaaatgccgatgccgcgcgctgttgtccaacactgtttgctcaaggggctgcatcacatgcaatttcatccctcgatttcgtgtcacgactatcgcaaaaagttaccaaattattttaggaatgtaaaattaagatatcccttaaaatataattacaaacctacaaaaataatgtgaaaaataacaaatcctacgactgctatgtagtagagtacttcaaaatattaccaatcattcatattaaataattatgttaataaaatattaaataaaagcttgctgtattcttgctggtggatgcttatcaaaaaagtatagtattaaaatttctgtataaagcaaaactaaaaacaaaaaatgcagcttactttttggaaacagttttctagcgatgtttttaaattgaaagaaaaccatacctaccctgtgttttaaacgacaaaaacagttagacagatacctaattttaaagttaaatttttacttcttttgcaaatcataattcatactcagccaagtagaagtcaaatataccccaatgtcggatgtagaattttaaatactaaaaggaaatgcctaacatttttgaaaacatcattagcgttttttaataataaatattaaaatagctataaagcgaagtataaataggattttagtttttatttgtttggttttagacctggttatggatcttgaaaataatttaaaagattgtgtaaattagttaagagattataaataagaattgcttggatactaccttcttattaagctagtactcaagatgtccaaataacatgtaagcatttagcatttaaaagtataaataaagaacttaaaagagctgtgtagcttaggctgagcaccttaagtttgattgatgtatattgaagttataaattcatttgttggtcttctagaaacgcgatttctgtgatattccgccaggtggcaacgccagtcacgtcacgaggacacgaaggataaacgtgcgataagagaatagccgataagagctccacccagtcgcaaaaaagatgtaattctcgaagtagcggatatagatcgtttacttttttatttttca

SEQ ID NO: 5879 - DNA, 810 bp, DROSOPHILA
gtcgtgacacgaaatcgagggatgaaattgcatgtgatgcagccccttgagcaaacagtgttggacaacagcgcgcggcatcggcattttttggcggccattacaacgaatggaaaactgtgaagcgttgcgcacaaattaatgcataaacaacagacaagcaagtagcacacgctctgccgcctgacaaccaaacccaccgaaagcacaatacacatctccgaagatgtcttcgagcgctgccagggtctacatccaagtcgagacagaggccgagcagaaggagcacctgaagcagcagagacagaccctgaaacccttgcagggcaacgtaaacgataaggagaacctcactggttcagggcgcgcctccatcgtggatcagctgagtcgtctgaaggccggcgtccaagtcgcgcccaagtacggcaagcgcaaatgcgtggacacggcgcccgcgatttccacaaaggatgcggatacccagactgatgctgaggccgttccgcttggcaatgctgacaagcccatcacggcagaggatctcactagcacagccgaacccggcgagaactactacaagctgctggccgagcagcggcgactggcgctggaggactcgctcaccgaaaaccgccatctgcacgagcgcatcgaggggcttgaggaggagatggacactatgcgccaggaactggacgaggccaagaatttggtggaggtcctgaaggagatctgcgaagaggacaacagcgaggtggaggaggacgacactacgggtgacgaggacaaggtcaacgcctaggctac

SEQ ID NO: 5880 - protein, 192 aa, DROSOPHILA
MSSSAARVYIQVETEAEQKEHLKQQRQTLKPLQGNVNDKENLTGSGRASIVDQLSRLKAGVQVAPKYGKRKCVDTAPAISTKDADTQTDAEAVPLGNADKPITAEDLTSTAEPGENYYKLLAEQRRLALEDSLTENRHLHERIEGLEEEMDTMRQELDEAKNLVEVLKEICEEDNSEVEEDDTTGDEDKVNA

SEQ ID NO: 5881 - DNA, 2966 bp, DROSOPHILA
ggaggctatgccggcgtcgctatttacagcaagataatgcccatacacgtggaatacggcattggcaatgaggagttcgacgatgtcgggcgcatgattacggctgagtacgaaaagttttacttgatcaatgtgtacgtgccgaattcaggccgaaagctggttaacttggagccccgcatgcgctgggaaaagctcttccaggcgtacgtgaagaaactggacgctctaaaaccggtggtcatctgcggcgacatgaacgtttcccatatgcccattgatctggaaaacccgaagaataacaccaagaatgccggcttcacccaggaggagcgtgacaaaatgacagagctgctgggcctcggctttgtggacacgtttaggcatttatatcccgatcgcaagggcgcctacaccttctggacatacatggccaatgcgcgagcacgcaacgttggatggcgtctggactattgtctcgtctcggagagattcgtgcccaaggtggtggagcacgagatacgcagccaatgccttggaagcgaccactgcccgatcacaatattcttcaatatataagatgtacacttcgtttgtgtttaaatgtacttctggattcgtcattattactttgtttcctctccatatatggtttttattgtatttgattatccatcgctgtagaaattgtacgtccctatctaatcatttcaaaatgccattactctattacattctgtcatagatccaccatcaaaattcgtatttttttaataaagtgagctactgccccacgttcgaactttgtgctcaaattattggccaaaaacggttggatttaaatttttaaaaatcgctagaggtgatataaccggtcgacatcgataaatgtaatcgcttgcctatcgggtcgaaccgaagcaataactaattcccgccaattttcgagcagaactcgatttattttgcgggaaatatatacatacattatttttgcgaaatggttttaacaccaacgaaagatgggcccgaccaggagagcatgccgttgccggccgacaatggggagtcaccaagtaaacagcaggcccctgtcaatcgggatgagatgcactacttggatcttctgaggcacatcatcgcaaatggagagcagcggatggaccgcacggaggtgggcactctgtccgtgttcggcagtcagatgcgcttcgacatgcggaactcctttcctttgctgaccacgaagcgcgtcttcttccgcgcggtggccgaggagctgctgtggttcgtggcgggcaagacggacgccaagctgctgcaggcgaagaatgtgcacatctgggatgggaacagctccagagaatttctggacaagatggggttcacggggcgagccgttggggatctggggccggtgtacggcttccaatggaggcatttcggggcgcagtacggcacctgcgacgacgactacagcggcaaggggatcgaccagctgcgccaggtgatcgacaccatcaggaataacccctcagaccgtcgcatcatcatgtcggcttggaatccactggacatcccaaagatggccctgccgccgtgccactgcttggcgcagttttacgtctccgagaagcgcggtgagctttcgtgccagctataccagagaagcgcagacatgggcctgggcgtacccttcaacatcgcctcctatgccctgctcacccacatgattgcccatgtgacgggtctgaagccgggcgactttgttcacaccatgggcgacacacacgtctacctgaaccacgtagagccgctgaaggagcaactggagcgcacaccgcgaccctttcccaagctgatcattaaacgtcaggtgcaggacatcgaggacttccgcttcgaggactttcagatagtcgactacaatccacatccaaaaatccaaatggacatggccgtgtaggcgaccttgaaatcaatagttctggcttacttgagcaagcagaatcttcaactgagtaggtcgctcacaaatatcttactttcgtttcaatttccagaaaattaaacgaaaattgttaaccatatatgtatacaataaatattattatagtcttcacggaaacagtttttaaacacatcatttcatagctttatttgaataaatttttgctttcattcatcgtgtgtagtgtgtgtttgttgtttgtaaattctcagagtaatccataatgaagtataattgattcttaataaatcttgcacagagtataccataaatatgctatataaatttgcttgacattttccgcacttaatattgtgattttgttttgtttcggtttcttggtttttgtcttttaagtaatataatgcgaatttgaagaaaaactttaaggtttcgcgtccatatgagagaacacgacagtaattcaatatacaatttatgcactttaattaaattggaataattgttttctgttttgttcggtgatgattaaaggtaaatacatattagctactacaatacgatactgtccaccaatatttcgactattttttataacgacgagaaaaaaggttgcatagttcttcatacatatgtaatatgtggcataagtgtattatgcaagctaaccgatagacaaatataaataagtttgaattattataatctgttatgtggaattcatatgttcattaacttatgttgagcttgaaagagcgaatgccactagagtttctgagtttcagattcagttaagattcaatatttttgtttccgttttggctaaagtgattccttcatccgttgccttttgacttgcgtttaacaatagtgcttaaaattagtacctttgactaagttcgtttcgactaagatttggttttaattaatttataatatatcttaagtgtttccatttcttgcttgcttgaacatttaaacatatacatataaa

SEQ ID NO: 5882 - DNA, 966 bp, DROSOPHILA
atggttttaacaccaacgaaagatgggcccgaccaggagagcatgccgttgccggccgacaatggggagtcaccaagtaaacagcaggcccctgtcaatcgggatgagatgcactacttggatcttctgaggcacatcatcgcaaatggagagcagcggatggaccgcacggaggtgggcactctgtccgtgttcggcagtcagatgcgcttcgacatgcggaactcctttcctttgctgaccacgaagcgcgtcttcttccgcgcggtggccgaggagctgctgtggttcgtggcgggcaagacggacgccaagctgctgcaggcgaagaatgtgcacatctgggatgggaacagctccagagaatttctggacaagatggggttcacggggcgagccgttggggatctggggccggtgtacggcttccaatggaggcatttcggggcgcagtacggcacctgcgacgacgactacagcggcaaggggatcgaccagctgcgccaggtgatcgacaccatcaggaataacccctcagaccgtcgcatcatcatgtcggcttggaatccactggacatcccaaagatggccctgccgccgtgccactgcttggcgcagttttacgtctccgagaagcgcggtgagctttcgtgccagctataccagagaagcgcagacatgggcctgggcgtacccttcaacatcgcctcctatgccctgctcacccacatgattgcccatgtgacgggtctgaagccgggcgactttgttcacaccatgggcgacacacacgtctacctgaaccacgtagagccgctgaaggagcaactggagcgcacaccgcgaccctttcccaagctgatcattaaacgtcaggtgcaggacatcgaggacttccgcttcgaggactttcagatagtcgactacaatccacatccaaaaatccaaatggacatggccgtgtag

SEQ ID NO: 5883 - protein, 321 aa, DROSOPHILA
MVLTPTKDGPDQESMPLPADNGESPSKQQAPVNRDEMHYLDLLRHIIANGEQRMDRTEVGTLSVFGSQMRFDMRNSFPLLTTKRVFFRAVAEELLWFVAGKTDAKLLQAKNVHIWDGNSSREFLDKMGFTGRAVGDLGPVYGFQWRHFGAQYGTCDDDYSGKGIDQLRQVIDTIRNNPSDRRIIMSAWNPLDIPKMALPPCHCLAQFYVSEKRGELSCQLYQRSADMGLGVPFNIASYALLTHMIAHVTGLKPGDFVHTMGDTHVYLNHVEPLKEQLERTPRPFPKLIIKRQVQDIEDFRFEDFQIVDYNPHPKIQMDMAV

SEQ ID NO: 5884 - DNA, 9507 bp, DROSOPHILA
tttcgaatggagatggcgcgcgttctggtggaactcagggaggaggatcagcacatgctcgcggcggcgggacccgaagacgttctagagcgcagcatgcccaaactaacaccagccccgaattccagttttgccactcagctggagaaatcccagtaccatctatccaattccagctaccaaatcagtagccgaaaaacaccaacttcgtttgactatgtcgacagctccatggttgagtgcgatgtcaagatagagaatgagcctctgctatgaagacttcataccaaatttttacgattttacattcaccaataattctctaaggagtattcctttcatattgttacaagtcttagatgaaaccctactcatacatgagtagttgtttggcaaaatgcctatcataagaccattatccacacgctgaattgcttgtaaaatattgatttgtattgtccaataatttaaccattttgactccgggtatgccattcgcgggctgttttaaagcaatttacacgaaatggaatatacaaacaaaataacagctgatgctgattaaattttaaggtttagcttatcattgggatgtcatctggaaggaattttaatggatttgaattgatttaagattctgttttcgaatagacacgtaataaatatgtgcatacgatttaaaaaaggtccaatgattttaaggtgagataatcctaaaatcgattcggtttcatttcccgatgttccactacgaaatgtcaaccataaataaaacaaataaaagaggcaacttggtcgaaaacaatctcagttcaattgtaatgaaaattgacgtccggtgcataatttatatataataatatatatctatatatatataaataataacaattcaagattatttgctagtttatgttccttgtctaacgttccagaaaaaaagtaacttggcatttggcagtcggacgttttcgtttcggcgaatggtatttagttaggcagcagtacggtcacactggcggaactaactaaaaaaaagtgtgaaaatttgtcaaatatttcgacaagtacaacgatctaatcgattcgggagcagaattcagcccccgcagcaaagcgcccgcgtgtaccacctgatccgaggatgcagagatccacagaccggttgcgccggctgaaaaagctgaagagcgttacgggagcgcaggatggcgttggtggcggcgatgcggcggcgacggcggataatcggacctccgcatcgtcggacacgaacggagcagccgccagtagcggagccggcggcaatcagccaggcacactcaatccggaggtcttcaagcacttggacaaatccggacgcagtgaattgtacgtgtgtggtaccacgctccgacaccgatgcaaacgcagccagagatatatgcacacgcgcccaaacactcgcactcgcagtacagtggctgtcgtcagtttgtgtcttgctgctggatcgactgtttggactgactgttcctcgttccctagctaaattacacgtttacttctagcctgaagtacctcaagcatcagttgcaggatgcggcggatacgcccgtttacgacaagaacggcgtctttaagcagggcatctccaatgccatataccagcttctttggcagactctgcgcttcactcacaaaaaagacatagtactccacctgctcctggaagtcgtggtgagttgaatttgttgttgtaaagaaagatttataaggcatttacttcttaacaattgtcgctatatataacgttttcctatgttgcaggccctccatgcggactttcccagccttatagtggacgtggttaacattctggacagcgaaacctcccttataaccgatggacttcaggaagaacgacatgcctttgtgcaacttgttaaagacttggacagggtgattccagaaagtcttttgaaagaacgtttggaaatcgatacgttgcaggaggcgggaatcgtcaagaacaagagcttttactctaagttcatcaaggtcaaaaccaagctatagtacgtacatatagtaaaagcgatttgaggttaataaaatatataatctctactttccctttaagctacaagcagcgtcggtttaaccttttccgcgaggagagtgaagggtttgccaagcttatcacagagctaaaccaggagttcgacgagaacaccactccagagagcataatggatatcataaaatcccttataggtaagatagttttgatagctatgaggaaacacagtcaaaccgactgcattaattgttaattgaattgcaggctgcttcaatctggatcctaatcgtgtgctggacattattatcgagtcctttgaaactcgtccggatcgatggaacttgttcatacccctgctgcgcagctacatgcccactggtgccattatttgcgaagtcctcggctacaagttctgccactttaaggactcccgcactccccgctcgttatatcatgtatgtgctcttttgcttaagcatggcgtcattgctctgaacgatgtatacgtgtggttgactccaaacgatgggagcattaaggcggactgggaggaagacctggctgatgccagggaaatggtccgcaagctgaaccttatacaaaccaataagaaggaagacgaaaaggatccaccaccgccgccttcagttaagaagttcaatgaggtagatttaataaacgttttttgagggattctactaacgatatcgttttattcgcaggaaaaatacaatgcaaaccaaaaatttggcctctgcgaagctttgcttaaagttggcgactgggagaatgcgtacaagatcatccagaagcttcccgagcaggcggttgtattgcaggaacccattgcccgtgccattgccgatctgattcacctgtccgtggagaatatttattacaaaaagtgttttaaggctcccgcaggacgtaggccgagccgcaatcgcctgtatgaggattccaagttggtggccaagatgcaggcaaaggaattcggcgacttaaggaagtacacctggccgatggctaacgtgttgggacctgccatgcactacgacactgtgctgatgtacaaactaatccgtattatgcggaaactagttgtcgatatgggcgtggacagcctaaatggacctccgccgaattcggaagcagagcagcactactatgacattatgagctcgctggacgcctgcattctaccctcccttctatacttggacaacaactgttccatgtccgaagagatctgggctgtgcttaaatatttcccgtatcattttcgctacagtttgtatgcgcgttggaagaacgacagctatcagctgcatcccaatttgatcaggagatgtggattggcacaacgggatattaaggccctaatgaagcgcgtgagcaaggagaacgtcaagcagctgggacgactggtaggaaagtatagccattgtgcgccaggactgcttttcgactatgtgagtttcatctaggtactattccaaaacagtttattcatttccattactatttcaacagattctcttgcaaattcaaatctatgataatctaattggtccggtctgcgacctgctcaagtatcttactgccttatcctttgactgtttgggatactgcatcatcgagtcgttgacgttaacaggtcgtctcaggttcaaggatgacggcacttcgttatccttgtggctgcaaagtcttgcctccttctgcggcaccatatacaagaagtacagcattgagctaagtggtctgcttcagtatgtggccaatcagttaaagtcgcagaagagcctggacttactgattctgagggagatcgtgcataagatggcaggcgtggagtcctgcgaggagatgactaatgatcagttgcaagccatgtgtggtggtgagcagctcaggggagaggtaattatccaagtcactgcaatattgttctgttaattgagtgtatttgtcgctataggctggctactttagtcaagtgaggaatacgaaaaagtcctctaatcgcctaaaggaggcattggccaataacgatcttgccgtggctatttgccttttgatggctcaacagaaacactgcgtcatttatcgtgagacggcggcacacagccatttgaagttagtgggaaatctgtatgatcagtgccaagacacactcgtccagtttggtacgttcctaggctccacctattctgtggatgagtatgtggagcggttgccctcgattataaccatgcttcgagagtaccacataaacacggatgtggccttcttcttggctaggcccatgtttactcatcagatcaatgtaagttcgagcaaaccattctgcaaaatattacaaaaaggttaaccgaatccctcttacagcaaaaatatgatcaattgcgcaaggatgaccctaacgccaagaagctcaccacgacgcaaaagctccagaagtatttggaagctacgcagctgatcatgaaccctattgtagagtctgttcgtccactgcacagctccaaggtgtgggaggacattagtccgcagttcctggtaactttttggagtctgagcatgtacgatctgcacgtgccgaacgaaagctatcagagggaggttgccaagctaaagcagctggcccagcaagcggcagaaggcaaagactctaaccaatctaagaacaagaaggagcaggagcgctacattgcgctaatggagaagctgaacgacgagcgaaagaagcagcatgagcacgttgacaagatctcgcagcgtttgcaggagcaaaaagatagttggttccttctacgatctggcaagtccgcaaagaacgacaccatcacgcaattcctgcagctctgtctcttcccgcgttgcaccttcacagctctggatgcgttgtattgcgcgaagttcgtgcacaccatccacaatctcaagacatcgaacttctcaaccttgctgtgctatgatagggtaataagactaaatacatttacttaaactcgatcttactccttcttcttgtcctcagatcttttgtgacatcacttattcggtaacatcgtgcactgagggcgaggctacgcggtacggacgctttttgtgcgccatgctcgagaccgtgatgcgttggcatgcggatcaggcggtgtttaataaggagtgcgccaattatcctggttttgtgacaaagtttcgtgttagcaatcagttctcagaggccaacgatcatgttggctacgaaaactatcggcatgtgtgtcacaagtggcactacaagattaccaaggcgattgtattctgtctggactcgaaggactttatgcagatcagaaacgcactgatcatcctaatgcgaatactgcctcactatccagttctttccaaactggcgcaaatcatcgagcgtaaggtggacaaggtgcgcgaggaggagaagacaaagcgaccggatctgtatgccattgcctccagctacattggacaactaaagctgaagactccccacatgctaaaggagagtgtctttcatcaaatcgccgagcggccgaataaggagtcgccgaccagtgttggcgctcccgccgcagccaccagatccgataagttgtcacccacctctccatctgggaatacacaaggaacaagggctccaggcggagctgctcctttctacaacagcgaacaaaagtcggtgatcaaagaaccagatgcaaaagcaggtgagttgaaatattaaatgaatgtaaatcttaaatcttaaatcatcaaatcttaaatatgttttagcctccacaacgcgtgaatcgaagagccaaagaggcgagggcaataatgtcactttggtgtccacagccacttcaacggcatccaataacgaacgcgagagcaaacaacgtgacctgccagcgccacgtgagtcccaatcccgcagcaaggatgaccagcaggagcaggcaaacaacggcagtaatggcagccgacagagcgagagtcgtaatagagatgtggaacgagaccgacatgatcagcaagaccaacgaagcattagtagccatcgcagttccagagacattgtgcgggtcaaggagcgcacagaagccgagctgcatcagaggtcgcgggaacgttctcaacgtctggaggagttggaagcgcagcagcggaagcgggaaaaaacatcgcgacggggcggcgaagagcgcatccgacatggtgatggcgtcgagacagtggacctggtgggcagcaccgacaatcgccactacgaggagttcgaggggcgtatgagggacctgagctcagtgtccaacgagagcaacggttcgttgcaccatcgacaacgtagccatgagaccattgaatttgaaaagggtacgaagatcatctaaatctgaagacttcattcctaaccgtttattttagtagattcaaagcgtcgcaaattggagtcatcaaccagcagttcaaaggttagtagcataaggttgcagacgtaagttcgctaagacaacaacagtataaaacaacactacgatgacggtcaaatctggagggaacttactcgaggttctgattgatccaaaatcaacgaatcaataacgcacctgccacgccatccaaaacaaaaaatcattgttattaaaactgaatcttgatgcggatgcgatggatcttgtgggcatctgtaataatccttagttctgaatgttgaacattccgaggtgttagttttaagcttagttttaagagaaaagtgaatcattgtaaaaggatcatcgttaatttacctagaaggaaattatattttgtttttctaaatttgttaaataattgtaatagtataagggtagttgtgtaaataagcaatcaaattggagtaccgggaccacagagacgacaatcgaatgtaagaagacgaatctcgcaggaagcgctgaggactatatttcaaaaccacatgtgtttgcgatgaaggcgtaaaattctgcgaccaacgaaaaacgtataacatttgaaggaaatataaatccaaaccaactatattctgccataaaatctacaagaaaaaagaaaaacatcaaaaacatcggttgccataaattacaaccaaaagcttcaatatattgttaaactgcaaaaaaactacaaaaaggactgcaacaaataagacgattctgaaccggtactgaaaaggacatatctttgccatcttgtgatgatcattcagtacaagtcaaagtactgaatgatgaaaaacccctgcatgtaactcaaaaccaatcttctggagtcaaaatagcctgcttgccaatatgaggtctacagtaaatgagcgctgtatttacgctggatctaacaacttacatagttcagaaaaccatttatacatttcgaatcttcaaaatcaaacgttccacctccgactgccaatgtgaagatgtagatgtcaagcattataaaaccggataccaactcacgatgtcagcgtggacaaagccatttcaatttctacatggaacaagcgttataaaaccggatttcaacttactgtgcaaacgaggacaaaagcaattcaattactctgtggaatattagcttctgaataattcttcaacatcggtcctgtgaaaaccccaatgctcccgaggattcgtagtggatacccgactcagccgcttctctgacttccaaccttcagttacctgtgcagcccagtttagttgttaattcgttgatattgagactgtgcatgggtaagtaatgggcgcgtggtggggtcggcggacatataaaccatataggacagaggacacgtaacagacacagtagtaacatttggctttttgttcgttttaagtagttagacgcatacccttaaacgcttagattaagcaacagtcttgacatgtttttacaaccattaatcccatgccgttccagaaggtggaagaactggtggacagcgtaaagaaggcgcgcgcccttaagaccaaagagcgcaacaaggacaaactgtcggatgaggagcgagacgctcgcaaggatcgcaagctgggacgcaagcgggatcgcgtcgacgagtccaacagcaacgaacataaacgccggcgcgaaggtgagagaatagtcatttatcggatagtcaagacattcaaaagccaacgatttacaggacaaaacggtgaagaagagctgcgggatagagagcggcatagggtgagtgatatatcccaatagtcgacaacattcccaagttctggaattgcgtactggaattacaactaatgtggttgccaatccataggagaagtcaccgcgggagcgatcacatgaaaagttcgatagagaaagaggaggagccagcggttcgcgggccgaggagcggcagtacatcagcaagtccgctcggtcctccagagtcaactattgattgcactccgggcttttgcttgcccgttccgtgcattgtgaagcgcattttgtttaacttttaaagaatttggaatggcctttccatccattgtagcaaagaacgaaactacttttgaaatgtttacaagttttagtgactattttaaaacagagatccaaacaattacattgtaaaaatgactacatttttgtgttgtttactaaacgggaactgtaatagccataatatttgtataaaaagttcattccccaaatagatgttcagattgtctttaaaacaaataataaattgttcatttgcaatgagattaagatgtaaacccttcgtgttatttatttatcacccaagcgacagtgaaacaccagctttctatttcgaatcaaattttattcaatttaaattatttttacatttaacagttgaacttgaggtttaatctcgatttaaaacacgcatatcagatatctaaacaagcttgccactaacgttttttacaactctttccattattttaaatagacttttcttttactttgaaagtgttcctgaggtctttttaggtaggtaccgttgttgattcgattcgattcgattccacagtgatgagagaactaggcgaattgtttatcttgatttttattaaataaaatattaacaattcggtgctgtggcccgtgttcacttcatttgttttagttgttgcttttggcgcctaaacttgaactttgactttagcaaaagtaaagcacataaataataaaataatatcaaaaattgatttagttctgtggctgatcctccggcgctggcagcttctcccaggtgggctccactccccaaatctcgcgggcgtactcggcgatggtgcgatccgacgagaatttgccgctggacgcaatgttgttgatggacatctccagccacttggcttggttctgcaaattaggcaaaagtatcgtggtttaaataatgatctttgctacttatttttctaata

SEQ ID NO: 5885 - DNA, 5061 bp, DROSOPHILA
agcagtacggtcacactggcggaactaactaaaaaaaagtgtgaaaatttgtcaaatatttcgacaagtacaacgatctaatcgattcgggagcagaattcagcccccgcagcaaagcgcccgcgtgtaccacctgatccgaggatgcagagatccacagaccggttgcgccggctgaaaaagctgaagagcgttacgggagcgcaggatggcgttggtggcggcgatgcggcggcgacggcggataatcggacctccgcatcgtcggacacgaacggagcagccgccagtagcggagccggcggcaatcagccaggcacactcaatccggaggtcttcaagcacttggacaaatccggacgcagtgaattcctgaagtacctcaagcatcagttgcaggatgcggcggatacgcccgtttacgacaagaacggcgtctttaagcagggcatctccaatgccatataccagcttctttggcagactctgcgcttcactcacaaaaaagacatagtactccacctgctcctggaagtcgtggccctccatgcggactttcccagccttatagtggacgtggttaacattctggacagcgaaacctcccttataaccgatggacttcaggaagaacgacatgcctttgtgcaacttgttaaagacttggacagggtgattccagaaagtcttttgaaagaacgtttggaaatcgatacgttgcaggaggcgggaatcgtcaagaacaagagcttttactctaagttcatcaaggtcaaaaccaagctatactacaagcagcgtcggtttaaccttttccgcgaggagagtgaagggtttgccaagcttatcacagagctaaaccaggagttcgacgagaacaccactccagagagcataatggatatcataaaatcccttataggctgcttcaatctggatcctaatcgtgtgctggacattattatcgagtcctttgaaactcgtccggatcgatggaacttgttcatacccctgctgcgcagctacatgcccactggtgccattatttgcgaagtcctcggctacaagttctgccactttaaggactcccgcactccccgctcgttatatcatgtatgtgctcttttgcttaagcatggcgtcattgctctgaacgatgtatacgtgtggttgactccaaacgatgggagcattaaggcggactgggaggaagacctggctgatgccagggaaatggtccgcaagctgaaccttatacaaaccaataagaaggaagacgaaaaggatccaccaccgccgccttcagttaagaagttcaatgaggaaaaatacaatgcaaaccaaaaatttggcctctgcgaagctttgcttaaagttggcgactgggagaatgcgtacaagatcatccagaagcttcccgagcaggcggttgtattgcaggaacccattgcccgtgccattgccgatctgattcacctgtccgtggagaatatttattacaaaaagtgttttaaggctcccgcaggacgtaggccgagccgcaatcgcctgtatgaggattccaagttggtggccaagatgcaggcaaaggaattcggcgacttaaggaagtacacctggccgatggctaacgtgttgggacctgccatgcactacgacactgtgctgatgtacaaactaatccgtattatgcggaaactagttgtcgatatgggcgtggacagcctaaatggacctccgccgaattcggaagcagagcagcactactatgacattatgagctcgctggacgcctgcattctaccctcccttctatacttggacaacaactgttccatgtccgaagagatctgggctgtgcttaaatatttcccgtatcattttcgctacagtttgtatgcgcgttggaagaacgacagctatcagctgcatcccaatttgatcaggagatgtggattggcacaacgggatattaaggccctaatgaagcgcgtgagcaaggagaacgtcaagcagctgggacgactggtaggaaagtatagccattgtgcgccaggactgcttttcgactatattctcttgcaaattcaaatctatgataatctaattggtccggtctgcgacctgctcaagtatcttactgccttatcctttgactgtttgggatactgcatcatcgagtcgttgacgttaacaggtcgtctcaggttcaaggatgacggcacttcgttatccttgtggctgcaaagtcttgcctccttctgcggcaccatatacaagaagtacagcattgagctaagtggtctgcttcagtatgtggccaatcagttaaagtcgcagaagagcctggacttactgattctgagggagatcgtgcataagatggcaggcgtggagtcctgcgaggagatgactaatgatcagttgcaagccatgtgtggtggtgagcagctcaggggagaggctggctactttagtcaagtgaggaatacgaaaaagtcctctaatcgcctaaaggaggcattggccaataacgatcttgccgtggctatttgccttttgatggctcaacagaaacactgcgtcatttatcgtgagacggcggcacacagccatttgaagttagtgggaaatctgtatgatcagtgccaagacacactcgtccagtttggtacgttcctaggctccacctattctgtggatgagtatgtggagcggttgccctcgattataaccatgcttcgagagtaccacataaacacggatgtggccttcttcttggctaggcccatgtttactcatcagatcaatcaaaaatatgatcaattgcgcaaggatgaccctaacgccaagaagctcaccacgacgcaaaagctccagaagtatttggaagctacgcagctgatcatgaaccctattgtagagtctgttcgtccactgcacagctccaaggtgtgggaggacattagtccgcagttcctggtaactttttggagtctgagcatgtacgatctgcacgtgccgaacgaaagctatcagagggaggttgccaagctaaagcagctggcccagcaagcggcagaaggcaaagactctaaccaatctaagaacaagaaggagcaggagcgctacattgcgctaatggagaagctgaacgacgagcgaaagaagcagcatgagcacgttgacaagatctcgcagcgtttgcaggagcaaaaagatagttggttccttctacgatctggcaagtccgcaaagaacgacaccatcacgcaattcctgcagctctgtctcttcccgcgttgcaccttcacagctctggatgcgttgtattgcgcgaagttcgtgcacaccatccacaatctcaagacatcgaacttctcaaccttgctgtgctatgataggatcttttgtgacatcacttattcggtaacatcgtgcactgagggcgaggctacgcggtacggacgctttttgtgcgccatgctcgagaccgtgatgcgttggcatgcggatcaggcggtgtttaataaggagtgcgccaattatcctggttttgtgacaaagtttcgtgttagcaatcagttctcagaggccaacgatcatgttggctacgaaaactatcggcatgtgtgtcacaagtggcactacaagattaccaaggcgattgtattctgtctggactcgaaggactttatgcagatcagaaacgcactgatcatcctaatgcgaatactgcctcactatccagttctttccaaactggcgcaaatcatcgagcgtaaggtggacaaggtgcgcgaggaggagaagacaaagcgaccggatctgtatgccattgcctccagctacattggacaactaaagctgaagactccccacatgctaaaggagagtgtctttcatcaaatcgccgagcggccgaataaggagtcgccgaccagtgttggcgctcccgccgcagccaccagatccgataagttgtcacccacctctccatctgggaatacacaaggaacaagggctccaggcggagctgctcctttctacaacagcgaacaaaagtcggtgatcaaagaaccagatgcaaaagcagccacttcaacggcatccaataacgaacgcgagagcaaacaacgtgacctgccagcgccacgtgagtcccaatcccgcagcaaggatgaccagcaggagcaggcaaacaacggcagtaatggcagccgacagagcgagagtcgtaatagagatgtggaacgagaccgacatgatcagcaagaccaacgaagcattagtagccatcgcagttccagagacattgtgcgggtcaaggagcgcacagaagccgagctgcatcagaggtcgcgggaacgttctcaacgtctggaggagttggaagcgcagcagcggaagcgggaaaaaacatcgcgacggggcggcgaagagcgcatccgacatggtgatggcgtcgagacagtggacctggtgggcagcaccgacaatcgccactacgaggagttcgaggggcgtatgagggacctgagctcagtgtccaacgagagcaacggttcgttgcaccatcgacaacgtagccatgagaccattgaatttgaaaaggattcaaagcgtcgcaaattggagtcatcaaccagcagttcaaagaaggtggaagaactggtggacagcgtaaagaaggcgcgcgcccttaagaccaaagagcgcaacaaggacaaactgtcggatgaggagcgagacgctcgcaaggatcgcaagctgggacgcaagcgggatcgcgtcgacgagtccaacagcaacgaacataaacgccggcgcgaaggtgagagaatagtcatttatcggatagtcaagacattcaaaagccaacgatttacaggacaaaacggtgaagaagagctgcgggatagagagcggcatagggagaagtcaccgcgggagcgatcacatgaaaagttcgatagagaaagaggaggagccagcggttcgcgggccgaggagcggcagtacatcagcaagtccgctcggtcctccagagtcaactattga

SEQ ID NO: 5886 - protein, 1638 aa, DROSOPHILA
MQRSTDRLRRLKKLKSVTGAQDGVGGGDAAATADNRTSASSDTNGAAASSGAGGNQPGTLNPEVFKHLDKSGRSEFLKYLKHQLQDAADTPVYDKNGVFKQGISNAIYQLLWQTLRFTHKKDIVLHLLLEVVALHADFPSLIVDVVNILDSETSLITDGLQEERHAFVQLVKDLDRVIPESLLKERLEIDTLQEAGIVKNKSFYSKFIKVKTKLYYKQRRFNLFREESEGFAKLITELNQEFDENTTPESIMDIIKSLIGCFNLDPNRVLDIIIESFETRPDRWNLFIPLLRSYMPTGAIICEVLGYKFCHFKDSRTPRSLYHVCALLLKHGVIALNDVYVWLTPNDGSIKADWEEDLADAREMVRKLNLIQTNKKEDEKDPPPPPSVKKFNEEKYNANQKFGLCEALLKVGDWENAYKIIQKLPEQAVVLQEPIARAIADLIHLSVENIYYKKCFKAPAGRRPSRNRLYEDSKLVAKMQAKEFGDLRKYTWPMANVLGPAMHYDTVLMYKLIRIMRKLVVDMGVDSLNGPPPNSEAEQHYYDIMSSLDACILPSLLYLDNNCSMSEEIWAVLKYFPYHFRYSLYARWKNDSYQLHPNLIRRCGLAQRDIKALMKRVSKENVKQLGRLVGKYSHCAPGLLFDYILLQIQIYDNLIGPVCDLLKYLTALSFDCLGYCIIESLTLTGRLRFKDDGTSLSLWLQSLASFCGTIYKKYSIELSGLLQYVANQLKSQKSLDLLILREIVHKMAGVESCEEMTNDQLQAMCGGEQLRGEAGYFSQVRNTKKSSNRLKEALANNDLAVAICLLMAQQKHCVIYRETAAHSHLKLVGNLYDQCQDTLVQFGTFLGSTYSVDEYVERLPSIITMLREYHINTDVAFFLARPMFTHQINQKYDQLRKDDPNAKKLTTTQKLQKYLEATQLIMNPIVESVRPLHSSKVWEDISPQFLVTFWSLSMYDLHVPNESYQREVAKLKQLAQQAAEGKDSNQSKNKKEQERYIALMEKLNDERKKQHEHVDKISQRLQEQKDSWFLLRSGKSAKNDTITQFLQLCLFPRCTFTALDALYCAKFVHTIHNLKTSNFSTLLCYDRIFCDITYSVTSCTEGEATRYGRFLCAMLETVMRWHADQAVFNKECANYPGFVTKFRVSNQFSEANDHVGYENYRHVCHKWHYKITKAIVFCLDSKDFMQIRNALIILMRILPHYPVLSKLAQIIERKVDKVREEEKTKRPDLYAIASSYIGQLKLKTPHMLKESVFHQIAERPNKESPTSVGAPAAATRSDKLSPTSPSGNTQGTRAPGGAAPFYNSEQKSVIKEPDAKAATSTASNNERESKQRDLPAPRESQSRSKDDQQEQANNGSNGSRQSESRNRDVERDRHDQQDQRSISSHRSSRDIVRVKERTEAELHQRSRERSQRLEELEAQQRKREKTSRRGGEERIRHGDGVETVDLVGSTDNRHYEEFEGRMRDLSSVSNESNGSLHHRQRSHETIEFEKDSKRRKLESSTSSSKKVEELVDSVKKARALKTKERNKDKLSDEERDARKDRKLGRKRDRVDESNSNEHKRRREGERIVIYRIVKTFKSQRFTGQNGEEELRDRERHREKSPRERSHEKFDRERGGASGSRAEERQYISKSARSSRVNY

SEQ ID NO: 5887 - DNA, 3569 bp, DROSOPHILA
ctgattttgggaaacttcgacgtgcagagagcattacttttgtatgtggccttctgaaagacgatttatattcgtttagactggcttttttatttgctcactgaaatctcacttatataaccgaagcaaacactcgcgaaaaattgaagtcgcacttaaacaaacagcaaggtaaggaagggagtccaacaaaggggagcgatgggcgcgagggctattgttcgattatccttggattaacagttgcaggtggttgcattaaaacctatttaaaggacgattccgtcgctcctttcgctatcccgtgattctgattgggataacgtaacgctgtgtcgtaacgggacgttggcaggaaactgttgagcagcaaaaggacgtaatagccgaatggcaggacgaaaaggatagcggttaacgggggaggcgacagcgggagagcaaggaagcaaaaagaaaagagtagcgcagacgcggcacgcggcacgcgaatccaaaagagagggaagatggtaaacaaaagagggagaaacataatgcgaaaaaaaattcacattttcgacgaaatcagctattttgtattttaccatctctaaggcccaaaatcaagtaactcaattttaagatatatcgaattattcatttgattgattacgccaattgcaacattcaattcaagtgccgttagaaaaaaaagcgttagtgatttttcaaaaaatgaactggtcatcagaaagtgttatcgatgttgaacttcgtgttagcagtgattgcaattcacatagtgacaaaaactaatggaaaaaatattcaaaaccacaaaccatacaaacttttaattgggaaatgtgtgtgtcagtaaaatgatttaattgccacaatgaaattaatataatgaaagccatactgtgactgcctcaatgcgaatttgtgttcatctctgaaatgaactagcggtgaactagccgtcctaatgaacacttgccgacataccctctcataaattgtttatgatttcgatacgtgaacggggaattgcgtggattcatagaaacgatggtgttcaagtgccaggaggacagtttcctgaaggaggtgagccctcaaatgaagcgcaaagtaccaaattacataatttgtgatataatttgcggcagttcaagacaaaaatcgttagcagcgagtttgccaccttggattggacagatcccagtggaaaggtggagaaactcaagggcttcaatgtgatctgcgaggacacgatactatttcccgagggcggtggtcagccctgcgattacggaaccttaggcggatttccagttaagaatgtccagagaaaaggctctacggctgtacattttgtggaatccccaacgagtttcgagcaggatgccgaagtccttctgacactagactaccaaagaagactggatcacatgcaacagcactcaggacagcacctgatcaccgccctgttcgacagggagttcaagtacgataccacctcgtggtccctgggatccactgtctcttacattcaattaagtacgcctcatttgataagtcgcgagtcattggacctcatcgaacgtcaggccaacgatctgattcgcgagggccgtgaagttacggtgcttctggtggatcccgaggtggcgcaagagttccaggatgccagagctcccaggggattgcccaaggatcacgagggtctggccagggtggtgcgaatcgagggcattgagagcaacatgtgctgcggcacccacgtcacgaatctctctcaactgcagtgcattaagctgctctacgccgaagaaggtgaaggcgaatgttctggtgcactttgtcgtcggcgagagggtgctcgtaaagcttggcgaggtctttcagcgcgaacagcagctaacacaggctttaaagtgagactctcaaggatgtgggccaattgtctgtaaataatcatctgcatttcacagaggtggacccggtcagcacttggagcttgtccagaagctacagcaaaatgtgaagggcagtcgaaagtacttccagcagctgcttaaacgttacgccaccgccgaagccgagcgtctctgcgatttgcccaaaaaggatcgtccgaaatatttctctctccatcgacgcgatggcatcgaggtggacttcatcaacacattcttgcgggcggctccggaaggaatcttctactttctcactgtttccgagagcgtttttgctggcagcagtgccaaaggacatctggtgctgcgcggagatccagaaattgtcgggaaactcggtccccaatttatggaaattctcgagggcaagggaaacggcaaagaggacaatttccagggaaaaatcaacaacttggctagactgcaggaatgccaagagctgctggaggcggagtttaaaccaaagaggatcatcgaagccgctcctgcaaatggagctcaactggaggcagaggaatgaagtatttttgtagtgttcgaatatacaatatttgtatgcgctacgaaaattcataaaataaatattgcctagttttataacaaatagttagccatatcgtaatccgatgagaaagaagtaaacacatgttcatgtactaaaaacatacatatattggtatattctccctcgattgacttaagcagcaaacacggtcttaaggataacgaaagcgttaagctttgtggtgtgggatcacaggtagttgacatcatagttgcgcatcttccatttgagtcgccagtattgattccaaaatcccacatcgatgatccgttcgtggaagttgaagacgcccacgttggtatattcacagatggccggataggtgcagtcgtcctcgtcgtatagatccacccaaaggatcgtgcagatgccgagagaaaggagacgcagtttcttttgattgatcgccctctccaaggttagcagatagtcggcggacacgggattctgaagttctaccggcactgtgatcattcgatttgtggcaccccttagcagagtcataaaggcctcctcgccgggattcttcagattggcttggtacatgaacagcattcccgttccatagagaagcgcctttttcggcttcgtgtaggattctcgcacaacacccactgccacctctgtgtagtccctgaccaggccgttccaatactgcacccacttctccacgaacgtgcccttgaagcgctccggcatctgaattcgatcggtcaatctctgacgcagtgccgttatacgaccacccacgcggaggaactgcatctcctggcgggttttcagtgatcaatttggaaaaagccgaaaaaccaggtggaattaaagtgctagtgttatcaaatcaaaaaaacagctgttcagtgtgactgtgcgccggaaaaaatatcatcgacgcgacgatgtgtatatcgatatcaaccgaatagtggaaaataattagctttaactgtatattatcaaatatgtgtgactccattttaaaatattgtgcgtttaacattattttgaaaacatacatacattttattatttttttt

SEQ ID NO: 5888 - DNA, 1450 bp, DROSOPHILA
taaattgtttatgatttcgatacgtgaacggggaattgcgtggattcatagaaacgatggtgttcaagtgccaggaggacagtttcctgaaggagttcaagacaaaaatcgttagcagcgagtttgccaccttggattggacagatcccagtggaaaggtggagaaactcaagggcttcaatgtgatctgcgaggacacgatactatttcccgagggcggtggtcagccctgcgattacggaaccttaggcggatttccagttaagaatgtccagagaaaaggctctacggctgtacattttgtggaatccccaacgagtttcgagcaggatgccgaagtccttctgacactagactaccaaagaagactggatcacatgcaacagcactcaggacagcacctgatcaccgccctgttcgacagggagttcaagtacgataccacctcgtggtccctgggatccactgtctcttacattcaattaagtacgcctcatttgataagtcgcgagtcattggacctcatcgaacgtcaggccaacgatctgattcgcgagggccgtgaagttacggtgcttctggtggatcccgaggtggcgcaagagttccaggatgccagagctcccaggggattgcccaaggatcacgagggtctggccagggtggtgcgaatcgagggcattgagagcaacatgtgctgcggcacccacgtcacgaatctctctcaactgcagtgcattaagctgctctacgccgaagaaggtgaaggcgaatgttctggtgcactttgtcgtcggcgagagggtgctcgtaaagcttggcgaggtctttcagcgcgaacagcagctaacacaggctttaaaaggtggacccggtcagcacttggagcttgtccagaagctacagcaaaatgtgaagggcagtcgaaagtacttccagcagctgcttaaacgttacgccaccgccgaagccgagcgtctctgcgatttgcccaaaaaggatcgtccgaaatatttctctctccatcgacgcgatggcatcgaggtggacttcatcaacacattcttgcgggcggctccggaaggaatcttctactttctcactgtttccgagagcgtttttgctggcagcagtgccaaaggacatctggtgctgcgcggagatccagaaattgtcgggaaactcggtccccaatttatggaaattctcgagggcaagggaaacggcaaagaggacaatttccagggaaaaatcaacaacttggctagactgcaggaatgccaagagctgctggaggcggagtttaaaccaaagaggatcatcgaagccgctcctgcaaatggagctcaactggaggcagaggaatgaagtatttttgtagtgttcgaatatacaatatttgtatgcgctacgaaaattcataaaataaatattgcctagttttataaca

SEQ ID NO: 5889 - protein, 297 aa, DROSOPHILA
MVFKCQEDSFLKEFKTKIVSSEFATLDWTDPSGKVEKLKGFNVICEDTILFPEGGGQPCDYGTLGGFPVKNVQRKGSTAVHFVESPTSFEQDAEVLLTLDYQRRLDHMQQHSGQHLITALFDREFKYDTTSWSLGSTVSYIQLSTPHLISRESLDLIERQANDLIREGREVTVLLVDPEVAQEFQDARAPRGLPKDHEGLARVVRIEGIESNMCCGTHVTNLSQLQCIKLLYAEEGEGECSGALCRRREGARKAWRGLSARTAANTGFKRWTRSALGACPEATAKCEGQSKVLPAAA

SEQ ID NO: 5890 - DNA, 3643 bp, DROSOPHILA
ccgaagaacgttcagaatctaacgactacagctgttcttgacaaccacaccactttggaaacgactacaacaacaactacgcccacaccgccaagaagaagaacaaacgtcaatagaaaactgagaaaactgcgagttttggcatcgaccaaaaaggttccggtgcagatttcgagaaattctacagattccagcaaagccatgggagaattcaaaaagagtttaccgaaaagaatttaccaacggcgcaagcacttgaactccactgcaatgccagaagccgcgaaaaacacaacagctgataccgatatcgaaacgataaaaaagcttaagcgccgaacaacagcaacaccccggaaatcgacgaaggtcgatgataatgttatcgttcgaaacgctacgcaggcgataagtcacactttggcaaaatctcgcgccgatggtatatcagaagaaaaacacgctttggtcacagaatcggcaattatgactatttccagtggtactttaaaaatgaggcagccccatattaaggcaaggtcaaagccgcaaaggtccagaaaaatgtcgcacctggaaaacgataatttcataccgtcgttgcccattgaggtttattttaaaaaagtaaatcagcagtaaattgctatagtcttcgagtcatgcgtatacattgtgtaaatgaacagagcaaactaaagtcttaaccattatttatacttacagagacattttaagcaccaaatacataataaaacaaaaaattaagtgtttacttgcaacatacatacatacatacacatatagcttataaatagttgttttcaaatttaagactgagttggcaggccattgtaagtttggcgaaaatacggcatcggccttatcgttccattcccacagttcctaaactggcacagcgaccggtgctgacaatccgtgtgctaagatgcagcactgtgcgtttcttattattgaccggaaacaaaacgtgggtttgattcgatagcagggttctttcattttacatcttcggttggaacagtcactggactttgcaagtaggttagtaatttcgcatttttgtgtataaaaaaattgcaaattcgccggagaagcggcggacgacctaaatggcacttacagccggaggagacggtcaaaaacggcttggaagccagaattaacctccggtcatctcggcacattcagtaatatgcgaaagaaagtgcttacactcacacaagcacacatacacacatacaagtgcaaaaatgcagtacacaactttcaagtgccgtgtgtctcgatgactttgccaaattaaatgtttgaacactaaagtgccaagtgcctgggtatgcaatttggcatatgacatttcggatacatacatttgccgacacatatatacatacgtatgtatgcattttttcggcttgcacacacacgtatttacatacatatgtgcgaatccgtctgtgtctgtatgtacccatagaacgccgaggtatataatgtgctttcaacaccagctagtgtctttgtgcctaagtgtaaatgcattcaaatcccaattaatcggcagttaattaaatagataaataattaattcaatcacatcttgtgtcttgtgcggcagatatggctgagttggacgatcaattcgagaccacggattccggcgcatcgacgacctatcccatgcaatgttcggcattgcgcaaaaacggattcgtcatgctgaagtcgcggccatgcaagattgtcgagatgtctacttcaaagactggaaagcacggacacgccaaggttcatatggttggcattgatattttctctaacaagaagtgagtatattcgcatatttcttcctatctggtggcagcagcatttgcggagaacacaaaggaagcgacgcgctgctcttgaatgtaatcaacgaaaagtgtgcgcaagcaatcttatcttggaccaaagttatcaataaatttatggaggaaaattagagttcaacgcggcgacgccacctcaagccaaatccagatcctcttacttaacgcctgctttgtctatcgtcgtctttgcagatatgaagatatttgcccatctactcataacatggatgtgcccaatgtcaaaagggaggaccttcagttgattgctattagtgacgatagcttccttacattgatgaccgagagcggagatctgcgtgaagacttgaaggttccagagggcgaattgggtgaacaattgcgtttagattttgatagtggcaaggacttactggtgagtttgcctcgacaccatattattatttcgcagagaataatttaattatactttttcagtgcaccgttctcaaggcgtgcggagaggagtgcgttatcgcaattaaaaccaatactgctctggacaaataggcaaaatgtgtcgctgtaaatttctgttgcatttacatctgaaacaaatttattcaaagatgctgttataggctagttggctctacatcttaaatctggttctaacgattgtaattaatataacagaaactcgaagcatcatgtttgaataactaagtaacaagatacacgtttgccaataaaattttttacctaaacgtcatccgtaaaactatgattctcctgtttttcattgggtttaagctctttatttcagcaaactttattctaattcgcacagctaaatgggaaaagtaaacaaaatgttggtctggacgcacgaatgaatggcgtcacttagcattgtgatggtaaacggcgggaaccagatggggtgacgctaccggttttgaatgggtacaagatgaacttgtattattgacaacgctactgagctttgctacaccccatttaaaagtgtagtgtatcctgaaaaagataaggtactcggatatagagaatggaggaggcatattgtttgaggcaggtcggaatttcgtatagtaccaatttatgtatgtacatgtacatatgtacggtttaaatgccgttgttaaataacatttcaacattgatgtaccgactttcggaaaggtcaagtaaaagtacaaaaacaataaaaacaattttcataagttgtaagattagaagaataatcgataattttttaagccaaatgccaatcaatcgatataccaattgtcttgtaaatcggtttagtaagttgatagagaaaattcaaataagtatttcttcagctagcagatataaattacttgcataatcataaataaatattagattgaactaacaaaattgaactaactgaactaacaagaagataaaaatatttacaacgaccgctatgaaatgtagttaaaaaaatgtaaatctgaattttaattaaacttaaaatatatcaactagtatttaacattttcaacaaaaaaaaaagatttcttaaagcctaatttcaaattaagaataaataaaaatataaactcattacactcgtttcaattccgcgttccattcgagacactttttattccgatagcactgggcgatacatcacttgcaaacggtcctcccggaaatcgatagcttcttctttctttttctgtgtgtcttttttgcggtaaagtacatgagctgaaaatgtctcaaataaaatcggc

SEQ ID NO: 5891 - DNA, 764 bp, DROSOPHILA
attcgatagcagggttctttcattttacatcttcggttggaacagtcactggactttgcaagtagatatggctgagttggacgatcaattcgagaccacggattccggcgcatcgacgacctatcccatgcaatgttcggcattgcgcaaaaacggattcgtcatgctgaagtcgcggccatgcaagattgtcgagatgtctacttcaaagactggaaagcacggacacgccaaggttcatatggttggcattgatattttctctaacaagaaatatgaagatatttgcccatctactcataacatggatgtgcccaatgtcaaaagggaggaccttcagttgattgctattagtgacgatagcttccttacattgatgaccgagagcggagatctgcgtgaagacttgaaggttccagagggcgaattgggtgaacaattgcgtttagattttgatagtggcaaggacttactgtgcaccgttctcaaggcgtgcggagaggagtgcgttatcgcaattaaaaccaatactgctctggacaaataggcaaaatgtgtcgctgtaaatttctgttgcatttacatctgaaacaaatttattcaaagatgctgttataggctagttggctctacatcttaaatctggttctaacgattgtaattaatataacagaaactcgaagcatcatgtttgaataactaagtaacaagatacacgtttgccaataaaattttttacctaaacgtcatccgtaaaactatga

SEQ ID NO: 5892 - protein, 159 aa, DROSOPHILA
MAELDDQFETTDSGASTTYPMQCSALRKNGFVMLKSRPCKIVEMSTSKTGKHGHAKVHMVGIDIFSNKKYEDICPSTHNMDVPNVKREDLQLIAISDDSFLTLMTESGDLREDLKVPEGELGEQLRLDFDSGKDLLCTVLKACGEECVIAIKTNTALDK

SEQ ID NO: 5893 - DNA, 3239 bp, DROSOPHILA
cagccaaatctggagaaggagtacgaggatcgctttcaagcggcggaaaaggctagtcgtcttttgcaaaagtatgcgacgctggccaaaatcgggcattcgcccagcaaggcgttgcccgcaccagcgcgtctggaacccatgattcagtctgtggccacgtccaatgagttgcagcccgagggaggcaccatgaaaaagttcgcctccctaccacgcttcaagaaaattgacttttcgccgctgaagatgagactcaatagtgtcctccagagaaatccaccttcgccgcagcactaaaatggattctccgttttccgtaaccatgtttaacacttcgctgtggacacaaactgctttttaaccatttcgctatttatgttgtagtttcttgtgaatgtgatctgattagttcgacaagttgattattatgttatccgagtatataatacgctttcccacgatgcacttagtattaagccttatatgtatggtcatcctgctttgtcaaatgtattttaacgaaccatatccggatccacttggggggtcccctagtattactactgttgtgaaccaacgatgaatgtctaagaatatgctcaattatgaaaatttacaaaaacgcttttatacgtattaaaccaaaaaccacattgttgactcatttaggcgccttgttgttaaagaaaaactaaatttagctaaacaattttcaattctacagatgattaatcgtctaccaaaatgggcttacgccgcatcagatattttttggcggcgtagcctgaactacgcttttcggcttcgcataacatatcagagattagttaaacttacaataaaatgcttcaagatagcataaccaatgctgaactgtaccgtgactaaaccataagcttacaaataaaatatgccacaaaaatgaagtaaactttacaagcaaatgaaaaggtgtttgtttgttttcaagaaggaatcactttatttgctcactgtcttaactgtaaaccatgggtcgtcgccgttcgtttataaactcctgttccactcgcgaatccttgtgcaccacatagaagagcagagcgccaccggaaacgaaaaaccccttttcggcgattatctcggccagctgcttctcctcgtccaccttgtggacacagcccaccttgcggttctcgtagtaaacgtgcacgttacccaggcggtagttgtgtgccttgtcgtatggcagcttttcggtgagcagcgtcgccaggcaatcccgcatggtggtggtctccggcagctgctgataaaagtcgctgtacaggaactcggggtaggagaacgcagccggccagatcagagtgctgccgtcctcgtctaggtgcaccggatggtcctccaaaggcagaaactttggataaaggagctcctcactgaggacgtcctttttgccaactttttgatcgtcaaacttaatggcgcgctgctcgatggcgtcgcggagtctgtggaagcgtgtaagccgtcgctttgcctcggcagcttccttgcgctgattgcgttctatctcgagctacggaaataacttgtttaatgtgggttcctatccagttggatcacgtattctaaccttcttcatcttgttcttgtgcagcagcgcgatggccacctcgttgtcgacgtccacctcgagcagctcctcgcacatctgggtgcacagatcgaacctctccagctcgtacgcacactgtgccgaccgccagcgggcctttgtgtagtctggcttgtagaacagagctcgctgggcgtcgctcagcgaggatctgtagttcttgatgaagaagtgagccgccgagcggttgttgtagagaacggctagcacgtcgggattgtccgtcttggtcttgatgccctcggtaaagctgtagattgccatgcggaacttcttgtgcttcatgtaaaagttgccatcctccttgtagttgagcgccagctcgtcgcgcgtgttctcctccggatcgtacttgagcttctgcagaccctcgaacatcggatgcacgtcatcccctggctgaggagcacgtttcatgaagaacgggtgcttgtccatctcctcctgccagcggtcctccggccagccctcctcgtaacgtttcttctccaggccatcgataaacgcatccagttccgcgtccagctgggccgccagctccagacgctcctcatccgtccaggctttttgtgccgccatttgtttcatttggtctaatcagaaacagtgtgaccgcagacgaaccgttacaatataccaactggccaaaggtgccgcacatttcctaaaggtggcgcctctaaaataagggtggccctccgtctatcgatagtcgtacgcttccttctttaaacgagctaaactcggaacgaattatgatcttaacatcttaaatcttaacatggtaaaactttaagccttttgacgctttacgcagctgttgtgatatatcagaaacatcgatagtcgccataacatattgttattgtatgagagttttaaaattatcgatgcgctgatgaccccttcatcggcgttttcccacccctaattggcagagacgcgactgagctgggacgtaccgttaccgttggcagagacgcgactgagaaataaaattaaaacgtcgacgttccttcctcgtagaagaaaccaatcaaaataaaaacaaacagagcgtgcgttcgcgccaaatacttaacaacaattagcaaacgtaagaagcaaagtgagtgtcgtcggctgcgggagcccgtgtgcccagtttggaactgggatccgacccagtccacgtccgtctcgtccccgctaaatttgtaactcttgtttccccgtcttgtcccctcagtgcataccctcacggcggccattgagatggacaagctggatgccaatcttgagcagcagtttgatctcaatctcatcgaggctgtcaagctgaacccagtgatatacgacaggtcgcactacaattacaagcactttgtgcgcaaggcccagacctggaaacaaatcgccgaaacgctcggtgtgcctggtaagtgaaattcggctggttttggctacgggttttctgctttctgtcagccgtcttcggtccgtgccccaaccagccccagccaattgattaattctgtgcgggcgcaggtcgaaggggcgggacaagtcagtcgacgacgacgacagaaaacgacgcaaa

SEQ ID NO: 5894 - DNA, 1182 bp, DROSOPHILA
atggcggcacaaaaagcctggacggatgaggagcgtctggagctggcggcccagctggacgcggaactggatgcgtttatcgatggcctggagaagaaacgttacgaggagggctggccggaggaccgctggcaggaggagatggacaagcacccgttcttcatgaaacgtgctcctcagccaggggatgacgtgcatccgatgttcgagggtctgcagaagctcaagtacgatccggaggagaacacgcgcgacgagctggcgctcaactacaaggaggatggcaacttttacatgaagcacaagaagttccgcatggcaatctacagctttaccgagggcatcaagaccaagacggacaatcccgacgtgctagccgttctctacaacaaccgctcggcggctcacttcttcatcaagaactacagatcctcgctgagcgacgcccagcgagctctgttctacaagccagactacacaaaggcccgctggcggtcggcacagtgtgcgtacgagctggagaggttcgatctgtgcacccagatgtgcgaggagctgctcgaggtggacgtcgacaacgaggtggccatcgcgctgctgcacaagaacaagatgaagaagctcgagatagaacgcaatcagcgcaaggaagctgccgaggcaaagcgacggcttacacgcttccacagactccgcgacgccatcgagcagcgcgccattaagtttgacgatcaaaaagttggcaaaaaggacgtcctcagtgaggagctcctttatccaaagtttctgcctttggaggaccatccggtgcacctagacgaggacggcagcactctgatctggccggctgcgttctcctaccccgagttcctgtacagcgacttttatcagcagctgccggagaccaccaccatgcgggattgcctggcgacgctgctcaccgaaaagctgccatacgacaaggcacacaactaccgcctgggtaacgtgcacgtttactacgagaaccgcaaggtgggctgtgtccacaaggtggacgaggagaagcagctggccgagataatcgccgaaaaggggtttttcgtttccggtggcgctctgctcttctatgtggtgcacaaggattcgcgagtggaacaggagtttataaacgaacggcgacgacccatggtttacagttaa

SEQ ID NO: 5895 - protein, 393 aa, DROSOPHILA
MAAQKAWTDEERLELAAQLDAELDAFIDGLEKKRYEEGWPEDRWQEEMDKHPFFMKRAPQPGDDVHPMFEGLQKLKYDPEENTRDELALNYKEDGNFYMKHKKFRMAIYSFTEGIKTKTDNPDVLAVLYNNRSAAHFFIKNYRSSLSDAQRALFYKPDYTKARWRSAQCAYELERFDLCTQMCEELLEVDVDNEVAIALLHKNKMKKLEIERNQRKEAAEAKRRLTRFHRLRDAIEQRAIKFDDQKVGKKDVLSEELLYPKFLPLEDHPVHLDEDGSTLIWPAAFSYPEFLYSDFYQQLPETTTMRDCLATLLTEKLPYDKAHNYRLGNVHVYYENRKVGCVHKVDEEKQLAEIIAEKGFFVSGGALLFYVVHKDSRVEQEFINERRRPMVYS

SEQ ID NO: 5896 - DNA, 1916 bp, DROSOPHILA
ttctcgatgtactccagcggtatctctacatcgccatcgggccggatcatgtcgggggcatctttgaaggccggatttagcgacgccagtatgctctggaactcgtgacgatcgatccggtactcgcatgacaggcacttgaccacatagccactgccatgaacctccacaacatttcggctgcccgccttcgtgtgcagccggtccacgttctgggtgaccaccgcctggacccgctcctcccgctcgaatctggccagcgcgtgatgcgtggcattgggctgtgtggcagaaaacttgggccagcccacaaagttcctggcccagtaccgcttgcgcaccgccgacgacttgacgaactccatgtgctggacgggcttgtggttggagcgggcgtagaggcccacgccttcggaacggtaatcgggaatccctggaatttatttcaagtttttagacagccagaaatgttgatttaaataaaatactaatgcgaatccaagtataagctagaagtcacttgcattagcattatataaataaatgaataatgtacaagcttttggaagtcaatctgaaatatttgtgttaatggcttctgaacatagaaaagtcggaaaatcatgaaactcacccgattccgtcgagatgccagcgcccgtgagaaccaaaacattcggtttggacaggagaaagtcctccagccgtttgatgtcgtcctccacgacgggcttgtgatgcggcacgtactcctgcctggcggtggagctgcgcaagctggtgctccggaagcggagcagctggcccacacgcattgttttgttatgtattattgcaagtaatatttggttctttttcggttacgttactagaggtgagcgcacgcacatcgatggcaactccttcagtcgcttaccgctgtaaatcgattgtatgccccgcaatggcaatcgataactgtacgacccccatcgatttttacacgccatcagccgatagcagcttgccagcagctaccatctctagagcaacggctgcagaaaaaagatattctattcggtaatttacgcgtggatttatcacgcgccgtgaacccagaagttacaggccaacctttccgagattcgatcagtgaaccttgcgggcgtccagcttcgtaagcacgaaacaggacattcacacacatatttatcactccgtgtggcgtttgcgcccatccgtgcgtgcctgtgtgtgtgtgtgtcgctcgtctgtgcgtgcgtgagtgtgtttgtgaattgtcggctttaattttgcaagctcgctaaagttgtgttttcaaaggacatcgcaaaggagtcgcagcgcacaagatgtcgtacccgccgcgggcgcccatgccgcccttcatgaatacagccataccgccgccgcacgtaagtccaccttttctgggtcacaatcaccatgaagctgtcagaatctgacgccaaatccttttccacctactccatccgctttcagataatgcagaacatggccaagccgccgaggagcttccgtaactcggccaccattagttcacagccgacagtataccaacgtccgccggagccgcaaccacagttccgcggacccatcattaccgtcttcgtgggcaacatcagcgaacgcgtcccggaggcactgctcaaacgcatcctgaacgcttgcggcgtggtaatcaattggaaacgggtgtccacattcggcttctgcgaatttgagtacgttcaaccataaatcggtcatcccaaaatcactttagaaggcttagggcagcacaagaaggtttcgttagttaaataacgctagaaaagtaattgaagagccattgcataaacagcagcataacgcatctcactcgttgtttgatgcgtttcctagaatagcttagc

SEQ ID NO: 5897 - DNA, 715 bp, DROSOPHILA
gtaagcgactgaaggagttgccatcgatgtgcgtgcgctcacctctagtaacgtaaccgaaaaagaaccaaatattacttgcaataatacataacaaaacaatgcgtgtgggccagctgctccgcttccggagcaccagcttgcgcagctccaccgccaggcaggagtacgtgccgcatcacaagcccgtcgtggaggacgacatcaaacggctggaggactttctcctgtccaaaccgaatgttttggttctcacgggcgctggcatctcgacggaatcggggattcccgattaccgttccgaaggcgtgggcctctacgcccgctccaaccacaagcccgtccagcacatggagttcgtcaagtcgtcggcggtgcgcaagcggtactgggccaggaactttgtgggctggcccaagttttctgccacacagcccaatgccacgcatcacgcgctggccagattcgagcgggaggagcgggtccaggcggtggtcacccagaacgtggaccggctgcacacgaaggcgggcagccgaaatgttgtggaggttcatggcagtggctatgtggtcaagtgcctgtcatgcgagtaccggatcgatcgtcacgagttccagagcatactggcgtcgctaaatccggccttcaaagatgcccccgacatgatccggcccgatggcgatgtagagataccgctggagtacatcgagaa

SEQ ID NO: 5898 - protein, 204 aa, DROSOPHILA
MRVGQLLRFRSTSLRSSTARQEYVPHHKPVVEDDIKRLEDFLLSKPNVLVLTGAGISTESGIPDYRSEGVGLYARSNHKPVQHMEFVKSSAVRKRYWARNFVGWPKFSATQPNATHHALARFEREERVQAVVTQNVDRLHTKAGSRNVVEVHGSGYVVKCLSCEYRIDRHEFQSILASLNPAFKDAPDMIRPDGDVEIPLEYIE

SEQ ID NO: 5899 - DNA, 3225 bp, DROSOPHILA
ggaagccccgcttatgaaggtcaggcaccctatgtggtgggcatggcctttggacagagcaacatctggtgcagtggcactattataggcgacacctggatccttacatccgctcagtgtctaacgggcagttccggagtgaccatctactttggagccacccggctgagtcaggcccagtttacggtgacagtgggaactagtgagtacgttacgggtaatcaacatctcgccctggttcgagttcctcgagtcggattcagcaaccgggtcaaccgggtggcccttccatcactgagaaatcgatcccagcgctacgagaactggtgggcaaatgtctgtggatggggagtgaccaccttcagcaatggactcaccgatgcgctgcaatgcgtcgaccttcagataatgtccaataacgagtgtatcgccttctacggatccaccaccgtctccgatcagatcctgtgcacccgtacgcccagcggcagatccacttgctttggcgatgccggcagccccctgatcaccaaacaggattccaccgtggtgggcatttccgcatttgtggcctccaacgggtgcaccttgggattgcccgctggatttgctaggatcaccagcgcactggattggatccatcaaaggactggaatcgcctactaatgggtcaaatagtagcaacatttaataaaaaatgtccaatacctgcatagatattttattgcttataaggtcttttctactttaaaaaaaaattggctaatatacagcaaagtccggtgggttgtactgaatactaatgcaaaatatacttaaaatgaatatgatcctactgaccattaaactattaacaaatactacgagtattctaagaaactttaaaaacgttgaattttatttttcagattacaaagtaattgcattcattttctctccgagctcttaagcttaaattttaaattgaaaaaaacatatataaagacattgatcggcggatctacaactcgaatatggaccgggtcatgtccatgtagctattgcggcgtattagattagattgcaccacatttatgttatccgccgtccgtttcctcatcatgttgttggccgagcggtatgattcctcaaagtttaggaccagttcatcctcgccaaagctgtccgtctggcagctggagggtccacccgactgcggattgcgtacatctgaggtgctcgaccatcggcgtggtctcttcaccgtctccattttggcgcaaggatgcacgcgcttgaactccatttgatccttctgctgtttatccaacatcccagcataggcacgcacacacatctccgtctcccaggcgggatcgtcgacgggcatgggacgccttggaatgttctccagcggctcattcggctgtccacgttttttggtcaacttgtggaagtatcgctcccgatccacttgtccattgggtgcatatatggccgtgcttcgcaactgtgctcgttccgttgccaaattgttggctataatgcggcgacagaagtcggatggtggctcaattatacgcgatgttctcgccttcctgcaattcttcttaatccaatccttatcttgcgggcagctcacgtacatgaattgatggagcggactcggacggtccgtcaaccagcaggtcttactattgaacagaccctcctccacatcatagcaatgttcgggaatatttctgggttgcattttcgatgtaagaaaggcagtggggccaaccggctgttggccataacgacgctcggcatgataacgccgatccttgggcgtcaggtaatcccattcatcgcactgcaagaccatgccattaaatctgccatccacatgcagaccgtcggaaaaccacatgtcctccactgtcaccaggcgaccatgctcgaactcacccttaaccgtaaagcggtacggctgggcgagtcgcaaatggccatagccatggaactgaccctgatggaaccttcctcgatactcgctcccatccggatagcggtagcttccaaatccgtccatcacattcaccaatctatcccaggcgccctcataactgctgcgcgtgatgaagtgcctctgctgggtctccgcgttcagctgcgacattttctcaactttttttgtttctctgtgtttggggtgtggggacgaattttgtgtgtgtagtcgaagcaaccaaaccaactcgaacgtgcgaactgacaaacttctgacccacttggaatggcctggcttgttgagattacgcatcagctttatgactaaataaatgtttgccccactcgaccgatcccatccccaatttcccgcttcctccactgaccgagccccgagtccagggtgtgcccatccgcatccactcggttttggccaatgtcgcatgtctggcctaatgaacactgggatacccttgtgtggcaatgtgaagttggctgtgctatttgctgtgctacctgctgcctaagtagccaagtgatttaacttgtttattaactaccataaagtagagacctccggtgatctgagattttgcatgcatatgtagagtgagtttgccaaattatactaatgagctttaaagttagaccaggaaaaccacacatgatatgcgttcagttcattagcaatgtttacaacttagaggagataagagtcgaggcttggttaagcaaaagagagacagtacttaaattatgcaaatgtacagaatttttaatgcagttaaattgaaaattcatttttaagagcctcaaaaccaatgctcgaaaaattctaagttctaagttttactaagcctgtcaagcgaaacttctgcattgacctaagaatagctccacctgtccaccgatggttgtaaaacaaaatgattttaacagccaaccgggtcgagctgcattgcttaacccggccagaagcgaaagccagttaagtgcgattggtgtttatggctattggctgtggcagcggcacttgctgttcccacctatcctcctggtccgctctcggatatagccattccgtagaccgtgtcgtcgttgttggtcaggccaaatcgtaagcactcccgaatgggccgtaaatcatgctcacttacctcactgttggcgccagtggccacgttgctggtgttcccattgctgctgctgctgcccacgcatcggaaatcgacggaaccacctgatgagcgtcgc

SEQ ID NO: 5900 - DNA, 1225 bp, DROSOPHILA
gttcgagttggtttggttgcttcgactacacacacaaaattcgtccccacaccccaaacacagagaaacaaaaaaagttgagaaaatgtcgcagctgaacgcggagacccagcagaggcacttcatcacgcgcagcagttatgagggcgcctgggatagattggtgaatgtgatggacggatttggaagctaccgctatccggatgggagcgagtatcgaggaaggttccatcagggtcagttccatggctatggccatttgcgactcgcccagccgtaccgctttacggttaagggtgagttcgagcatggtcgcctggtgacagtggaggacatgtggttttccgacggtctgcatgtggatggcagatttaatggcatggtcttgcagtgcgatgaatgggattacctgacgcccaaggatcggcgttatcatgccgagcgtcgttatggccaacagccggttggccccactgcctttcttacatcgaaaatgcaacccagaaatattcccgaacattgctatgatgtggaggagggtctgttcaatagtaagacctgctggttgacggaccgtccgagtccgctccatcaattcatgtacgtgagctgcccgcaagataaggattggattaagaagaattgcaggaaggcgagaacatcgcgtataattgagccaccatccgacttctgtcgccgcattatagccaacaatttggcaacggaacgagcacagttgcgaagcacggccatatatgcacccaatggacaagtggatcgggagcgatacttccacaagttgaccaaaaaacgtggacagccgaatgagccgctggagaacattccaaggcgtcccatgcccgtcgacgatcccgcctgggagacggagatgtgtgtgcgtgcctatgctgggatgttggataaacagcagaaggatcaaatggagttcaagcgcgtgcatccttgcgccaaaatggagacggtgaagagaccacgccgatggtcgagcacctcagatgtacgcaatccgcagtcgggtggaccctccagctgccagacggacagctttggcgaggatgaactggtcctaaactttgaggaatcataccgctcggccaacaacatgatgaggaaacggacggcggataacataaatgtggtgcaatctaatctaatacgccgcaatagctacatggacatgacccggtccatattcgagttgtag

SEQ ID NO: 5901 - protein, 379 aa, DROSOPHILA
MSQLNAETQQRHFITRSSYEGAWDRLVNVMDGFGSYRYPDGSEYRGRFHQGQFHGYGHLRLAQPYRFTVKGEFEHGRLVTVEDMWFSDGLHVDGRFNGMVLQCDEWDYLTPKDRRYHAERRYGQQPVGPTAFLTSKMQPRNIPEHCYDVEEGLFNSKTCWLTDRPSPLHQFMYVSCPQDKDWIKKNCRKARTSRIIEPPSDFCRRIIANNLATERAQLRSTAIYAPNGQVDRERYFHKLTKKRGQPNEPLENIPRRPMPVDDPAWETEMCVRAYAGMLDKQQKDQMEFKRVHPCAKMETVKRPRRWSSTSDVRNPQSGGPSSCQTDSFGEDELVLNFEESYRSANNMMRKRTADNINVVQSNLIRRNSYMDMTRSIFEL

SEQ ID NO: 5902 - DNA, 3026 bp, DROSOPHILA
tgtttttcattgggtttaagctctttatttcagcaaactttattctaattcgcacagctaaatgggaaaagtaaacaaaatgttggtctggacgcacgaatgaatggcgtcacttagcattgtgatggtaaacggcgggaaccagatggggtgacgctaccggttttgaatgggtacaagatgaacttgtattattgacaacgctactgagctttgctacaccccatttaaaagtgtagtgtatcctgaaaaagataaggtactcggatatagagaatggaggaggcatattgtttgaggcaggtcggaatttcgtatagtaccaatttatgtatgtacatgtacatatgtacggtttaaatgccgttgttaaataacatttcaacattgatgtaccgactttcggaaaggtcaagtaaaagtacaaaaacaataaaaacaattttcataagttgtaagattagaagaataatcgataattttttaagccaaatgccaatcaatcgatataccaattgtcttgtaaatcggtttagtaagttgatagagaaaattcaaataagtatttcttcagctagcagatataaattacttgcataatcataaataaatattagattgaactaacaaaattgaactaactgaactaacaagaagataaaaatatttacaacgaccgctatgaaatgtagttaaaaaaatgtaaatctgaattttaattaaacttaaaatatatcaactagtatttaacattttcaacaaaaaaaaaagatttcttaaagcctaatttcaaattaagaataaataaaaatataaactcattacactcgtttcaattccgcgttccattcgagacactttttattccgatagcactgggcgatacatcacttgcaaacggtcctcccggaaatcgatagcttcttctttctttttctgtgtgtcttttttgcggtaaagtacatgagctgaaaatgtctcaaataaaatcggcgaaaactaacgtaatctttgccttacagcgactgttcaagccaagataccgctatgcctcccaaattcgacccaacggaagttaaattgggtaagtaagcgagtgtttttgtgaggagttgagcttcgagcaaaccgtagtttataatagaggattatcttcaataacgaatttctgcacccaaattacagtgtacctgcgttgcgtgggcggagaagtcggtgccacatcctccctggccccaaagatcggtcccctcggtctggtaagcatgcaaatcggtttgtttacttgtgcaattcgcgctaacaaaagtgtctctctgtagtcgcccaagaaaatcggtgatgacatcgccaaggccacctccgactggaagggtctgaagatcaccgtctgcctgaccatccagaaccgacaggccgccatctccgtggttccctccgccgcctcgctgatcatcaaggctctgaaggaacccccacgtgaccgcaagaagcagaagaacagtgagtattgcccggcaatcctggactggacttccaatgcctgtgccgggctgtggtggataatgaggagctttgcttccaccgcactgtgcccacatgcactggatggttctgtgcttgatcccccgattaacagcagatattcttaatttacagtcaagcacagtggaaacattggcttcgaagacattctggccatcgcccgcgtgatgaggcccaggtccatggcccgtgagttgaagggaacctgcaaggaagttctgggaaccgcccagagcgtcggctgcaccgttgacggaaagcaccctcacgatgttattgacgaactgaacgagggctccattgaagtccccgcggaataaacagttttttaaacagaattaataaattgtacgcgatacagtctgtaataattgacccaatcggacagaattttactttcgagctcaatgcggccgtgaatgcgatttcagataggctagctaaatgttaaacaagaggaaaactagaagtgcataatattgcatcaattcagcagagtagatttgccaattaagcaacgcaataggaaaatctttcttagttcggtttaacagttgaattcctattaggcagaaaacaatgtgcagaactcttgcattgttaaaacaattatatatttggaaggtctttccattaaatgagaagtaaacaattcgcacatgccccgcaaaaagcacatgcttgataagaaagtgttcagttttcgttactggagaatgctttcggtcacattttccgcctgggtttcctgcgttgcatttacgaatgcatgtatgccacccctttcccaagatacaaataaaaagagagtatatttaatccgcaaattgtagacgaatttattatttcatattctcgaaaagatcttcagcattccacaaaattgcggaactcctggaatcaacagcttacagcttcaacttggtacgcctccagtgacggcgcttagcgttgtaactgaaagaaaaagcggaaagttgaagttaatattagaataagattatgttgcaccaatgatctttatgttattaagaatattaaaaataaggtagtgacagtacactcaacaattaaacgcacttgcgttgggatactttgcccttacaaaacttttgccactgcaatactaaacatttaaatggaaaaccaacaccgaacttaccgaatagtgttgccagtacgtaggcgaacccattggggaacggatctgttctgcttcagcttcttagccagcttctgctttattctgaacgacttgtgtgcagcctggtggagaaagaagtaacgaacgtttagtatctcgatatattcaaaacatttgatcaaaaacacaaataagaaaaatttcccaccatttcgtccaatcttttcaacgagccacaccggaaagaaagaaccagaccggaaaagaatacgcgctggtggtgggtttatatcgataagttcacttatcacaatttcatgcaatacggaatgatgaa

SEQ ID NO: 5903 - DNA, 706 bp, DROSOPHILA
taacgtaatctttgccttacagcgactgttcaagccaagataccgctatgcctcccaaattcgacccaacggaagttaaattggtgtacctgcgttgcgtgggcggagaagtcggtgccacatcctccctggccccaaagatcggtcccctcggtctgtcgcccaagaaaatcggtgatgacatcgccaaggccacctccgactggaagggtctgaagatcaccgtctgcctgaccatccagaaccgacaggccgccatctccgtggttccctccgccgcctcgctgatcatcaaggctctgaaggaacccccacgtgaccgcaagaagcagaagaacatcaagcacagtggaaacattggcttcgaagacattctggccatcgcccgcgtgatgaggcccaggtccatggcccgtgagttgaagggaacctgcaaggaagttctgggaaccgcccagagcgtcggctgcaccgttgacggaaagcaccctcacgatgttattgacgaactgaacgagggctccattgaagtccccgcggaataaacagttttttaaacagaattaataaattgtacgcgatacagtctgtaataattgacccaatcggacagaattttactttcgagctcaatgcggccgtgaatgcgatttcagataggctagctaaatgttaaacaagaggaaaactagaagtgcataatatt

SEQ ID NO: 5904 - protein, 165 aa, DROSOPHILA
MPPKFDPTEVKLVYLRCVGGEVGATSSLAPKIGPLGLSPKKIGDDIAKATSDWKGLKITVCLTIQNRQAAISVVPSAASLIIKALKEPPRDRKKQKNIKHSGNIGFEDILAIARVMRPRSMARELKGTCKEVLGTAQSVGCTVDGKHPHDVIDELNEGSIEVPAE

SEQ ID NO: 5905 - DNA, 2336 bp, DROSOPHILA
agcaattgtcattggttgagttgtgtcgaaatgcacgaattccttcgattgcataattaatgtgctgaatcggttttgatggacgactcaaataactaaagccgaaccattttggccacatttattttgcatatttgttctcttgcattttaattgcttgccaaattaatgtctctcctttaaataaatgcaaagcactctgccttggttagaaaaagccaccaattagaatgtccgaatgtgaatatgcttgaccatagccctgaacgtctgactgggtgaaatggcacatacatacgtagagtataataaatccttttggataaaccataaaacaaaagatattcctcgccagcagctggcaaaactaattccgattctctctgctggcatccacatactcccacaagtaattggttgaagcgagtgtttttggtttttgcctcttgttttgctcgagcgaacactcttggttttggcacgttacgtatacgccacaagtacctaatgccaggcacctaatacccagctcgttggcggttgcggctgctgcatccaacttactttcacactgccgcactgacacttggctggggcattgctgatgcggcttggagcaatgttcctgctggcagacaaatgagcgccaccattaaacgcttctgaaatatgctggcgaatcattcacaaccggagcagcagaaagaacaggagcagaagcaggagcagcagcgtccaaagaatgggttgtggagctcttcatgccaataaatctgcgaattctgcacccggaacgcagcttgttctccggggtccaaagtgttaaatcgtatttaattcgaagcttaaataaatgtagggtaggaatttatttattgaagaagctcttcggccagttcgaatttgaagagaaaaccccttaccttaattggagagcttgttttgaaatgatagcatcctagtaggagtggatttgagtttcccaatttatctggtaaaaattatgtagccggaataatgtttgactagaatctgcaaccaaggcccgtttccagagtaccgcagtcccattggacctcgcccatcctgaaaaatgccgaagaagggaaaagacaaggggaagaaaggaaagaaaagtgttttcagagccaagtctacagtggtgcccacagcacctccagaaccagtgttcgatagaaatttgcccgttttctccttcgatcttgttatcacccgactggaggtaaagggtgtggtcctggccgacgcaagaaaactgctggtgaaggtcaaatttggtggcaacaatctcagtcttacggctagtagaaccaatgtgagcgagttcaagccgaatgccagtcacacctttcaggcggagccaccgaatctagcccagacagtcgaagaaaatggcatagactttgaggtggtgtacgatgagcaagttgttggcttgggtaaactgagcctgcccaaaagattaagcacaagaataaagctggacatgaaggcattctcctacacgagcacttgtcccctggaaatggaggggaagccagttggcgcattagagttcctttgcaagctgttcatcaaatgtggcgattatgccaggtaagctgggattaccttacgtagtgcttagtaattaagaccacttaattttttcagagagggcgaaacttgccccaatttggacaggaaccttagcccaagggacatagtatttgtggtcggcaaatcgcaggccaataccagctgctgcgatccctgtcgagatgctctggaaatcgaggcgagaaaacagaaagactacagtattcaatcgagttctagtcgaaaatagagtaatttaaggttcataactatccatctattacaagattcatttaataccacacttacacttcatctcttacgaagaaggtttgcacaattgaaatcctaaatgacctagctcaaatttccctggatcacaatgttcaatgttttattttagattcacgtctcaattaccttcaatcaatccgtgtttgctagcaaaacagctttaaagtatccttttgggttcagaacttgccaaatggaattcgtttcttttggctgtcaaaaatctgcttgattagaagtgacttcaatttaggatatttttctggcgtttgtagataagcaaatatttgggcacgggatcaggttggatttttattacacattttgctcattttaatgtcctggctgccttgagttgtttgccaggaccttctccttcgttctgcaattcggggcacacatgtgtgtgcataagggaaagtgagttcatctattttttattt

SEQ ID NO: 5906 - DNA, 792 bp, DROSOPHILA
attatgtagccggaataatgtttgactagaatctgcaaccaaggcccgtttccagagtaccgcagtcccattggacctcgcccatcctgaaaaatgccgaagaagggaaaagacaaggggaagaaaggaaagaaaagtgttttcagagccaagtctacagtggtgcccacagcacctccagaaccagtgttcgatagaaatttgcccgttttctccttcgatcttgttatcacccgactggaggtaaagggtgtggtcctggccgacgcaagaaaactgctggtgaaggtcaaatttggtggcaacaatctcagtcttacggctagtagaaccaatgtgagcgagttcaagccgaatgccagtcacacctttcaggcggagccaccgaatctagcccagacagtcgaagaaaatggcatagactttgaggtggtgtacgatgagcaagttgttggcttgggtaaactgagcctgcccaaaagattaagcacaagaataaagctggacatgaaggcattctcctacacgagcacttgtcccctggaaatggaggggaagccagttggcgcattagagttcctttgcaagctgttcatcaaatgtggcgattatgccagagagggcgaaacttgccccaatttggacaggaaccttagcccaagggacatagtatttgtggtcggcaaatcgcaggccaataccagctgctgcgatccctgtcgagatgctctggaaatcgaggcgagaaaacagaaagactacagtattcaatcgagttctagtcgaaaatag

SEQ ID NO: 5907 - protein, 232 aa, DROSOPHILA
MPKKGKDKGKKGKKSVFRAKSTVVPTAPPEPVFDRNLPVFSFDLVITRLEVKGVVLADARKLLVKVKFGGNNLSLTASRTNVSEFKPNASHTFQAEPPNLAQTVEENGIDFEVVYDEQVVGLGKLSLPKRLSTRIKLDMKAFSYTSTCPLEMEGKPVGALEFLCKLFIKCGDYAREGETCPNLDRNLSPRDIVFVVGKSQANTSCCDPCRDALEIEARKQKDYSIQSSSSRK

SEQ ID NO: 5908 - DNA, 3848 bp, DROSOPHILA
gctttctgtaatagaagcttaatttaagccatattttacttagtaattagctagaccttgctgctttttgaaccttcaatgctgacttttaaatactttcgaaagatttacgtgagaattatatgtatacgtagatggaggcagtggggggcactacttacgggcatccgttcggtggctccgccgatggggaaattgatctgggatcgcatcgtttgggcgccatagtacttatccgcgggcaccttcagttcgccaaaggtgtcgctctccacgcgaaactcctgggaggcctgtcgatgcgaatgaatccgataagaatggctataattatcagtaagtaaacacaggggcagaccatttcagatgcagatatgacagatagtaagtaagtgaagccaaattgagactatggcaatcagagtgaacaaatcagaggacgaccactcgacgacggctgctgctcgatgttaactgaggcgtgctcgggcattgaaaggcagaggcgataagctagggggattcaaaaccaaaaagccgagtgtacaacgaacagattcttgaaagagcgctctcaacgagcgaacttcccgcagaattggtgggaggtgttgaatgcccgagcactgggcgctgaatatgaaagacccaacttgggcatggggtgcacacagcagggggcacgaaagtagtgcgaggatctcgaactatatttgtgtatatatgtatattgtatgcataataattgcaatagcaattctataaaaacagactgattcgaacttttgcatttccagtgctattcatgtgaccagcgctgttcctcgggatttatgggtggaatttacgccggactgtagctctactatctagtgtcttatatacatatgttttatatgcagcattatctgaataatcggtagtgtattacagtggtcgttcattcatctagtaccatatataattaaccggttttaattcaattgccgaaaaaaaaaaacaagaattcgctgactagcacaatttcttgaattacaactcgtttcgcgagtttatggttctctcttttccctttttttttcaacgccgtgagtttgttttgttttcaatcatgtgatttgagttttgagtgcgaaatgaaaataaaaaacgtttgcgaaaattgagtgaaaaaatcaatgcgacggcttccaattggagtcgcgcgccaattggagtttcgtccacaagtggtcgcagtggtgtgccaattggaacgtccgttccagcgcctggaagtcgctcgcctccgctttccattgtgtaatgattacgaaacgccggcatttgtgcacttttcattggcatttctgctcgccgcgccttgtttacaatcaaaaaaataacatattttggagttattagccgctgcatgggcgaatctagcattacataaggcaaaatatttttgccatctcgctacaaaatatatatccaatttgcacagcacttggaatccttaccagacgcaaacttccaatggcggcccagggtttcgtcatttgttgaacgccgcgaagcgtggagcgttgcaataatggtagcaccatctctatgcttattccttagtcggtaattaataaataagtttgcaagcaagtgatctttcacggacgagcccaccacaacaacaccaacaacaacaaaaaacaacaacagcacctcgatgcgcgggtgagagctatcggaccatcgattgttcttatcgactttgtaacgattgctgcctaagttcataaaaattgagaaacaaaaatcctaaacatttttaagaaacacctagttaccttagtactaactgtaaattcctattccatagctaacaaatttaaaatctgttgatagttctatttgttttttttgaaactacaactatcgatagcagaccgttgcggcactgtatcctatcgtttgtgtgccatccgcaggcgaacagctgttttttcgggaatcgtaacttcagaggaacttttttttagtggaaacaagcctgcaatgtcggcgtttgtgaaaaccgtgtgcttggcccaaaagctgtgcgccgccaatcccgtcgtggctcgccaggcgatccgcagcagtaagtgtgaatcggggctgcgctggcaacagtgcaacctgccccactgttttgtttacgtaacttttgcatgcaccgaatggctacaaattcgaatttctcgccatttacgttttagtggctggctggaataaggactacaagccgggtccgtatccacagacggagaaggagcgcctggcggcggccaagaagtactatctgttgccggaggagtacaaaccgtatgcggacgatggtctgggctacggagattatcccaaattgggctacggtctgggtgtggaggccaaggactcgtactatccctgggactatccggagcacaagcgcaaccaacacgagcccgtaagcgccaacatcaacggctagcagcagctgctgcataaaaaaagagtcaaaccctgatccatttccattgcagatctcggcggatcatgatctgtacagcgaggatcgctggtcgcaggccgaaccgccacgctacagcaatgcgtactactttgcctgcttcctgggcgtgatgtccggctgcctggcactctactactggctggatgacaagaagatgtaccgccccgtggccgccaagcaatatcccagccctggcgtcaagcactacaccttcgagaagtaggattgtatctatcacgctctcgatcgcactgcgcgcctcgtttttatttcataggcaattaatcaacgcatctatacaattaaaatgaatggaaaccaagctaaaacatggatttgctatcattttgactgcgcatgttgggttgcatttttcattccgttcttaatgagcagcaaaaaacgaaatgaatcttgagatgaacgtttatttcggcgaaaacatgaatgatttggaacgtaactgaaccaagaaatccttaatggatttcaataatgtctctaaactataaacttactgcctaaatacattgtttgtttgggtgagcaaaaaaaagcaagacgcggaaacagaaacttaaccagctagatttagggcatagtaataaactgttgatcggctgggatcactccacaacgtagttgggatgcaccaccagcaggggatcgtcctcctccacgaaatccttttgtacctgaattctcggcttcagcgtggatgtcttgagcggaataatgacctgatcgtgatagatgaggcgatcgataagcttctcgatgagatttttgcgagaaattaactcatcctcggattcgatttggtccgccacctgctccagataccaggtgaccacattgctgcgcttgatgcccgtatcgttgccctccacctcgcagcgcgcctcctcggcgcgcatatgcaacaccagcatggtggacagattcttgtaatcctcgaacgaaagcgtgaacttcttcttctgcacggcgccgctggcggatgtgtccataccattgttctcatccacattggccgctgctccattgttctccatgtcgatgtcgtgctgaatgccatcgtccatgtccagaccctcgtcgtcatctaaatgaatatccggttgctccacgcgaatgatggacttgttgagcaaacggaaggcctccttgacgtgtcgctccagcacgcgattcgagcactccagcttggccatggcctcgctcagtcgaatcatggactccagctgacgcaccgttatcctccaggtgctcctgcccgacgtgcccgtatcgcgctgcctcaaatggccatagt

SEQ ID NO: 5909 - DNA, 1312 bp, DROSOPHILA
caagaattcgctgactagcacaatttcttgaattacaactcgtttcgcgagtttatggttctctcttttccctttttttttcaacgccgtgagtttgttttgttttcaatcatgtgatttgagttttgagtgcgaaatgaaaataaaaaacgtttgcgaaaattgagtgaaaaaatcaatgcgacggcttccaattggagtcgcgcgccaattggagtttcgtccacaagtggtcgcagtggtgtgccaattggaacgtccgttccagcgcctggaagtcgctcgcctccgctttccattgtgtaatgattacgaaacgccggcatttgtgcacttttcattggcatttctgctcgccgcgccttgtttacaatcaaaaaaataacatattttggagttattagccgctgcatgggcgaatctagcattacataaggcaaaatatttttgccatctcgctacaaaatatatatccaatttgcacagcacttggaatccttaccagacgcaaacttccaatggcggcccagggtttcgtcatttgttgaacgccgcgaagcgtggagcgttgcaataatgcagaccgttgcggcactgtatcctatcgtttgtgtgccatccgcaggcgaacagctgttttttcgggaatcgtaacttcagaggaacttttttttagtggaaacaagcctgcaatgtcggcgtttgtgaaaaccgtgtgcttggcccaaaagctgtgcgccgccaatcccgtcgtggctcgccaggcgatccgcagcatggctggctggaataaggactacaagccgggtccgtatccacagacggagaaggagcgcctggcggcggccaagaagtactatctgttgccggaggagtacaaaccgtatgcggacgatggtctgggctacggagattatcccaaattgggctacggtctgggtgtggaggccaaggactcgtactatccctgggactatccggagcacaagcgcaaccaacacgagcccatctcggcggatcatgatctgtacagcgaggatcgctggtcgcaggccgaaccgccacgctacagcaatgcgtactactttgcctgcttcctgggcgtgatgtccggctgcctggcactctactactggctggatgacaagaagatgtaccgccccgtggccgccaagcaatatcccagccctggcgtcaagcactacaccttcgagaagtaggattgtatctatcacgctctcgatcgcactgcgcgcctcgtttttatttcataggcaattaatcaacgcatctatacaattaaaatgaatgg

SEQ ID NO: 5910 - protein, 175 aa, DROSOPHILA
MSAFVKTVCLAQKLCAANPVVARQAIRSMAGWNKDYKPGPYPQTEKERLAAAKKYYLLPEEYKPYADDGLGYGDYPKLGYGLGVEAKDSYYPWDYPEHKRNQHEPISADHDLYSEDRWSQAEPPRYSNAYYFACFLGVMSGCLALYYWLDDKKMYRPVAAKQYPSPGVKHYTFEK

SEQ ID NO: 5911 - DNA, 4314 bp, DROSOPHILA
ttaaccaaattgtaaataaattgattatcagtttgtgtataaacgaacaaagaatatatctgtaagcggtccacaaaacgatagctgtacagaccacacaccaaatgatataatacgcgagtacaaagaacaaaaattaagtactttaatttggttcacttaacataatattcaaaatcaaatattttcgttaacagtctcgttttgggattagtagtgggacacacataaatgatacgaagattaacttcgaaagggtacatttctctgcttaattgacggcctctcggcgatgttgaaaacctaggagttaaaataaaattatgtttggaatggcatcgtttaagtggcgagaagtacatgatattctcgagtggcatacactacaatacattacattacaggcttatcatatataagtcgttattatcgtgcatcgttatttgggcagttagtattgagtgggagcgctactattgcctctacacgggaggctaaatacaagagtctacgtttgtatctaccagatactaactacgttctacatctagtatgctaagctctatgttactttatacagggatgtgtaattataatctctacttagtttgcacagtaaaaaatctaactaaaacggttaaatattcatttaaagtattgtccagaaggcgcgcgtgcatctagggcaaacaattgatctatcattaggggaattaacaaattttcgtagacgaggccaacatctgataatgcaatcaaaggtaaaggtacaacagcttaacactaggcgcccagatagacaagcttaataaggatttcagcacacatacgtgggcggaaataacagaatagaaacacgaaactatttccagatcaggagtgtgaggttgtggaaaggacacggcgtttggtgcaaccattttgaatggttaagcacaatacgtaggccctaaaaaatatcactttttcgacggcgatagacggccagtttccgtagttctcagttgtgcttggcccgacgaccaaacatatagcccttccagcgctccgcagtttgtgcaattaatggatcgctgtcgatggtggctaacagaagtaactggttcacgtgcgttgcatggtagtcccagcgcgccagattaggagctacgcccaggctcagatggcgcaggtcgtagctggtgccggagccagtgtcaaatagcaacagcatctttttaagggagtgcatgccctgcgcgaaaagctttccagcctcgcgggcgatttttcccggggcagtgctgttgagatcgtagagacccagcagtgaatagataaagccgtttagcacataagagggtggcgtggtggggtactcctcgtacctgtaaaagccgaaaaaagaatttcgattattgaataaatttggttctcaaaaacaattttcctattgttgctgttcctgtttggtatacagggcgatcttatactcaccagtagaacttgtccatgaactgcgccagaacgccgccatcgcgcgagtataccctataaggctgcagtccggctgcggccgctcgaaggtagcgttcatccccgccggagtgccagtaggctcgtgccagcactgaaatagcgtgtccctggcccatggctgatatccaccccggacgcaattcggcaaagccgttgaggctgcgacgcacaggattggtccagccacccgtcttggggtcctggttgtggacgaaccactcagccgcgtcgtagaagtgagccagatggtcactggtggacaaggtgatattgtcgaagaagccaaggcccagaaagccaatagatattacctccagatcggagcgccgtatctttagcggcgagcgtttgtcacccatgatgcccttttgaaggtcaatgtgcaggtctcgagtgatgtggcgccacttgttcagtgccgagcctcccagaccgtagtagatgtttgtatcctgcacgctcagcagcagatctgcgggtatgtagtgcaggctgtagttgtgacgggtgtcccgattctgaacggtaatcatgagactactgctattggttaccaggagcagatcaacgctgagcagaagatccaatgtctggtttagagcaatgctgatgacgccttcgtaaccaggtgccgtctcgaactggacaacactggtgttaaacttgtggtgccagatgcgggtcatgttgctggtcttgggcgtactccattccatctggttcccgtcgccgtcctccaacacgcgaaccctgggtgccggctctgtgaggttcttgctgtagtgcgacaacgcgaactgggcaatttgtgtggggtaaaagtacccacgcttctcccattgcgtgctcactggaacgccctccgcggcactgatgcactttacccggtcgcgcacttccacgttgtagttctcaaagtacatatagacgccgcgcgcatcgtactttcccctgggaaggttaactttggctgtgctgtgcacccagttgaacttggccacctcattgctgttggtggaaactgctccactgacgtcgaagtagttacgcaggaaggaaaacggaacgtaaacctcgttggcgttctcgtctcgcttgcagtgcacggtgtactcctggttaatggagcactcaatgtcgtgcagcgctgtagcttctcctccgctggaggactgccttgcggaccggtccagaggacgcacaaagtccggcgaaaaggagaaggcggcgcagcgcatatacacgcccagagtgattaccaccacagccactgtgaggacaagcagcacggcttttaggttcagtcgcatgatgaaaaagaccagtggctcgcgttgctaaagaaaattctaagattagccaactgataacacgacgaaatagacattgttacctttaccccttggaatttaggtggctcccggttttccctgcttactggaagcgcgggtgcggaaagggcatctctctgactgcttagatatttggacattcggttgggggcgaactctctaactggcttctaggtgagtcatgctctaaatttaaaactgcattcatctggcagatgcattgctgacgatgataatggtgcaccagtacgcgtacgtctctttcactgtctctgtctaaaattccacctgccgagcctgtagccctctgagttcagtccagggccatccaaagttgatatttcaagtgcatccagttctcactaagcatattttgcttagatttgcgctgctcttctcgctttaatgggcgaacactgcgaaaacacagaaactgcgatacagatgagcaaatgttttgacatatgacaaatggtcgctcttgggcggcctatgcacgtaagctatcgataacaagcattaaccgtgtgcatcgttacttctgtagctaagtaatttaaatagtttaattttcgagtttaaatagtttatattcctcctttggttgaaaatgaacttttatttataaattcattggtattttcaaatgttcccatacgcatgctgacaactatcgacgaaccgatagcatcaacacgacggcgattaatcaatagtgcaatgtttacaaaatatttcgggtggatgtcggtgagaaggcgcgtttaactagttttagtaatgtctagtcgtagtttaagtgcaatagtcttgctccttggggcgttagtgaccgcctgcctcgcctccaacggcgaccgcacacagttttttcacaattgccgacagaactgcgagcgaacgaactgctcggcaggtgagaagtgctatccactttaattgcaagtcttaagagcaagcttccattggcagatggactggagatccaggagcaggcagtcaagttttaccagcagtcggtgtttgaccggctcttccagtggagctgcgcggacgagtgtcagtatggatgcatgtggcgaacggtgttcgccttctttgaacgcggttggccgattccccagttctacggcaagtggccctttctccgcctgctgggcatgcaggagccggcctcagttatcttctcctgcctgaattttgtcgttcacctgcgcttgttacgcaagttccgccgagaagtgcgtccggacagtccctgctatatgctgacccacatattcgcagtggtatgcctttatttacacgatcagccaataaagtcgttatactaagttccctcgatccttactcttccagacgagtctcaacggctggatctggtccgccatctttcacacaagggactttccactgaccgagctgctggactacgcctttgcct

SEQ ID NO: 5912 - DNA, 2149 bp, DROSOPHILA
ctgtatcgcagtttctgtgttttcgcagtgttcgcccattaaagcgagaagagcagcgcaaatctaagcaaaatatgcttagtgagaactggatgcacttgaaatatcaactttggatggccctggactgaactcagagggctacaggctcggcaggtggaattttagacagagacagtgaaagagacgtacgcgtactggtgcaccattatcatcgtcagcaatgcatctgccagatgaatgcagttttaaatttagagcatgactcacctagaagccagttagagagttcgcccccaaccgaatgtccaaatatctaagcagtcagagagatgccctttccgcacccgcgcttccagtaagcagggaaaaccgggagccacctaaattccaaggggtaaagcaacgcgagccactggtctttttcatcatgcgactgaacctaaaagccgtgctgcttgtcctcacagtggctgtggtggtaatcactctgggcgtgtatatgcgctgcgccgccttctccttttcgccggactttgtgcgtcctctggaccggtccgcaaggcagtcctccagcggaggagaagctacagcgctgcacgacattgagtgctccattaaccaggagtacaccgtgcactgcaagcgagacgagaacgccaacgaggtttacgttccgttttccttcctgcgtaactacttcgacgtcagtggagcagtttccaccaacagcaatgaggtggccaagttcaactgggtgcacagcacagccaaagttaaccttcccaggggaaagtacgatgcgcgcggcgtctatatgtactttgagaactacaacgtggaagtgcgcgaccgggtaaagtgcatcagtgccgcggagggcgttccagtgagcacgcaatgggagaagcgtgggtacttttaccccacacaaattgcccagttcgcgttgtcgcactacagcaagaacctcacagagccggcacccagggttcgcgtgttggaggacggcgacgggaaccagatggaatggagtacgcccaagaccagcaacatgacccgcatctggcaccacaagtttaacaccagtgttgtccagttcgagacggcacctggttacgaaggcgtcatcagcattgctctaaaccagacattggatcttctgctcagcgttgatctgctcctggtaaccaatagcagtagtctcatgattaccgttcagaatcgggacacccgtcacaactacagcctgcactacatacccgcagatctgctgctgagcgtgcaggatacaaacatctactacggtctgggaggctcggcactgaacaagtggcgccacatcactcgagacctgcacattgaccttcaaaagggcatcatgggtgacaaacgctcgccgctaaagatacggcgctccgatctggaggtaatatctattggctttctgggccttggcttcttcgacaatatcaccttgtccaccagtgaccatctggctcacttctacgacgcggctgagtggttcgtccacaaccaggaccccaagacgggtggctggaccaatcctgtgcgtcgcagcctcaacggctttgccgaattgcgtccggggtggatatcagccatgggccagggacacgctatttcagtgctggcacgagcctactggcactccggcggggatgaacgctaccttcgagcggccgcagccggactgcagccttatagggtatactcgcgcgatggcggcgttctggcgcagttcatggacaagttctactggtacgaggagtaccccaccacgccaccctcttatgtgctaaacggctttatctattcactgctgggtctctacgatctcaacagcactgccccgggaaaaatcgcccgcgaggctggaaagcttttcgcgcagggcatgcactcccttaaaaagatgctgttgctatttgacactggctccggcaccagctacgacctgcgccatctgagcctgggcgtagctcctaatctggcgcgctgggactaccatgcaacgcacgtgaaccagttacttctgttagccaccatcgacagcgatccattaattgcacaaactgcggagcgctggaagggctatatgtttggtcgtcgggccaagcacaactga

SEQ ID NO: 5913 - protein, 614 aa, DROSOPHILA
MSKYLSSQRDALSAPALPVSRENREPPKFQGVKQREPLVFFIMRLNLKAVLLVLTVAVVVITLGVYMRCAAFSFSPDFVRPLDRSARQSSSGGEATALHDIECSINQEYTVHCKRDENANEVYVPFSFLRNYFDVSGAVSTNSNEVAKFNWVHSTAKVNLPRGKYDARGVYMYFENYNVEVRDRVKCISAAEGVPVSTQWEKRGYFYPTQIAQFALSHYSKNLTEPAPRVRVLEDGDGNQMEWSTPKTSNMTRIWHHKFNTSVVQFETAPGYEGVISIALNQTLDLLLSVDLLLVTNSSSLMITVQNRDTRHNYSLHYIPADLLLSVQDTNIYYGLGGSALNKWRHITRDLHIDLQKGIMGDKRSPLKIRRSDLEVISIGFLGLGFFDNITLSTSDHLAHFYDAAEWFVHNQDPKTGGWTNPVRRSLNGFAELRPGWISAMGQGHAISVLARAYWHSGGDERYLRAAAAGLQPYRVYSRDGGVLAQFMDKFYWYEEYPTTPPSYVLNGFIYSLLGLYDLNSTAPGKIAREAGKLFAQGMHSLKKMLLLFDTGSGTSYDLRHLSLGVAPNLARWDYHATHVNQLLLLATIDSDPLIAQTAERWKGYMFGRRAKHN

SEQ ID NO: 5914 - DNA, 2756 bp, DROSOPHILA
tattttgtgttttatatatctctttgggtacattcgtatcttgagctttaagatttacgtactgatattctaaaacaagcgttttcaaaaatgttgtcacagaattgatctatttagaaagcgcactgaatatatgtgctctgctgtgcctcactcgacttgtgcaacaaatgctaatcacaggacaaagggcatctgcaattctatccgaacaattcagttattccatttcttgtttattacttcccataatggcactcccatgttcaactacttgggaatgcatgcggaaaagtccttgaaaggagggtaaagggggggggtaacattgcaaaggaccaaggcgccgcttgtttcgtgagctcaccatttgttcggctatttcgtagcaaatgaaaatgattagcacatttggcaggaggaaagtgagagcaaaccttttggacatctgccaagtgggctgccatcgaagtgaacgccatcattcataagcttgtctgctaaaaatttaaaacttaattggaatctgctgcctcattctgccaaccgtgcgcttgttgactcctcgcacatatgtatgcgctattcaactagtttttgttatgttttcttttcattttttgtattcagctgcgagtattatgaaaaagttacacttaggcgaaagaaaagttcgctgagagaaattagactgcatttgcttggatcgttgtgaaataatataacgaatgctgcgaatattttttataatacaagtgatttatctcaaaatactttgtggaattcttaaaacgacgcattttactgataagcagagtgctgagttcgcagggtaagttctaagtactcgatttcattttgattcgaacactcgttgcggaatgtcgctatactttgcgtttctcacgacactgataatcagccttgtgaatagtcaatactttaactacaatcaggttagtttatataatacttgtacatagatataaaaaatactgaaatggaaatacgcatgcagatacgacgtgaaacatatggcagtaatcccagagcgacatttccctgggtggtttctgtgctcgaccagagggattggctgtttcgctatataggagtgggatctctgattaatccaaatgtggtccttactgccgctcatattctgaatggaacaaccaagtatgatctggtggtgcgagctggcgaatgggatacctcgactacggctgaccagcagcacgtggatctcgaggtgctgaatatagtctcccatgaacagttcaacagattcaatgccgaaaacaacatggcgttactcattctggtatccgcatttgagatgacagccaacattaatttaatcccattgtacctacaagaagctggtattcaaaaaggatcctgcttcttcaacggctggggaaaagtatatttgaactcgacggactaccccaccgttctcaagacggtccaggtcgatcttttgagcatgggtatgtgtagctctcgaaagctgcccatccagcaaatctgtgggaaaggtctggaaggcatagattgcagtggagacggtggggctcctctggtttgtcggatacttacatatccatataagtacgcacaggtgggcattgtgaactggttaagtcaaaagcctgtcgaaaatacattcatcgtctttacgaatgtagctggtctgctcccttggattgactaccatttaagacttgaagcgaactttcgtcccagaagttgaaaactaaagccttaggcagttagccagttatttattaaatctttattcggagaatcagaaaagagagcaaatagttatctgcagttatttcctaaataaaatgtggcctgtgtccaatcacaaacattctaccacgaaaatttatatatacattctgagtaaaaatactatttcattatcaacttaagtcgctcaattcaacataatcagttcaagaagtgctgtgcaagtattattttattacttcgtaccataaactttgttgctgcgcaacacggcggatgcgcgatgttcattgaaaatgctttttatattcctagaaaaataacttgtaaatattgtattgtgcctcgttttttcgccaagtgtacaacgcaagcagaaataatctcggctaaaaaatcgcatttaaaagatggcaggtagctgaaatctggagaggtggccaggagttttgtgggtgaaacggcgttcaaaagttaaagtgttgccatttttcattttttgcacgctacttgtttgttgtttttggcttgtttgtttgtttgtcgctccacaaaggcgagtgtgtgtgtgtgggagcaaccaacacaagcacacgaaacatatgagagttgcgtttgccctgtgaaaaaaagagcgattcgagtgcttgttagaaagagtgcgagtgcggtgggaaagggacgccagatggatggggcatacgagtgtttgcatgtgtgagtgagatcctgaaactcgttttgccgctaattggatgctgaaggtgtcctccgcgtgagtgtgtgtgtgtttgtatgtgtgtatggctgcggtcatgtatctgtgtgtgtgacgtccggagttgaagttgccaaacatcattaacagcagaccgacacgcccaacgcccacgaactttcacacttaaacacacatgtatttgcaccctgtttttccaaattaattcattgcaaaaggaaagccatattttaaatatctgaataaatgaatatat

SEQ ID NO: 5915 - DNA, 756 bp, DROSOPHILA
atggaaatacgcatgcagatacgacgtgaaacatatggcagtaatcccagagcgacatttccctgggtggtttctgtgctcgaccagagggattggctgtttcgctatataggagtgggatctctgattaatccaaatgtggtccttactgccgctcatattctgaatggaacaaccaagtatgatctggtggtgcgagctggcgaatgggatacctcgactacggctgaccagcagcacgtggatctcgaggtgctgaatatagtctcccatgaacagttcaacagattcaatgccgaaaacaacatggcgttactcattctggtatccgcatttgagatgacagccaacattaatttaatcccattgtacctacaagaagctggtattcaaaaaggatcctgcttcttcaacggctggggaaaagtatatttgaactcgacggactaccccaccgttctcaagacggtccaggtcgatcttttgagcatgggtatgtgtagctctcgaaagctgcccatccagcaaatctgtgggaaaggtctggaaggcatagattgcagtggagacggtggggctcctctggtttgtcggatacttacatatccatataagtacgcacaggtgggcattgtgaactggttaagtcaaaagcctgtcgaaaatacattcatcgtctttacgaatgtagctggtctgctcccttggattgactaccatttaagacttgaagcgaactttcgtcccagaagttga

SEQ ID NO: 5916 - protein, 251 aa, DROSOPHILA
MEIRMQIRRETYGSNPRATFPWVVSVLDQRDWLFRYIGVGSLINPNVVLTAAHILNGTTKYDLVVRAGEWDTSTTADQQHVDLEVLNIVSHEQFNRFNAENNMALLILVSAFEMTANINLIPLYLQEAGIQKGSCFFNGWGKVYLNSTDYPTVLKTVQVDLLSMGMCSSRKLPIQQICGKGLEGIDCSGDGGAPLVCRILTYPYKYAQVGIVNWLSQKPVENTFIVFTNVAGLLPWIDYHLRLEANFRPRS

SEQ ID NO: 5917 - DNA, 5406 bp, DROSOPHILA
gatttcagctggaacacgcttataagctgatttagaacagcttgagcgccactgggatgtagccacagccagagcgtgtgattcgtctgtttctcatcctcctcctcccgccgtggccgccacataaaactggcccgctgcagggctccatacggatagcggccatcctcaaataactccacgctgccctcacgtcgtccgctcagaaaagtccgggccgtgatcccaaggccacactgcggacttgttagccgggcgaatccctcgcgtagcatgtccaagggtccccgcaactccacgcaaccatagaacgagatgtcctgcagcaggcagtgctcggcgctggcgcgatagcaagcgcggtaggtcttgtcgcagctggcgtagggcaaccggtggccccagcggtcaaccatgtggaatcgcttcgcgtgccagatgtgcgtctccagccagacgtgccgcctctgccggcgcacgtactcacgcatcagattcttgggtctccggcggtacttcctcgatggtcgtttcccattcaccggctggttgccgcttttgcccatttgggacttgtgcgcctgtcggtacttgcgcggcagtcgcttgggatggtgcgacatggcgcggcggcgcatgtgcttgggcagcgtctggaagattagcttgctgctccgctgcgtcgtctcctggcagtcggccaccaaattgcgaatctcctgcagcgcctcggccgcataatggtacgtggtcacgtgcgacggcagtgtgacccggccgcccaacgcagcgtcgtactccaccttctgtgtgctcatcggggactaactaatttggccaggatccaatgcatccaaaatcaaaacaaatcggcggcacgtgtggcggtttcttgtgaaacgatctggcagcactgctcgatttcactaaactccctgcactcatcgatgttgtcgcacctatcgaatttcgagtggcctatcgattgcgcccactatcggcgaccactaacaccaacaacgtttcagaatttgcttgcgttttgtttcgacgtcgaattcaatattcaatatttcgtgtattttgtgttgttttccctcagatagctaaaaacaaatcgatatggtgagtgcaggctgtttattgcggcgctgtttactgtttacgatcgcactggaagtgcgctttccggcgcctttggaagccagcactcaagtttccttcattgttttcctttctttcccctctctctctccccgcaggcagcttataccgaggatcagttggctggtgagttgaatcgcacgaggaccagacggggtcaagtaccaggagtcaaaagtcgggcaaatcgcatatatatatatatacagatatatatatgtgtatagtattgatatgtgcgctggcacctagcgccctctccctcccactcccacacagcattggaatgcgggaaagcgatggcacgtacatttgtgtggtgtgcatgaatcattgataaagcaaatacgctggaaggcagacggcagccatacgaatacgatcgtgactcacctaaaaagcggcgagaaagtcccaaaaccgaaacactgcaataccctgtccaaaatgctttaattaagagcagctgtaggcaaagtttgacgtgatgacttcgaaagacatccgagatcaagctgacaacacatatcgaaactgtgctacttttgggctttgatcagcagattatgttcgtccaaggaatagcttcatagaatagcgacacacggctgtgtaccaagtttcgcattaatatctcttgataaatccgagttctttcggttatccgaaacccacaccaagttaattgataatatgcatagcaggcaacaaacttattcgaccatcagctagttagtttctgccaacaagctagtgctagtcttaagctagtgtaaaccaagtttgtaggtcatcataagagcagttattgtaagacagaaactggtcgcttataatcataaccaacacctcggtatgagtacaaaaaaaaaaaaaaaacactgtttaagcgaaaggaagtgagcgataaaatatagataacagagcggtctaatgggataatcacccggttttctgactcgccggctgctcgtttcaaataaaactgcaattgcagttgcaaaaaccgaatagccatgcgataagaagccagtcagttgacaaaaaaaaaaaaaaccagcttccatttacggaacatcaccttctctctaagtaaaaatgcaacacgatttcgattccatggcgaatcaaatcgaatcgaatctttacgcaatcccctcgtttaacctaatcaaagtcaatggtctctgataattccgtcatgctggattcgtgacactctgacgtcagcgttcaaccgcatatgcctatgtacgagccatataccatatatttattttccaattccaacttaccttgttgcaatctttagccagccgtcgacgttttgtcattgcctaaaatggacaaaaatgtgctggattcgtttgtttttattgccatttttggatctcgtattcgcatgataaccgaacacatcccagcaattcatcgaatggtgaacactctagtgctcagatctttagaggatctgaaaacaaaatattgagcccaaccacaatgttctatttacgcacgtagatcgcagaacttttgcagcttggttaacttacaccatcacttgcttaaatccaactgcacgcgaaatggacttgcgatgtcacgcctcgaaacgaaaaactttgaaacttaggatttctgggttgtttatcttacttgcaagcaggcagttcccggtagagaaacgaagtttgccagcgacgtgagggtataccatggccaaggaaggcggagtggtggcttgcatcggagccgatccgatccgcttcgatccgatggccagccaaatccgggcaggcggagtttcaggcagtcagtagctggcaaaacggtcatcggagtggttcaatatgtattactatacggcgcatgtgaagcaaacctttaccacactggaaggtgatccatttagccatttagtgggtggtagaaagctatagttccccctcacatttccatacgtttatatgtagtagttatgtaggtattatatattatatcccttatcgaagggttcttgtaagttgtaacgataataattaagatttgtaaagcatctgccaacaatcagcacgcactttccattcgcagaattccaggaggccttcaacctgttcgacaaccgcggagatggcaaaattcagctgagccaggtgggcgagtgtctgagggccctgggccagaaccccaccgagtcggatgtcaagaagtgcacccaccagctgaagcccgacgagcgcatctcgttcgaggtgttcctgcccatctatcaggcgatctccaaggcccgctcgggcgatacggctgatgatttcatcgaaggactgcgtcacttcgacaaggacgccagcggttatatctcctccgccgagctgcgccacctgctgaccacgctgggcgagaagctcaccgacgaggaggtcgagcagctgctggccaacatggaggaccagcagggcaacatcaactacgaggagttcgtgcgcatggtcatgagcggttaggatcagaccgattctagctgttcaactgtccagcgacacgacaatagaagcaacgctatatccaacacaatacaacacaccaacactaaacacacctgccaagctacacatagatgagccgttcattccgccagaagttccaactccgtgattccaacttagccattcttaccccggcattaaagcattcaaaaccaaggacaacgaccaaggatatcgagatataacaaatacaggggaaagtgcttaacacaagcagctaataactgaaaactaaaaactaaaactacgagattggagctattcccacttccaaaattaaccaacgatgtagacatagattcatgattaaccataactaattaccgcgtctgtgaatgtgcgtattattctaaaattgacactagaaggttaatcagtaattatcaactagtgcagtcgttcttttgtaccaatcacactcgatacatttatatatatatatatatgaattaccatagtatacttcaatggaaggaaggaaagccagagtatcacgaaaaagtatttctaaattaaagctgatatgcgtcggtggcgtgtgtccgtatttaaatgcgcattttgaagttttacatgtttatttttttttaaataatttaatatttgtatttaataaataatgaaatgagatccaatgaatgtgtaggtctttttacaaaagaaacgtacttaaactattaaaccaattgaaaccttagctcttgtttttatttcttgttgaaagcggatggcaatcaaataaatggctgcttaaaattacgactgatgcaaatttttgaaatatttaggaaacttaactgaaattaagcaaattgtttgtggtattttttgcgagctcttgtgctctgagctttcggacatttttaaactgattattaagtgagaaccactgcatactacagtatttacaaaacaatataatgtagtttagctatcaataaattcaataagcttactataaagtttatctaaagttatagtcatttaaatttagtattcttccgactttaataccgcgctaattttcgccagtctggcagctctgctcgctcggacaaaattatttgtatactttacttaattggctgcattccttaattattcgccgcctacttagtggcttttgaccaagtggcctgctaatccgagggaggatgccccggaacacggaggcgggcgccggaaatgcgaataccggtggatccggcggagtaggcggtgcccccgagcccagttctccggttcagaaggtttggaagccggaatgtgagtggagaagcacctcgtatgccacccacaagcttatgatatgactaaccatccccttacccatttacccgcccacgcacagtgtacaaactgcagctggaggcaccggctccatgtccactgcgctgccagcgaacactgccccttccgccggcgaaaagcacggctgaggccgtggaggccaataacttggcgggcaggctatacggctccgagtaccatggcctgatgggccacctggaggcggagcagctgctggccaatgcccgcgacggcagctactttgtacgccggagcccccaatccgatggctactacacgcttagcctgcgcttcaacaagcgacccaagcactacaagctcctctataagcccggcgtgggacactatctgcgcggccaggacaagcgcttcgacacggtgcacg

SEQ ID NO: 5918 - DNA, 1304 bp, DROSOPHILA
gcgaccactaacaccaacaacgtttcagaatttgcttgcgttttgtttcgacgtcgaattcaatattcaatatttcgtgtattttgtgttgttttccctcagatagctaaaaacaaatcgatatggcagcttataccgaggatcagttggctgaattccaggaggccttcaacctgttcgacaaccgcggagatggcaaaattcagctgagccaggtgggcgagtgtctgagggccctgggccagaaccccaccgagtcggatgtcaagaagtgcacccaccagctgaagcccgacgagcgcatctcgttcgaggtgttcctgcccatctatcaggcgatctccaaggcccgctcgggcgatacggctgatgatttcatcgaaggactgcgtcacttcgacaaggacgccagcggttatatctcctccgccgagctgcgccacctgctgaccacgctgggcgagaagctcaccgacgaggaggtcgagcagctgctggccaacatggaggaccagcagggcaacatcaactacgaggagttcgtgcgcatggtcatgagcggttaggatcagaccgattctagctgttcaactgtccagcgacacgacaatagaagcaacgctatatccaacacaatacaacacaccaacactaaacacacctgccaagctacacatagatgagccgttcattccgccagaagttccaactccgtgattccaacttagccattcttaccccggcattaaagcattcaaaaccaaggacaacgaccaaggatatcgagatataacaaatacaggggaaagtgcttaacacaagcagctaataactgaaaactaaaaactaaaactacgagattggagctattcccacttccaaaattaaccaacgatgtagacatagattcatgattaaccataactaattaccgcgtctgtgaatgtgcgtattattctaaaattgacactagaaggttaatcagtaattatcaactagtgcagtcgttcttttgtaccaatcacactcgatacatttatatatatatatatatgaattaccatagtatacttcaatggaaggaaggaaagccagagtatcacgaaaaagtatttctaaattaaagctgatatgcgtcggtggcgtgtgtccgtatttaaatgcgcattttgaagttttacatgtttatttttttttaaataatttaatatttgtatttaataaataatgaaatgagatccaatgaatgtgtaggtctttttacaaaagaaacgtacttaaactattaaaccaattgaaacctt

SEQ ID NO: 5919 - protein, 147 aa, DROSOPHILA
MAAYTEDQLAEFQEAFNLFDNRGDGKIQLSQVGECLRALGQNPTESDVKKCTHQLKPDERISFEVFLPIYQAISKARSGDTADDFIEGLRHFDKDASGYISSAELRHLLTTLGEKLTDEEVEQLLANMEDQQGNINYEEFVRMVMSG

SEQ ID NO: 5920 - DNA, 2838 bp, DROSOPHILA
atgctgagatatttgaatttaatgtacttactttgctggccccacctcccaaacgtatcaagcgcgagaataggttcatggcagtggtgatttcctgagatagtgaagaatttaatttatattaatgaaaattactgtgcttcaaacagactagcccaaaaccaatttttacttaagtattgtattgaagatatgtatttctgatgaagtaagctcttaaagaaatattgtaattttataccaattcatttgtagttacagctcacaattatataatgataattgggatcgaataaatataaaacattgtaacaaggtatgtattggcacacactaaaaaatattatatgtacacatacccttagcttttttgaaagactgttaataaaactataaacaataaatgagatatttggcactggcttgtattttgcactgtgacctgcccaataagaggtctgattcgcaactaaagttgcagtttcgctctggcagtgcatcgcccccagaggcgcagccccaatccgaaccgctcctcgagtttgatttaattatacctgtgaaagaaacgcgttccgtgtgcgtaagtacgatttatggctcgcggcgattgagattgagccgggcccaaaaaaactacctgtctgcgtggcagcttacctgagctctctcgcttgaccaaaagccaagttggtggaccgggttttgtggccagccaccagcgcagagcaaactgcactcgtcggcgcattccaggcccaaatatgctgagttgccgggtgtttggagagtcagagtctgccgactccacaaggttgccgaatagaactcaaattggtttagctgggccacaccaaaattgaccaattgctgcattaccctgcatattatctttttccgattaagagacatgcaagtgtcattagcctattaactgggagctatatatatggcaggccggtgcgtaagccccaaccaagttgacaaaatgggttttcacatgggacgacagctgctactctccggattcctgctggtgatgcttcagatggtgacccaaacgcaggccaggccgcaggtgattgacgagtataatcagttcgaacatgcataactcaatccgccatcaggatgtgatcacagttgctggcgaggagacagaggtggtgatcaagcgggagggcgatgacgatggagacgacgatgactcctcctccgaggaaacagtcgaggattccgaggaaagcagacgcagacgacgcgaggtgaatacggacaacacgccatcggctcgagcggttattccaggtttgccagatccggccaccataatcaagatcgctgagctttttcaatccgtaggcgagcaagtagtccccattctcttggaggccattcttcccagcgtggatgcagcgggcgatcgcttcgcaagatctgtgcaatttctgaaaaacttgacccctggctctgaattgtttgccgtcgagaagaacgaatagccgagccaaatttaatgtgactaccattgaaggaactggaccggaattgatttgacttttgtatctgcatagtgaatcttaaacaagtgaataatatttggatgtagtttggtttcttgagtttcttaaaagaatcattgtttaaatatcgttgtagtaatatttacattatattaagacatggtataacatattgtcttataagaggtattagtgctacccctaattattttattttggttacatcaatatataagctctcagattgttgtttaaccttttgattcaactatttcgttttccgcactggttaaaatataatagctattgaatccaggcctctccctgcaatttctttccaaatttccaaataatatgtcaatgacgctatcgattgcatccgacatgcttccgccacagagaaggatttccgtgaaaactttgtggataagtgggtgaatgggcttgtcgaggcacacttcattgagcctgtctaaaattccactgatcatgccatggatcactttaccaaccaagtttttctctttgaaaatatccatgcagtgtttataaaagttttccgtatagtctcctaatgtaagttgtgttgtttgattggttctagcccgtatgacattctgctttggtttcacaaagcttctataatgactcttgagagctgtcctgtgagcccctaacacgcatggcaatataactatcaggatgcaggatactagcacggtaaagtgacgctaaaaaagaatacatttaactgaggcaacgattttaggcaatacattaccatcttaatcgcttgccgatcgaattgcttttgatttttttttttgctgatctcgaaatctttttcgctttgcaaaatttcgattttccgcttcgtggttcataactaattcagttagtgctctttgtatacgacacctaaaaggtcctaataatatagttatgttgtttttaaagtgctttgtccatccacaggctagtgcctgcataagaatacatctcggttagaaatgtggtaactttggaagcaggcacttctcagtattcggtgatcgtgttcttgaggctaatattggcaatttattttaccacaaatcaggccctaggtaatgagaatcgatcggaagctgttcattaggtcgtaatgaaataattatgcatggcgtcgtatccgtgttcctgtctgcttactgccaacaaagtattggtaaataatttgcataaagtccgttctgctggttcgcattttgtgaggaaccttcagaaggtctacatacccatgcccatgcatcttctcattaaccataatgacctg

SEQ ID NO: 5921 - DNA, 732 bp, DROSOPHILA
atgggacgacagctgctactctccggattcctgctggtgatgcttcagatggtgacccaaacgcaggccaggccgcaggatgtgatcacagttgctggcgaggagacagaggtggtgatcaagcgggagggcgatgacgatggagacgacgatgactcctcctccgaggaaacagtcgaggattccgaggaaagcagacgcagacgacgcgaggtgaatacggacaacacgccatcggctcgagcggttattccaggcgagcaagtagtccccattctcttggaggccattcttcccagcgtggatgcagcgggcgatcgcttcgcaagatctgtgcaatttctgaaaaacttgacccctggctctgaattgtttgccgtcgagaagaacgaatagccgagccaaatttaatgtgactaccattgaaggaactggaccggaattgatttgacttttgtatctgcatagtgaatcttaaacaagtgaataatatttggatgtagtttggtttcttgagtttcttaaaagaatcattgtttaaatatcgttgtagtaatatttacattatattaagacatggtataacatattgtcttataagaggtattagtgctacccctaattattttattttggttacatcaatatataagctctcagattgttgtttaaccttttgattcaactatttcgttttccgcactggttaaaatataatagctattgaatcca

SEQ ID NO: 5922 - protein, 118 aa, DROSOPHILA
MLQMVTQTQARPQDVITVAGEETEVVIKREGDDDGDDDDSSSEETVEDSEESRRRRREVNTDNTPSARAVIPGEQVVPILLEAILPSVDAAGDRFARSVQFLKNLTPGSELFAVEKNE

SEQ ID NO: 5923 - DNA, 4272 bp, DROSOPHILA
ctggcaatcgaggcacatgaagacgccggaaacaagctccggatgtacgggatgggtgcgcaccacctggccggagatgcggatgagggtgccgattttggaggtggtcagatcgcgaaccttgtgacgcgtcggcacctccgtgaaggccacatagcaatccttctgggtcttcagtccaatccggtccttaacgtagttcgaaacggattggcaaaggaacggatagatgtggtagtactcctcgataatggcggtggccagattctgatcgtatttctccacatcctcgaagctgacctccagggtgcagcgatccggggattccaagctggcggctgggcgcgtgtacttgatctcgccatcctccttgaattcctcgaggaaatcctgaaacaacttctgggcccgaatgcccacctcgtcttttacgcgcagctggccaacctgagcatctgccacatccattttgggtcacttcttgcttcaaactggtgaattgcgcgctaaattccgagattgctttcgtttcttgcgaatgtttacagctgcgtgctttgctcggttttggcgcctttttctgacagttgcttgggggtggcaacgctcgtgcgcagggatgccagctattcaagagcaaaggtaaacatgtcttacggtcacattaatttattagttcaaatatatataaaaatatatatttttttaattgctgaaagcttacttaaatttcttgcccttgctaatcaacaagtagttttcgaattttttgaatagatcaaatagtccaaaagttgattgagatacgttgttttaataacttaatcggataacttaataatccaagagatgaatgacatgaattataagaataattttatacgagtaaagtattaaaacattcaacttaagttgtttattttatgaacttatagaatttagtacgtttttaagaccgatagttcgcccactcatgtcgcggaacgctgtgcaccgataggcttattccgaaataatcgataccacgcgaatttcgtgaaataattttattgattctattttggctaattttttggctaaacagcaggagcacagcgttgcacgtgtgttcacctgttcgccggcaccgttgtggccatagaagtcggtgtggtaccattggattcatttgattcactgggaccaccgcccccttcggagttttgtccccacaaattgcgaaggagccccggaaaatggtggacgccgccaggcagatgctcgacgagctgatgggcaggaatcgcaacctgcatccctcggaggcgggcgccaaggtcaattgggaggatccggaggtgagtacgctcaggatgtggcgcgccaaagagccacctccaaaataatgggggtttttttttttgtccgcagttctgtcagttctacaacgttaagttctgtccgcacgatctattcataaatacgcgcgcagatctgggcccctgtgcccgcatccacgacgaggaagcccgacatctctacgaggatgctcgaccctcgcagcggaagcgtcagtacgaggatgaattcctgcgcttttgcaatgttatgctgcacgatgtggatcgaaagatccagaagggaaaacagcgtttgctgctaatgcaaagggatcagcccaatgtaccggcgccactgagcaggcaccaggagcagcttgcgaatctgacggcccggatcaataagctgctctctgaggcagaggaagccggcattcggggtgacgtggaccaggcccaagatctaatgaccgtgtgcgaggagctcaaggaggagaaggaacagttggtacagcaatacgaggcccatcacaaggccatcagcagcatcagcctgaccaagtcagcggaggacgagctgcagcatcacccgcgcagcagtccggtcacaaatcccagcgaagaaagtccaactactcctcttccagccgccaccacgctagatgaagcgccggatgcagctccaagttccgcacaagcagctgtcacaacgactgacgatgccggtgaagcagctggtgcagccagcgaggacaaaacgtcagagaagacggatagcaaggcggctggctggtcgcatgatgccatgcccgagaaacaaatgaaggtgtgcgaaatctgtggcgctttcctgatagtcggcgatgcacagcagcggatcgaggaccatttgatgggtaaacagcatctgggctactccaaactgcgcaacgccgtcgccgagatcaacgaggcgcgacagaaggagcgcgagcaggaggaacgacgtcgacgtgagggtcgagtgcagcgcttccactcctacgatagcagacggtaaggtctcgacgaaccctgtatcctatcctatatgcgcacctggcaaaagatcacaaaacaaaaataagttcgttctcaaaaaaaaaataattggcagaatgccctcaatgtgacgatgagtaatgctgttcaattactttcgagtttatttcattacttggttactgcacgaaacgagaaaactatgcgatgtcatggtatcctatagacaatgttttagttaacgaactatgatgatcttatatctaatgtgagcatcttccattcgtttaatcctttagcgagccacgcagtgagtaccgcgagcgaagtcgcgactatgttcagaatcgccagccctcggatcgacgtcaccgtaagttctcacccccccaaattcgttttgcacttgcacacggcactcgaacgtttactgaactactgtatttccattccagatcaccataaatcgcaccacagctcccatcactcgtattcgcgcagtggcggtggtggcggcggtgtaggagttggcggcggaggaggtggtggaagcagtcggagcaaccggagccatcataatcacaaccataatcactaccgccatgacagccgcgagcgacattgccgcagccggagtcgcagtcgctactagagaccaaaaaaaaaaaagaaaaagaaaaagaaaagataaacacaatagaaaccaagtgaatagcaaaccaagaacacaagtaaataatccgaaagtccggagcacttccagtttccaaagccccataccgcaagtgtacaacaactaaatatgatcaagttcaaaacgaacccaatctctcgaccatctgcgatcttcagtcttcgtcttatgtggttcgcaaatcagcaattcgcaatccgtaagcaccagctgccgtggccacgggcggcagcatcgaggtatcccaatagaaaaaaaaaaatcattaacacaatttccaaaaaaaaaaaaaaattataataataatatgtatcagaaaacagttagataaaacagtatctgagctggcagtatcaattgcgctgaggtgagtccaacacttaataagcccgtaaaaaaaaagaatatataacactcgggcgccattgtgccccttcacattctgtagacatactcgttttcgtatcattactctactctcgtatatacgatctatatatctgtgtacacacacacacacacacacacacgcgcgcgcgtgtcccctcaatatgtgtgtgtgtacccagttgggttgagatccgggcgaggatttcaccaaggtccaccagttcttcgaaacggacagacggacctacgtcctttcgatcaaaaaatatgtttaactcttttagtttttttagtcaagcaccacaggcacttttaacctaacgttgtagtattcaattttgtgcaggattatttttaaagtttgtaccttcgacagttttctttttgcccaattaatatactcaatggttatttggttaaacaaatattgagggagttgcagaatgaatagtgaagtttatggtttagtcttaaaattagttaactatgaaatataaaaacaagatttcgccaagtgctgcgtgagtttgacttctatatatttatatatatatatataagcataatgaccaaaagataggctggggattagggcgatacggagcgttcactggacgtttcccttgcaattgtgagtgggacattgactgaaacaggtatttaccaagccttactcttatctctatgcgcttaactaacccaacagatacagattcgcattccctgccatacccgcattcccctccgcacatccaactaatcaacccattcgcaagacataagaacacagacacattatgaaccataaaatacaaaccacaaacgataaatgtatgtacatattatatg

SEQ ID NO: 5924 - DNA, 1516 bp, DROSOPHILA
gcttattccgaaataatcgataccacgcgaatttcgtgaaataattttattgattctattttggctaattttttggctaaacagcaggagcacagcgttgcacgtgtgttcacctgttcgccggcaccgttgtggccatagaagtcggtgtggtaccattggattcatttgattcactgggaccaccgcccccttcggagttttgtccccacaaattgcgaaggagccccggaaaatggtggacgccgccaggcagatgctcgacgagctgatgggcaggaatcgcaacctgcatccctcggaggcgggcgccaaggtcaattgggaggatccggagttctgtcagttctacaacgttaagttctgtccgcacgatctattcataaatacgcgcgcagatctgggcccctgtgcccgcatccacgacgaggaagcccgacatctctacgaggatgctcgaccctcgcagcggaagcgtcagtacgaggatgaattcctgcgcttttgcaatgttatgctgcacgatgtggatcgaaagatccagaagggaaaacagcgtttgctgctaatgcaaagggatcagcccaatgtaccggcgccactgagcaggcaccaggagcagcttgcgaatctgacggcccggatcaataagctgctctctgaggcagaggaagccggcattcggggtgacgtggaccaggcccaagatctaatgaccgtgtgcgaggagctcaaggaggagaaggaacagttggtacagcaatacgaggcccatcacaaggccatcagcagcatcagcctgaccaagtcagcggaggacgagctgcagcatcacccgcgcagcagtccggtcacaaatcccagcgaagaaagtccaactactcctcttccagccgccaccacgctagatgaagcgccggatgcagctccaagttccgcacaagcagctgtcacaacgactgacgatgccggtgaagcagctggtgcagccagcgaggacaaaacgtcagagaagacggatagcaaggcggctggctggtcgcatgatgccatgcccgagaaacaaatgaaggtgtgcgaaatctgtggcgctttcctgatagtcggcgatgcacagcagcggatcgaggaccatttgatgggtaaacagcatctgggctactccaaactgcgcaacgccgtcgccgagatcaacgaggcgcgacagaaggagcgcgagcaggaggaacgacgtcgacgtgagggtcgagtgcagcgcttccactcctacgatagcagacgcgagccacgcagtgagtaccgcgagcgaagtcgcgactatgttcagaatcgccagccctcggatcgacgtcaccccccataccgcaagtgtacaacaactaaatatgatcaagttcaaaacgaacccaatctctcgaccatctgcgatcttcagtcttcgtcttatgtggttcgcaaatcagcaattcgcaatccgtaagcaccagctgccgtggccacgggcggcagcatcgag

SEQ ID NO: 5925 - protein, 414 aa, DROSOPHILA
MVDAARQMLDELMGRNRNLHPSEAGAKVNWEDPEFCQFYNVKFCPHDLFINTRADLGPCARIHDEEARHLYEDARPSQRKRQYEDEFLRFCNVMLHDVDRKIQKGKQRLLLMQRDQPNVPAPLSRHQEQLANLTARINKLLSEAEEAGIRGDVDQAQDLMTVCEELKEEKEQLVQQYEAHHKAISSISLTKSAEDELQHHPRSSPVTNPSEESPTTPLPAATTLDEAPDAAPSSAQAAVTTTDDAGEAAGAASEDKTSEKTDSKAAGWSHDAMPEKQMKVCEICGAFLIVGDAQQRIEDHLMGKQHLGYSKLRNAVAEINEARQKEREQEERRRREGRVQRFHSYDSRREPRSEYRERSRDYVQNRQPSDRRHPPYRKCTTTKYDQVQNEPNLSTICDLQSSSYVVRKSAIRNP

SEQ ID NO: 5926 - DNA, 3741 bp, DROSOPHILA
acgatcccgtctaatttccaggtcttatatgccctgcaccggattattgcattcaaaacaaggaatacctaaaattaggtttattcccactttataccccttggacttatctctgctggtactcccgacttctaggaagatcagctgtaagtgacatgaccatccctctataaaaccactacccgttgtaatagtaatgggttatgagatcactcgactttcgtttggctgagcttattatccctaaagtgctgagatcacctgtgcaaatgtttattccagctatctgaattagtttagtcacgtttgcgttcgtaaagatattggccatgatgatccaactctcacgagcctaatctacaggaaacgtgtcgcgtgaacaagttgttgttgaaatggttgcacactataaagaacaacaacttagagcccgaaaccccagaaccctaaaccaaaatttctctttttgaattggttgatgaaattatcgaaaatattattcaacatattggatatagttcagattgcataaaacgttttacacgcgtctaaatgtagactcatataagataaatgttatcttaactgtcgtcttttcgtgccatattctcagatagcttaactgtctccgaaaaatctcagtttatatttacacaatccttaagtcattaaggtttatggttataaggggtaattcagccaataggctggctaccagttcaaaagcatatggcaacactcgccatagtttaatttttgaacccaagcctacaaagatctgaaggttatattttggggttatattttgtctatgtcttcattggcaatattgattaaaatctctttccatggaccaggttttccatagggcttttcaagactacccattctagtatcttaattaattaattcaaaacatacacacattcattatgtgtgctacatttttattacagaaagaagttgttggcgaacattgaaaacagatttttctgccttcttagttgtcgcagacctgctttccgcttccaatgcacgcagcatatgccatcagatggggaatggtgctctgctgcatcactccggtgaagaggtgactctgaggtccggaggcgaatatgcccacgtcctcgccggagtggacgccctgatccttgggaatgtagctgggggtgatggcgtcgtccgagccaaggatatcgtccaaaggaatgcgctgtccgttctcatccagatactgattgggtccagctgcatagttcagaaccgagtactgcactccgttgatgtcggtgtcatgttgattgattcccaggatgggtgttcctctgccaggatagccggctatgctgacggcgtgtccgtgatcagcggtcaccacaattaaagtgtcctcgatgtccgtcatgtcacgggccaactgaatggccttctcgaattccagggcctcatccagagcatagccagctttggtgtagtggttgccatagtcaattagaccacctacaaatatttcggaatataaatacttaataaaaagattatttcgtgaaaaacccaccttcaatgaacgcaaagtatccgtgttccttgttctggctgagcttcttgatggtcacctcagtgagttcggagagggttggctggtaggtgtcatcagcctccaagtggaagttcattagcttggactggaagagaccaatgacactggacactgctgacacgttcagtttaagcagctgattgcgattggtgaccaagacgcctccatcgtggagtccctgccagcgggaaagcagattcactccgtcggatcgctcaccagggtttccgtgagaatcaacgatggagttggggaggaacttgcccattccgccgccgaacatgacctcgaagttcttgccgggcgtctgggtgacaagctgggtggccatgtcaatgcaggaattggcatccacaccatagctggtcacatccgtgtcgcattcccacatgcggttggctgtctttgcatatgctcccgaaggactggcgtgggtcagggtggtggtggtcacaataccagtggactttccagcattctgggcccactcggcgatggaggtcaggcggttcgcgggatcctggctggcggtgcagttattgtattccactgctgcacttactccgatattgacgatgttggtctttacgccgcacaaatacgcggtggcagtgcaggcggagtcgggcacttgggcattggagcagtaggtctgcagggataatgtttcgtcttagctagtttatagttaccagttagttaaccacaactcaccctgctcaaacccgtgtaggggaatcgctcgaagctcagggaggattcctcaccggtgtttccttgtcgttgtcctttcaggatgcgagcagctgcaacggtggagagaggcatgccatctccgaggaacataataatgttcttggccttctgggaattgggttgtggtagttgtagcctcttggtgatctcctcgtcggcgatgttgtaccagtactggggatccatctcctccgggggagtgtacttttcggtagccacatccgtggaaaacttcaacttattcgctgcctgtcctgtcaactccagaacgttgtgcacctcctgtactccacacagtgctgttccggccaaggccagaaggagcaggattgggagtactaactgccgctgggaggaacccatatctaattgctctgctgctgatgaaatatcacttactacaccgaatttaccgaaaagtacggacttatataccttgattactgtgctcccagacaaagatgcctaaatttaggtttatggtcctctgggcatatctcgtctggaatgtcgtatctttcataatatcagctctgtctagcatggtgcccagttaggtaggcaaggaaagggtataagctattcaactatcataccccgttttccaccatctaaagcgtatcttttggttcgttgggatccattatttgaccttcgttacttcaaaagctacaaatacgctgcccatttgtctttctcatgattcccaaaatggtagactcacctttgcaaagaacttaccgagcattctgaaccatttcagtcacgtttggggttataaagatctttaagagtattatgatcctaatcttagtagaacgtgtagctaacttatcacagcatttttgcgctttcactctgggtggtattttcgacagcatctcgtggccgaagattttattagaaagaaaacatttttatatagtatcactttacttttgccaaataaactttttcgtattccttgctattttatgatactcttatatggcaatatgaaatttttaatctttgaaaataatgtcataaagtactcaaaattttaatatttcacattctaaatttaatcaaaattgtattatgttaaggcgcagtctaagccatctggacaagctgccgaaggcaaaggtggccgaatggctggccgggatcgacaccattatttgcagcacggatggggtgctgtggcaggagaatacccccattgagggctctgtagaggcattcaatgccataatttcaaagggaaagcgatgtctcatagccaccaacgagtgctgcctaacaaacaaggatctgttccagaaggccaagtgcctgggcttcaatgtcaaggagcaggacattttcagctcgtcgggtgccattgcgagttaccttag

SEQ ID NO: 5927 - DNA, 1621 bp, DROSOPHILA
agcagcagagcaattagatatgggttcctcccagcggcagttagtactcccaatcctgctccttctggccttggccggaacagcactgtgtggagtacaggaggtgcacaacgttctggagttgacaggacaggcagcgaataagttgaagttttccacggatgtggctaccgaaaagtacactcccccggaggagatggatccccagtactggtacaacatcgccgacgaggagatcaccaagaggctacaactaccacaacccaattcccagaaggccaagaacattattatgttcctcggagatggcatgcctctctccaccgttgcagctgctcgcatcctgaaaggacaacgacaaggaaacaccggtgaggaatcctccctgagcttcgagcgattcccctacacgggtttgagcaggacctactgctccaatgcccaagtgcccgactccgcctgcactgccaccgcgtatttgtgcggcgtaaagaccaacatcgtcaatatcggagtaagtgcagcagtggaatacaataactgcaccgccagccaggatcccgcgaaccgcctgacctccatcgccgagtgggcccagaatgctggaaagtccactggtattgtgaccaccaccaccctgacccacgccagtccttcgggagcatatgcaaagacagccaaccgcatgtgggaatgcgacacggatgtgaccagctatggtgtggatgccaattcctgcattgacatggccacccagcttgtcacccagacgcccggcaagaacttcgaggtcatgttcggcggcggaatgggcaagttcctccccaactccatcgttgattctcacggaaaccctggtgagcgatccgacggagtgaatctgctttcccgctggcagggactccacgatggaggcgtcttggtcaccaatcgcaatcagctgcttaaactgaacgtgtcagcagtgtccagtgtcattggtctcttccagtccaagctaatgaacttccacttggaggctgatgacacctaccagccaaccctctccgaactcactgaggtgaccatcaagaagctcagccagaacaaggaacacggatactttgcgttcattgaaggtggtctaattgactatggcaaccactacaccaaagctggctatgctctggatgaggccctggaattcgagaaggccattcagttggcccgtgacatgacggacatcgaggacactttaattgtggtgaccgctgatcacggacacgccgtcagcatagccggctatcctggcagaggaacacccatcctgggaatcaatcaacatgacaccgacatcaacggagtgcagtactcggttctgaactatgcagctggacccaatcagtatctggatgagaacggacagcgcattcctttggacgatatccttggctcggacgacgccatcacccccagctacattcccaaggatcagggcgtccactccggcgaggacgtgggcatattcgcctccggacctcagagtcacctcttcaccggagtgatgcagcagagcaccattccccatctgatggcatatgctgcgtgcattggaagcggaaagcaggtctgcgacaactaa

SEQ ID NO: 5928 - protein, 533 aa, DROSOPHILA
MGSSQRQLVLPILLLLALAGTALCGVQEVHNVLELTGQAANKLKFSTDVATEKYTPPEEMDPQYWYNIADEEITKRLQLPQPNSQKAKNIIMFLGDGMPLSTVAAARILKGQRQGNTGEESSLSFERFPYTGLSRTYCSNAQVPDSACTATAYLCGVKTNIVNIGVSAAVEYNNCTASQDPANRLTSIAEWAQNAGKSTGIVTTTTLTHASPSGAYAKTANRMWECDTDVTSYGVDANSCIDMATQLVTQTPGKNFEVMFGGGMGKFLPNSIVDSHGNPGERSDGVNLLSRWQGLHDGGVLVTNRNQLLKLNVSAVSSVIGLFQSKLMNFHLEADDTYQPTLSELTEVTIKKLSQNKEHGYFAFIEGGLIDYGNHYTKAGYALDEALEFEKAIQLARDMTDIEDTLIVVTADHGHAVSIAGYPGRGTPILGINQHDTDINGVQYSVLNYAAGPNQYLDENGQRIPLDDILGSDDAITPSYIPKDQGVHSGEDVGIFASGPQSHLFTGVMQQSTIPHLMAYAACIGSGKQVCDN

SEQ ID NO: 5929 - DNA, 3856 bp, DROSOPHILA
ccttaagctgacccttgtggatgcgggcggctgccaccgtggacagggacatgccatcgccgaggaacaggataacattcttggccttcctcttgtccaattgtggctgttccaggcgcttggcgatctcctcgtaggcaagatcgtaccagaactgcgcgttcttctcctcctctggtccgggttttcccttggccatggcatttgggtcgataaggtttccttcgcgggtttttgctgtgctcaccgatcctcccaccagctggaactgattatggatctcgggcactggaaagggaattcagtgagatatctctagaattcagggtccaactgctgcacttactgtctatggaagcagccaaggaggtggccaccagggtgcataacaccaggctaatggctacgaaagtcttcattttcagaaagatgaggttcgctcagggcaactgattgaactactgccacactcttgcaaaaggctatttattaacccttccagatctctgttatctagttagccatatctccatggcataatccccgcagtgaaaacgcgcccaaaaaatctcactttatggtttcatatttacatggtcttttggtctttagagtttatgaatattttatggcctttgagtcaatagacccagctaccatccaaaattctagaccaatgggctgcgagcacatacccgtggcttccaaaagtgggcacggcaccaagagtttgaaccatgcaaactgaccctatcccacactcaaggtgagctaatgggactggttgcgtccaaatgccaccataactgtgattactataagattaccgaaaagatcgtgataactcttgggtagaagaataatcttaaatgtattattagtataagtacacggtttattaaaatgtgagaaagcctaatactaaagaaaggacatgcgctgtcttttggattacttcaaatctcctatagttacagtagaatatattccatggtatctttcaggttttccgccctgagctcccgcagacctgctttccactaccaacgcatgaggcgtaggccatcaggtggggaatggtgctctgctgcatcactccggtgaaaaggtgactctgcgggccagaagcccaaatacccacgtcctccccggagtgcactccaatttctttatcgatgtagcttggtgatatggcgtcatcggggccaaggatatcatccaaaggaatgcgctggccatgctcatccagatactgattgggtccagctgcgtagtttagcaccgagtatttcactccgttgatatctgtgtcgtgttgattgagtccaaggataggtgtaccccttccaggatatccggctatgctgacggcatgtccgtgatcagcggtcaccacaatcaacgtgtcactgatgttggtcatttcacgagccaactgaatggccttctcgaactccagggcctcatccaaggcgtatcccgcctgcgtgtagtggttgccgtagtcaatgaggccacctaaaatgcattcaaacttgttgttagtgtatatatttaagaggtatatactttcaaagaagaacctaccctctatgaacacaaagtatccattttcattgtggctgagcttcttgatggccacctcggtgagttccgagagagtgggctgataggtgggatcagcgtccatgtgaaagtccatcaagcccgattggaaggtaccaattatgctggatgcagctgaaacgtctaagttaagcagctgcttgcgattggtgaccaagacacctttatcgtggagcccttgccaccgggacagcagattcacgccatcggatcgctcgccatatttcccgtgactatccttcgtggttttgggaaggaacttgcccattccgccgccgaacatgacctcgaagttcttgccgggcgtctgggtcaccagttgagtggccatgtcgacgcaggtgctggcatccactccatagctggtcacatccgtgtcgctttgccacattcgattggccgtcttggcatatgctccagagggactggcatgggtcagtgtggtggtggtcacaaatcccgtggacttgccggcattctgggcccattccgcaatggaggtcaggcggttcgcgggatcctggctggcggtgcagttgttaaagtttactgctgcacttactccgatattaataatgttggttttaacgccgcacagataagcggtagcagtacaggctgagtcgggaacctgggcgttggcgcagtaggtctgtaaagataatatttttgtttgaataaagcacttatgtggggattttatggtcctggcacacgttgtgaacttcaccatgataaagaaaaaggttaaggtttgtttttgctatcattactactggtctatggtactatgcaaacactcactctgctcaatcccgaataggggaatttctcgaagctcagtgaggactcctccccagtgtttccttggcgttgtcctttcaggatgcgagcagctgtgactgtgctaattggcataccatccccgaggaacattatcacgtttttggccctgtcggagttgggctgtggtagctgaagccttttggcgatctcctcgtcggcgagcttgtaccagaactggggatccatctcctccggcggagtgtacttgcccgtggccacgtccgtggagaacctcagcttgctggctttctgacccgtcaactccaacacattgtgcacttcctggactctaccgagtgctgtgccaacaaaggccagcaggaatagaaagatcggataaaggcagcgcctctgggagatgtgcatcttacaactgcagtgataccgaacgaactacaacgatcccgtctaatttccaggtcttatatgccctgcaccggattattgcattcaaaacaaggaatacctaaaattaggtttattcccactttataccccttggacttatctctgctggtactcccgacttctaggaagatcagctgtaagtgacatgaccatccctctataaaaccactacccgttgtaatagtaatgggttatgagatcactcgactttcgtttggctgagcttattatccctaaagtgctgagatcacctgtgcaaatgtttattccagctatctgaattagtttagtcacgtttgcgttcgtaaagatattggccatgatgatccaactctcacgagcctaatctacaggaaacgtgtcgcgtgaacaagttgttgttgaaatggttgcacactataaagaacaacaacttagagcccgaaaccccagaaccctaaaccaaaatttctctttttgaattggttgatgaaattatcgaaaatattattcaacatattggatatagttcagattgcataaaacgttttacacgcgtctaaatgtagactcatataagataaatgttatcttaactgtcgtcttttcgtgccatattctcagatagcttaactgtctccgaaaaatctcagtttatatttacacaatccttaagtcattaaggtttatggttataaggggtaattcagccaataggctggctaccagttcaaaagcatatggcaacactcgccatagtttaatttttgaacccaagcctacaaagatctgaaggttatattttggggttatattttgtctatgtcttcattggcaatattgattaaaatctctttccatggaccaggttttccatagggcttttcaagactacccattctagtatcttaattaattaattcaaaacatacacacattcattatgtgtgctacatttttattacagaaagaagttgttggcgaacattgaaaacag

SEQ ID NO: 5930 - DNA, 1635 bp, DROSOPHILA
tatcactgcagttgtaagatgcacatctcccagaggcgctgcctttatccgatctttctattcctgctggcctttgttggcacagcactcggtagagtccaggaagtgcacaatgtgttggagttgacgggtcagaaagccagcaagctgaggttctccacggacgtggccacgggcaagtacactccgccggaggagatggatccccagttctggtacaagctcgccgacgaggagatcgccaaaaggcttcagctaccacagcccaactccgacagggccaaaaacgtgataatgttcctcggggatggtatgccaattagcacagtcacagctgctcgcatcctgaaaggacaacgccaaggaaacactggggaggagtcctcactgagcttcgagaaattcccctattcgggattgagcagaacctactgcgccaacgcccaggttcccgactcagcctgtactgctaccgcttatctgtgcggcgttaaaaccaacattattaatatcggagtaagtgcagcagtaaactttaacaactgcaccgccagccaggatcccgcgaaccgcctgacctccattgcggaatgggcccagaatgccggcaagtccacgggatttgtgaccaccaccacactgacccatgccagtccctctggagcatatgccaagacggccaatcgaatgtggcaaagcgacacggatgtgaccagctatggagtggatgccagcacctgcgtcgacatggccactcaactggtgacccagacgcccggcaagaacttcgaggtcatgttcggcggcggaatgggcaagttccttcccaaaaccacgaaggatagtcacgggaaatatggcgagcgatccgatggcgtgaatctgctgtcccggtggcaagggctccacgataaaggtgtcttggtcaccaatcgcaagcagctgcttaacttagacgtttcagctgcatccagcataattggtaccttccaatcgggcttgatggactttcacatggacgctgatcccacctatcagcccactctctcggaactcaccgaggtggccatcaagaagctcagccacaatgaaaatggatactttgtgttcatagagggtggcctcattgactacggcaaccactacacgcaggcgggatacgccttggatgaggccctggagttcgagaaggccattcagttggctcgtgaaatgaccaacatcagtgacacgttgattgtggtgaccgctgatcacggacatgccgtcagcatagccggatatcctggaaggggtacacctatccttggactcaatcaacacgacacagatatcaacggagtgaaatactcggtgctaaactacgcagctggacccaatcagtatctggatgagcatggccagcgcattcctttggatgatatccttggccccgatgacgccatatcaccaagctacatcgataaagaaattggagtgcactccggggaggacgtgggtatttgggcttctggcccgcagagtcaccttttcaccggagtgatgcagcagagcaccattccccacctgatggcctacgcctcatgcgttggtagtggaaagcaggtctgcgggagctcagggcggaaaacctga

SEQ ID NO: 5931 - protein, 538 aa, DROSOPHILA
MHISQRRCLYPIFLFLLAFVGTALGRVQEVHNVLELTGQKASKLRFSTDVATGKYTPPEEMDPQFWYKLADEEIAKRLQLPQPNSDRAKNVIMFLGDGMPISTVTAARILKGQRQGNTGEESSLSFEKFPYSGLSRTYCANAQVPDSACTATAYLCGVKTNIINIGVSAAVNFNNCTASQDPANRLTSIAEWAQNAGKSTGFVTTTTLTHASPSGAYAKTANRMWQSDTDVTSYGVDASTCVDMATQLVTQTPGKNFEVMFGGGMGKFLPKTTKDSHGKYGERSDGVNLLSRWQGLHDKGVLVTNRKQLLNLDVSAASSIIGTFQSGLMDFHMDADPTYQPTLSELTEVAIKKLSHNENGYFVFIEGGLIDYGNHYTQAGYALDEALEFEKAIQLAREMTNISDTLIVVTADHGHAVSIAGYPGRGTPILGLNQHDTDINGVKYSVLNYAAGPNQYLDEHGQRIPLDDILGPDDAISPSYIDKEIGVHSGEDVGIWASGPQSHLFTGVMQQSTIPHLMAYASCVGSGKQVCGSSGRKT

SEQ ID NO: 5932 - DNA, 3845 bp, DROSOPHILA
acgacgcgactttaaaagccgacaagctgctgccgacaagcgatttgcgttttacgaccacaacactaagtaaacgaacccctggcttccacttttcgctgagccagcaatcgttgaacaagcgaatttttcagaacttttaaacaacaaaaattcccaaaataaagactcaaagtaatccgaaacaaggacaaggcacgagcgaaaatgagctggaatgaacttactttaaaatataagtttcactaacaagatcactactttagtactttaaacaaatgctacaataaacattttaatatgttcctcttttggcaatttaaatatttcaatgtacgaatcggaatattttctgtgtgtgcagacgaataattgagttattgaagtcgttggggatcgaggacaccgccttggccagagcgatccttaattgcgtaagaaacgagaaaacattaagcttaattgtctggagctgcgccttcatctcgactcacttcatgtcaagcgcatttaaataaattctgttgaatgcgcaaacccataaacaagcaaacaattacaagtcaaagtcagagcgagtgaaggagctgctccagatgcgtgtgggagtcaatatatctacatctgtgcatctatatatctacggcatatctgtgtatctgcgtatccccaagtgtcggcaatgccaatgcttgaacctgacattcagcgaattcatatttattccttaccccccacaagtgacagccatcgactggcaacaaatcgatgcgatcgctcaatctatctaaatctttgtttgtatctgtatctgcatctgcgagtgtctgtcttttcgctgatgcgttttaaattgaagtcaattcggcagactcgtgcaataaattacgggagtcgggccaatttgattattgatttctgcaaagtgctcccccagaatcaaatcaaagtgagagcagggtgctttccaaatactctatattatagattcattaaaattctagtcctcattgtcacagagagtgggtccattgccaatgcaggaggcataggccatcaggtggggaatggtgctctgctgcatcacgccggtgaagagatgactttgcggaccagtagcgaagattcccacatcatcgccagcatgaacgccaatagtgccgtggatgtagctggggtggatgaagtctagaaggaaagcagattggttcgcttatcacttatcaaggcgcccaaaagtagaattcacttaccttccgctccaatttgatccgtaagatcgatgcgctggccgtgctcatccagatactgattggttcccactgcatagttgagagtggcgtacttaactccattcacatcggtgtcatcctgattgagacccaaaatgggggttcctctgccaggataaccagagatggtcaatggatgggcgtgatcggaggtgactacaatcagggtctcttcgggatcggttatatccagagcctcctgaacagcctgctcgaactgaagcgtctctgagagcgaataggttggggagttgaagtggttgccataatcgatgagtccaccctcgacgaacagaaagtagccaccatcgcgtttgctgaccacctcgattgctttgcgcgtcatttccgccagtgtgggctcctccttgggatcggccatcttattgaagctcatcactcccgagcggaaggtaccaatcaggttggtgatcttcgagacattcacgctcagcagctggttacgattgtaggctaaaacaccgccgggatgcagtccctgccagcgagacagcaggtttactccgtcggaacgctcgcccttcttgttgaacggatccgtgatcgtgttgggcaggaacttgccaattccgccgcccagcatcacatcgaagttcttgccgggagcctgggtaatcagttgggtggcaatgtccgtgcaggtggccggatcgttctgtccctcgccgtaggtcagaatatccgtgtcgctctcgaagaatcggttggtggtcttggcatatgcacctgatggactggcgtgggtcagagtggtggtggtcacaatgccagtggcctttccagcagcctgggcccaggctgcgatggagtccacctgattggccggatcctcgctgccgctgcagttgttgaagctcactgccgccgtaattcccaaagccacgatattagtcttcacaccgcacaagtaagcggtggcagtgcaggcggagtcgggaacctgggcattggagcagtatgtctacggaaaagatatatttaaatacttatctcattcaaatccaaatcccgagcatatcactcaccctgctcaggccggtgtaggggaacttctcgaagctcagggagtcctcctcgccggtattgcccttaagctgacccttgtggatgcgggcggctgccaccgtggacagggacatgccatcgccgaggaacaggataacattcttggccttcctcttgtccaattgtggctgttccaggcgcttggcgatctcctcgtaggcaagatcgtaccagaactgcgcgttcttctcctcctctggtccgggttttcccttggccatggcatttgggtcgataaggtttccttcgcgggtttttgctgtgctcaccgatcctcccaccagctggaactgattatggatctcgggcactggaaagggaattcagtgagatatctctagaattcagggtccaactgctgcacttactgtctatggaagcagccaaggaggtggccaccagggtgcataacaccaggctaatggctacgaaagtcttcattttcagaaagatgaggttcgctcagggcaactgattgaactactgccacactcttgcaaaaggctatttattaacccttccagatctctgttatctagttagccatatctccatggcataatccccgcagtgaaaacgcgcccaaaaaatctcactttatggtttcatatttacatggtcttttggtctttagagtttatgaatattttatggcctttgagtcaatagacccagctaccatccaaaattctagaccaatgggctgcgagcacatacccgtggcttccaaaagtgggcacggcaccaagagtttgaaccatgcaaactgaccctatcccacactcaaggtgagctaatgggactggttgcgtccaaatgccaccataactgtgattactataagattaccgaaaagatcgtgataactcttgggtagaagaataatcttaaatgtattattagtataagtacacggtttattaaaatgtgagaaagcctaatactaaagaaaggacatgcgctgtcttttggattacttcaaatctcctatagttacagtagaatatattccatggtatctttcaggttttccgccctgagctcccgcagacctgctttccactaccaacgcatgaggcgtaggccatcaggtggggaatggtgctctgctgcatcactccggtgaaaaggtgactctgcgggccagaagcccaaatacccacgtcctccccggagtgcactccaatttctttatcgatgtagcttggtgatatggcgtcatcggggccaaggatatcatccaaaggaatgcgctggccatgctcatccagatactgattgggtccagctgcgtagtttagcaccgagtatttcactccgttgatatctgtgtcgtgttgattgagtccaaggataggtgtaccccttccaggatatccggctatgctgacggcatgtccgtgatcagcggtcaccacaatcaacgtgtcactgatgttggtcatttcacgagccaactgaatggcc

SEQ ID NO: 5933 - DNA, 1658 bp, DROSOPHILA
cctgagcgaacctcatctttctgaaaatgaagactttcgtagccattagcctggtgttatgcaccctggtggccacctccttggctgcttccatagacatgcccgagatccataatcagttccagctggtgggaggatcggtgagcacagcaaaaacccgcgaaggaaaccttatcgacccaaatgccatggccaagggaaaacccggaccagaggaggagaagaacgcgcagttctggtacgatcttgcctacgaggagatcgccaagcgcctggaacagccacaattggacaagaggaaggccaagaatgttatcctgttcctcggcgatggcatgtccctgtccacggtggcagccgcccgcatccacaagggtcagcttaagggcaataccggcgaggaggactccctgagcttcgagaagttcccctacaccggcctgagcaggacatactgctccaatgcccaggttcccgactccgcctgcactgccaccgcttacttgtgcggtgtgaagactaatatcgtggctttgggaattacggcggcagtgagcttcaacaactgcagcggcagcgaggatccggccaatcaggtggactccatcgcagcctgggcccaggctgctggaaaggccactggcattgtgaccaccaccactctgacccacgccagtccatcaggtgcatatgccaagaccaccaaccgattcttcgagagcgacacggatattctgacctacggcgagggacagaacgatccggccacctgcacggacattgccacccaactgattacccaggctcccggcaagaacttcgatgtgatgctgggcggcggaattggcaagttcctgcccaacacgatcacggatccgttcaacaagaagggcgagcgttccgacggagtaaacctgctgtctcgctggcagggactgcatcccggcggtgttttagcctacaatcgtaaccagctgctgagcgtgaatgtctcgaagatcaccaacctgattggtaccttccgctcgggagtgatgagcttcaataagatggccgatcccaaggaggagcccacactggcggaaatgacgcgcaaagcaatcgaggtggtcagcaaacgcgatggtggctactttctgttcgtcgagggtggactcatcgattatggcaaccacttcaactccccaacctattcgctctcagagacgcttcagttcgagcaggctgttcaggaggctctggatataaccgatcccgaagagaccctgattgtagtcacctccgatcacgcccatccattgaccatctctggttatcctggcagaggaacccccattttgggtctcaatcaggatgacaccgatgtgaatggagttaagtacgccactctcaactatgcagtgggaaccaatcagtatctggatgagcacggccagcgcatcgatcttacggatcaaattggagcggaagacttcatccaccccagctacatccacggcactattggcgttcatgctggcgatgatgtgggaatcttcgctactggtccgcaaagtcatctcttcaccggcgtgatgcagcagagcaccattccccacctgatggcctatgcctcctgcattggcaatggacccactctctgtgacaatgaggactag

SEQ ID NO: 5934 - protein, 543 aa, DROSOPHILA
MKTFVAISLVLCTLVATSLAASIDMPEIHNQFQLVGGSVSTAKTREGNLIDPNAMAKGKPGPEEEKNAQFWYDLAYEEIAKRLEQPQLDKRKAKNVILFLGDGMSLSTVAAARIHKGQLKGNTGEEDSLSFEKFPYTGLSRTYCSNAQVPDSACTATAYLCGVKTNIVALGITAAVSFNNCSGSEDPANQVDSIAAWAQAAGKATGIVTTTTLTHASPSGAYAKTTNRFFESDTDILTYGEGQNDPATCTDIATQLITQAPGKNFDVMLGGGIGKFLPNTITDPFNKKGERSDGVNLLSRWQGLHPGGVLAYNRNQLLSVNVSKITNLIGTFRSGVMSFNKMADPKEEPTLAEMTRKAIEVVSKRDGGYFLFVEGGLIDYGNHFNSPTYSLSETLQFEQAVQEALDITDPEETLIVVTSDHAHPLTISGYPGRGTPILGLNQDDTDVNGVKYATLNYAVGTNQYLDEHGQRIDLTDQIGAEDFIHPSYIHGTIGVHAGDDVGIFATGPQSHLFTGVMQQSTIPHLMAYASCIGNGPTLCDNED

SEQ ID NO: 5935 - DNA, 4280 bp, DROSOPHILA
atactttgcccttacaaaacttttgccactgcaatactaaacatttaaatggaaaaccaacaccgaacttaccgaatagtgttgccagtacgtaggcgaacccattggggaacggatctgttctgcttcagcttcttagccagcttctgctttattctgaacgacttgtgtgcagcctggtggagaaagaagtaacgaacgtttagtatctcgatatattcaaaacatttgatcaaaaacacaaataagaaaaatttcccaccatttcgtccaatcttttcaacgagccacaccggaaagaaagaaccagaccggaaaagaatacgcgctggtggtgggtttatatcgataagttcacttatcacaatttcatgcaatacggaatgatgaaatagaacgaaaaatatttgaggcattacaaaaaattataatataatatttaagactttttttttatagcaagggtggttcttataaaattacataaaaactaagtttgtttcgttcaattactactggtttcttgagttaaatatgtttccgaaagaaccagtatcagctatttagcgtaagtgagcgacgaaatcaaattatattttgcaattagaattcagctatcttgttttatatattttttttatatacaatttatataaagttgttatgttatcggtatattttttacttaagttacaatcttaatgtatattgcaaatacatcaccaaaatataatcaatgtaaacataaagctcgccatgattcaatatgaaagtgtaattatggtaagtctgttttaattcgatcacgttgttttcttattcgtatcggaaatacattttaaaaattaagatccctagttaaataactttataaaaatattttttctttgacattccgataggcctctatcgataacagtttcaattgtcgtgtgtatctgcccctaacgtttttgttctaaaaccattatttcatttcttctatacatcgttccattttcccataagtgtcagtgtcatcatttatcaattatcatttgattattatattttacaatataatatgtgtttaagaaaagccaaaaacgcttcctgctgaggacgaggcacaaacagagcgcagttttgtcaccgaacttccgtgcattacgtgcgaatcgaaacgcaatgtcaacccatacataatattttgctttgtaaacggtttttgagttgaaatacatacacacagtggtgttaaatataaacacgtacagaagactcatttgcatctatattgcacgcatcgaataacacaaaaagctgatttaacaatgcgcgaattcaaagttgttgtgctcgggtcggggggagttggtaaatcggcccttacagtgcaattcgtctcgggatgctttattgaaaagtacgatcccaccatcgaggacttctaccgcaaggaaatcgaggtatgtacattgtatgggcctgcatatgttcgcgatatcggccagacataatcaatttacaaacgcagccacacgcacatacagatctacataaatatttatgtatgtactaagcgtaatcacgcacatacatacgaacgtctgtaagcacgggcccagcacagacagccgtacatatacgaatgttcgtatgtatgaatgtatgcgcacatatgtagatacatataatgggcgattaattgtacatacatatgtacatatgtgcgaacggccacatatagattcataaattcactggcgtctgtgcatccaaatgtgcatatttgagcataggcgtgggtgttgctgcaaggattaatggccaagccagttttcagcccgaaaacatgattcataggcgtccgcatccgcagtcggggggtttattaaatagggagtggactgataacgctaagcgactccgaaacctgcattttcattcccttgcagtgcaattctcgtttcgagcagccagccaaactagttcccaagccacaatgtgcattctacgcagagcagagtgccatttgcatcgcagcctgcgcaaaagttcatagtttgtcatagtttggcttgcaaagcaaccgattcgatgagtgaatcaatcagctggaaccgtatgtatctcgccatgctgtttatctattaaaactgcattgtgctgccgaattgaaagcaaaatgcttcacatttactgcgacgtgagttagccttttgccatagaacgaatgagtgacacatgcgagtgcagtcactcgcagctacaagtccatcggatatctgatactgcttggatctcgggaacgagcccattgcaggcgcataagtgccgcctttggcaaataaaatatatctaatgatgtcgaaagacaaagagcaggcgtttcttccgcattcgcacatgcccgccatcgtgtgtaccaccccattttgtgggcagcacttgcacaacccctaataccgcagctttgtctgaagagcaaataactatttcaattaatccctaccgagccaagagaacgtcgtagaacgtacgtttgcccacgtacgtagatggggccagcttctgcgggttcaacgccccaagacaatttactaatgcaatttaccctcttttgcaggtggacagctcgccgtgcgtcttggaaatattggacaccgcgggcacagagcaattcgcatccatgagagatctctacattaaaaatggtcatggttttattgtaatgtattcacttacgaaccatcaaacatttcaggtatgaaagccacaagtccctcctgtgcgttcatcatcgtgtttgctttgtactttttaacccaaacttgctcttgagtactccaactaatgccaattaatggtctcgctttgctccacaggatatttctagtatgaaaaatgtgatcactcgagtgaaaggaagtcagccagcacccatcctactagtcgcgaacaaattcgatttagattgccaaagagaggtatccaccgctgaaggtaggcatcatccatatccctccccagacgagactgctcttatttacgccactgttttcctcgtcctcacaggtaatgccttggcacaactgtgggactgtccatttatcgaggcatctgcaaaggatcggataaacgtaaacgaagtattcgccaccatcgttcgagagatgaatttgacgcaagagaatcggcaaaaaaaaaattactgttgttgtacgcttttatagaaattttgtaaaattgtaagattattatagttaaaaataaaattactaatatttaatagataacgaaaacttggcgaatttttatttttcatttccttgaaacaaagctgtggtgaaaaacccaagtccaactcttatcatctatgaaagctgttgaaagaattcaaacgatgactagcttgacatcacgaaaataagtaattcatgctaaattagaagaatatttgcaaaagtgactcatgggtaagcattgataaagagcgaacgcgaacagattcgcaagcgaatgacaccgatgagcatggatgtctttggctccacgtaaagctgaatctgctgggtcggtcacagatcgaactcaatgaagctcatgaatcgcgtgcattctggtccaaatgcacgccgcattctggttacttggttacttggcttgcactttacaatagtcggggtattcgggtttcggcatgagtcatcgctgctgaccacacctttcatccacctgaactctctcttcggcgttcgaaagtcatctgaatcagatatcttcttttcaatcagtgcgttcactgatcgtcggaagctttaaaacccagaaacaaggcgcccagtaataatgataaacacacaaattcgtttatgtaaagaaatactataaaatttgaaaaatatttaatttagaataatacaaaatataaaacttttaggtctaatacagatgtatacattgaattaattaattttataccattccaaatcgtcaggtttgtgggaagacggcggatttacaatggcctgtgcgtcattgaacaagttactgcaaagattatcctcaatctgaaagcgtaaagtgggcaaagtgaggtagtggcgtggaactcggttcgccaactcggcggtcggcaactgcgaatgcttacctggagggaagacactaagttatctgggcagtcgagcacgctaagcccagattctgcaaagatacacggtaagggaaggcgttaagttagtaaaggcgaggcatggagcgataaggagtgtggagtgttcggcctctatctcaag

SEQ ID NO: 5936 - DNA, 927 bp, DROSOPHILA
cccataagtgtcagtgtcatcatttatcaattatcatttgattattatattttacaatataatatgtgtttaagaaaagccaaaaacgcttcctgctgaggacgaggcacaaacagagcgcagttttgtcaccgaacttccgtgcattacgtgcgaatcgaaacgcaatgtcaacccatacataatattttgctttgtaaacggtttttgagttgaaatacatacacacagtggtgttaaatataaacacgtacagaagactcatttgcatctatattgcacgcatcgaataacacaaaaagctgatttaacaatgcgcgaattcaaagttgttgtgctcgggtcggggggagttggtaaatcggcccttacagtgcaattcgtctcgggatgctttattgaaaagtacgatcccaccatcgaggacttctaccgcaaggaaatcgaggtggacagctcgccgtgcgtcttggaaatattggacaccgcgggcacagagcaattcgcatccatgagagatctctacattaaaaatggtcatggttttattgtaatgtattcacttacgaaccatcaaacatttcaggatatttctagtatgaaaaatgtgatcactcgagtgaaaggaagtcagccagcacccatcctactagtcgcgaacaaattcgatttagattgccaaagagaggtatccaccgctgaaggtaatgccttggcacaactgtgggactgtccatttatcgaggcatctgcaaaggatcggataaacgtaaacgaagtattcgccaccatcgttcgagagatgaatttgacgcaagagaatcggcaaaaaaaaaattactgttgttgtacgcttttatagaaattttgtaaaattgtaagattattatagttaaaaataaaattactaatatttaatagataacg

SEQ ID NO: 5937 - protein, 182 aa, DROSOPHILA
MREFKVVVLGSGGVGKSALTVQFVSGCFIEKYDPTIEDFYRKEIEVDSSPCVLEILDTAGTEQFASMRDLYIKNGHGFIVMYSLTNHQTFQDISSMKNVITRVKGSQPAPILLVANKFDLDCQREVSTAEGNALAQLWDCPFIEASAKDRINVNEVFATIVREMNLTQENRQKKNYCCCTLL

SEQ ID NO: 5938 - DNA, 5246 bp, DROSOPHILA
ggacactttggggtaggatctcagcaccggcagggtggccgtgtagcggtacgactcgtccttctccaacgggcacttcagaccactgtccacacaggcatcgggattggccagcgggaagggcatctcgatgcccaggaccttgccgtggacgactgtcttcaccgccgttgcctcctcggccagggcgaagtcgatggagaagctgaccgtggtgttcctcttgaggatgcactccgccttggtggtgtcgcagccctcgatggccacccgggtgaacttgcccgtcttcgatccgcaatcgctgaactcgagggctccggcgaagaccaccagtgcagcacaggcaattaccgcgtacctcagcattttcttccacttaattgaattacaaggtaaacgtatcgggtggcttttccgctggctctcgcctctttctgcctcttcacagcgctacgaatctactaaatctggagagagtccgaagacaacgcaaagctttcgtatgaacggaaaacagctgcgcgcggcgactcagaagaaagctttcttcgacgattgacgggagtgctgcgaactatcgcttgaagggaataaatattatatatattatagcttatataacaattataaaatatagttattttagaaaagtaagtataatgtttcctggcaaccatatattaattaatggggatcgcggagaataaatatttcattgcctacttatgggcatgtgctcgaatactgaagcatattttcaaaattcaagtaattaaacttacaaaatgtaaatttttccaaatattcagtatatgaaagccataaattaaactgattttaaatagtttttattcactcagtcatattttgcacagaagccaagagttcggttagaaaaagtccaaaaggggagcactggcgagctttcgcccccgcgataaatatcgaatgcagaccggcaaaagcttcagctcacgaccttttgcgcttgccgcttttgtctttagtattctcttgaggccggcggcgattggcaacgtttattacagtttctaattgttattaacttaaagcttagtacaaccaccgagtgcatttagcaatgtcgcagatctgtaagcgcggtttgttgatcagcaaccgattggcgcccgccgccctccgctgcaagtgagtaagcgggacggagagagggctcccagcggccagcgtgcgtgctggaaagagacagcaggccgacgaacacgttgcagatgcagcagtgtcatttgccaaggtcattgcagttgccggtcgagctgcagtgacacatttgtgtttgttttccccagcactgcataatttgtttgtccttgcgggctcgttctccagttttagcactatactaaatctgttatacggatttattgttatatcagcacaggggccttttatttaatcatctttcgctctgggcaaatgtaaaacaattatttccgctgtttccagctgtttttatctcgtcggctaatatttgcatatgtttcgggccctctactatactatatagactgattggcctattggcggacgtatgtgtatttatttttaaagccaattctgtgacgctccatgctcttttctgctaatttcattccacttgagggaacattttgaaaccacatgacgacggatgggttggtagaaaacaggtgccaaaatgagcttaaatcactccaacattcttgaattattatatttttagtggttaggaataaagaaataattcaagtttcaaaatatttgaatttgtacgaaatcaactgtgaaaaagacatcaaaaagtattttttctacatcaaaattgcaagtttaagttaatattaagttatgagtagaaccattattatgacgcttaaggacattgtgcatgtgtggtccaacgacccgggagaacggatgtgccgagcgaacagagtgtagggtattcgtggtcatatcacgcttctgtcgcgtgctttgatttccattttatgaagctccttggcttgtgggcggtttgttttatcgaagtcagaaggttctttccggaaatcaaacaatcagatcgaaagacaggtggcgcctaattgaaagagtttaattaagtttaataacttccacgatttattgctgaatattgagaaggagatttggaaagccggctacgtcagcaaacaatcatcgaggttatcgctgacgtaggcttaaatggatctatattgtatactttgtaatcgccgaccgagttcccataataacatgtttacagctgatatgggggggctatttaagacccccgtgtcgttgggggtacgaagtgttaacagtgggggcgaaatccaagaaaacctttagatgactttcaaactttagtcatgaaagcgaaatgataaatgatagccacaagtggtcagacgtggatgagataacctactactaagcagtttcataatctaccaattaaatttaaaacagataaggacttcgtggggcgttctcgggcattctagggttaaaggttgacgggcaatagaaatcacttggcaagtgtggcagatataaggatgtttttaatacatacgtgatggatattgtgatgcaatgattaatatatcattattattctagatcaacatggttctccgaggtgcagatgggcccacccgatgccatcttgggtgtcacggaagccttcaagaaggacaccaaccccaagaagatcaacttgggcgctggcgcctatcgcgatgacaacacccagcccttcgtgctccccagtgttcgggaggtgagttcagatcaagtttaaactaaacccaattttgaaacatagttatcgtttatgaccaggccgagaagagagtggtgagccgtagtctggacaaggagtacgccacaatcatcggcattcccgagttctacaacaaggccatcgagctggcattgggcaaggtaattatatcccttatgactgaggaatgtcctaaaaattaataagtattcctttattacagggatccaagcgtttggcggccaagcacaacgtgaccgcccagtccatcagtggaactggagctctgcgcatcggagccgccttcctggccaagttctggcagggcaaccgcgagatctacatcccgtcgccatcgtggggcaaccatgtggccattttcgagcacgccggtctgccggtgaaccgataccgctactacgacaaggacacctgtgccctggactttggcggcctgatcgaggatctgaaggtgaggatttacattgccactgattgatgttctttgatatgcttacccattgtttattaccttttccagaaaatccccgagaagagcattgttcttctgcacgcctgcgcccacaaccccactggagtggatcccactctggagcagtggcgtgagatctcggctctggtcaagaaacgcaatctgtatcccttcatcgacatggcctaccaaggcttcgccaccggagacattgaccgcgacgcccaggcggtccgcaccttcgaggccgatggccacgacttctgcctggcccagagtttcgccaagaacatgggattgtatggtgagcgcgctggcgccttcaccgtgctgtgctccgacgaggaggaggctgctcgcgtgatgtcccaagttaagatcctgatccgtggtctgtactccaatcccccggtgcacggagctcgtattgccgccgagatcctcaacaacgaggacttgcgcgcccagtggctgaaggatgtgaagctgatggccgaccgcatcatcgatgtgcgcaccaagctcaaggacaatctaattaagctgggatccagccagaactgggaccacattgtcaaccaaatcggcatgttctgcttcacgggcctgaagccggagcaggtgcagaagctgatcaaggatcacagcgtctatctcaccaacgatggacgtgtttcgatggcgggagtcaccagcaagaatgtcgagtacctggctgagagcatacacaaggttaccaagtaaggaggaccagtggagatcgaagtggagatggagtttctgtagtaccttctaatcggcacttgtacgaattttctagcaccaacgaaattgcgaagtctagataagccaatgcattttgcacactctctatccatatctctgtatataagctaaatgatctgccttttaaaaaataaagcatttaaaatgttagtaaatacgattcgtattttttatgaaaaatgaacagatgtaacagaaagcagaagaactttgtgttcgcatttagataatcatatattactagcatccaatttttatatacaactaggatcacggtttgttataacgatatcttaacttatcgctcggctcgcagtactccttgataatgagcttgcacaggaatatgtggaatactatgattattgcgcacacggaaacccagaagagcgtgggcaatccacccagttggtggccatgccgatgcagtgcgatcaaatgctgctcatgggcgggagctgaatggaataattacataatttacataacttgaatatgattgcccagtgaaacttcttaccctcgaccacttccttcacgtggatggcatggtgcagctcttccatgtgttgcttgtcctcggttatgtataatattgctgttagcggttcagtcagtttgactgggaattgtcgtcggttttgcctgcaaagtgatataatttcaatatgttcccaaaggattatatgtgagttaaaattacgtgagcagcacgggctcatccaggcagccgccatcgcaagcgtagtagctcctgtctgaacgatccagcgcgatgttgatcaccgccttgttgtcatcatccacaatgatggtgacgttgacatgggttttgttgccgtaattgaggcgcctgaagtggaagtccctatgcagaaacttcggatggatgttgcactccagatgctgattgctaaaacgaaagctgccaaagctcaggaccatggcttggatgactcccgaagctcccgctcgaataagattgtggcagccctgtttctccaacgttagcatccacgacgtaaccagggagttaagctgctgaagattagacatctcgcgccaaagattctccgcctgcagagtgtgatacgaatcgtagcagccttcggcgtacgttagcgcctttgctatatcctcctttttggagcc

SEQ ID NO: 5939 - DNA, 1574 bp, DROSOPHILA
ttgtctttagtattctcttgaggccggcggcgattggcaacgtttattacagtttctaattgttattaacttaaagcttagtacaaccaccgagtgcatttagcaatgtcgcagatctgtaagcgcggtttgttgatcagcaaccgattggcgcccgccgccctccgctgcaaatcaacatggttctccgaggtgcagatgggcccacccgatgccatcttgggtgtcacggaagccttcaagaaggacaccaaccccaagaagatcaacttgggcgctggcgcctatcgcgatgacaacacccagcccttcgtgctccccagtgttcgggaggccgagaagagagtggtgagccgtagtctggacaaggagtacgccacaatcatcggcattcccgagttctacaacaaggccatcgagctggcattgggcaagggatccaagcgtttggcggccaagcacaacgtgaccgcccagtccatcagtggaactggagctctgcgcatcggagccgccttcctggccaagttctggcagggcaaccgcgagatctacatcccgtcgccatcgtggggcaaccatgtggccattttcgagcacgccggtctgccggtgaaccgataccgctactacgacaaggacacctgtgccctggactttggcggcctgatcgaggatctgaagaaaatccccgagaagagcattgttcttctgcacgcctgcgcccacaaccccactggagtggatcccactctggagcagtggcgtgagatctcggctctggtcaagaaacgcaatctgtatcccttcatcgacatggcctaccaaggcttcgccaccggagacattgaccgcgacgcccaggcggtccgcaccttcgaggccgatggccacgacttctgcctggcccagagtttcgccaagaacatgggattgtatggtgagcgcgctggcgccttcaccgtgctgtgctccgacgaggaggaggctgctcgcgtgatgtcccaagttaagatcctgatccgtggtctgtactccaatcccccggtgcacggagctcgtattgccgccgagatcctcaacaacgaggacttgcgcgcccagtggctgaaggatgtgaagctgatggccgaccgcatcatcgatgtgcgcaccaagctcaaggacaatctaattaagctgggatccagccagaactgggaccacattgtcaaccaaatcggcatgttctgcttcacgggcctgaagccggagcaggtgcagaagctgatcaaggatcacagcgtctatctcaccaacgatggacgtgtttcgatggcgggagtcaccagcaagaatgtcgagtacctggctgagagcatacacaaggttaccaagtaaggaggaccagtggagatcgaagtggagatggagtttctgtagtaccttctaatcggcacttgtacgaattttctagcaccaacgaaattgcgaagtctagataagccaatgcattttgcacactctctatccatatctctgtatataagctaaatgatctgccttttaaaaaataaagcatttaaaatgttagt

SEQ ID NO: 5940 - protein, 424 aa, DROSOPHILA
MSQICKRGLLISNRLAPAALRCKSTWFSEVQMGPPDAILGVTEAFKKDTNPKKINLGAGAYRDDNTQPFVLPSVREAEKRVVSRSLDKEYATIIGIPEFYNKAIELALGKGSKRLAAKHNVTAQSISGTGALRIGAAFLAKFWQGNREIYIPSPSWGNHVAIFEHAGLPVNRYRYYDKDTCALDFGGLIEDLKKIPEKSIVLLHACAHNPTGVDPTLEQWREISALVKKRNLYPFIDMAYQGFATGDIDRDAQAVRTFEADGHDFCLAQSFAKNMGLYGERAGAFTVLCSDEEEAARVMSQVKILIRGLYSNPPVHGARIAAEILNNEDLRAQWLKDVKLMADRIIDVRTKLKDNLIKLGSSQNWDHIVNQIGMFCFTGLKPEQVQKLIKDHSVYLTNDGRVSMAGVTSKNVEYLAESIHKVTK

SEQ ID NO: 5941 - DNA, 3866 bp, DROSOPHILA
gccgttcattccgccagaagttccaactccgtgattccaacttagccattcttaccccggcattaaagcattcaaaaccaaggacaacgaccaaggatatcgagatataacaaatacaggggaaagtgcttaacacaagcagctaataactgaaaactaaaaactaaaactacgagattggagctattcccacttccaaaattaaccaacgatgtagacatagattcatgattaaccataactaattaccgcgtctgtgaatgtgcgtattattctaaaattgacactagaaggttaatcagtaattatcaactagtgcagtcgttcttttgtaccaatcacactcgatacatttatatatatatatatatgaattaccatagtatacttcaatggaaggaaggaaagccagagtatcacgaaaaagtatttctaaattaaagctgatatgcgtcggtggcgtgtgtccgtatttaaatgcgcattttgaagttttacatgtttatttttttttaaataatttaatatttgtatttaataaataatgaaatgagatccaatgaatgtgtaggtctttttacaaaagaaacgtacttaaactattaaaccaattgaaaccttagctcttgtttttatttcttgttgaaagcggatggcaatcaaataaatggctgcttaaaattacgactgatgcaaatttttgaaatatttaggaaacttaactgaaattaagcaaattgtttgtggtattttttgcgagctcttgtgctctgagctttcggacatttttaaactgattattaagtgagaaccactgcatactacagtatttacaaaacaatataatgtagtttagctatcaataaattcaataagcttactataaagtttatctaaagttatagtcatttaaatttagtattcttccgactttaataccgcgctaattttcgccagtctggcagctctgctcgctcggacaaaattatttgtatactttacttaattggctgcattccttaattattcgccgcctacttagtggcttttgaccaagtggcctgctaatccgagggaggatgccccggaacacggaggcgggcgccggaaatgcgaataccggtggatccggcggagtaggcggtgcccccgagcccagttctccggttcagaaggtttggaagccggaatgtgagtggagaagcacctcgtatgccacccacaagcttatgatatgactaaccatccccttacccatttacccgcccacgcacagtgtacaaactgcagctggaggcaccggctccatgtccactgcgctgccagcgaacactgccccttccgccggcgaaaagcacggctgaggccgtggaggccaataacttggcgggcaggctatacggctccgagtaccatggcctgatgggccacctggaggcggagcagctgctggccaatgcccgcgacggcagctactttgtacgccggagcccccaatccgatggctactacacgcttagcctgcgcttcaacaagcgacccaagcactacaagctcctctataagcccggcgtgggacactatctgcgcggccaggacaagcgcttcgacacggtgcacgacatggtcgccgacgggctgatcaactttcacatgcagctccacgccagtcccatcatccagcagattaaccagcagaccaagaactgctaccagcaaagcccatacatgaccttaaatggccggaaacttagggctctgtccaatgagctgggcaaggccgccgccaaggaatcgaaggaatcgccagccgaggagaaggagcagaagcaggaggagccaccgcctccagccgtggatcccatgccgctggtctacgagaagccgcatcacttcaaggtgtgtgttcagacataagaagccaactataaaggatcatagcatctaatggaagattctgatccaaacaggtgcacacgtttaaggggctcaattggtgcgagttctgcgccaacttcttgtggggattcaccgcccagggcgtcaagtgtgaggcgtgcggctttgtggcgcacagcaagtgctccgaactggtgccgcccaagtgtgtgccggatctgaagcgcatacgcggcgtatttggcacggatctgaccacgatggtgcagctggagccccaccaccagatacccttcgtggtgcgccgctgcgtggaggaggtggaggcccggggcatgctgcaggagggtatctatcgggtctccggctttgccgatgagatcgaggcactcaaactcgccctggatcgcgagggcgagaagacggacatgtcggagacggcgtatggcaatgtgaatgtgatcgccggcacactgaagctctacctgcgcctactgcccgtgccgctcatcacattccaggcgtatcccagctttatggcagcaggacgtgagttttatggtgctatgctgcacctcatcccatgccattcacatctatctatctctctatctattttgatctgttgcaggcaccggcaagcaggccgagcagcgccagctcatggcggaggcagtgcgtcgcctgccgcccgcccaccacagctgtctgcagtacatgctggagcacctgaagcggtgagtgtgactgccagcatggtcaatgcgatcttaagtaaaaaaaaaaaccttctgcccgcagggtggcctcccactacgccgttaacaagatgaacgagcacaatctggccaccgtatttgcgccgaccctgattgccacgccccagcacatgaccaacctgacggaggagatctttatgctctcctcgctcatcacccactgcaagactatattcgccacatcctgaggacgaggtcatcataccatgctgcccataccaagccaataactaactttatcatcaattagaggagcacggccaagcgaatcgcgtctgtgcccacctgtctctttcgaagcgaatccttaacttccaccaaaaaaaaaaactttagcctaagatcaaaatcgatgatttttatacaaacatttatatgaaaaaaaaaacaaatcaaccagtagaaaaaaacgaatttagcgatttttcgaaatatttttgcgctaattaaatatgcgtcacaataaaaaaaaggatatttattatacatatatacaaatacaaattcaaatacctatgtgtattaacttgacaaacttatttgctcgctcgttattttttttttttgctcgtttttttttcgctttttttttaacggggcaggcgtgtaattcgctgtagcacatttttcctaacgattagcaagcaccgagttttcctgtaagcgcaaggcactagccaaaatcactttcgtttcgagttcatagaggctagtcgaatttactgattgtgctcctgaatatttttcggaatattttttctgatttttgtgcgcgttctgttttttttttttgttttttgctttttgtgaaacaaaaagttacattgtgcgctgccccaaattgtttcgaacacaaagttgttgtgaattgaatttgttttgcggttttatttcgatttgatcaaagcgaaaatggcaaacgattcggatagaaacgatggccgggagaatggcaagaagaacaacaagaacaataagaagaacaacaagaagaagaacggaatgctgaagccgcttggtaagaagaccgagaagattgagaagaaaatgaaggagatcaagtgccacaaggcgcactttaacgaaatgaccgactgcttgcataagcttttgactccagtgacgcccagtagcatgaccaagaacacgtgagtcctccttgccgccattttaactctaaccttaaaa

SEQ ID NO: 5942 - DNA, 1564 bp, DROSOPHILA
acttaattggctgcattccttaattattcgccgcctacttagtggcttttgaccaagtggcctgctaatccgagggaggatgccccggaacacggaggcgggcgccggaaatgcgaataccggtggatccggcggagtaggcggtgcccccgagcccagttctccggttcagaaggtttggaagccggaattgtacaaactgcagctggaggcaccggctccatgtccactgcgctgccagcgaacactgccccttccgccggcgaaaagcacggctgaggccgtggaggccaataacttggcgggcaggctatacggctccgagtaccatggcctgatgggccacctggaggcggagcagctgctggccaatgcccgcgacggcagctactttgtacgccggagcccccaatccgatggctactacacgcttagcctgcgcttcaacaagcgacccaagcactacaagctcctctataagcccggcgtgggacactatctgcgcggccaggacaagcgcttcgacacggtgcacgacatggtcgccgacgggctgatcaactttcacatgcagctccacgccagtcccatcatccagcagattaaccagcagaccaagaactgctaccagcaaagcccatacatgaccttaaatggccggaaacttagggctctgtccaatgagctgggcaaggccgccgccaaggaatcgaaggaatcgccagccgaggagaaggagcagaagcaggaggagccaccgcctccagccgtggatcccatgccgctggtctacgagaagccgcatcacttcaaggtgcacacgtttaaggggctcaattggtgcgagttctgcgccaacttcttgtggggattcaccgcccagggcgtcaagtgtgaggcgtgcggctttgtggcgcacagcaagtgctccgaactggtgccgcccaagtgtgtgccggatctgaagcgcatacgcggcgtatttggcacggatctgaccacgatggtgcagctggagccccaccaccagatacccttcgtggtgcgccgctgcgtggaggaggtggaggcccggggcatgctgcaggagggtatctatcgggtctccggctttgccgatgagatcgaggcactcaaactcgccctggatcgcgagggcgagaagacggacatgtcggagacggcgtatggcaatgtgaatgtgatcgccggcacactgaagctctacctgcgcctactgcccgtgccgctcatcacattccaggcgtatcccagctttatggcagcaggacgcaccggcaagcaggccgagcagcgccagctcatggcggaggcagtgcgtcgcctgccgcccgcccaccacagctgtctgcagtacatgctggagcacctgaagcgggtggcctcccactacgccgttaacaagatgaacgagcacaatctggccaccgtatttgcgccgaccctgattgccacgccccagcacatgaccaacctgacggaggagatctttatgctctcctcgctcatcacccactgcaagactatattcgccacatcctga

SEQ ID NO: 5943 - protein, 494 aa, DROSOPHILA
MPRNTEAGAGNANTGGSGGVGGAPEPSSPVQKVWKPELYKLQLEAPAPCPLRCQRTLPLPPAKSTAEAVEANNLAGRLYGSEYHGLMGHLEAEQLLANARDGSYFVRRSPQSDGYYTLSLRFNKRPKHYKLLYKPGVGHYLRGQDKRFDTVHDMVADGLINFHMQLHASPIIQQINQQTKNCYQQSPYMTLNGRKLRALSNELGKAAAKESKESPAEEKEQKQEEPPPPAVDPMPLVYEKPHHFKVHTFKGLNWCEFCANFLWGFTAQGVKCEACGFVAHSKCSELVPPKCVPDLKRIRGVFGTDLTTMVQLEPHHQIPFVVRRCVEEVEARGMLQEGIYRVSGFADEIEALKLALDREGEKTDMSETAYGNVNVIAGTLKLYLRLLPVPLITFQAYPSFMAAGRTGKQAEQRQLMAEAVRRLPPAHHSCLQYMLEHLKRVASHYAVNKMNEHNLATVFAPTLIATPQHMTNLTEEIFMLSSLITHCKTIFATS

SEQ ID NO: 5944 - DNA, 3346 bp, DROSOPHILA
acttgattgtatttttaaattaattcttaaaaactacaaattaagatcactctgtgaacgtgtgctcgatggtgtgcatctacggatttgtttttgtgttctttttccccacccaaccccgtccctgacccaattccgctgttctctttaccgacttgtagattaatcacgctcttgatcttcatgaccggatccacctgacaagtaacgccaaagcagccccacttagcggaatagtagagcctaggggacccaacgtaaaaactctagtatagcaccaatctcccaaccagttaacattatacctaaacccatggtcaagagtaaacatttctgcctttgaagttgagaacacaattaagcatcccctggttaaacctgacattcatacttgttaatagcgccataaacatagcaccaatttcgaagaaatcagttaaaagcaattagcaattagcaattagcaataactctgctgacttcaaaacgagaagagttacaagtatttgtaaggcacagtttatagaccaccgacggctcgttagggctcgtcatgtaactaagcgcggtgaaacccaattgaacatatagtggaattattattatcaatggggaatatttaaccctcaggtagcaaagtaatttaattgcaaatagagagtcctaagactaaataatatatttaaaaatctggccctttgaccttgcttgtcaggtgcatttgggttcaatcgtaagttgcttctatataaacactttccccatccccgcaataatgaagaataccgcagaataaagagagatttgcaacaaaaaataaaggcattgcgaaaactttttatgggggatcattacactcgggcctacggttacaattcccagccacttaagcgacaagtttggccaacaatccatctaatagctaatagcgcaatcactggtaatcgcaagagtatataggcaatagaacccatggatttgcccaaaggtaaccgagacaatggagaagcaagaggatttcaaactgaacacccacagtgctgtgtactaccactggcgcgtttgggagctcactggcctgatgcgtcctccgggcgtttcaagcctgctttacgtggtatactccattacggtcaacttggtggtcaccgtgctgtttcccttgagcttgctggccaggctgctgttcaccaccaacatggccggattgtgcgagaacctgaccataactattaccgatattgtggccaatttgaagtttgcgaatgtgtacatggtgaggaagcagctccatgagattcgctctctcctaaggctcatggacgctagagcccggctggtgggcgatcccgaggagatttctgccttgaggaaggaagtgaatatcgcacagggcactttccgcacctttgccagtattttcgtatttggcactactttgagttgcgtccgcgtggtcgttcgcccggatcgagagctcctgtatccggcctggttcggcgttgactggatgcactccaccagaaactatgtgctcatcaatatctaccagctcttcggcttgatagtgcaggctatacagaactgcgctagtgactcctatccgcctgcgtttctctgcctgctcacgggtcatatgcgtgctttggagctgagggtgcggcggattggctgcaggacggaaaagtccaataaagggcagacatatgaagcctggcgggaggaggtgtaccaggaactcatcgagtgcatccgcgatctggcgcgggtccatcggctgagggagatcattcagcgggtcctttcagtgccctgcatggcccagttcgtctgctccgccgccgtccagtgtaccgtcgccatgcacttcctgtacgtagcggatgaccacgaccacaccgccatgatcatctcgattgtatttttctcggccgtcaccttggaggtgtttgtaatctgctattttggggacaggatgcggacacagagcgaggcgctgtgcgatgccttctacgattgcaactggatagaacagctgcccaagttcaagcgcgaactgctcttcaccctggccaggacgcagcggccttctcttatctacgcaggcaactacatcgcactctcgctggagaccttcgagcaggcaaggcacaattatatattcaaatgtcctttgatttgattcaaatatgatatgattcacttgattccaggtcatgaggttcacatactctgttttcacactcttgctgagggccaagtaagaactttataatctctttttggggagaaaaattttaaagcacaatagcagaaaaatatatcagataatataacaaaaaaaaagatcattatagttttttatttaagtggtttattactaaggtatccaaaaataaagcgaaaaatctgcaatttcagatatttagctttgttcaaaagcaacgatttttaggcggaagtgaatcagtcaccgctatccgtcgtatccgctggggcagcatcagctgcaggttctggctcagatgcaatagctgtagcgggcgggtcgtccaccgtgttgtctttttgtgtcttccacatcttagctgcagccagcaacttgagattgggtcgagccatttcgtcctcgggaaagatgtagtcgaatacctcctcccaaccttcctcgacgccattgtccgagacgatcttttgccgcttcttgatgcgccgcggcatcttgtccattaccttttgcatctcctgcgaatcggaggcgtcgcgttcaaagtcgcgccatgcctctagcaacagaacacgcgactccttgtctcccagctgacgcaacatctcgttggctcgctcatagattctccttgccagctgcacgttcagctccgcatctggcccgctgtcgccgtggctgaggcccatctcgaacttggcaaacgacatccacactttcacatgctgcgtccgctcaaggagtcgctcgtaaagctgtctggctagctctgtttcgcctagggctacctcgaagtcgatgtacgccttccacagcagctctggcatgtccaggcgcggctgctgcaccgccagctcgaaaatggctctcgcccggtccgtgtcgcccaacagattctccagctcggcaaacttcatccaagtgacacaattctccggtccaaactccaggaacttctcgtacagcatgcggcagcgctcgaactcacgcaactgaatctccagatcaatatagcctctgaagagcttatctctgggacacatgccgatggccaagcccagagctttgcgtgctcgctgcagctccttgcagcggatctcgaattgggcgtacagcagc

SEQ ID NO: 5945 - DNA, 1276 bp, DROSOPHILA
atggagaagcaagaggatttcaaactgaacacccacagtgctgtgtactaccactggcgcgtttgggagctcactggcctgatgcgtcctccgggcgtttcaagcctgctttacgtggtatactccattacggtcaacttggtggtcaccgtgctgtttcccttgagcttgctggccaggctgctgttcaccaccaacatggccggattgtgcgagaacctgaccataactattaccgatattgtggccaatttgaagtttgcgaatgtgtacatggtgaggaagcagctccatgagattcgctctctcctaaggctcatggacgctagagcccggctggtgggcgatcccgaggagatttctgccttgaggaaggaagtgaatatcgcacagggcactttccgcacctttgccagtattttcgtatttggcactactttgagttgcgtccgcgtggtcgttcgcccggatcgagagctcctgtatccggcctggttcggcgttgactggatgcactccaccagaaactatgtgctcatcaatatctaccagctcttcggcttgatagtgcaggctatacagaactgcgctagtgactcctatccgcctgcgtttctctgcctgctcacgggtcatatgcgtgctttggagctgagggtgcggcggattggctgcaggacggaaaagtccaataaagggcagacatatgaagcctggcgggaggaggtgtaccaggaactcatcgagtgcatccgcgatctggcgcgggtccatcggctgagggagatcattcagcgggtcctttcagtgccctgcatggcccagttcgtctgctccgccgccgtccagtgtaccgtcgccatgcacttcctgtacgtagcggatgaccacgaccacaccgccatgatcatctcgattgtatttttctcggccgtcaccttggaggtgtttgtaatctgctattttggggacaggatgcggacacagagcgaggcgctgtgcgatgccttctacgattgcaactggatagaacagctgcccaagttcaagcgcgaactgctcttcaccctggccaggacgcagcggccttctcttatctacgcaggcaactacatcgcactctcgctggagaccttcgagcaggtcatgaggttcacatactctgttttcacactcttgctgagggccaagtaagaactttataatctctttttggggagaaaaattttaaagcacaatagcagaaaaatatatcagataatataacaaaaaaaaa

SEQ ID NO: 5946 - protein, 397 aa, DROSOPHILA
MEKQEDFKLNTHSAVYYHWRVWELTGLMRPPGVSSLLYVVYSITVNLVVTVLFPLSLLARLLFTTNMAGLCENLTITITDIVANLKFANVYMVRKQLHEIRSLLRLMDARARLVGDPEEISALRKEVNIAQGTFRTFASIFVFGTTLSCVRVVVRPDRELLYPAWFGVDWMHSTRNYVLINIYQLFGLIVQAIQNCASDSYPPAFLCLLTGHMRALELRVRRIGCRTEKSNKGQTYEAWREEVYQELIECIRDLARVHRLREIIQRVLSVPCMAQFVCSAAVQCTVAMHFLYVADDHDHTAMIISIVFFSAVTLEVFVICYFGDRMRTQSEALCDAFYDCNWIEQLPKFKRELLFTLARTQRPSLIYAGNYIALSLETFEQVMRFTYSVFTLLLRAK

SEQ ID NO: 5947 - DNA, 5012 bp, DROSOPHILA
tgggatcacaggtagttgacatcatagttgcgcatcttccatttgagtcgccagtattgattccaaaatcccacatcgatgatccgttcgtggaagttgaagacgcccacgttggtatattcacagatggccggataggtgcagtcgtcctcgtcgtatagatccacccaaaggatcgtgcagatgccgagagaaaggagacgcagtttcttttgattgatcgccctctccaaggttagcagatagtcggcggacacgggattctgaagttctaccggcactgtgatcattcgatttgtggcaccccttagcagagtcataaaggcctcctcgccgggattcttcagattggcttggtacatgaacagcattcccgttccatagagaagcgcctttttcggcttcgtgtaggattctcgcacaacacccactgccacctctgtgtagtccctgaccaggccgttccaatactgcacccacttctccacgaacgtgcccttgaagcgctccggcatctgaattcgatcggtcaatctctgacgcagtgccgttatacgaccacccacgcggaggaactgcatctcctggcgggttttcagtgatcaatttggaaaaagccgaaaaaccaggtggaattaaagtgctagtgttatcaaatcaaaaaaacagctgttcagtgtgactgtgcgccggaaaaaatatcatcgacgcgacgatgtgtatatcgatatcaaccgaatagtggaaaataattagctttaactgtatattatcaaatatgtgtgactccattttaaaatattgtgcgtttaacattattttgaaaacatacatacattttattatttttttttatgggaaatctcaattggagagctctgatacacggccacattgtgccatcgatagttccaggcagattatcgatgacaaaatatacaaaataattgtttttatcgcgaattgccaacgctctgtacaagtgatgtacaacacgagttaaatacaaaacaaaacgaacggataaaagttgcacgctgggcgaatcgtgacaaagagggcgtggcaaatcgaaatatagtatagatcaaatccccagaaggcgcggcataaacgtaatatgcgaaaatcgctgccatgaaaaagggcaagggatcaagctcccttggatcgaaggaatcatcggggagaccatccacggcagtcctggtgttcaagaagtgcgctagatttgcggactcttcagaatcggcggagatccagcaggacggcaaggagcaactgcctgagaggcaagactcgctggatgccaaggaatgtaagtacgaagcacttccccttccaacgcgatacaagtgctcattcccatgcaaacacagtggtgggcatactaatagaagcacaggacgtgtggttagccatcccgctgacgcattaaacggaatatttaacttctagctgtgataaggaaattggtaaacgtaaatataaaaaataaaagccgattccttcctattcctagagaagtccaccgtagtcctaaatatttcacaaaacacaacgaaacacagaaagaatatttaaatattaccaaatttaacgtcttcagctgcaggaatggaaaaagaggcgattagcaatcagccattaaaggatgagccatcgaaagatgaacctaaccaaagcgagggcactgccatttccaccataccggcgattgataaactacgtcgcttctgctttattggatccacggacgagcccgtctataccacgcccgcactggatcttgttgtcgagaacaatttcgcatcgctaaaggaactctgctcccaagtgagtgaagacgagctggtcgagtgcttgttgagcgttttgggcagcgaaccaaatgaggagcaacctccccgacccgacgagccgctcctaatcctggctgttttctttaccacgtgcgaagacgagaagaagcgaaatgcggtgcgtaatagattcaccgacctgatcaccagcgaatcggatcttctactgttcgtccagttggtcaagcgagtccagaagttgctcgaacgtaaaacgcccttcaatcgcacagtgcgaaaggccgtcctcaactggtatggcacgaaatcgcttgatcgccttctccacttctggtcaataggcgatggaaatcgttggcctgcgcatcgcgatctactgtaccgcctccattttcggcatgccaattttttaccggaaatcattgctgccttaaggctgctctcatcatcgccaaaggagctatcgcagtggcctgattttttaacgcccttgaccagctttcgcgaaactattgagggtgttgtgaagcttcggctactcacggatcccgaacaggctatctccattgtgaagaagttgtcgctgagctgggagcatgtgccttttcatttgcttcacgaccccaggctggcgcattttcttattccacacatgagctatgagcaacttcttcagaaatggccacgcctctcgcgacttaactcccgagtgcgcccctttgctgagcaattgctggataagaagaagcttaaggcgagcaatgttccgcccgtacgtctgctgttggaggatatgcgtttgaggaagcccaaaaaggtggttaatcagttggtactaccttcgtcactcaaaaacaagaatacatttaaattccagtgtgcaactacttcgttccaaaaggcgagtttcctgcatagcgtctacgaaatatcctttggcctgaacaaggcactcggtaggcgactgcacattaccctcaatctggagcaggcctatctgggcagtaagtgaaatgccgacttattacctattcagagattatttcaaacgtacctccccccaccaccagaatacctttctggtccatgtcgttcgctgaagtacttagacgccctggtggcattgggttttggctatttccgcagcgaccgaaaggtgacggtggagttttggcacgaccgcagtggcaaattgaaggcgttgccgtggacaaatgagatgtctgtttcagaggccaagacctgttgcgagaatcagaaggtaaacactttccacaaccgatccccggtctttaccattgatcttcgattcaggtgggcaaagtgaggcaatcgctaaatgaaattctgttcagagcgctattggatatgcagaatacgttcgacgtgtttttggtactagtgccgggtgccgcgcgaggaaatccggaaaataattcaaagtgcttggctgctctaatggataagtatcgcgaaaagcgaaactctaatgctaagtgagtattttccattggtaatttatataatgaacatcctttccgttcacagattcataatggtgagcctgcggcagcgtcaacgctccatgatatattccagcggacgaaacgagaacttgttagagttgtgcagcctggataagcacacaccgcgtttgattaacgcatttgtccgcaataagttctactagacggtgagctgcattgcgaatatcggacgacccatttcatcgcacaactgcaggcacaaagcagttccatttgttgaaggacgatggccatcggttagttgccatcggccatctctctcgctttcatagatgcctggtcgttcggtcctctcactccattttcgaatagcttttgtgtaacatattcataggcccttggtgtgtaatcgttgtagaaccaggccaccaactcaatgctacattcatatttacatactactaattgtaatagttgcatcccggaatccagaatttaaaattcctatcgggctagtaagatattatcgctcgttttgtgtaatgaaattgtgtattagcatttgtaatttttactcgatttggtgtattcattttgttaaaattaaaccgaatcaactgaactgaacttaatctaaattcaatttggatttaaaacaatctcaatgaaatcgcaagcgcaaacaacaacaaaagaaccgacaaaaaaaaaaaaaaagaaaaacaaattgccttacaaacaaaaatgttagtaaaactttcattttagtttagactttttcaaaaattgaatactggaactgaaacacaatttatggcatttagataaagttaaagttaaatataaactaattgtatggcctatgtattgaatattaatctaacgtaacattaaaatagtccaagtcaaagcaataatcaccaatcactaaagcaaatccagttatagcctcagatcttttatagatttttgttgtgctcgaatagaatcgaattaaattagctaaatagttgaaacgcgtacaaggcaaaaattaatggtaaacaaaaactcccaatgtgccatacacaacccacagcccacaaaacaaacacattcaccccaaactcttgatcagtatacatatttattaggtttgtgtgcaaaattgccgaaccgaaaccaaatagagaacaataacgaaacgacgagcaaacgctaccaatttgactaaaattagttaagtgaaattatactcaaattacgattaaattacatttacttgtatagaaagcaaagcaaccaatttggatgataagcaaaagccaactgaaaataggaaaattgaaatcgaaaattaactaaacagaaatcgaaaggacaaaaacaaaaacaaaaaaaacaaaaacaaaacaaaataggaaatatttccacggacatttctaaccaaatgtttccacacgcgtctgtgaagtaaaccgttgtgatcgctttagattttgatttaacaaacaaacaaaaacattaaatacaaaactacaaactactaaatactgaatactgaatacaaaaacagataagccggaaaatgagccgcaacaggcagctataagttattttatatattttgtaaactcgaaatcattaggagtgtaaccgaaaagtacctatacaacaaaagctaaacttaaaatgaaactgatactgcagagccaaccaattg

SEQ ID NO: 5948 - DNA, 2562 bp, DROSOPHILA
taaatacaaaacaaaacgaacggataaaagttgcacgctgggcgaatcgtgacaaagagggcgtggcaaatcgaaatatagtatagatcaaatccccagaaggcgcggcataaacgtaatatgcgaaaatcgctgccatgaaaaagggcaagggatcaagctcccttggatcgaaggaatcatcggggagaccatccacggcagtcctggtgttcaagaagtgcgctagatttgcggactcttcagaatcggcggagatccagcaggacggcaaggagcaactgcctgagaggcaagactcgctggatgccaaggaatctgcaggaatggaaaaagaggcgattagcaatcagccattaaaggatgagccatcgaaagatgaacctaaccaaagcgagggcactgccatttccaccataccggcgattgataaactacgtcgcttctgctttattggatccacggacgagcccgtctataccacgcccgcactggatcttgttgtcgagaacaatttcgcatcgctaaaggaactctgctcccaagtgagtgaagacgagctggtcgagtgcttgttgagcgttttgggcagcgaaccaaatgaggagcaacctccccgacccgacgagccgctcctaatcctggctgttttctttaccacgtgcgaagacgagaagaagcgaaatgcggtgcgtaatagattcaccgacctgatcaccagcgaatcggatcttctactgttcgtccagttggtcaagcgagtccagaagttgctcgaacgtaaaacgcccttcaatcgcacagtgcgaaaggccgtcctcaactggtatggcacgaaatcgcttgatcgccttctccacttctggtcaataggcgatggaaatcgttggcctgcgcatcgcgatctactgtaccgcctccattttcggcatgccaattttttaccggaaatcattgctgccttaaggctgctctcatcatcgccaaaggagctatcgcagtggcctgattttttaacgcccttgaccagctttcgcgaaactattgagggtgttgtgaagcttcggctactcacggatcccgaacaggctatctccattgtgaagaagttgtcgctgagctgggagcatgtgccttttcatttgcttcacgaccccaggctggcgcattttcttattccacacatgagctatgagcaacttcttcagaaatggccacgcctctcgcgacttaactcccgagtgcgcccctttgctgagcaattgctggataagaagaagcttaaggcgagcaatgttccgcccgtacgtctgctgttggaggatatgcgtttgaggaagcccaaaaaggtggttaatcagttggtactaccttcgtcactcaaaaacaagaatacatttaaattccagtgtgcaactacttcgttccaaaaggcgagtttcctgcatagcgtctacgaaatatcctttggcctgaacaaggcactcggtaggcgactgcacattaccctcaatctggagcaggcctatctgggcaaatacctttctggtccatgtcgttcgctgaagtacttagacgccctggtggcattgggttttggctatttccgcagcgaccgaaaggtgacggtggagttttggcacgaccgcagtggcaaattgaaggcgttgccgtggacaaatgagatgtctgtttcagaggccaagacctgttgcgagaatcagaaggtaaacactttccacaaccgatccccggtctttaccattgatcttcgattcagagcgctattggatatgcagaatacgttcgacgtgtttttggtactagtgccgggtgccgcgcgaggaaatccggaaaataattcaaagtgcttggctgctctaatggataagtatcgcgaaaagcgaaactctaatgctaaattcataatggtgagcctgcggcagcgtcaacgctccatgatatattccagcggacgaaacgagaacttgttagagttgtgcagcctggataagcacacaccgcgtttgattaacgcatttgtccgcaataagttctactagacggtgagctgcattgcgaatatcggacgacccatttcatcgcacaactgcaggcacaaagcagttccatttgttgaaggacgatggccatcggttagttgccatcggccatctctctcgctttcatagatgcctggtcgttcggtcctctcactccattttcgaatagcttttgtgtaacatattcataggcccttggtgtgtaatcgttgtagaaccaggccaccaactcaatgctacattcatatttacatactactaattgtaatagttgcatcccggaatccagaatttaaaattcctatcgggctagtaagatattatcgctcgttttgtgtaatgaaattgtgtattagcatttgtaatttttactcgatttggtgtattcattttgttaaaattaaaccgaatcaactgaactgaacttaatctaaattcaatttggatttaaaacaatctcaatgaaatcgcaagcgcaaacaacaacaaaagaaccgac

SEQ ID NO: 5949 - protein, 641 aa, DROSOPHILA
MKKGKGSSSLGSKESSGRPSTAVLVFKKCARFADSSESAEIQQDGKEQLPERQDSLDAKESAGMEKEAISNQPLKDEPSKDEPNQSEGTAISTIPAIDKLRRFCFIGSTDEPVYTTPALDLVVENNFASLKELCSQVSEDELVECLLSVLGSEPNEEQPPRPDEPLLILAVFFTTCEDEKKRNAVRNRFTDLITSESDLLLFVQLVKRVQKLLERKTPFNRTVRKAVLNWYGTKSLDRLLHFWSIGDGNRWPAHRDLLYRLHFRHANFLPEIIAALRLLSSSPKELSQWPDFLTPLTSFRETIEGVVKLRLLTDPEQAISIVKKLSLSWEHVPFHLLHDPRLAHFLIPHMSYEQLLQKWPRLSRLNSRVRPFAEQLLDKKKLKASNVPPVRLLLEDMRLRKPKKVVNQLVLPSSLKNKNTFKFQCATTSFQKASFLHSVYEISFGLNKALGRRLHITLNLEQAYLGKYLSGPCRSLKYLDALVALGFGYFRSDRKVTVEFWHDRSGKLKALPWTNEMSVSEAKTCCENQKVNTFHNRSPVFTIDLRFRALLDMQNTFDVFLVLVPGAARGNPENNSKCLAALMDKYREKRNSNAKFIMVSLRQRQRSMIYSSGRNENLLELCSLDKHTPRLINAFVRNKFY

SEQ ID NO: 5950 - DNA, 5630 bp, DROSOPHILA
gacacatgatgcatacgtgagtgggggcttctatgcacatggatgtggtacatacatatgtacgtccaatattctggtccatttgggccaggccactatcgaaatttgaatgcttagtgtaccgggcgacaagcatcctcgaacattgaaataaaccgataaaaacgacagatgagcccggcatttcgcccacaatgcatgccaggcaggcaatcgagtgtggtcgagaaatagtcgggtagccccctttttggttttggggcacagctcactgccctgcaattcttatataaaaccggggaagtccccatcccaaccgcccatgcaaatctcgagcacttgaggccggtccccagattattccttttccctattttgggccacgtggtctgaccacttggcggctgctccaactttaatatttcttcgtttaaatagtcctttatttctgcagaaattagacaaaatcaaagacaatatatttatgctatatattcattttcactgttatgtctgtaagggtattcagaaatgcgcctactctgtgtagtttttcaatttagttagatacgatgaatatattgagattctgccagatttagattgtggtgtgtgagttttcagattggtttgtaaggaccccttttgtttggtccatatcaatacaaactcctcatgtgcatataaaataagtaaaaaggcaaaatatgaaacaaaacaaaaagaaaaggacattcatattttgtagctattgggggattttaagtaatgttatgaaatcatacctttctttatttgtgtaaagtattcaatacacgcaactaacgggcaaaattggaaacacccaaaaattcaattttggcgcgcacagaaagctgcccttttggaatagattggcagcactctcgcgcacggtggcaacctcgtctagggactgccgatagcagcaagttccgcccgtgtggcaacaccgctagaaaaacagtctaaatttgctgtgcaacactggcggtttgcaaaaataatttcggtgctcgcgtcaatcagaaaaagccgaaaagaacggcctttatgtgcgcgaattaatcgccagccgagtggaacgcgaccaaaggaacccagcacacacacacactcagaatggaggccctaattccggtcataaacaagctgcaggacgtcttcaacaccgtgggctccgactccatccaattgccccaaattgttgttctaggcagtcaggtaaatgcaaactgcgaggtgcccaaaaatccgcacaccgaaaaccataaatccccgagctccgtaaaaggagtggcaactgagaaccggaatatggcgcagctatctgaaaccccaactcttgcgcttttccagtgaccgcaaaattatataactgagtgcgtttgccggcattttagttgtgttttcagtttgtagcaacatttcagccagctttcgctcttcgcggcgtccccattgtttatataattatttttggcactgctcgccgccgccatggaaaatcaatatgccacagtattatacaaaaacgaaaaaaaaaacagctgctggctgatgtgacacattcccccacgaacacactgcaaaaaacaaacgtacacatgtgtgacttcgatagttgtgtctgtatgtacatatatgtgtgcatgtttcgatcgctggcttaattgcactttgattcacgctctggaattaagtcagtatgactaaatgctcgcgcaactcattgataccgagtacagcggagctccaatatgttgaatctgtgccatttcttaccattcatttggttttctgttgcaaaggcttaagtttgagaaatttgcaatcacagaatggctcccattgccagataagaatagttaatctgcggttttccaagtgtttcctcgctgcaaacgcttgggagccaccttatcaggtcatcgtcttttatcagccgtcgttttaactcccagtaatacatacatttccccttttttccagagctccggcaagagttcggtgatcgagagcgttgtgggacgatcctttctgccccgtggaactggtattgtgacccgtcgcccactggtgctccagctgatctacagcccactcgatgatcgcgagaatcgctcggcggaaaatggtgagttgagacgtcagaagttcgggaaaacccaattgctaaaccacataacacttaggtacgtccaatgccgaggagtggggccgcttcctgcacaccaagaagtgcttcacggactttgacgagatccgcaaggagatcgaaaacgaaacggagcgggcggcgggcagcaacaagggcatctgcccggagcccatcaacctgaagatattctcaacgcacgtggtcaacctaacgctggtggatctgcccggcatcaccaaggtcccggtgggcgatcagccggaggatatcgaggcgcagatcaaagaattggtcctcaagtacattgagaacccgaactccatcattttggctgtgacggccgccaacacggacatggccaccagtgaggcactcaagctggccaaggacgtggaccccgatggccggcgcactctggccgtggtcacgaaactggatctcatggatgccggcaccgatgccatcgacatcctgtgcggccgggtcattcccgtcaagctgggcatcatcggcgttatgaatcgctcgcagaaggacatcatggaccaaaagcacatcgacgatcagatgaaggacgaggccgccttcctgcagcgcaagtatcccactctggccacccggaacggcacgccctacttggccaagaccctcaaccggctcctgatgcaccacatccgggactgcctgccagatcttaaggtgagtctagtctataaagactgcatatcgatttcacaaactatgcgagaatctcaggctaaaacttcaagaaaatgtaaaaaaatgaaacaaacttggcactcgattataatcgatctttatatttttctatggtaaagcaagagaagattaatggcagataaggttagaatagcatgttgaattcaagagaatgacttcccatattcttgcagactcgcgtcaacatcatggccacgcaattccaatcgctgctgaactcctatggcgaggatgtctccgacaagagccagaccctgctgcagatcatcacgaagttctccagcgcctactgctgcacaatcgagggcacggccaggaatatcgagaccacggaactgtgcggcggtgcccggatgggctacattttccacgagaccttcggccgcaccctggactccattcacccgctggcgggtctgagcaagatggacatactgacagccatccggaatgccactggtccacgcccggctttgttcgttccggaggtctcgttcgaactgctagtgaagcgccagattcgccgcctggaggaaccctccttgcgctgcgtggaactcattcacgaggagatgcagcgcattgttcagcattgtggcaacgaagtgcagcaggagatgctgcggtatgtgaactcatgatagctgaacgccaaaggttttcatcgatctcccctacagctttcccaaactgcacgagaagattgtggacgtggtcacccagctgctgcgtcgacgtctgccgcacaccaacgtgatggtggagaacattgtggccatcgagctggcctacatcaacaccaagcaccccgacttccacaaggatgccgctttggtgcccagtctgctgaaaacggacagcgatccctactcacagataaatctggggcagcggcgggccaatacaccgcgaaaccacatgtcgcctcagatttcgtcgcacagtgctggttcacagcagccgcagcagcaacagccgccgcagccgaattcctcacagcagcaatatagccaagtgcatgagcaggtgccagcggaatcttcatttatgtatgcaacctatttaacccattttcgtttcgctctctagaaccacgtcgccgagaactcgacgccttcgatggccagcacatggctgtcaaacattttaccgccggcaccaacgcgtccggacagcattgagaactcgaccaacaacactccggttcacaataacatcgtgagtccagtgaagccggtcaatctgctgcccgatgtgccggccaaccacaatccacgtcgcctcactgacaaggagcagaaggattgcgatgtcatcggtgggttgcacttaactcgggccacttaaagacctaactcaatctgactactttttgtttttagaacacctgatcaaatcgtatttctacattgtgcgcaaatccatacaagactcggttccaaaggccatcatgcatttcttggttaactacgttaaggacaacttgcagagcgaattggttacacatctgtataagtcggataaggctgaaaccctgctcaacgagtccgatcacattgcagtgcgccgaaaagaggcggcagatatgctgaaggtgcgcttggctagcttatacttagcttgacatcgttttaaacttacttttgatttcaggcactgacgcgagcgaatcacatcatcagcgaaatccgcgagacccacatgtggtaggctggtcagcgattggagcaacccgtttcgacttaataatccccgcatataagcaacataaaaactatttattgaagacgcgttcaaagagaacgaactcctttgttaaatgttccccctaccgagcactgaaatatcatcaaattgcatgcgacccccaaattctgggcctttcatttagccaactcgcatttctattcgcctggcatttgtctatcatcgagcctctccgctttttaaattaataagaagttgtagacgccgtgattggtttgattaggttactcaaagcacttattacacattgaatagtcaaataaagcagaaaaggttgattcaaacatagtagatgtgttttctgtcacggcagctaaaagtttacgaaggcaacgtcatcatgttgaatgatacacctggaatttcgattagataagccattatgttcgtaaagttgctaggctcagtctgaagattaataagtgtttaaatctgataggagttgaatcttcctgagttttgagatgcgtagcaattgcttagccttactaaaaacaaaatttttcttacaaattatgttacatgtaggtgtggcttgagtgaactagaagtacgttcgttcccctgattgaaatcactgccactcacctttcgtaataaaaactttaatacttggataccagttaaaatctaatttggaaaacgtcatttgtattgcggcgaagaaacagaagtgggttccagctggggcgtggcaaatcccgaagataaggatgtggtgtccagtgctccaatcctgtgttgattaaatgctccgcgatgcgtatgaatcggtttatggggcagggaacagttggggtagtgactctatgaccgcctttggctgtgctgatctcctctaggcgcgatttgtgtcggacagcacgcggacaatgcagcccactcctcccttggcgaaggccttctcatgccactgcagcaggtggccactggagccctccga

SEQ ID NO: 5951 - DNA, 2348 bp, DROSOPHILA
caacactggcggtttgcaaaaataatttcggtgctcgcgtcaatcagaaaaagccgaaaagaacggcctttatgtgcgcgaattaatcgccagccgagtggaacgcgaccaaaggaacccagcacacacacacactcagaatggaggccctaattccggtcataaacaagctgcaggacgtcttcaacaccgtgggctccgactccatccaattgccccaaattgttgttctaggcagtcagagctccggcaagagttcggtgatcgagagcgttgtgggacgatcctttctgccccgtggaactggtattgtgacccgtcgcccactggtgctccagctgatctacagcccactcgatgatcgcgagaatcgctcggcggaaaatggtacgtccaatgccgaggagtggggccgcttcctgcacaccaagaagtgcttcacggactttgacgagatccgcaaggagatcgaaaacgaaacggagcgggcggcgggcagcaacaagggcatctgcccggagcccatcaacctgaagatattctcaacgcacgtggtcaacctaacgctggtggatctgcccggcatcaccaaggtcccggtgggcgatcagccggaggatatcgaggcgcagatcaaagaattggtcctcaagtacattgagaacccgaactccatcattttggctgtgacggccgccaacacggacatggccaccagtgaggcactcaagctggccaaggacgtggaccccgatggccggcgcactctggccgtggtcacgaaactggatctcatggatgccggcaccgatgccatcgacatcctgtgcggccgggtcattcccgtcaagctgggcatcatcggcgttatgaatcgctcgcagaaggacatcatggaccaaaagcacatcgacgatcagatgaaggacgaggccgccttcctgcagcgcaagtatcccactctggccacccggaacggcacgccctacttggccaagaccctcaaccggctcctgatgcaccacatccgggactgcctgccagatcttaagactcgcgtcaacatcatggccacgcaattccaatcgctgctgaactcctatggcgaggatgtctccgacaagagccagaccctgctgcagatcatcacgaagttctccagcgcctactgctgcacaatcgagggcacggccaggaatatcgagaccacggaactgtgcggcggtgcccggatgggctacattttccacgagaccttcggccgcaccctggactccattcacccgctggcgggtctgagcaagatggacatactgacagccatccggaatgccactggtccacgcccggctttgttcgttccggaggtctcgttcgaactgctagtgaagcgccagattcgccgcctggaggaaccctccttgcgctgcgtggaactcattcacgaggagatgcagcgcattgttcagcattgtggcaacgaagtgcagcaggagatgctgcgctttcccaaactgcacgagaagattgtggacgtggtcacccagctgctgcgtcgacgtctgccgcacaccaacgtgatggtggagaacattgtggccatcgagctggcctacatcaacaccaagcaccccgacttccacaaggatgccgctttggtgcccagtctgctgaaaacggacagcgatccctactcacagataaatctggggcagcggcgggccaatacaccgcgaaaccacatgtcgcctcagatttcgtcgcacagtgctggttcacagcagccgcagcagcaacagccgccgcagccgaattcctcacagcagcaatatagccaagtgcatgagcagaaccacgtcgccgagaactcgacgccttcgatggccagcacatggctgtcaaacattttaccgccggcaccaacgcgtccggacagcattgagaactcgaccaacaacactccggttcacaataacatcgtgagtccagtgaagccggtcaatctgctgcccgatgtgccggccaaccacaatccacgtcgcctcactgacaaggagcagaaggattgcgatgtcatcgaacacctgatcaaatcgtatttctacattgtgcgcaaatccatacaagactcggttccaaaggccatcatgcatttcttggttaactacgttaaggacaacttgcagagcgaattggttacacatctgtataagtcggataaggctgaaaccctgctcaacgagtccgatcacattgcagtgcgccgaaaagaggcggcagatatgctgaaggcactgacgcgagcgaatcacatcatcagcgaaatccgcgagacccacatgtggtag

SEQ ID NO: 5952 - protein, 735 aa, DROSOPHILA
MEALIPVINKLQDVFNTVGSDSIQLPQIVVLGSQSSGKSSVIESVVGRSFLPRGTGIVTRRPLVLQLIYSPLDDRENRSAENGTSNAEEWGRFLHTKKCFTDFDEIRKEIENETERAAGSNKGICPEPINLKIFSTHVVNLTLVDLPGITKVPVGDQPEDIEAQIKELVLKYIENPNSIILAVTAANTDMATSEALKLAKDVDPDGRRTLAVVTKLDLMDAGTDAIDILCGRVIPVKLGIIGVMNRSQKDIMDQKHIDDQMKDEAAFLQRKYPTLATRNGTPYLAKTLNRLLMHHIRDCLPDLKTRVNIMATQFQSLLNSYGEDVSDKSQTLLQIITKFSSAYCCTIEGTARNIETTELCGGARMGYIFHETFGRTLDSIHPLAGLSKMDILTAIRNATGPRPALFVPEVSFELLVKRQIRRLEEPSLRCVELIHEEMQRIVQHCGNEVQQEMLRFPKLHEKIVDVVTQLLRRRLPHTNVMVENIVAIELAYINTKHPDFHKDAALVPSLLKTDSDPYSQINLGQRRANTPRNHMSPQISSHSAGSQQPQQQQPPQPNSSQQQYSQVHEQNHVAENSTPSMASTWLSNILPPAPTRPDSIENSTNNTPVHNNIVSPVKPVNLLPDVPANHNPRRLTDKEQKDCDVIEHLIKSYFYIVRKSIQDSVPKAIMHFLVNYVKDNLQSELVTHLYKSDKAETLLNESDHIAVRRKEAADMLKALTRANHIISEIRETHMW

SEQ ID NO: 5953 - DNA, 3370 bp, DROSOPHILA
taggaactaagctttgcaaactttcttcatgaagttccatattatcttcggaaagttggctttcggctcctttttgggcgtattgttcttgaatataaagttatacgcatgctttcccaagtgccagaatcttgtttcttcctcacaatgcgctaaatcatctggtttctttagtagtatccatggcaaaagtaaaataagtggcgccacaactagcaagtagatgaagggcgcattcctttttagatttattcgaatgttggctaacgaaaggatctccatttttataaaataaaatttgcgttgaaaaagtatagatcttatcggttctggctatactggcttactgaccgaatgtgttcggttgacacaagttctccatttgacgtatggttcaatgaacccatggatatcgagatctcgactagtcctctagtgcttgctcccatttcctcaattccgattggaaagcacttcagccgccaaacaatggtgaaaggagaaaaataaagaaaataactaccggacaccgagaaacacacataaatttatagttgagccatggaaaacaatgagatggaaaagcggtcggctttcttttccattcatccggatccggatccccgactgaagtgatttccgttgtttttcgttgtgctgcgagcgttggtgcattcaatggagtgcactctcctcgcaaaggagcacttgaactgcagcaagaaaagacgcacaatacaaatgttgaggggctttgtttgagcaaatcgtgtatatgcgtagtgtatatcccagacaaaacccattcccatgtgctccatttggcctgctaaacagtaagaatacatttttcagtgctgatgcttatatgtatttatttaaaacttattacaccttaaacgacgagtccgctgcttcacaattggaaagtatggagcgggtgaaatctgtagggagagttataattactaccagatatgtaagatattcctgcagatccttacatatcctcgcgtgccttaatcagagtttcgaccaggcgctgcagtggatagtctccagtgcagattctgtacacagttgtaaagagggggaatctgtgaaggggagagatcttagatcacatgatagcattcgacgtatctacattatcctaacttgtcctccaagcccttcttcttgagcatatgatgcaccagctccgctgtcaccggacccagtggctcgtgtcctggaatgagaatgtgctccagttcgctcaagggtttgcccgtcttcacaaaagcttcggccaacttgcgattgcggtttgctgcgaaacatatatatttaagactgtgtagatttatgtaagtttttggtataccataacaactagtaaccaaatcggatattccgcaggactcaaaaaaggttcccatgcggcagccgggatagaaaacatcgacgaactgaagcatctccagaaatcctctcctgatgatgcctcccttggtgttctcattcagctccatcccgtcggaacagccagccgcaaaggcaatgatgttctgtgatttgaagaagaaacaaggttccacaaatgcaaatgtcgtaatgcgaaactaacccttagagtggaacagatctccacacagtcggcatcctcggtgaccaccacgcggaaagtgggcgacttgaatatgtcgtggagcaccctgtaatacttctgatcccgacagccaactgtgccctcggcaaagtggtcgtgggccagctcatgggccaagttacagccgaccaggacggagcagggaatctactttggagcaagaggaaattacaatagataagctatagaagtatccaatagaataaatatttcagcttgtgttatgacctttagctgccgcattataatctgcgaaatcaggacgaactggccatcgtcgccgcgctcgaatcctttgatcagggaaacggcgtgggccgtgggcttgacttttccgagcagcgtcttgcagcagctactcacgaaagtcggcggaatggcgaatattataatgtccgcatctcgagctgtagtcacgatatcatccacggccacctgtcaaatgtagaatcgaaatattagaaaaccggacacatcgtcagtcagtcgaaggcacccacaatatttggcggcagttcaaagttcggcatgtacttggaatttatgtgggtggtgttgatgatttccgtgagtttgcgaccttcaacaatttcctcataaacgtacatgggcaccttttcgtccagtgtctgcgagttcagcacgtttctgcccacattacgggctatggtagtggcccagtttcccgacccaatgatgcaaatcattatcttgtccatcttgagttgaagattgccaaatgatgtatgaatttcaatcaaatgtttcgtgtttgtccgtttgttggagtgactttaaagtctacggaattttttcgtcactaagtgtttatttggaattgaatgtatgattcgaattaaattagttattcggctgtgatgagtttcatttcattttgttataacttgcataacacacatttaaatggtttagtaattgacaccatcaattagtttcgtgtatgcagcaaagatactaattgtacatttgctaacctagctcctcaattattggcaatgataattgcaatgtatacagcttttaaaccgaaatcaagcttatttaccaccccgctgaaaatgaaactccaattgactcccagtatcaattcggttgtgaaccttaaaaattaatgccccaataaattaaagcacacgcaaagggcaggcacacggactcgtattattatatatgcatatttacatatcaacatataagttccatgttcatacatatattgattgagtgctgggcaaacaattcatcagtaaaccaggcgggataaaaattacgtatacgtcacgttcgccaaactggcagggcaaataattaactgcagcaagcgttttcccctccaatttccaatatggattcactcatggcagccgacaacaaatttaagctgatgctggaaaaattccataattcttatatttattttttaattacggcagcgttatatattctctgagaaattcgactgtgtcggcggttatttaaataaaatatcaaattgccagcgttaaaatgcaaaagggcgaaagccaaagtgaaagtcccatcgaaatcaatgtgcaagaaagtaaacactttgaaattgtgcgacccgcagtcgttggcagtcagccctatctcatccaattccaaccaatccggccagaatccaactgcagctcaaccgcccagcgccatccactcgactatgaaatcaaaatggat

SEQ ID NO: 5954 - DNA, 1050 bp, DROSOPHILA
atggacaagataatgatttgcatcattgggtcgggaaactgggccactaccatagcccgtaatgtgggcagaaacgtgctgaactcgcagacactggacgaaaaggtgcccatgtacgtttatgaggaaattgttgaaggtcgcaaactcacggaaatcatcaacaccacccacataaattccaagtacatgccgaactttgaactgccgccaaatattgtggccgtggatgatatcgtgactacagctcgagatgcggacattataatattcgccattccgccgactttcgtgagtagctgctgcaagacgctgctcggaaaagtcaagcccacggcccacgccgtttccctgatcaaaggattcgagcgcggcgacgatggccagttcgtcctgatttcgcagattataatgcggcagctaaagattccctgctccgtcctggtcggctgtaacttggcccatgagctggcccacgaccactttgccgagggcacagttggctgtcgggatcagaagtattacagggtgctccacgacatattcaagtcgcccactttccgcgtggtggtcaccgaggatgccgactgtgtggagatctgttccactctaaggaacatcattgcctttgcggctggctgttccgacgggatggagctgaatgagaacaccaagggaggcatcatcaggagaggatttctggagatgcttcagttcgtcgatgttttctatcccggctgccgcatgggaaccttttttgagtcctgcggaatatccgatttggttactagttgttatgcaaaccgcaatcgcaagttggccgaagcttttgtgaagacgggcaaacccttgagcgaactggagcacattctcattccaggacacgagccactgggtccggtgacagcggagctggtgcatcatatgctcaagaagaagggcttggaggacaaattccccctctttacaactgtgtacagaatctgcactggagactatccactgcagcgcctggtcgaaactctgattaaggcacgcgaggatatgtaa

SEQ ID NO: 5955 - protein, 349 aa, DROSOPHILA
MDKIMICIIGSGNWATTIARNVGRNVLNSQTLDEKVPMYVYEEIVEGRKLTEIINTTHINSKYMPNFELPPNIVAVDDIVTTARDADIIIFAIPPTFVSSCCKTLLGKVKPTAHAVSLIKGFERGDDGQFVLISQIIMRQLKIPCSVLVGCNLAHELAHDHFAEGTVGCRDQKYYRVLHDIFKSPTFRVVVTEDADCVEICSTLRNIIAFAAGCSDGMELNENTKGGIIRRGFLEMLQFVDVFYPGCRMGTFFESCGISDLVTSCYANRNRKLAEAFVKTGKPLSELEHILIPGHEPLGPVTAELVHHMLKKKGLEDKFPLFTTVYRICTGDYPLQRLVETLIKAREDM

SEQ ID NO: 5956 - DNA, 3367 bp, DROSOPHILA
acgtgaataacaagcagttggagtcgagcatctaccatgacatagacagtctgcgatccaagatagacaacaaactgaaaagtgtctcccatttgccgaagatgatgcgagacgagcactccaagtacgagacggtaatgcgggaaaattgtctgctggcggataaacttcatgccctccaacaggaagccatgcagctgaaggtcaaaatagatgaactgggccgccgaaagttggtcaccatcaaccggctgaaggccgccgaaagggatctgaagatctttaagaactacaactcggccttgaagacggagaagcggaaactgacccaggagctgtccaccatgaaggatcagctggagcagctccaggcgagcagcaaaaggcaactttcccgccatcgcgagcagagcgaaaagcagcgcagggatctgcagaagaagatctacgacctcgaactgaagctgagtaggagccaaaactcgacgtccagtttgatccaggaacgggatagtctgatagctgagctccagacgcaactccacaccctggtccacaacttcgaggtctcgcagaaacacataagggttctccggcggcacatctactccatgacgaatcagggtggcacgggcatcgttggcagtgggtcggctggcattgcccacttgacatcaggtggttcccatcgacccagtctgatcaggatcaatcagctgccccagggaaccagcaacggtcgatttgcagccccccgaactctgaaggcgacgatctaaacggggatctggactggactgcctagacctaggcactagattgggctcatcagctgtccaggcaacttgaaggtactgctcccagcacttggactatgccatcaagttgcctggacattatcagcccttattaagccaccaattatttcactctaatgattatgtaaactcatttttaaaagtacttttaatgattcggttaaatgtattgggataggaacttatttaggtacgacagtcacattactatcaccgctccaaagattccaaagcctccagaatttgagttcattatacggagctatgaccagatctttatggcactccttgacataatttaggcaacaattgccgttcaccagacatgattcttggcatcgacacccttcattgatgtaccttccccgaacaaagtcctgaccacaacgaccagagcagtcggtcatttggtagcccagtgaatccgtgatatccgattcttctattggtttttttggttcctcgatgaaggtagacctcctggcacattccttagctgccatcagcttcacgtcgtcgatggcaatatctccgtattgggacctcgcatccgtggcggtaaagatcacttggaagtcctcatccatcttattgatatcgatcgtgtgctccagccacctggcaccttgtgatccagtcatcacgaattggtcgaacttgtagggactaaaaaatcatattgctgtataaggcaaacttaattctagataagataattagtaagcaactcactggtttgttttaaatatgtctcctatagtcaccgaaacgggttttatggacaccagcaggctacccactccgctgccgaacatgaagtagtgaaactggaagcaggcgccactcaaactgagctccttgggatacagtggcgataggaagtggtaggttccaaaagcatcgctttccgtctccatgcgcacgtagtgtccgatggattggttttggaacgtgtgatctttttggggacccgttttctcagagtgaaagtcggccaccgtactgacccgtttccaagttcccaagaagctcaattccgccgtccagccgcacatatcctcgctctcgaaatcacaggaaacatcgatcgtctggcgtcttaatgcgcaggatcccaactgggtgctccacttctcgccatcgcaataggcaatgcgatttccaaccaacccatggccatccgaacatatgattttagctttcataggagcatttaaaacaaatccgttctgtatttgttcgtattcctggcaaccgctttctgaaagttgttaaaaattatgttagcttttacttactttaatttataattaaaattgttttcttattttgtacacctactggcgcaaaatggttttttccctcgaggaataccgcgatcgcaggtgaacactttcgatccttgtagaaagtatccttgatcgcaatgaaaaataatggatccatttactatttccgtcgaaccgtgttccaagtgcacagattctagacatcgagcatttgttcgatccacactcgatataagaacgatcgcccagagcaatatcatagcttcaagaagtaatactctatacttctgtcaaatccgtgctttcttaggcttcgacggaaaacaacgactgagttaagtggggatctgcattccatttctattaaataaaaagtacatgctgagtgtgttcatacgagatgagttcatttgtgccttatcaggtcttgtacaatctttaaatttattgtttttatctagaataatgagtaacgacgcagctcaacagcgtttgtaagtgccaaaaagttctaactattgaaatctatatgctttgcgagtttggacgaatatggaaggttctgttctaagcggactgatttttaatggctatggtgctttaatagtaatgtttgcatcgttggtgactttttctcttattttctactaaatacatttgtggccaatttggaattttgtgatctcattccaagccaaaataagcagccaacaatggccaattaaaatatcaatgtaaacaatgcggttcttggaaactcacttgcctatgatttttccatcgatcgtttgctgtatataaggatgaatatgtaaacatttgcctcacccactttggagtgtgattctgtgcgaaaagtgtttgaaatcgggtgttttttttttttttttggggcgactgtggaattaaggggggcgggaaattggggctgatgacagctgaaaaaaatagagaaagaaagaaatgtgcactgcgcagagaataggaagcattcttctgcggagaaacagagaacagtctaaatataaacaaagatactctcagaaataatttttaatattaaaacaacttgaattgcgcaggtccagttggcgcacaaatagtacctccaataggatttttaataaattattcaaatatatacactgatatatttttactatatctatctctgaaatctaagtgcattcaaaatacttaatgatgcacatgagtttcatctcgtttcatcttttgatatgattttcctaacctatcaag

SEQ ID NO: 5957 - DNA, 1221 bp, DROSOPHILA
atgatattgctctgggcgatcgttcttatatcgagtgtggatcgaacaaatgctcgatgtctagaatctgtgcacttggaacacggttcgacggaaatagtaaatggatccattatttttcattgcgatcaaggatactttctacaaggatcgaaagtgttcacctgcgatcgcggtattcctcgagggaaaaaaccattttgcgccaaaagcggttgccaggaatacgaacaaatacagaacggatttgttttaaatgctcctatgaaagctaaaatcatatgttcggatggccatgggttggttggaaatcgcattgcctattgcgatggcgagaagtggagcacccagttgggatcctgcgcattaagacgccagacgatcgatgtttcctgtgatttcgagagcgaggatatgtgcggctggacggcggaattgagcttcttgggaacttggaaacgggtcagtacggtggccgactttcactctgagaaaacgggtccccaaaaagatcacacgttccaaaaccaatccatcggacactacgtgcgcatggagacggaaagcgatgcttttggaacctaccacttcctatcgccactgtatcccaaggagctcagtttgagtggcgcctgcttccagtttcactacttcatgttcggcagcggagtgggtagcctgctggtgtccataaaacccgtttcggtgactataggagacatatttaaaacaaaccatccctacaagttcgaccaattcgtgatgactggatcacaaggtgccaggtggctggagcacacgatcgatatcaataagatggatgaggacttccaagtgatctttaccgccacggatgcgaggtcccaatacggagatattgccatcgacgacgtgaagctgatggcagctaaggaatgtgccaggaggtctaccttcatcgaggaaccaaaaaaaccaatagaagaatcggatatcacggattcactgggctaccaaatgaccgactgctctggtcgttgtggtcaggactttgttcggggaaggtacatcaatgaagggtgtcgatgccaagaatcatgtctggtgaacggcaattgttgcctaaattatgtcaaggagtgccataaagatctggtcatagctccgtataatgaactcaaattctggaggctttggaatctttggagcggtgatagtaatgtgactgtcgtacctaaataa

SEQ ID NO: 5958 - protein, 406 aa, DROSOPHILA
MILLWAIVLISSVDRTNARCLESVHLEHGSTEIVNGSIIFHCDQGYFLQGSKVFTCDRGIPRGKKPFCAKSGCQEYEQIQNGFVLNAPMKAKIICSDGHGLVGNRIAYCDGEKWSTQLGSCALRRQTIDVSCDFESEDMCGWTAELSFLGTWKRVSTVADFHSEKTGPQKDHTFQNQSIGHYVRMETESDAFGTYHFLSPLYPKELSLSGACFQFHYFMFGSGVGSLLVSIKPVSVTIGDIFKTNHPYKFDQFVMTGSQGARWLEHTIDINKMDEDFQVIFTATDARSQYGDIAIDDVKLMAAKECARRSTFIEEPKKPIEESDITDSLGYQMTDCSGRCGQDFVRGRYINEGCRCQESCLVNGNCCLNYVKECHKDLVIAPYNELKFWRLWNLWSGDSNVTVVPK

SEQ ID NO: 5959 - DNA, 6267 bp, DROSOPHILA
gggcgcttggcgtcacccggattcaggacgctgtcgaatagcgcctgcaggttgtcgtccgtgtcctggttgacccgcaccaccaggttgttggacttgatcggcgaaagcatgtcctcgtcgtcgatctccttctcgatcaggctgtttgtattgctgctggctgacatcgtcgttaacatataaaaggcacttattgtatacaaacgaaaactacatagaattatcttagcgattaggcacgcgcacatatatgttcttccatatacgtatcactccatcgcgctgcgcgaaactataacattaaggtgttaaaaactaaacttcgttgcaataaataatagtaataataataattacggaactgccaacataaaataaatttatcccagtgttgccagatggctatccccgtccacttgtccattccgatactagcgttcctcatgtaatcggcttcgtggctgcacctgcggaatgccaggggtattccgcaagccgattacgacttttgtcgatttcctttagctatagctaaagatttattctatattttgtaattaataaggcacaaaacaaagtagatattaaattatggtgtgtgtatagcccacacacttgtgttccataatatcagactataaattattagactaacaattattatttattggtttataacattttgtttagtgaaaataagtacaggcaaaggtctgtcaaaaacacacccaataacaatataaactgattgtaaatgtgccttgttgatttaagtaataagtgcaggtaaaggtctgtcaaaaacacatacccaataacaatataatctgaatgtaaatgtgcctttttgttttcagtgcacgttcattcaacccttttcaaaacgattggcagtggaacaagaagccgttccgtctcctgcccgaccggaatcgtcccctttccgtttgttccccgtagagatgagcgcgggccaggtctgtgagcacgagacaggtttttgacacagtcaaggtccatcgctagttcggtctacagcaaaaagtattttaacattgtatatattggcacgacacaattcggaggcatttttcgcttaacaataactaatgtcgcatgacacaaatgtaaaatgatcgccgtgctgttggacatattctggatccccatcgggggcttcctctcatttctcatatttatttccgccataaacaaatcaatcggcgtccgaaaagcgtacgtgaacctcctcctaaggatattcgaggtaaatattgcttgctttcgttcctcagatgagtaagcaccgatttgaggtgctccactgctgcggtggctttgcaaatggtgctgtcttaccaatagttaagctattccaaagtccataaatatagtcagcttttggagtacgccatactacgtctgccctacgcaattactgcaatgcaggcgagttcgagaaactattgcttgcccggaagctttaagtagattcttcggctatcctcaaggaatctgcggggcaggagtgcgccagtgcacccaagttgccgcttcccagacacttgtaaagtgccagtcattacctcgtccgacgatatgcttgcgataatcttatctgcagataatccccgattcgactcgttaacaactaatcacctctactttcagtatggtcgagttagtatagagacagcatccaaagaaaaccaacacattcaaaatcccaagactgacgacaaacagggagtgcaactagtggacgacgccgattccaaagaaggcaccaatggagccacattgattaccagggacgcggtactcctgccccagccacaggagcccgctccagagaagccagtttcctccacaaaggtaaggagtccggcattgcaatgggcacctgatttaaacaacatttcccatttgcaggatgaaatcaatttcgattttgagaaatgcctggactacgtaaagtctggcgtggaggccatcatcgaggacgatgttacgtcgcgcttcgaggcggaggagctcaagagctggaacatgctgacacgcaccaataggcactacgagttcatttcctggaaaatcacctccatctgggtgttcggcttcttcatccgctacgtcatcctgatgcccctccgggtattggtatgcttcgttggtgtgagtacattcggttcatttagtggcttttccacaactacccgatcgtcccgattcccatgcatgctacaaattatcccaaaggatacgcttaagtaatgtattccgctttagactggagaacagcatcatgcatagggattgggctgtcgagtagttatcttacagtgtgaaaggaaagtgactcaacggacaataactggttaaactttacccattagtagataaaaagcgttttcctcaatcgattacatttcagcttagagctagctaccttttgatctctttagagaaataagtttagtagagtatcggacgacccgacccccaaatgcgcgtttgttatcgaaattgcttgcactaacgtttactggaagttaatacagatacgtcgcagtaccgcgaacttgtgattaacaaagttttcgttgaaaattttttaatttacccataatttaccaccatttatttgtgttgtgcgcgttttttaatttacttctctaataaaaactatttaattcctaggttttatttgcagttttatcaagctccattgtggcttgtttaccttttcgatttgtacggctttctctagcgagcttgtcattcaaaattacgttccgccttatttcaagttctatgtcctcctttatcaagttccacaataagcaatataagcccacagtctctgggttctgtgtagccaaccacacctctcccttggatgtggctatattatcgaccgattgtacctactctttggtgagaaagaaattttatcttaaattcgtcacacaaactggtttcatttaagttaaaatgcatgcatgtaacacccgaaatcgcacattttgtaacccgtacttgtacctaaacatactaaatcctgacgctctaacatatcggttcgatcattttatcccagtaagagaaactcgacttttgggcttcagactttggctagcagcccggtaaccgccgataaattgtccaatggctttattggtttccattcgtccaaacttatcaaagagttcccatgtgtacgccttggcagatagccattatctctgtgtacatggagtttagacccgacgcatatgaacatacctacaggcatcgataagtttcaaccgccttgccgacatgaattacttcatactattcatattacctgataagtcggaactgttccgagtttgggcagaaagtcgattcgagaatgcatgcatgaatttgacggaggtgcacttttccatgtggtcctaagtttatgttgcagtacttttgcttttgtttcgtccccgcctaatgtcctttgtcctttgcaatctacgagtggtttgctgatttcagcttattcgtttgccgtgcgagtatctaagtacacgaatcaggtaagataagtgccgtgggtatggtatccatttgtttattactcggtttatggcccccacggtgccctctattacgtgtgaagattagtgtcagctcttttcgtggtttccccgttgaattttgtttgcggagtgtgagcctagacctaaaattgtaatgatgaccattagattaagcctaggctactatgtaggaaattccagtgtaaatccaacgaagccaattggctaacataacgcctagaagacgacgagtggagatgagtcctggtgattttaaaaaagaagaacttgaagctctatgtaactgaactccctcactgttcccattctcgttttgtgcaatcttaggtagtgtggttaacagtctgcacggctgcagtgggatacttgaaggatgggcccttcaagcgggatctcgtgcacaaggtgctcggcatgtgcttcggcgttttgtccagcgctatatcggcggttatcacctaccacaatgaggataatcgcccgtcatccggtatttgtgttgccaatcacaccagtcccattgatgtgctggtcctgatgtgcgactcgacctactcgctggtaaggcaacgtttggaacctgaagctactaacaccccgcccgtatggaaataatcacgatctttggttgtagcatcttaccttctcagtttcctgtagtcactagaaacacacaaacatataatccattttaaagtggtgaaccgcttgaatgctttttgtatatttcctatgttatcaattaggaatagggatttgctctgaatggatgattcttttttagtttctgatacacaatgaacaattaagcttaatttaatagtacttagaaataagaaaacactggtgctccaaaatgctctaaataaactaggctgaattggcacatatccaaaatttgcacgtacaggtactaacacgaatttaagcttgttgtggtgatggtttttgttatgcatgtttagtgttttggctttctgtgtttttgggtagctccaagcctctcttaagccagataataagtttcgcccgactttctagattggccaacgccatggcggctttttgggggtgctgcaacgagctctggcccgcgcatctccccacatttggtttgagcgcggcgaggccaaggatcgtcatttggtggccgagcgactgaagcagcacgtgtctgatccgaacaacccaccgatccttatcttcccggagggaacttgcatcaacaacacgtcggtcatgcagttcaagaagggcagcttcgaagttggcggcgtcatctacccggtggccattaagtgagtagtgaatagtttttcgcggcgaaaccatttctcatccgtggggtctcttttggcttgaaggtacgatccgaggttcggcgacgccttctggaacagcgcgaagtactcgatgatgcagtatctgtacatgatgatgacctcgtgggccatcgtgtgcgatgtgtggtacctgccgccgatgtacaggcaggagggagagtcggcgatcgacttcgcgaaccgcgtgaagagtgtcatcgcgaagcagggaggtttgattgatctggtctgggacgggcagctgaagcgcatgaagccaaagaaggagtggagggagatccagcaagtcgagtttgccaatcggctgaagtcggactccacctaaattaccatattaccatacagtgactgtaaatgatatacatacatgattttgcataatttgtattgcagcgactgtaatttgtataaattacgattaacaattggatggttaaataaaagatgaagtcaaatgtacaattataataattatttgtatattaattaatttatctactttgtaaaataaacgatatctgataagctgattatcataacatctggacccgatcgctgtaaattcatttctttgtcatgcaaaacgccagccacactctggcgaagaatgggctcgaaggtgaggcctctttgttggatggagcgagaccaggtcagcaacctatggatgttgatttttggccacctgcatatcatgcatagttaagcggagccaaatgaagccaacaagatggcgaataactagattacatattcataattatgcggctaataataaatacgagtggctgactcagcgctgcgccaaatgtctattttgcactaattgtccacccatacaggtaattaagacatacatacttccgtgttccgagttggaggcgatcggtcgatcgagtggttaattcccgacattcttggcgatgaactaaccctgaactgtcgccaaaaataatggtggtatcggatcggatcggcacgcggataaacaatgctggcaaagcaaaccacattgtcagatttgtcgagtcaatgggcctggccttcataaattgttaggctcattgccaatcgcaagtgagcgatttacaattaacaaatacccagagcccctctatttatagatatgtttatacatgggcatcgcaggcgctgatgaaaagatgcttcactccatccacatacacatccacatccacatccatattcatattcatatccatgtgcatattcgtttggccccccaattgaaacacttgtggctggccactcgatccactctccaaaaacgctctttcgaaaactggaacctattttcgaacact

SEQ ID NO: 5960 - DNA, 1749 bp, DROSOPHILA
tttttgacacagtcaaggtccatcgctagttcggtctacagcaaaaagtattttaacattgtatatattggcacgacacaattcggaggcatttttcgcttaacaataactaatgtcgcatgacacaaatgtaaaatgatcgccgtgctgttggacatattctggatccccatcgggggcttcctctcatttctcatatttatttccgccataaacaaatcaatcggcgtccgaaaagcgtacgtgaacctcctcctaaggatattcgagtatggtcgagttagtatagagacagcatccaaagaaaaccaacacattcaaaatcccaagactgacgacaaacagggagtgcaactagtggacgacgccgattccaaagaaggcaccaatggagccacattgattaccagggacgcggtactcctgccccagccacaggagcccgctccagagaagccagtttcctccacaaaggatgaaatcaatttcgattttgagaaatgcctggactacgtaaagtctggcgtggaggccatcatcgaggacgatgttacgtcgcgcttcgaggcggaggagctcaagagctggaacatgctgacacgcaccaataggcactacgagttcatttcctggaaaatcacctccatctgggtgttcggcttcttcatccgctacgtcatcctgatgcccctccgggtattggtatgcttcgttggtgttttatttgcagttttatcaagctccattgtggcttgtttaccttttcgatttgtacggctttctctagcgagcttgtcattcaaaattacgttccgccttatttcaagttctatgtcctcctttatcaagttccacaataagcaatataagcccacagtctctgggttctgtgtagccaaccacacctctcccttggatgtggctatattatcgaccgattgtacctactctttggtagtgtggttaacagtctgcacggctgcagtgggatacttgaaggatgggcccttcaagcgggatctcgtgcacaaggtgctcggcatgtgcttcggcgttttgtccagcgctatatcggcggttatcacctaccacaatgaggataatcgcccgtcatccggtatttgtgttgccaatcacaccagtcccattgatgtgctggtcctgatgtgcgactcgacctactcgctgattggccaacgccatggcggctttttgggggtgctgcaacgagctctggcccgcgcatctccccacatttggtttgagcgcggcgaggccaaggatcgtcatttggtggccgagcgactgaagcagcacgtgtctgatccgaacaacccaccgatccttatcttcccggagggaacttgcatcaacaacacgtcggtcatgcagttcaagaagggcagcttcgaagttggcggcgtcatctacccggtggccattaagtacgatccgaggttcggcgacgccttctggaacagcgcgaagtactcgatgatgcagtatctgtacatgatgatgacctcgtgggccatcgtgtgcgatgtgtggtacctgccgccgatgtacaggcaggagggagagtcggcgatcgacttcgcgaaccgcgtgaagagtgtcatcgcgaagcagggaggtttgattgatctggtctgggacgggcagctgaagcgcatgaagccaaagaaggagtggagggagatccagcaagtcgagtttgccaatcggctgaagtcggactccacctaa

SEQ ID NO: 5961 - protein, 537 aa, DROSOPHILA
MIAVLLDIFWIPIGGFLSFLIFISAINKSIGVRKAYVNLLLRIFEYGRVSIETASKENQHIQNPKTDDKQGVQLVDDADSKEGTNGATLITRDAVLLPQPQEPAPEKPVSSTKDEINFDFEKCLDYVKSGVEAIIEDDVTSRFEAEELKSWNMLTRTNRHYEFISWKITSIWVFGFFIRYVILMPLRVLVCFVGVLFAVLSSSIVACLPFRFVRLSLASLSFKITFRLISSSMSSFIKFHNKQYKPTVSGFCVANHTSPLDVAILSTDCTYSLVVWLTVCTAAVGYLKDGPFKRDLVHKVLGMCFGVLSSAISAVITYHNEDNRPSSGICVANHTSPIDVLVLMCDSTYSLIGQRHGGFLGVLQRALARASPHIWFERGEAKDRHLVAERLKQHVSDPNNPPILIFPEGTCINNTSVMQFKKGSFEVGGVIYPVAIKYDPRFGDAFWNSAKYSMMQYLYMMMTSWAIVCDVWYLPPMYRQEGESAIDFANRVKSVIAKQGGLIDLVWDGQLKRMKPKKEWREIQQVEFANRLKSDST

SEQ ID NO: 5962 - DNA, 4228 bp, DROSOPHILA
ggctccattgtttcagcactggcatgcggatgtggttggtcaaacgtgcatgtcgggcacgtgttttgctttggcttgaaattggtggttgggttcggatcgcatcggatggggttaaagttaaagcgagcgttcttaatgtcagggtcaatgcagaatacgggggtcctgcatgtgtggaatcgacggccatcttactcgtcccaatattggcggcatgcatataatacccactgacggtgcataaatcaaaatatatacaaaaaaaaaaatacaagcgggcaaaacaatgtgtgtgttttgttgctcgagagatacaatacaatatttattcaaaagcaattggccgggcgcttctgtcgccgacagctgcacaaaactcgggggacacttttgacacacacacgtggccagggcgaccttatagtacataatgagtttgctgggtatgcagaggagcaaagtggccttgccactggcaattagagttattttcactagcaataggggacatgtcggtgctgcaacgtgcccgcaaaatggacaaaaacatgtgcatgaataatacaggtgaatgttatggacatttgccaccattggggctcgtgaaatggtcgactaaatcaaatatattataatttgtgggtaccaaaggtataagcttgaggtactagccaaacaatttctaaaaactaatattttgcatttttaaatcttaactaaaatatagtgaaatttgattatcctcttttcttatagacctcaactaggcgactgtatacttagtgattaagtaaatacttaggtttttgggcaattcaacttattatatagttgatggttatcgttaatcgaaatttcaatacaatgcaatttcccgccaaataaaagtgtgaccattagtttatattaaacgaaattcctaacattcttttgcgcgctttggtattttgcaccaatgcattgagtccatcagctgtttatttaatttcaaaactgaatctataacgaagtaaataattgaaaatgagcacttttaagccaaagttcctaaaacccgagacggacgatgcaatcacagatagtgccggtggtgaacagcagtcctccgcctttgtattcaatgtcaatcacaatatgggactcatggagcaggtgggcttacaaaatatttcgtaaacatttgctagaataacaaattaaacttaaattattacagagggaacgtttgcccattcgtcagtaccgggatcaaatactttactgcttggaaaagcatcaagtggtcatactagtgggtgaaacaggcaggtttgtatggaattccatgagcttcaaagtaatgcttctaactctgtggtttttcatatttcccagtggcaagagcacccaggtgccacagtatttgtatgaatggggctggcacaccaagggactcattggcatcaccgaaccacgacgcgtttccaccgtaagtaatcctaaagcaaagcaactataaaatctaaaactaaagacttcatttccaggttacgctggctaatcgcgtggcacaggaacgcggcgaactggtaggtgacacggtgggctatgtagttcgcttcctggaaagcatgagctcctgtaccaaaatcaagttcatgaccgagggcatcttgctgagggaagtcctagccgatccgctgctcacccaatatggtgttatcatcgtggacgaggcgcacgagcggaatatgctcaccgacatgattttgggactgctcaagaagatccttcgcaaacgcagctcgctcaagctcatcatttcatcggccaccatagatgcaagcttcttcagcgagttcttcagctggccaggatcgggcgaagtgagcgttaagctaagcattgaaggtcgcatgcatcctgtgagtaatttctatctgaacgaaccctgcgccgattatgtgaaggaaactgtggagaccgtctggaaactgcatcaaaaggagccgcctggcgacattttggccttcctaactggccaggaggaagtcctggaggcgctggatcttctgcgcgaatacatcgccagttcggaacaggagaatctcaaggtgctgcccatgtatggtagtatgtcgagcactgatcagttgtcggtattctttaccccgcccaaaggaacccgcaaagtggtgctggccacgaatatagcagagacctccatcaccattccgggcattgtttatgtgatagactgcggctacgtcaaggtaaaatggtacaatcccaaaacctgcagtgacagtttggttatagtgcccgtcagcaaggcgtcggccatccagagagcaggacgagcgggtcgtatgcgtcccggcaaggtctatcgtttgtacactaaatcagactatgaagcactagctcctcggcagccacccgaaatgcgacgcagcgaattgagcggcgctatcttgcagttaaaggcgctgggcatcgggaacatattgcgctttgatttcccatcgccaccaccggcacagaatctactttccgcactggagagtctatttgccttggacgccatcgatgagcagggcaatctgacgaagcccgtgggttacctgttggccgaactccccttcagcgctatgctctccaaaatgctctatgtttccggtcagatgggctgctccgaggagatcataaccatcattgcgttgctgcaggtgcagtctatattttcgcgcccagcttcagcggttgcccaacaaagtggacgcattgcacatcgaaaattcgaagttgcggaaggggactttattacgatgttgaacgcttacactggcttcgtggaggagggcatgaccaaggagttctgtggccaatacttcctcatctacaggaatcttaagagggcccactcgctgagggagcaactcatcacagtggccagaaagaagtacggcattccaatcttctcgtgcaagggcgatgtggaaaagttgtgcaagtgcatcaccgccggcttcttcacacaggtggcctatctgcatcactctggagtttatagacaaatcagcagcggcactgaactggccattcatccgaactccactctctacacacttcctcaagctcagtacgtggtctatggggaactgctccaaacgacgaaattgttcatgaactacgtgaccgtaatcaagagagagtggctgacggagctggcgccgcattattaccaacagaccacagtgcgggattagcaggaactaaagccttaatgataggtgtaagtctattaaaatagttcattaaatcaaataactaagtttattgtaaaattataggtgaaacgatgccgcctcttgaaaaagaacttaagcttaggtaatggattccatatgatgattcctattgtgtgtttaaccagcggcgacgcgccctcgtccctgaaacatcatcatagactcgggtccacggatgacacgcgacatcagctcccagcacattttggcgggcaaaagactgagaaaaccagcattaattacattgtatataactatgttaaatagactacttaccatttgagaggagtgagcaggcgaatagagttgggcagcacgcaccacacctcgttgcagcgcacggcgttctcgatgcgatccgccacatactgcggctccagcatgggcatcatccgcggccgaacacccgaaaacatgcccgtgttgatgtagtacgggcagatcaaactcatttggatttgatcatagccatgggccttcagatcggtgagcaaactctcgtggaaaccgatgcaggcgtatttggtggccgcgtagtcactgcatccgtaggtgcccagcattccagttaccgagcccacagtaacgatatgaccacgattattgcgcatcatgtgaggcagaaacgctttcacggtccagtagtgcgatatgatgttaatgttgtacgtgttctggatgacccgatcgtgcagctcccagaagggtttgcagcacacgataccggcattgttaatcaatatgtcgacgggaccaacctcctcggtcacctggctggcacgctggtagatctgctcccgatctgagatgtccacaacgtagcccttgcagttgtcataaccatgtttggccaacaaatccacagttgtctttatggctgtgcggaaaattatgatcaaatattgtttagctaatcaaattgtaaatgtaacagc

SEQ ID NO: 5963 - DNA, 2040 bp, DROSOPHILA
atctataacgaagtaaataattgaaaatgagcacttttaagccaaagttcctaaaacccgagacggacgatgcaatcacagatagtgccggtggtgaacagcagtcctccgcctttgtattcaatgtcaatcacaatatgggactcatggagcagagggaacgtttgcccattcgtcagtaccgggatcaaatactttactgcttggaaaagcatcaagtggtcatactagtgggtgaaacaggcagtggcaagagcacccaggtgccacagtatttgtatgaatggggctggcacaccaagggactcattggcatcaccgaaccacgacgcgtttccaccgttacgctggctaatcgcgtggcacaggaacgcggcgaactggtaggtgacacggtgggctatgtagttcgcttcctggaaagcatgagctcctgtaccaaaatcaagttcatgaccgagggcatcttgctgagggaagtcctagccgatccgctgctcacccaatatggtgttatcatcgtggacgaggcgcacgagcggaatatgctcaccgacatgattttgggactgctcaagaagatccttcgcaaacgcagctcgctcaagctcatcatttcatcggccaccatagatgcaagcttcttcagcgagttcttcagctggccaggatcgggcgaagtgagcgttaagctaagcattgaaggtcgcatgcatcctgtgagtaatttctatctgaacgaaccctgcgccgattatgtgaaggaaactgtggagaccgtctggaaactgcatcaaaaggagccgcctggcgacattttggccttcctaactggccaggaggaagtcctggaggcgctggatcttctgcgcgaatacatcgccagttcggaacaggagaatctcaaggtgctgcccatgtatggtagtatgtcgagcactgatcagttgtcggtattctttaccccgcccaaaggaacccgcaaagtggtgctggccacgaatatagcagagacctccatcaccattccgggcattgtttatgtgatagactgcggctacgtcaaggtaaaatggtacaatcccaaaacctgcagtgacagtttggttatagtgcccgtcagcaaggcgtcggccatccagagagcaggacgagcgggtcgtatgcgtcccggcaaggtctatcgtttgtacactaaatcagactatgaagcactagctcctcggcagccacccgaaatgcgacgcagcgaattgagcggcgctatcttgcagttaaaggcgctgggcatcgggaacatattgcgctttgatttcccatcgccaccaccggcacagaatctactttccgcactggagagtctatttgccttggacgccatcgatgagcagggcaatctgacgaagcccgtgggttacctgttggccgaactccccttcagcgctatgctctccaaaatgctctatgtttccggtcagatgggctgctccgaggagatcataaccatcattgcgttgctgcaggtgcagtctatattttcgcgcccagcttcagcggttgcccaacaaagtggacgcattgcacatcgaaaattcgaagttgcggaaggggactttattacgatgttgaacgcttacactggcttcgtggaggagggcatgaccaaggagttctgtggccaatacttcctcatctacaggaatcttaagagggcccactcgctgagggagcaactcatcacagtggccagaaagaagtacggcattccaatcttctcgtgcaagggcgatgtggaaaagttgtgcaagtgcatcaccgccggcttcttcacacaggtggcctatctgcatcactctggagtttatagacaaatcagcagcggcactgaactggccattcatccgaactccactctctacacacttcctcaagctcagtacgtggtctatggggaactgctccaaacgacgaaattgttcatgaactacgtgaccgtaatcaagagagagtggctgacggagctggcgccgcattattacc

SEQ ID NO: 5964 - protein, 671 aa, DROSOPHILA
MSTFKPKFLKPETDDAITDSAGGEQQSSAFVFNVNHNMGLMEQRERLPIRQYRDQILYCLEKHQVVILVGETGSGKSTQVPQYLYEWGWHTKGLIGITEPRRVSTVTLANRVAQERGELVGDTVGYVVRFLESMSSCTKIKFMTEGILLREVLADPLLTQYGVIIVDEAHERNMLTDMILGLLKKILRKRSSLKLIISSATIDASFFSEFFSWPGSGEVSVKLSIEGRMHPVSNFYLNEPCADYVKETVETVWKLHQKEPPGDILAFLTGQEEVLEALDLLREYIASSEQENLKVLPMYGSMSSTDQLSVFFTPPKGTRKVVLATNIAETSITIPGIVYVIDCGYVKVKWYNPKTCSDSLVIVPVSKASAIQRAGRAGRMRPGKVYRLYTKSDYEALAPRQPPEMRRSELSGAILQLKALGIGNILRFDFPSPPPAQNLLSALESLFALDAIDEQGNLTKPVGYLLAELPFSAMLSKMLYVSGQMGCSEEIITIIALLQVQSIFSRPASAVAQQSGRIAHRKFEVAEGDFITMLNAYTGFVEEGMTKEFCGQYFLIYRNLKRAHSLREQLITVARKKYGIPIFSCKGDVEKLCKCITAGFFTQVAYLHHSGVYRQISSGTELAIHPNSTLYTLPQAQYVVYGELLQTTKLFMNYVTVIKREWLTELAPHYY

SEQ ID NO: 5965 - DNA, 4397 bp, DROSOPHILA
aggagcggattgagctggtgcctcctcatcgtcctcatcagaggatgaagaatcttcgtcatcttcctccacgctaattacattcggattctttcgcttggcctgtagttcctcctcctcttcgacgagaagcttgcgcttggagccctttatagcatttacgcggagacccgacgccgagcttttttcagctaaaacttgggcctgtctttcctttttcttggctagatactcgtcaagggtgggtagacgctttaatcccacggtttgcacttggctaatggaagtatactgctgcagctcctcctccggaatttgaacggcagcaaggtcacccaacagctgagcgcgctaaattagaaaagatttcaattaaatatcagttttatattagcactgaataaaaacctacaccctctttctttttcttcttgtccacaatagcctggaggtgcttgcgctgcttcttggaaaggatcttcacgtgttgcactttgtccaccttaatcttggtggcccgcttctcggagggcagaaccagagcgttggcctcatcgtagccaacctggttgccgccggccacagcatccacatcgatctgaatctgtagagtattggatttggaaagggtaagaaagcggattcgagtgtgtggtccgacggatgacctaccttcttcacggccgagttgtccacaattgtttgtggattctgccgcgccttggcattgtgcaccttcttgcccatgattactttactttaccaatatagttaataaaataaagtaacagaattaactttgggcaataatataaacattgatttaaatcacacgtgcgaagtacgcttatcgataacagcgcaggcgataacaaaagttgagatactctaaaatgtgctgtgatgttacatttgtgttagtggaaacatacattagtgggaaaaactgattgttatagttgttcacactccttcgacagcactggtatcgaaacgttatcgcaatcgattcatcgtaatattttcaatataagtttttgtgacaaataggcgtgcaacattttagatccatctgctccccgcctgtcgtttcggcttggctcctctgctcgagtcctgaacccccgttttcagtgaaatccagctacctgcaatggtgtccaagaaccaattctatcagaactggaccatgcagtcgcagcagcagcacccgcaccaaatgcagcaacagtttcagcaacagcagcagccaaatctgcagcaccgcaacaaccagagcaacaataataattgcaacaataatccccgcgcagctgcggctccgtatagaaaaccgtttcgttcgggcaaaattaactccggaccaggaggaaatgggaatggtaacagggtcaacggtaacaatcagatgatgttttcctccagccaaatgccgagcgatcccctgtacattgacttcagcagcccgccaccaggattcaaacacaatcaggtaggcagtcccaagaagaagtctatgaagggcatcaaacagcagcagcatcccagtccgaaccagcagcagcctcccagtccgaaccagcagcagcatcccagtccgaaccagcagcagcatcccagtccgaaccagcagcagcatcccaattcgaaccagcagcagcatctcagtccgaaccagcagcagggcaagatgaacaaccagaacaacaatcatatgaaccagtcgcagcagcccttcaacaatcagatgaacggaagcgattggcagcgccatccgggcaacaatcccaatcagattcgcggtggctttaatggattccaacgcgggccgcctccgaaccgtcctcctccacgcctcatgatgggtccgccaatgggtccgatgggccccggaccacggggacccggaccgatgggccctggaggaccttacccgcaaatgcctttcccgccaccggtgcctggtatgcgcggtcccggacccatgggccccatgggtggaccaccaccgccgccgccaccgctctttatgcgtcgcaacggacccggtccaggtcctatgatgggtgtcccaccgcccatgcacatgatgggtccacggatgccgccgcggggaattccaccggtcggaccttatggaccaatgaacatgaatggcggccggataatgaagcccaatcccaagctaatcaagcaggtggtgaaaggcaagagcagcataaagacactaaagaacctgatcaatcagtatcccatcgaaaagccctgggtaacggacgagatacgcagcgagcacgacaagaaggtggacatcgagaacagattgaagggccacaaagacgacgagctcttcgctcagtacaagggccagcgggacaagttcgttagtctctacgaagcggcgcgggaagagtatctcaagcaggaggcagccactgtcaaggccaaggtgagcatatagagaccccccaacatatccttattcccttggaacaggtgtcccatccgaagctctattcagggaggcacaccgattccgggtacagtttcggcttaatccggaatcactttgcacccctgatttgatccgtaacccccacccgtccctctttgttgcgtttgccgggcggtaggaaaaaaataagagagcagagaaagtgaaaaagtaagtctcaacctgatgcactctctcgcattatcctgcagtcctgcggaaggttgttgtcatatctattttcaccttcggttgttcccttggcactgatatatatccgcaaaagagaaactattggcatatatttacaaccatagatttattaggaactgaacaaaattgtgtaactatttagaactgcaatacaatgtgtttactgccaccttgtatacaaatttaaaaaactaatagaattttgtactgttcgatcgtggcaggcgtagtagattcataaatgcactcttagtaacttaatattcttaattgaacgagcctcagtactgaatcctatggctgttttcattttccaatttggttggcatgtgaaaagcgaacttaatgaattttaaactgccagaacatcaatttagttacttaattagcagatataacccaacttatgaaactcattgcatatgaaatgataatgatttgagtgattaatgttcgtgggcgtagttatctggaaatagccaagagaagttcgcagaatgcatttaatagcgaaaacagatctgagagctctttttacacactcaacaaccttgctattgaacaccgttggcaattctcgtatttcttttgcaggatgccaagtcagacaaagacaaaaacgcaatttcaagtcagagcgcagcccctaaggccggaagcgctaaagatgcaacaattccaaatccctaggcagccaatgcaaccgaatccgaataccgaatcaatcgaatcgaaccgactaaagaagaggtcggtcgactcacagaactaaatgtaaacttaaactttaaaccaatgagcaattcaaaactaaaactaacagcgagcaacagcaagagtctgacaattgaagacgaatataactcaaaaccccgactcctatatcggatatacgtatacacaatcgtaatccgaggaggcgccgcctttgtcacacgttgcttttgcgactgagaactgagcttagaacgataatgtagcaacaaatacaaacccagcgataataatgtgggcgaaactctagtaatagcgataaaaatttagattgcgaatcgattcacttgtctaacgtaacctagcgtaacgtaaagtagagtattgaaatgtaaccgtaacgtaacgtaacgtaccagtttcctattcgaaaactatttgttgttcaattctaagttgcagccatttcaagtatgtgtacacaatttatgacacgcccttacctatatatgtatgcatatatattgatatatatatatatataaattattttcctattcgttgcccgagtgcgtgggcgcgacataattgaaacagagtggccggatcctaagcactctggcataaatcacactgtaggccttagattacaccacttgattgtatttttaaattaattcttaaaaactacaaattaagatcactctgtgaacgtgtgctcgatggtgtgcatctacggatttgtttttgtgttctttttccccacccaaccccgtccctgacccaattccgctgttctctttaccgacttgtagattaatcacgctcttgatcttcatgaccggatccacctgacaagtaacgccaaagcagccccacttagcggaatagtagagcctaggggacccaacgtaaaaactctagtatagcaccaatctcccaaccagttaacattatacctaaacccatggtcaag

SEQ ID NO: 5966 - DNA, 1545 bp, DROSOPHILA
cgcaatcgattcatcgtaatattttcaatataagtttttgtgacaaataggcgtgcaacattttagatccatctgctccccgcctgtcgtttcggcttggctcctctgctcgagtcctgaacccccgttttcagtgaaatccagctacctgcaatggtgtccaagaaccaattctatcagaactggaccatgcagtcgcagcagcagcacccgcaccaaatgcagcaacagtttcagcaacagcagcagccaaatctgcagcaccgcaacaaccagagcaacaataataattgcaacaataatccccgcgcagctgcggctccgtatagaaaaccgtttcgttcgggcaaaattaactccggaccaggaggaaatgggaatggtaacagggtcaacggtaacaatcagatgatgttttcctccagccaaatgccgagcgatcccctgtacattgacttcagcagcccgccaccaggattcaaacacaatcaggtaggcagtcccaagaagaagtctatgaagggcatcaaacagcagcagcatcccagtccgaaccagcagcagcctcccagtccgaaccagcagcagcatcccagtccgaaccagcagcagcatcccagtccgaaccagcagcagcatcccaattcgaaccagcagcagcatctcagtccgaaccagcagcagggcaagatgaacaaccagaacaacaatcatatgaaccagtcgcagcagcccttcaacaatcagatgaacggaagcgattggcagcgccatccgggcaacaatcccaatcagattcgcggtggctttaatggattccaacgcgggccgcctccgaaccgtcctcctccacgcctcatgatgggtccgccaatgggtccgatgggccccggaccacggggacccggaccgatgggccctggaggaccttacccgcaaatgcctttcccgccaccggtgcctggtatgcgcggtcccggacccatgggccccatgggtggaccaccaccgccgccgccaccgctctttatgcgtcgcaacggacccggtccaggtcctatgatgggtgtcccaccgcccatgcacatgatgggtccacggatgccgccgcggggaattccaccggtcggaccttatggaccaatgaacatgaatggcggccggataatgaagcccaatcccaagctaatcaagcaggtggtgaaaggcaagagcagcataaagacactaaagaacctgatcaatcagtatcccatcgaaaagccctgggtaacggacgagatacgcagcgagcacgacaagaaggtggacatcgagaacagattgaagggccacaaagacgacgagctcttcgctcagtacaagggccagcgggacaagttcgttagtctctacgaagcggcgcgggaagagtatctcaagcaggaggcagccactgtcaaggccaaggatgccaagtcagacaaagacaaaaacgcaatttcaagtcagagcgcagcccctaaggccggaagcgctaaagatgcaacaattccaaatccctag

SEQ ID NO: 5967 - protein, 463 aa, DROSOPHILA
MVSKNQFYQNWTMQSQQQHPHQMQQQFQQQQQPNLQHRNNQSNNNNCNNNPRAAAAPYRKPFRSGKINSGPGGNGNGNRVNGNNQMMFSSSQMPSDPLYIDFSSPPPGFKHNQVGSPKKKSMKGIKQQQHPSPNQQQPPSPNQQQHPSPNQQQHPSPNQQQHPNSNQQQHLSPNQQQGKMNNQNNNHMNQSQQPFNNQMNGSDWQRHPGNNPNQIRGGFNGFQRGPPPNRPPPRLMMGPPMGPMGPGPRGPGPMGPGGPYPQMPFPPPVPGMRGPGPMGPMGGPPPPPPPLFMRRNGPGPGPMMGVPPPMHMMGPRMPPRGIPPVGPYGPMNMNGGRIMKPNPKLIKQVVKGKSSIKTLKNLINQYPIEKPWVTDEIRSEHDKKVDIENRLKGHKDDELFAQYKGQRDKFVSLYEAAREEYLKQEAATVKAKDAKSDKDKNAISSQSAAPKAGSAKDATIPNP

SEQ ID NO: 5968 - DNA, 4031 bp, DROSOPHILA
agtcacgtattatcactgcacttaacaagtaccaaagctatatcgattacctgcacatctcggaccagttcagtgggcccatccagcaggaagagggtggcaccctcaagcagcccgaaaccaaggccgtgcttctcgcaggcttcaatttgccgaagcacgccgaaatggagaccattaagccgttgttattgttgatcttttatttaatggagcgtttaaagacctatcgcatgtccaaggaggtaatttagtacgcttatttagtttcaacttgcgattaatttgttgtgacaattccagggcaaagccaagtcggacaaaaaccgtcagcgcgtggaggaggagttcttgaagagcacccatgccgcccgcgccgaggctgccgctcagagacgtgaggataagcgtaagcaggagaaggagcgcattctggccgacgaggacccagagaagcagcgccgttgggaggctaaggagcagaagcgccaggccaagaggaatgcgcccaagatgaagagactggccgtcaaatccctgtagatttgtttcaattgtgccatttgccgcaaggagcgcacctcattaacgtacacaaaccgaccatttgtagatgttcctctcaaatgccagaataaagcaatatctatttgtttcctatggagcgccaaaacaaaaacctcagttgtgccaacttaatctggatcatacaaagtactacactgtttaaatgcagataagcagcctatctcttcgttgagcaagataagttttgtaaccttaatctataaaatgaattaggttaaatacttcaacgatataaaaggaacgcaagtatttgccaaaatacttatatatttattgaaatatttaaaattttcgttacaaaatgatttatatgctttgtgaatggttttcgaacgcaagctacattatctttcacagacaccttatgctgaatatgcatgtgaattcgaaatggttccgaatctcttcccatttagcacttgacggggaagcagttttcgttggacacatatgcgatgtgattgcgcagcgttttgatctgcttctgggcggcatcgaagctgtaggagagtgtgttcagttgaccctgcatctcgcggatgacagcctcccgatcgttgaccgacagcgaggcagttgctcggcactgagccaactccttctcaagccgattgatctgttcctgttgctgggacttgatcagctcggcccgttccttggtgccggctatgatcttggcggattcagttcgcagagtgtccagatcgtcttgggtggacttgagctgttcgcagaagagatccctctgtcggagaagctcctccagttcattcctggcctgagtcagttccatttggcactgggccagctgaggtcgcacatcgacgttgggttgctgctccatctgcgtcttgcaggccttgagctccttgcagaccaccaccagtttcgtctgcatctcatccttctccttgcaaacctgggccagcttcagctgctcgttctctaagagcttggggaagtgcagtaactcgttcagtttctcttggaacttagctcgaatctctttgacctccgtgttgatctgctgttcgattcgtttgttgttcatgttcagcttctctagggagacgcactgttcctcgaccttctgctgggccagcaggtacttgttgcggtagtcctctaactgctgcgactgctccttcatgatgcacttgaactccagctgctcctccttgagctcgttgacccgcgctcgaagtagattcagctcggcggcatcggcatccccgtcgccccctttcgatggacagggaccacagatacccttcattcgcttctgcatctccttcatctggcagtccttgcgctgaaactcggttagcagcctggtgtagttctccttcatcttctcgtacttgtcggccttggtgttccgctttccgccgcagatgaccagtgggtctggatcctcgggacacggcggcctgggaggacacggcctggagcaggggtcctcctctccttcatcgtcatcgtcgtcgacgtcacagggttcggacgcatcccgattgctcacctcctggagcaacttcttcaccgaggtctgcatgcattggatgcgccgcttcagtttctccaaggactcgcacttgcccggtggctggggctggggctgggggcagggagccttctgagccttccgtttggctggacagggaggaggacatggggcaatgctgctgctgctgctctccgggcaaggaccttggcaaggacccggacagggtggtggcggacagggacccggaacgcataccggctgcttcttgcagctcattatagcgcaggcgatctcttcgatcatcttcttgtcctcaggacaagcgcccttcatcttctgcatggccttttgcagagcgcagatcaacttgtcgtcctgaccagccatgtcccgttgacctccaccgcctccgccgccaccacaaacactggcacacgagctaggctcttcgctacagggatccgtggcgctgccagctggagcacaaggaccgatgccacacatatacggtgacaggttgtcctcgtcgacggtggtggtcatggccagctccttgtagtgccgatgggagccgaagttttgcagctgcaccgctctgttcatcatggtgtgcagcttaatgttctcctgctccatgcaaatcctcaaccgcttgatctcgcgcagttcgttgcgggtcttgcagggcttggcgcacatgtccatgatgttgctcttgatgtcctggatgatcttgttctggcaatcgatctccttgatcagcgccaggtactccatgtacatgcgcttctgctcgggatcgtcggaggactcgcccagcttggagaagaggtcctcgtcgggcccctcctccatcatgtgctgttcgccaaggtactggttctcatcgtcctcgtactcgccgccctcatcggtgtactctgtgttctctgccatcgcgatttagattcacttatcgatgcggccaaaaattgtatggttaaaatttttttttttttttttttatatttggctagatttactaacgattttaaggtacgtatattctgcgaaaattttaacacatactctgaaaaaatttcgaaacaagttttgggaagaataagttgttttcttcgtgatcgaataaaatgaactgaaaaatccacggacattcgccctgggcagttggcaacagatttggaatggcctgcttcgacttgggagaatcgaacgaaagatcccggagaactggattgggatcgaggacttgctttgtcgaggtggattaccggagtcctccctcccaggatggtcaggaatgtgtccttcgggaggagtgtgtatcgaggcatctattcggcgaaacaaacaactatatttactactgccgctacttgaattggttcaaaatcaaaacacagtgcgacttgaaggaaatggtatatcttaataaataattttaaatctattcgaaaatatgttatgagaatctacctgtatcctttactaacataaaagtatgaaaatgttttacggtgaaatgggaaatttaaagggcaatcagtaggaatatacatatataaattatcactctactgggagatgtggtttattatctaaaactattatataaaccttaaggatataatcaatcctcgaacagcgatattttccagaaggcaaatgccattcgagtaggcgtaacgcccaattttctatcaaataattttcgtcacgtcctacgtaaaattaatatttttgggaattgaatgtgtcacataaggtttttaaaaaaattctctgttcgccaaaaacagtgcaaaaaattacacaagtgcaacattaaccaaataggctaaattttcgtagatgttaaagccatccaggcgaccattagccaacagacaacgatcacttcgattccgtccacagaatcgcaaaggaacatcatcta

SEQ ID NO: 5969 - DNA, 2031 bp, DROSOPHILA
atggcagagaacacagagtacaccgatgagggcggcgagtacgaggacgatgagaaccagtaccttggcgaacagcacatgatggaggaggggcccgacgaggacctcttctccaagctgggcgagtcctccgacgatcccgagcagaagcgcatgtacatggagtacctggcgctgatcaaggagatcgattgccagaacaagatcatccaggacatcaagagcaacatcatggacatgtgcgccaagccctgcaagacccgcaacgaactgcgcgagatcaagcggttgaggatttgcatggagcaggagaacattaagctgcacaccatgatgaacagagcggtgcagctgcaaaacttcggctcccatcggcactacaaggagctggccatgaccaccaccgtcgacgaggacaacctgtcaccgtatatgtgtggcatcggtccttgtgctccagctggcagcgccacggatccctgtagcgaagagcctagctcgtgtgccagtgtttgtggtggcggcggaggcggtggaggtcaacgggacatggctggtcaggacgacaagttgatctgcgctctgcaaaaggccatgcagaagatgaagggcgcttgtcctgaggacaagaagatgatcgaagagatcgcctgcgctataatgagctgcaagaagcagccggtatgcgttccgggtccctgtccgccaccaccctgtccgggtccttgccaaggtccttgcccggagagcagcagcagcagcattgccccatgtcctcctccctgtccagccaaacggaaggctcagaaggctccctgcccccagccccagccccagccaccgggcaagtgcgagtccttggagaaactgaagcggcgcatccaatgcatgcagacctcggtgaagaagttgctccaggaggtgagcaatcgggatgcgtccgaaccctgtgacgtcgacgacgatgacgatgaaggagaggaggacccctgctccaggccgtgtcctcccaggccgccgtgtcccgaggatccagacccactggtcatctgcggcggaaagcggaacaccaaggccgacaagtacgagaagatgaaggagaactacaccaggctgctaaccgagtttcagcgcaaggactgccagatgaaggagatgcagaagcgaatgaagggtatctgtggtccctgtccatcgaaagggggcgacggggatgccgatgccgccgagctgaatctacttcgagcgcgggtcaacgagctcaaggaggagcagctggagttcaagtgcatcatgaaggagcagtcgcagcagttagaggactaccgcaacaagtacctgctggcccagcagaaggtcgaggaacagtgcgtctccctagagaagctgaacatgaacaacaaacgaatcgaacagcagatcaacacggaggtcaaagagattcgagctaagttccaagagaaactgaacgagttactgcacttccccaagctcttagagaacgagcagctgaagctggcccaggtttgcaaggagaaggatgagatgcagacgaaactggtggtggtctgcaaggagctcaaggcctgcaagacgcagatggagcagcaacccaacgtcgatgtgcgacctcagctggcccagtgccaaatggaactgactcaggccaggaatgaactggaggagcttctccgacagagggatctcttctgcgaacagctcaagtccacccaagacgatctggacactctgcgaactgaatccgccaagatcatagccggcaccaaggaacgggccgagctgatcaagtcccagcaacaggaacagatcaatcggcttgagaaggagttggctcagtgccgagcaactgcctcgctgtcggtcaacgatcgggaggctgtcatccgcgagatgcagggtcaactgaacacactctcctacagcttcgatgccgcccagaagcagatcaaaacgctgcgcaatcacatcgcatatgtgtccaacgaaaactgcttccccgtcaagtgctaa

SEQ ID NO: 5970 - protein, 676 aa, DROSOPHILA
MAENTEYTDEGGEYEDDENQYLGEQHMMEEGPDEDLFSKLGESSDDPEQKRMYMEYLALIKEIDCQNKIIQDIKSNIMDMCAKPCKTRNELREIKRLRICMEQENIKLHTMMNRAVQLQNFGSHRHYKELAMTTTVDEDNLSPYMCGIGPCAPAGSATDPCSEEPSSCASVCGGGGGGGGQRDMAGQDDKLICALQKAMQKMKGACPEDKKMIEEIACAIMSCKKQPVCVPGPCPPPPCPGPCQGPCPESSSSSIAPCPPPCPAKRKAQKAPCPQPQPQPPGKCESLEKLKRRIQCMQTSVKKLLQEVSNRDASEPCDVDDDDDEGEEDPCSRPCPPRPPCPEDPDPLVICGGKRNTKADKYEKMKENYTRLLTEFQRKDCQMKEMQKRMKGICGPCPSKGGDGDADAAELNLLRARVNELKEEQLEFKCIMKEQSQQLEDYRNKYLLAQQKVEEQCVSLEKLNMNNKRIEQQINTEVKEIRAKFQEKLNELLHFPKLLENEQLKLAQVCKEKDEMQTKLVVVCKELKACKTQMEQQPNVDVRPQLAQCQMELTQARNELEELLRQRDLFCEQLKSTQDDLDTLRTESAKIIAGTKERAELIKSQQQEQINRLEKELAQCRATASLSVNDREAVIREMQGQLNTLSYSFDAAQKQIKTLRNHIAYVSNENCFPVKC

SEQ ID NO: 5971 - DNA, 3593 bp, DROSOPHILA
agttctgtagtctcactgaaaatgcatttgtcaattcgactggtggggctgccggtgtgctttagccagaggcgcctgtaaaagaacggcttgataattaaacgttgaatggaaaaaatcactcacatggactcaaaggaatgtcggtgtgcttgaatttcgcccttcaccgtattctcgttggtgtttttgcaccaaccccggactcccagcttttgagctcttcgcaaggtgtactaaaacatggtaattggattacagtaaagagatttcacatatacaataagaggtagcagaaaatccatagctcaaaggggttttgaagatcccatttcccagcaagctcttaccattcgaaatgaaacgcctgttggtgccagataactaattattgcgactatacgatttgtgaataccctaccttgcacaatgccgaacacttcgaattggcagctgaagaccggctcatcgcttctgtccgatgttactcttttttggaactctgtgttcgaaattcggttgggctcctcgctgccttttttggatggtgtacctttatctggtgtcgaagatggaagagttaccctcctacgttcaccctcagtctgcgtttcttgggaggtcattttacaactcgtatatttaacatatttggagcggaaactgtcaaaaatcgataggtcgatagggattgagggttttattttgggtcaccttgaatttcaatggctttaaaaacagtacattttaaatgaaatgacttgaacaaggtaaaacaaaaacaatagcaaaagttacgttttcttattgtcaacaaatgaacacttatgttgaaaattcgacagcaatcctagagcggtatttttagatctagcttttttagccttttttaaatcgtcggtcgacccgatcagtctggttcgggctatcggggcatgtaagggtcaccctgtgttcaaggcggttcgttggaaccagttccgaactgtctttgaacaaaacaaaatcacccagacaaaatagtgaattacaaatattacgcagattctacatcaacgcactatgcataccgtgtacgcgcttctgaagaacaagctgagcgatgtgcatcccctacacaacatcgatctgacgcgggatgtggcctacctaaaggcggtggtgaccaaagagatgcacttgcaattcgacgccagcgagttgggtgagtgaccctcgggattcaaatcgctgtccattgtctctattgtgtcaagtcatttgctgcgcacttgcagagatcatccaccacggacgcgtgctggaggacgcagacaccctcaaccgaacgctgcagcccaacgccgtgatccactgctttcagaagattaaacgttactcgccgtatgtgccgccagccgccgccgaaatcaacacgaagcatattcaagagctgttttcgttgacctcgcacctgcaaatcagcgttacctcgcggttcaacattctgcagaagatactcgctgagtatccggaatttaggcgaaatctgggcgcccaggcccttattcgcgactccgtactgttcaacatgctgcacgagccggaagtggtccaaaatctcgttaaagattatcccctcatctgcgaggccgctccattcatagtggacaccattcgcaaggagctagccagaaatagctcggccacgcagtgtaactaatgccgtatctattcttgatttgtatattttacccgtttcttcctttttagtgcaggagcaagctgcttcggagtctactacttcgtcagaggaggaaaactctctgggtgcaggcagcagcagcagtggtggaagcagcagcacagccgtggcagctgccgcggccgccaatcggcgtgatgagatggccaacatccgtcagattagccgccagcaactggctaacgcattggctaacgtgaccccgtttaattcactgtcgaatattgcgcagagaaacgcggacgaggccgtgcagggtgatgaaagacctagaaccacctcggcgccattagcaggcgttggaggagcagcgggaacaggcgcaggaagcagcagtggagccatcagcagcggatccatatcctcagagttgctccgcaacgagctggcccgcgcttttcagtccctgtcgcaggatcaaccggcgcctgtggagaacatggaggtggagtccggagaaggaccagtaccagagcaagccgccacagcaccagccgatgatgtagatgacgaggacgatggtggagacgacagtgatgtgctgccacgccgctaccgtcgccatcggttcaccgaacaactgcgtaccatggccgccatgggcttcattaatcacactcagaacgttagttatctagaactttccgatgggaatgtggaacacgctattaatctgcttatgctgagcatgaattaataaggatcggaattgactaaaaagccaacataatgtgcttactttacggacttatatttattctgctgctgaggattctgaagcattaaactcccaacttaagcaaggaatatctcttaataacttttaataattaaatatacgtttagaggagtcatctttgtaagctaattggggtgggattgcggagtttgggcatgggggtaaaagccggccgtacaaaaggtttccactaaattatactagttgattagatagtccagcgccttgtccttattattgttgaacttgagtagcgccgccgagattttcgattcgtcaaaaccgaggtccagaagttctcccagtggaataaggtgttcgataatctgaaaagacgtcccagatcggaataatgcattttgcaaaagttttcgaaactgacttaccttcttatcgtcgataccgcatagactaaccacctttgccacccgttccagagggaaacccatagtactgatacgttgggccaacttctgtgccggaccagccagctccctaaaggagtttctgtccactgccaactccaccgttggctgctgctccgcgttgtgactgtgcaggcgggtacgacgcttctccgcctgctgcagctccgtcttcagctcccgcaggatgtcaggcacactccttgacttcgtggctacctcgtcctccgactggctgagcgcatgcacggaggaaggcgctggaggagccttcaaaaggttttgagtcccgaatccattgacttggtagttgctaaactgttggaaagaatgctgctgcggagggtagaagggctggtgactgtagccctgcatgtggtacacctgcgaaaataataattagcccatattttaaatcggagcgtctgaaaaaaacttattttcgattgaaataaaatattgggtatcggactaatacttggtttataagaccatgctaagatcgtactcaagctcagtcaaaatatattacaccctcaattgtggtactaattagtttgagcaatagccccaccctcgacttgtgatgagttatttatttttaggtaatctacctgcaaatgctcagaaatcatcccgattaaatggtatactgtgagtgaatgaacaatttcctcttttatta

SEQ ID NO: 5972 - DNA, 1462 bp, DROSOPHILA
acaaaatcacccagacaaaatagtgaattacaaatattacgcagattctacatcaacgcactatgcataccgtgtacgcgcttctgaagaacaagctgagcgatgtgcatcccctacacaacatcgatctgacgcgggatgtggcctacctaaaggcggtggtgaccaaagagatgcacttgcaattcgacgccagcgagttggagatcatccaccacggacgcgtgctggaggacgcagacaccctcaaccgaacgctgcagcccaacgccgtgatccactgctttcagaagattaaacgttactcgccgtatgtgccgccagccgccgccgaaatcaacacgaagcatattcaagagctgttttcgttgacctcgcacctgcaaatcagcgttacctcgcggttcaacattctgcagaagatactcgctgagtatccggaatttaggcgaaatctgggcgcccaggcccttattcgcgactccgtactgttcaacatgctgcacgagccggaagtggtccaaaatctcgttaaagattatcccctcatctgcgaggccgctccattcatagtggacaccattcgcaaggagctagccagaaatagctcggccacgcagttgcaggagcaagctgcttcggagtctactacttcgtcagaggaggaaaactctctgggtgcaggcagcagcagcagtggtggaagcagcagcacagccgtggcagctgccgcggccgccaatcggcgtgatgagatggccaacatccgtcagattagccgccagcaactggctaacgcattggctaacgtgaccccgtttaattcactgtcgaatattgcgcagagaaacgcggacgaggccgtgcagggtgatgaaagacctagaaccacctcggcgccattagcaggcgttggaggagcagcgggaacaggcgcaggaagcagcagtggagccatcagcagcggatccatatcctcagagttgctccgcaacgagctggcccgcgcttttcagtccctgtcgcaggatcaaccggcgcctgtggagaacatggaggtggagtccggagaaggaccagtaccagagcaagccgccacagcaccagccgatgatgtagatgacgaggacgatggtggagacgacagtgatgtgctgccacgccgctaccgtcgccatcggttcaccgaacaactgcgtaccatggccgccatgggcttcattaatcacactcagaacgttagttatctagaactttccgatgggaatgtggaacacgctattaatctgcttatgctgagcatgaattaataaggatcggaattgactaaaaagccaacataatgtgcttactttacggacttatatttattctgctgctgaggattctgaagcattaaactcccaacttaagcaaggaatatctcttaataacttttaataattaaatatacgtttagagg

SEQ ID NO: 5973 - protein, 415 aa, DROSOPHILA
MHTVYALLKNKLSDVHPLHNIDLTRDVAYLKAVVTKEMHLQFDASELEIIHHGRVLEDADTLNRTLQPNAVIHCFQKIKRYSPYVPPAAAEINTKHIQELFSLTSHLQISVTSRFNILQKILAEYPEFRRNLGAQALIRDSVLFNMLHEPEVVQNLVKDYPLICEAAPFIVDTIRKELARNSSATQLQEQAASESTTSSEEENSLGAGSSSSGGSSSTAVAAAAAANRRDEMANIRQISRQQLANALANVTPFNSLSNIAQRNADEAVQGDERPRTTSAPLAGVGGAAGTGAGSSSGAISSGSISSELLRNELARAFQSLSQDQPAPVENMEVESGEGPVPEQAATAPADDVDDEDDGGDDSDVLPRRYRRHRFTEQLRTMAAMGFINHTQNVSYLELSDGNVEHAINLLMLSMN

SEQ ID NO: 5974 - DNA, 4696 bp, DROSOPHILA
accacattgtcagatttgtcgagtcaatgggcctggccttcataaattgttaggctcattgccaatcgcaagtgagcgatttacaattaacaaatacccagagcccctctatttatagatatgtttatacatgggcatcgcaggcgctgatgaaaagatgcttcactccatccacatacacatccacatccacatccatattcatattcatatccatgtgcatattcgtttggccccccaattgaaacacttgtggctggccactcgatccactctccaaaaacgctctttcgaaaactggaacctattttcgaacactttatggcatgtaaatccgattccgattccaaatccgattccaattccgatcgagcgatcaatgcgtaatgggtttatttatggatctgggttgagcagttatgagctattttcgaatttctaagtttaaaataaggccatgaatgtactttgatacacatcgcatgggtgtgcatatatttttagactacaaacatacatatttacatctgcgcggattttggtgtgcgtgtcgaaagctaataaattaattgttgcgtaaaatcagattacatatgggttagttggttggatggatggttggttggttagttggttggttatacgggtagaaccttcgtgagaaacagcccattatatatttcgatttttccccaaaaatcttgcatgcctcgcacttgagagtgcagtagaacaaaacaaattacttcaagacgaggcaaattccttcccagtgggtgaagatatagtaatccaagttagtctaactggtctgttaccagcccaggaatgagacatcggggcgtggatatagccgagagtacacatacatagagccgtgggcattgcatgataaataaatgatatattcagaaagtgctgtttttattacgcaaactgtattttcttagttgtgccgtgtgcatccacaaatatagactacctgtgtacagaatctttccagtctagtccgcggcatttccgacgaataggaactacttcacagagtacctccgaggtatatatccttaggattatatatatatatatatacatatatatatgtgtgtatataattgaatcgcgctgatccaccacacgcatagccgctgcagtttgccataatcacagttttttgcccccgcagacacacacacgcactcagatcaaaatgcctttcgttcccgttgaaacccccaagtgccccgcgtgcggcaagtcggtctacgctgccgaggagcgcgttgccggaggctacaaattccacaagacctgcttcaagtgcagtaagtataaatgtcctgccagccagatcgtctggacttggtccttcgagtcggatgtcggatagctaacgcaaaaccctacccccctccccctccactcgcccgtttcaggcatgtgcaacaaggccctggactcgaccaactgcacggagcacgagaaggagcttttctgcaaaaactgccatggtcgcaaatacggtcccaagggatacggtttcggtggtggtgccggctgcctgtccacggacactggcgcccacttaaacagagagtaaggactaaataagaaatatgttttgtatgaaaattgtgtaaaattccttgaattaaatgtgtagttttgctttctattagaacctgtatgttttcaatgttttccacacgcccacccccaaaaaagcaaccgaaaaatttgtttttaactttccgggcagaaaccgccagggatatccagtttctgattccctggaaaattccactaacactaaccgattgttaatgttaaactagcaaacacattgtggtctttggtgaaataattcttgtatctttgtttacaacgtccgcggactgtaaattgataaaataaatgtacaataaaacaaagtagttgtaagcttattcacatgttatttataggtttctattcgcatctccctcgctgctgtctatgtggatttcgtgtatttccccaattcgttttttgttcgggcacaacgaccgacctttctgacttttgttcctcgtcttgtgtgtgactaagatgaaacaacccccccccccccccacattggatgtccaccgagagcgccgtaattgagggaggcatttgaatctttctagattcgttccgcccaagattcccccaaaagcacccgacgggctgggctgcccacggtgtggcatatatgtgtatgccgccgagcagatgctggccagaggaaaggtgaactattgaaacgatctcggtccgtcggcccttgtcttaggtggtgttctttatcgcagggttaccatcgaaggtgctttaagtgcgtgcaatgcaacaagactctagactcaactcttcactgtgatggtccggacaaggacatttactgtagaggtacatttccaacccatagattttagagaattaggatctctagaagcattcgcttttcaggatgttatgctcagaagtttggggccaggggttacgggcacatcggcatttcgtccttggggttgatgtccgacatcagggatagcgagtggcaaaggtgagattagtagtaacaccaattctggctaggttattatgttggtgcttgcagcgacatggctcccaaagcctccatcataaatgtggagcaaatccaggcgccaatcggagaaggatgcccacgttgtggcggcgtagtattcgccgcggaacaagttctctccaagggaaggagctggcaccggaagtgcttcaagtgtcgggactgcaccaaaactctggactccattatcgcgtgcgatggtccggacaatgaggtctactgcaagacttgctatggcaagaagtggggaccccatggctacggattcgcctgtggatccagtttcctgcaaaccgacggcattacgtgagtggtttccattccaaggctcatcttgaatttggataaaacaagctttcaatcatattcgtcaaaatccaatccataatttgactgaaagagatttgttacagtgaggagaacttggcatccgaacgaccctttgtggctccggacaccacttcgatcatggctccggacggcgagggatgtccccgatgtggcggagcggtctttgcggccgagctgcagctgtccaaggggaagatgtaccacaggaagtgcttcaactgcgccaggtgcacccgacccctggactcggtgctcgcctgtgacggaccggatgacaatatctattgcaagctctgctacgcgaagctctttggccccaaaggcgtcgggtacggacacacgcccaccctggtgtccaccaactacgagtacacgcccagctggtaagtccgttgtccagttcaaagagagttcgtctggatccaaggatctcttcttccagctggggaaccatcgatcgcaacggacaaaagtcggagaacgggtgtccgcgatgcggattcatggtcttcgccgcggaacaggtgaagagcgcgaagaacgtgtggcacaagctctgtttctactgcatggagtgccggaaatacctggactcgaccaatctgaacgacggacccgatggcggcatctattgccgatcgtgctacgccaagttctatgggccaaagggtgtgggctacggaatcggagctggcacactgacaatggcttaacaactcgaccaaaaaagcgcgttcaagaactaatcccaccagcatggaataagctccaagattcgtgctggggatttcagtccttgagcgcccacatttttgaggatgacgaataggtgtagtattgcaattccacaagagtgtacttttagctccaagacaacgacatttagttatgaaagtatagaaggcgaatgagttggcggtggttagtatagaaattgtataagtctcgaacataagtaccgaaaaatgcattctaaccttcgacttgaacttcatcgtaaaacctgcgaaaacgaatttccaaaccttgtttatcgaggatgcccaagaatccaaaggattggtgtgcaaatgcaaatgcacaccattttcaatcgataccgccattcgaaatcctttgaacttctgagttactccctatgatatgatatacatatatggcagtcgtagcaacaaatcaatatcctataagtttcgaacgactaataaacgacaagtggtaactttgtacatgtggttctgttgttttcaaatatttattatataataagtaataagtaacggtaggacagattacttggagagggtcaaagcgtcatctattgcaggagctctttattcaaaatatattaacgataatgctaagggtacatagtatgggaacggaagtggcgatcaccaggccgctgcccgagaacgtggagttgcagcagtcggcggagaagacaaggatcttggggtacagcgatctccagaagttgatccgctggttgttcagcaggttgtccgtgttgaagctctcgtcgatcagaagcactgaatcgttattgggggtcatggcgttccacttcacgtacacgttcgacttcgtggggttcgaggtcttggcgaagttcgcccacagggtcatgatgatgtcggcgatcttcttgtcggtcgacttccagtcaacggagttggtcatgtagggattgccccacacgaagatctggtc

SEQ ID NO: 5975 - DNA, 1542 bp, DROSOPHILA
cagtctagtccgcggcatttccgacgaataggaactacttcacagagtacctccgagacacacacacgcactcagatcaaaatgcctttcgttcccgttgaaacccccaagtgccccgcgtgcggcaagtcggtctacgctgccgaggagcgcgttgccggaggctacaaattccacaagacctgcttcaagtgcagcatgtgcaacaaggccctggactcgaccaactgcacggagcacgagaaggagcttttctgcaaaaactgccatggtcgcaaatacggtcccaagggatacggtttcggtggtggtgccggctgcctgtccacggacactggcgcccacttaaacagagaattcgttccgcccaagattcccccaaaagcacccgacgggctgggctgcccacggtgtggcatatatgtgtatgccgccgagcagatgctggccagaggaaagggttaccatcgaaggtgctttaagtgcgtgcaatgcaacaagactctagactcaactcttcactgtgatggtccggacaaggacatttactgtagaggatgttatgctcagaagtttggggccaggggttacgggcacatcggcatttcgtccttggggttgatgtccgacatcagggatagcgagtggcaaagcgacatggctcccaaagcctccatcataaatgtggagcaaatccaggcgccaatcggagaaggatgcccacgttgtggcggcgtagtattcgccgcggaacaagttctctccaagggaaggagctggcaccggaagtgcttcaagtgtcgggactgcaccaaaactctggactccattatcgcgtgcgatggtccggacaatgaggtctactgcaagacttgctatggcaagaagtggggaccccatggctacggattcgcctgtggatccagtttcctgcaaaccgacggcattactgaggagaacttggcatccgaacgaccctttgtggctccggacaccacttcgatcatggctccggacggcgagggatgtccccgatgtggcggagcggtctttgcggccgagctgcagctgtccaaggggaagatgtaccacaggaagtgcttcaactgcgccaggtgcacccgacccctggactcggtgctcgcctgtgacggaccggatgacaatatctattgcaagctctgctacgcgaagctctttggccccaaaggcgtcgggtacggacacacgcccaccctggtgtccaccaactacgagtacacgcccagctgctggggaaccatcgatcgcaacggacaaaagtcggagaacgggtgtccgcgatgcggattcatggtcttcgccgcggaacaggtgaagagcgcgaagaacgtgtggcacaagctctgtttctactgcatggagtgccggaaatacctggactcgaccaatctgaacgacggacccgatggcggcatctattgccgatcgtgctacgccaagttctatgggccaaagggtgtgggctacggaatcggagctggcacactgacaatggcttaa

SEQ ID NO: 5976 - protein, 486 aa, DROSOPHILA
MPFVPVETPKCPACGKSVYAAEERVAGGYKFHKTCFKCSMCNKALDSTNCTEHEKELFCKNCHGRKYGPKGYGFGGGAGCLSTDTGAHLNREFVPPKIPPKAPDGLGCPRCGIYVYAAEQMLARGKGYHRRCFKCVQCNKTLDSTLHCDGPDKDIYCRGCYAQKFGARGYGHIGISSLGLMSDIRDSEWQSDMAPKASIINVEQIQAPIGEGCPRCGGVVFAAEQVLSKGRSWHRKCFKCRDCTKTLDSIIACDGPDNEVYCKTCYGKKWGPHGYGFACGSSFLQTDGITEENLASERPFVAPDTTSIMAPDGEGCPRCGGAVFAAELQLSKGKMYHRKCFNCARCTRPLDSVLACDGPDDNIYCKLCYAKLFGPKGVGYGHTPTLVSTNYEYTPSCWGTIDRNGQKSENGCPRCGFMVFAAEQVKSAKNVWHKLCFYCMECRKYLDSTNLNDGPDGGIYCRSCYAKFYGPKGVGYGIGAGTLTMA

SEQ ID NO: 5977 - DNA, 7471 bp, DROSOPHILA
aataactgacactctcattttacgaagtcactcactcacaataggcgatttgacgtcaaaatgttattcaacccagactatcaaattctattatttcaataagaagattagttgtcacaaaaaaaagaaacaaattaataatgctgttaattagatggttagacttttgtaaaaggtgacaatctaactatatttttaatataaaggagcagattttgattgaatacatttcaactatgaattaatttttttattttttgcaaataatatttaagttatatatccattgctgcaaagtgaatggagaaaaacgaaagtgccaatgtaagaacatagcattgattagaccacttcagccgatccgcccaaagtttccactcaacgtaagttgtgcgatcacttcgccaatgccaaggctatgcaagtacatacatctgaattatgcaacgcctgatgttaatttctgtaagctaatttatcactaagcaaacacaacaatggcggagtccgttcagcggcaaagtaagccacgccaatgcacaaaaacttgtccctacgtatacgtaatgcaagtaattgcgtatacgccgcatgtaacacatgaacggtggacagtcacgatgaaagttggctgataagcctcccaatcaaaagcaaaacaattagatgcgatgcccactccatccctcacaaacggccaaggactcgtgcagcccgacacatcctcttaacgtggccaagtagactcatttccaacaacgcgacatgcgccggcgaagtgtgcgatatcctggagggtcgcgtgtttgaaatgctggctgcgtgctggcaacgtgtgcgaatccttctattgaagcggcgcattatgaaatggttccatcggattggttggcatcgtttgataattttttattgcgggtatttgaaatacatctagtcaaagcaatcgcataggaagaaattgatttcaaactatgttaactgtgcaggatatacgaatctagacaccactgtgctccttgatccaatcccgtgcgaaacttactcttgagtagacacccggatagtcgggcttagcgcaaccgtagccccagctaaccacgcccaccagctcgcccgattcactgaccatcggaccgccggaatcgccttggcacgcatcctttccgccttccagaaatccagcacagatcattcgctcggtgacgccgccgtactgtttgtacttctcgctgcaaagctcctgattgaccagaggcacctccacctgacgcagccactcgcgggactccagcaggttctgggtgttgccccaaccactcacgaagcaagcttccccgtccatgtatttcatctgagactcgggcagcttgaccgcctttttggtctcgtcaaacttgatgggatgagctagctgaagcagcgagaaatcgtagtccacattggtgtagttgaactgggcgtgctgcacgatcttctgcacccgcagaagttggccactgcgagcaaattcgctggttccgagtcgcactttcaggcgatctgccgttttaccactacgaaatcaggaggaatcatttttggcatactctctagagaagattccttgagcggcttacttactatgtgcaatgggcggcagtcaatatccactcctcggatataatagaaccgccgcaaatatgggacgaagtctgcagcgaaacctgatgtggtgcatcggtgatgttgatgcggtgaccgcccacaatacggccatccaggcggggtgatagcttccagggattctttataacatcctcaagcgatcgctgcctcttaacgggctgtggtattaaacaaacgccagccagaaccaacaggctgcactgcagcagtacaaacaagcggagagccaacatggttgtttaacataaaccgaaggtattcaatggcctaaggcagagtaaaaccttatataggaatgcttttcttggattagtgatagccacccagtgggtagaagacccgctgtgccatcactgcgcagcttatccaccagctgacacacaaaatgctcggaacacattcatttcggggtggcattggacacactctcatttaagaagtcacttggtttcctcgatgtttcagaataaagtcgttatctttcagttagcattcaattgtttaattgggtcacttgtaatgccccatgaaacagtcattgtaaaaggtttcaagttcagtcggagtcacataaggtaacttaaatggttcagcagctaacttaggaatatatcgtataccataatctatcgtaagttaaattgggcacaaccaactcacagtacattttaatagccattatttgtgttttacaacattttaatttcattctatgaataagttagtttggcttgtgatgccgttttgacctaatccaccacatagatcagattccttcccacttcggtcagttttccagcctgctccaggctcactttcttgttctccacatccagaacgaagtttccctcgccgagtacagactttcctgctttgtaatcctcaaagttgggaatttttcggggtcccagaacgggatcctcataccgccagatcttaagggtagccgcatccgttttaagtccaataatcttggagagcttctctcgcagagattggaccgtgtctccctcggatatgacagtgttgacctggaaaagcgacgagcgctcgataggattcgtgagctcaacgctcacatttggggccactgaaaagctgatgaagggagagccgggacgcacttcttcacgagttttctccggcgctgacggatcatcggtgtacttaatttccaagacatcaagctgaaaataaaccaaacgttaatttgagttgctaactcatcaagcaatagaaactacttacatccagtgtgttcttcaggtactccaaattgctgatcaacacctgacgctcatcgaactccaaagtcacggccaatgcagccacacccttgccggactccaccttttcgcgaatcatctgggcaaagggcatcactcgtttcatgaacttctttaactcggccttttgctgcagtgtagcagcgatgactttgttatctggaagggcctgcgatttgttaaacaactccttcatggtatcgaggacacagcactgccaaggaggataggtcttggcgacccaaacgagccctcgattcggtttcgctgcctggacattcacagatttatcttttccggccttgcccttgatttgcagcaagttcttgaggttcagacggaacgagtgagcggcttccatgaggtactccgagcacaggatatcgacttcgttgatggctcccacttctggccaccgagcatgaacaatggactccttgttacccagcagtccccagacatgctccgccatatgggggcaaataggggataccaaaagagcttgtctgcgaatgaactccagaaccagatcttcatgcattccatttgcgccacacagctccctgtacttgtccctggccaactgcagttcgtagaagccactccttagagcctccttgaacaacatctttcggtaattctcatcggtttgctgcgttttcaaattgagttcactcaggaaaacttgatcgttgaaggttttatcagtgccctttctcagactgctcctgttttccaacatctctttgacccactcaatgaaagtgtatagacgcagaataccagcatccgcagtgctctccacgaaattggcatcctccacactgtcgccggcatcagctaaacaaaggcgcatgccatccgcagagaatttgtccacagcttcggtcagagttaggaagtttccgtccgatttggacatcttggcagaattcagcagcagatgaccattgacacgcattcctttgggccacttgttttcatcattaggccaaatggcagcgtgattgtaaaggcagaaggtcaagtggttctggataagatctttgccagaaacacggagatccattggataccagtactcaaactcgcgtcgcagaactgccagatgttcctgtttaatggccgtcttttttggcagtggggtttccttaaagaaaatatagtcccagatttcgccagtcatgtcggacggtttgatgcctgtgaaagtgtaaatgtaaatgttccaaatcattagtggcagcaattcaacctaccaaaaggtcctggtttctctccacggaaagtaccaccctggagcaggtgcaccacggtataaaaggccatgtatatggtagagtcggagagagattcaatcagccacttgtcgtcccaaggtagtttggttccaaggccgtatgttctggagcaagcgtactcgtgcagccagttcaaacatgcttcgaaattattgcgcgcctcctcgtggaaggtttccatgccgtgcaagatcttggtggcctgggcctgccattcaggctcaccgtagttgaggtaccactggttgcatagagctaccacgcactcgtcagctgaacgagacataatggtcttctccggctcgtaatagacatccgcttcgttggcatcgaccaaacgtttctgcagatccttcttcacgtcctgaatcttgcgaccggcaaatgcacccaccaacattactccgtcatagaaacctgtaagtggaagatgtaatttagaaccagaaactagaatgggctctactactacttactcttcagataacacatttccttagcttcagccagcttatccttgtcgttctgtgattgaattttaagggtttcataggcatggacggcagacagtttgcctaacgtaggtacttcgatgatggggatgggctcgtaaggcagtaccatttcatctttcagtccatacttctggcggaacgcttccttcttttggagatccaccaaagcagcgtaatcatcaggagaatcggaggggactgatgtgaccacgccagttcccttatcctccttgatactcagcatgggcaaggagtagacaaccttgtgcttggtcagaggagccgaaaggggaactcccaatagatcttgaccagttacctcagccaacaccttaatctcgccttccacggcagtgaatccctggtaagtcatatttctagcagccctacgcgtgctgacccacacttcgttgtttttgtttgcctgccacgcgatatacttgatgtccggatgcaaccagcagttggtctgcccgtacatggtctccggacgcagagtggcagccaccatgaaaattggctgcttgatggagctaggattaggttaggaataaaacttttataatttaagatcatctcaaaaataaatcccattcttaccttaaagcctttggcacctccagcaccttcatcttgatgagggtgtactcctgaggacccactccctcgcccgaggagcgatcgtggtccatgcacggctgcccatccttgggcgaatatatggtataccgcttgccgtacatgatcttgccccgctccttcaggtggttgaactgccagcgcacgaacgagtcgaaatagggattggcatccgtggtgatgaatgtacgcctccagtccacgtgcacgccgatccgcttgagatcctgcaccgccagcggtgggaagtagttaagccagtgttcggcattggcaaagtccttgatttcctcgtccttcagtccgagactctgcataatttgccattggtatttggcagcgccggttttggcaaccgctttgctcttctttcccttggacttgtccttgggcacctcggatgcggcttctgcggcaacggggaccacttcctcggtctcggggaactgtggtggaaagccgaactgctccagttcgcgcgttaacttgtccgcacaagccttgatgggcatgccggtgcagtggaatccgaagggccagagtacgcgccgtcccttcaggcgatggtagcgcatcgagtactccgcctttgacaacgagaaggtgtggcccaggtggaggcgtccgttcatgtagggaaacggaaaggtcacgaagaacttctctgcctgccgcttctttggggccgtcggcgcgtccgactcgtgcactcgctccgcctcccatcgctgctgcacctcccgctcgatcttctgtagatactccaccttaaaggtgcccttgcgctcggttgtggcctgttatggtaaaaaaagtaaacttattagcatattaattgcctttcaaatgcagaaatgccgcggccaattgcatcagccggctcgtcctcgtggcagttcctgtgactcatcgatttatgggggattcccattcccgggccaatgctcaccatagcttagttctcaatgatattcgtaattgtttagaacaatttcttcattcaaatcgtggcactagcaaaaaacttaatatgtttcgagcagtgcaacgtgttgcggccagtgtggcagcagaataggcggcgcaaaatactgactattaaaatacaaattttaattcatttcataattttatataacatgcctcatatttatagaatttaataattaaaaattaaaagaattagttggaaaacatttaacaggcgtgtgcttattgggaataccgaattgcattcaaactaaaaggcactaacgcgttttattcttcaatctgcacgcgactgtcacactaaccatttaacctagtttttttttcttaattagtgtgaaaagttttaggacatttaaataaattataacttaagtgaaccgactagattacgccatcgtactacccccaagatgcgaccagtatttgccttcctgctcctggcgctcatctgcttcgccagcactaagtcggagagcgacttcgaggaagacgacagtgatgattttgccgaattcgacgacggcaatttttacgctgagccagcggccaagaatgcagattcgttctccggaggagcaggatccagccacggcgagtcccgcgacgatccgcctgccaaggagccgcggaagcaagcacaaaaccaggagagcgacgaggaggacggccttgtcgaggatgacgatgagtttgagcacttccaggtaaacaaagtcggctgttcgatgagaagaggtcaaatgcggttaggaactttgatcaagaatatgcccagtgaaatgtaactaggctttcctataggtggccttgtgttcctttacttccttcataaaatacttggtcataagggtgcataaagaaccattgggaacatttaatacattgcttttaaacagctttcaccatgatgacatggaattttgccgtaccttactttaaatcttctttaatgtgaagtgcttctacaaatctgtaatcgttagatagtcattgaattatgtaacgtagaaagcagttgtagtttatacactttgtcggaaccctcataacttgtacttcgaaatcaggg

SEQ ID NO: 5978 - DNA, 4409 bp, DROSOPHILA
ctggccgcaacacgttgcactgctcgaaacatattaagttttttgctagtgccacgatttgaatgaagaaattgttctaaacaattacgaatatcattgagaactaagctatggccacaaccgagcgcaagggcacctttaaggtggagtatctacagaagatcgagcgggaggtgcagcagcgatgggaggcggagcgagtgcacgagtcggacgcgccgacggccccaaagaagcggcaggcagagaagttcttcgtgacctttccgtttccctacatgaacggacgcctccacctgggccacaccttctcgttgtcaaaggcggagtactcgatgcgctaccatcgcctgaagggacggcgcgtactctggcccttcggattccactgcaccggcatgcccatcaaggcttgtgcggacaagttaacgcgcgaactggagcagttcggctttccaccacagttccccgagaccgaggaagtggtccccgttgccgcagaagccgcatccgaggtgcccaaggacaagtccaagggaaagaagagcaaagcggttgccaaaaccggcgctgccaaataccaatggcaaattatgcagagtctcggactgaaggacgaggaaatcaaggactttgccaatgccgaacactggcttaactacttcccaccgctggcggtgcaggatctcaagcggatcggcgtgcacgtggactggaggcgtacattcatcaccacggatgccaatccctatttcgactcgttcgtgcgctggcagttcaaccacctgaaggagcggggcaagatcatgtacggcaagcggtataccatatattcgcccaaggatgggcagccgtgcatggaccacgatcgctcctcgggcgagggagtgggtcctcaggagtacaccctcatcaagatgaaggtgctggaggtgccaaaggctttaagctccatcaagcagccaattttcatggtggctgccactctgcgtccggagaccatgtacgggcagaccaactgctggttgcatccggacatcaagtatatcgcgtggcaggcaaacaaaaacaacgaagtgtgggtcagcacgcgtagggctgctagaaatatgacttaccagggattcactgccgtggaaggcgagattaaggtgttggctgaggtaactggtcaagatctattgggagttcccctttcggctcctctgaccaagcacaaggttgtctactccttgcccatgctgagtatcaaggaggataagggaactggcgtggtcacatcagtcccctccgattctcctgatgattacgctgctttggtggatctccaaaagaaggaagcgttccgccagaagtatggactgaaagatgaaatggtactgccttacgagcccatccccatcatcgaagtacctacgttaggcaaactgtctgccgtccatgcctatgaaacccttaaaattcaatcacagaacgacaaggataagctggctgaagctaaggaaatgtgttatctgaagagtttctatgacggagtaatgttggtgggtgcatttgccggtcgcaagattcaggacgtgaagaaggatctgcagaaacgtttggtcgatgccaacgaagcggatgtctattacgagccggagaagaccattatgtctcgttcagctgacgagtgcgtggtagctctatgcaaccagtggtacctcaactacggtgagcctgaatggcaggcccaggccaccaagatcttgcacggcatggaaaccttccacgaggaggcgcgcaataatttcgaagcatgtttgaactggctgcacgagtacgcttgctccagaacatacggccttggaaccaaactaccttgggacgacaagtggctgattgaatctctctccgactctaccatatacatggccttttataccgtggtgcacctgctccagggtggtactttccgtggagagaaaccaggaccttttggcatcaaaccgtccgacatgactggcgaaatctgggactatattttctttaaggaaaccccactgccaaaaaagacggccattaaacaggaacatctggcagttctgcgacgcgagtttgagtactggtatccaatggatctccgtgtttctggcaaagatcttatccagaaccacttgaccttctgcctttacaatcacgctgccatttggcctaatgatgaaaacaagtggcccaaaggaatgcgtgtcaatggtcatctgctgctgaattctgccaagatgtccaaatcggacggaaacttcctaactctgaccgaagctgtggacaaattctctgcggatggcatgcgcctttgtttagctgatgccggcgacagtgtggaggatgccaatttcgtggagagcactgcggatgctggtattctgcgtctatacactttcattgagtgggtcaaagagatgttggaaaacaggagcagtctgagaaagggcactgataaaaccttcaacgatcaagttttcctgagtgaactcaatttgaaaacgcagcaaaccgatgagaattaccgaaagatgttgttcaaggaggctctaaggagtggcttctacgaactgcagttggccagggacaagtacagggagctgtgtggcgcaaatggaatgcatgaagatctggttctggagttcattcgcagacaagctcttttggtatcccctatttgcccccatatggcggagcatgtctggggactgctgggtaacaaggagtccattgttcatgctcggtggccagaagtgggagccatcaacgaagtcgatatcctgtgctcggagtacctcatggaagccgctcactcgttccgtctgaacctcaagaacttgctgcaaatcaagggcaaggccggaaaagataaatctgtgaatgtccaggcagcgaaaccgaatcgagggctcgtttgggtcgccaagacctatcctccttggcagtgctgtgtcctcgataccatgaaggagttgtttaacaaatcgcaggcccttccagataacaaagtcatcgctgctacactgcagcaaaaggccgagttaaagaagttcatgaaacgagtgatgccctttgcccagatgattcgcgaaaaggtggagtccggcaagggtgtggctgcattggccgtgactttggagttcgatgagcgtcaggtgttgatcagcaatttggagtacctgaagaacacactggatcttgatgtcttggaaattaagtacaccgatgatccgtcagcgccggagaaaactcgtgaagaagtgcgtcccggctctcccttcatcagcttttcagtggccccaaatgtgagcgttgagctcacgaatcctatcgagcgctcgtcgcttttccaggtcaacactgtcatatccgagggagacacggtccaatctctgcgagagaagctctccaagattattggacttaaaacggatgcggctacccttaagatctggcggtatgaggatcccgttctgggaccccgaaaaattcccaactttgaggattacaaagcaggaaagtctgtactcggcgagggaaacttcgttctggatgtggagaacaagaaagtgagcctggagcaggctggaaaactgaccgaagtgggaaggaatctgatctatgtgcccgttaagaggcagcgatcgcttgaggatgttataaagaatccctggaagctatcaccccgcctggatggccgtattgtgggcggtcaccgcatcaacatcaccgatgcaccacatcaggtttcgctgcagacttcgtcccatatttgcggcggttctattatatccgaggagtggatattgactgccgcccattgcacatatggtaaaacggcagatcgcctgaaagtgcgactcggaaccagcgaatttgctcgcagtggccaacttctgcgggtgcagaagatcgtgcagcacgcccagttcaactacaccaatgtggactacgatttctcgctgcttcagctagctcatcccatcaagtttgacgagaccaaaaaggcggtcaagctgcccgagtctcagatgaaatacatggacggggaagcttgcttcgtgagtggttggggcaacacccagaacctgctggagtcccgcgagtggctgcgtcaggtggaggtgcctctggtcaatcaggagctttgcagcgagaagtacaaacagtacggcggcgtcaccgagcgaatgatctgtgctggatttctggaaggcggaaaggatgcgtgccaaggcgattccggcggtccgatggtcagtgaatcgggcgagctggtgggcgtggttagctggggctacggttgcgctaagcccgactatccgggtgtctactcaagagtaagtttcgcacgggattggatcaaggagcacagtggtgtctag

SEQ ID NO: 5979 - protein, 1376 aa, DROSOPHILA
MNGRLHLGHTFSLSKAEYSMRYHRLKGRRVLWPFGFHCTGMPIKACADKLTRELEQFGFPPQFPETEEVVPVAAEAASEVPKDKSKGKKSKAVAKTGAAKYQWQIMQSLGLKDEEIKDFANAEHWLNYFPPLAVQDLKRIGVHVDWRRTFITTDANPYFDSFVRWQFNHLKERGKIMYGKRYTIYSPKDGQPCMDHDRSSGEGVGPQEYTLIKMKVLEVPKALSSIKQPIFMVAATLRPETMYGQTNCWLHPDIKYIAWQANKNNEVWVSTRRAARNMTYQGFTAVEGEIKVLAEVTGQDLLGVPLSAPLTKHKVVYSLPMLSIKEDKGTGVVTSVPSDSPDDYAALVDLQKKEAFRQKYGLKDEMVLPYEPIPIIEVPTLGKLSAVHAYETLKIQSQNDKDKLAEAKEMCYLKSFYDGVMLVGAFAGRKIQDVKKDLQKRLVDANEADVYYEPEKTIMSRSADECVVALCNQWYLNYGEPEWQAQATKILHGMETFHEEARNNFEACLNWLHEYACSRTYGLGTKLPWDDKWLIESLSDSTIYMAFYTVVHLLQGGTFRGEKPGPFGIKPSDMTGEIWDYIFFKETPLPKKTAIKQEHLAVLRREFEYWYPMDLRVSGKDLIQNHLTFCLYNHAAIWPNDENKWPKGMRVNGHLLLNSAKMSKSDGNFLTLTEAVDKFSADGMRLCLADAGDSVEDANFVESTADAGILRLYTFIEWVKEMLENRSSLRKGTDKTFNDQVFLSELNLKTQQTDENYRKMLFKEALRSGFYELQLARDKYRELCGANGMHEDLVLEFIRRQALLVSPICPHMAEHVWGLLGNKESIVHARWPEVGAINEVDILCSEYLMEAAHSFRLNLKNLLQIKGKAGKDKSVNVQAAKPNRGLVWVAKTYPPWQCCVLDTMKELFNKSQALPDNKVIAATLQQKAELKKFMKRVMPFAQMIREKVESGKGVAALAVTLEFDERQVLISNLEYLKNTLDLDVLEIKYTDDPSAPEKTREEVRPGSPFISFSVAPNVSVELTNPIERSSLFQVNTVISEGDTVQSLREKLSKIIGLKTDAATLKIWRYEDPVLGPRKIPNFEDYKAGKSVLGEGNFVLDVENKKVSLEQAGKLTEVGRNLIYVPVKRQRSLEDVIKNPWKLSPRLDGRIVGGHRINITDAPHQVSLQTSSHICGGSIISEEWILTAAHCTYGKTADRLKVRLGTSEFARSGQLLRVQKIVQHAQFNYTNVDYDFSLLQLAHPIKFDETKKAVKLPESQMKYMDGEACFVSGWGNTQNLLESREWLRQVEVPLVNQELCSEKYKQYGGVTERMICAGFLEGGKDACQGDSGGPMVSESGELVGVVSWGYGCAKPDYPGVYSRVSFARDWIKEHSGV

SEQ ID NO: 5980 - DNA, 2709 bp, DROSOPHILA
tgaatcggtttatggggcagggaacagttggggtagtgactctatgaccgcctttggctgtgctgatctcctctaggcgcgatttgtgtcggacagcacgcggacaatgcagcccactcctcccttggcgaaggccttctcatgccactgcagcaggtggccactggagccctccgaggggatctcgaatccccgatatatgtacttcatcagcacgtctattaggtcgttctggtccaaggtgtcgatggcctggtccatttgcgtcgacttgatggacagcagcacccgcagcgtgatgttcagggcgtggtcctgcaatgcaaggaaggattagctttatagggttctcgatacgaataggtgtggctacccaccttcacattctggttcttgcagcgcagcggggcattctgcagcgcactcaggagcgcctccacggattttccctgcgtcagcagcgtcgtaatctcgctctcatccggaccggctgccgcgctctccaccccatcatcctcccggaagttgtcctcattgtactggtccacatcgatcttgcggaacgcgttgctggacgtgtttttggccatgttttcgctaaattcccaccacttttctctacaaaaatatgaatcacaaaatccggcaaggcaaaacagatgagtggcagtgtggccgaacctcagaaaatactagctgcagtattattaccaaagcgccaataatgcacaggatacatccaagcaacaaaaaacatgagtttcacaatcacttatctcagcaaatgaaagtctaatgagctttaaaaatattttgagagtaggtttcgaccaatcttgttccatttttacttcaaagaatatgattgatatgattcagtatttctagctggtgcttttgacctctcctggccacactgcagattgactttgtttttgtttcaagtgagtccaagaaaatcgaaattatttacgtttaatatatttctgggttttcccggcagcatggcaaagtttttgggcatcaaccggctgacaaagctgttccagatggtccgcgaagccggaggactgaagcaagcgtacctgaagctctataggtgagtctcgatcttatataagattgctccaatcctgaaaaccgcatatgcgctattttccaggaacgatgatctgaagatcggaaccctggtgggcatcgacaagtacggcaacaagtacttcgagaacccgtactacttctacggccgcaatcgctggatcgagttcgccccccacgtcaacatggactacgatggatccatgattcccgccgagtggtacggctggatgcactacaaggtgggtttagactacatcttgtcgcacatgttattacctttttccttatagaccgatctgcctcccattcgcgatggatgccgccccaagtacaagtggatagcggaccacagcgagaatctttccggaactaagggtaactatgcactattcccattaagtaagccccctaattcaatcctgctcttgcagaggcctactacccctactccacaacacccaacaaagtggaggcctgggaacccaaggcgaagaagcagtagtgtggcatagcttataattatttttaaattcaagtgcaaatggctgcgattgatgagaacacccgatcgagttaataaacccaattttgttgactctgcactcgaagaacaattttagcaatggacagaaaagtgaagtaactctgcctattcccatattattcaggttttgaattggtttcatcttgtctttattcaatcacagctagattatataactttacttttacttttagcaggacctactacgaatatatacaatgtctttctgcgcctttcgtggcgcgtcgttgagaagagcttgatcatagctggattatatctagccaatagttgtccactccatgctaatactcctccttgatggcgaccttctgggccttcttggcccgcctcttgtacttcttggcggtatccgcacacttggtagtgatggtggcccgaatcacccgttccttgccgcccgtccggtttctcacacagaccacgatgtcgtccaccttgcgttggtctaactggagctttgggggtctttcgcggccgtagaatgcgggcgacggcttcccggtcagcgtgtgggtagccaactcatcgctgctgaagacaacgcaaagaagacacctcgtggccaccggggcgttggtccagaagacctcaccgtactgatgggctgtgatctgggtgccattgggtcccagtacgtacaccgcactgccgtcctccttttgcactcggtgcgggtactgcacaagagtgtctttctcgtccttttcagaggcagtatctgggatgtgcgattccgacgaactggtggacatgtggcgcggtctcttggagggcggcgcgggcacatcctcggcatcgttgtcgtaccgctgattcagggtctttagcatggaagtgagacgaccaaagagttgttcgtagtggtgctgactcttctggattttggccacttgctgcttaaaggattcctccaggcgaggcagtggctccacccgcggttcgatgttcttaatgcccccggaagcggtggctaccgctaccaactgggcattgatgacgcgtcgcttgggcggagagcttcggcggactggcactgcctt

SEQ ID NO: 5981 - DNA, 539 bp, DROSOPHILA
cagcatggcaaagtttttgggcatcaaccggctgacaaagctgttccagatggtccgcgaagccggaggactgaagcaagcgtacctgaagctctataggaacgatgatctgaagatcggaaccctggtgggcatcgacaagtacggcaacaagtacttcgagaacccgtactacttctacggccgcaatcgctggatcgagttcgccccccacgtcaacatggactacgatggatccatgattcccgccgagtggtacggctggatgcactacaagaccgatctgcctcccattcgcgatggatgccgccccaagtacaagtggatagcggaccacagcgagaatctttccggaactaaggaggcctactacccctactccacaacacccaacaaagtggaggcctgggaacccaaggcgaagaagcagtagtgtggcatagcttataattatttttaaattcaagtgcaaatggctgcgattgatgagaacacccgatcgagttaataaacccaattttgttgactctgcactcgaa

SEQ ID NO: 5982 - protein, 142 aa, DROSOPHILA
MAKFLGINRLTKLFQMVREAGGLKQAYLKLYRNDDLKIGTLVGIDKYGNKYFENPYYFYGRNRWIEFAPHVNMDYDGSMIPAEWYGWMHYKTDLPPIRDGCRPKYKWIADHSENLSGTKEAYYPYSTTPNKVEAWEPKAKKQ

SEQ ID NO: 5983 - DNA, 2489 bp, DROSOPHILA
gctgccgttgacacccacccaaccccctgcaccagtcatttaacaacaatcacagtttctgattttattttgtgcttcgttgttgctttttgcgctaaatcacacacgcacacacactcactgcaaacgctgagcttttgaagcaagcgagatagcaagagtggaccggctgcagcatcttatgaaaaataataattgctttaatcgtttttgcaagtgtaaaacccgatctatttcacagtgttgttatccaatcacacatgtgtgtgtgcgtccagcccacacacccactatttgtattatcaattgcactttatcaacgcaagttaaaccgaactctatgtttatgtattcaaatgttaggggcttactttacttcctgcggcaaggaaataaataatattaaaacaaaatgcgcacggtccgcccgcagacaacttgttcgcacgattgttgatgaattaattgcaagcatatgtttttttatttaacagtgcgctgcctacgaaaaggcactaaataatgccaaaaaatagtattgtaaaagacgaagtagatggagtgcagcttaaaaatgagtaacttatacaacttattgtcgcaacaagtagctaatttatggaattttagtttaattagttttggttgaatttagttttatttcgaataaataaaaacagctgtgtatcagtgtgcacacaccacgatttcttcagttatcgataagaaaccaatcggccggggaccgtcgccaacattctatgtgcgcattaaattaacttgttacctttaaaaccctcgtttcttaaccaaaaaaaggtaaagttaagcaacaaattactgtaacagtatataaattaacattcaaatgcattacaggttttaggaaacacctagcagcagcagcagaatctaaaaccccattggcaaccaaaacacgtgccaaaacaaacgattaaattttccgtaaaagttgtaaatataaaaaaaagtcagcaagatgggaatggtatcgaaacgcaagaagatgcactatggcgatacccatctgcagaggagatggcgtgtgcggaatcgacgtcgtgatctcgaccagatcgacgacgatctgcagacccggagcggtgaactgatcaatcagaatgtggatctcgacaagccgggattcgcgcagttctactgcgtgcactgtgccaagtacttcatcgatgacaccgccatgcaggcacatttccgcaccaaggtgcacaagaggcgtctcaaggccctagagatcgagccgtacagcatcgaggaggcggaacgcgccgcgggacgtggcagcttcgtgaagcccaagaagcgggcgatggaaacgcagccatcgaaggaggacgtggtcgctggcaagaggatccgagtggaagtggtgcccgaggatacagatgccaccgattcgccatcgacgtccaaaacgaagcgcaagaaagtcgagaaaatggagacataggcgaggaggatgaaccaatctattgatctagcttagtttttaaggccctcggggacaggactttcttcacccccctcccacagaactctgtttacctccaattgctttctttaaatacattttttttccaacatatataaatcgattcaaaattaattttcatttaatgcgcgcaagggtggcgaaagatcaacaagcttctaaacaacaagcagttcaacgcttccaagcggcaaagctttatttaccgttcttttgatttctctcctgcagctcaaaagttcaagttctctccgcaagcggtcactttcttcgtccgtgagcagcggtaaacacaaaatgcgatggctgacgcgctttaaaattaaaattaaataaatatcagcgtcgtttgctgtcgaaaagtgctacaaagtgtaattaaccagtgagcgcaggtcgacgcaatgcgtttgatacggtatttctagtttaaacgggtgaaattggtaaatttctgcaatttcctcattctcctttgggctcattctccgttggcgcgtgtgtgggtgtgttggtgcgtgttcaactggcattctcatgtgcacttaagagtatgctacgttttagagcggtgatcttgtgcattttgccatcgcgagtgttttgttgtgaaatggctcatcaaaatgtgagagtatttgtgtttttttttatatttttttttaggtgatttgtgctcaataaatgtgaaattaaataatgtacaactttaattgcatggatttattttgaaaagggtgagtcatttaaatttacactttaattttatgagtcctatatttgcaactgaaatataatgaataatttaacgtacggtaacaacaatatgcgtactaaaatccccaagcatttgtttgtttaagcaaataaagaataatttgcacaaatttccatttttggagcaaagaaaatcaaggccttcattcaatcttcacggtataaatatatgtatttgtcg

SEQ ID NO: 5984 - DNA, 489 bp, DROSOPHILA
atgggaatggtatcgaaacgcaagaagatgcactatggcgatacccatctgcagaggagatggcgtgtgcggaatcgacgtcgtgatctcgaccagatcgacgacgatctgcagacccggagcggtgaactgatcaatcagaatgtggatctcgacaagccgggattcgcgcagttctactgcgtgcactgtgccaagtacttcatcgatgacaccgccatgcaggcacatttccgcaccaaggtgcacaagaggcgtctcaaggccctagagatcgagccgtacagcatcgaggaggcggaacgcgccgcgggacgtggcagcttcgtgaagcccaagaagcgggcgatggaaacgcagccatcgaaggaggacgtggtcgctggcaagaggatccgagtggaagtggtgcccgaggatacagatgccaccgattcgccatcgacgtccaaaacgaagcgcaagaaagtcgagaaaatggagacatag

SEQ ID NO: 5985 - protein, 162 aa, DROSOPHILA
MGMVSKRKKMHYGDTHLQRRWRVRNRRRDLDQIDDDLQTRSGELINQNVDLDKPGFAQFYCVHCAKYFIDDTAMQAHFRTKVHKRRLKALEIEPYSIEEAERAAGRGSFVKPKKRAMETQPSKEDVVAGKRIRVEVVPEDTDATDSPSTSKTKRKKVEKMET

SEQ ID NO: 5986 - DNA, 3070 bp, DROSOPHILA
tctggaaagtgcgaaaaaaggtgggccacactttgatcgaaattgaatcaaccaacatcaaagggattcgatttcagaaaaattccagcgactgttgcatacttatgggttacctttgccattcataacttacacgggccataaaatatttaacaaaatcgttacacaattgatttaaatgggatagaatggttcgataaatatgtacaacaaattacaaattaattacaattcaaaatggccgcaggcagccgcaattatgtgatttatgcgccggctgtgcatcagaaatcacgcatacgcctcgtatgccaccctcattttgccaatgcctttggccattgcaattgaacacataataaataaagttgcttgtttttctacacacacacaaacgcacccacactcggatgttatttgtgttttcccagattattaaagttattttctttggccgccccgcccgcagtttcacctgctggcacttttccttgccttggaaccttttgtttatgtttacacacatgaatgtataaattacgatgccaggtttttgtaaacaaaacgagttttgcctgcgggccgacagaacggagaccccgcctccgggccaccggcttctcccgttggccacatttaaatatttgcgcacggaattattttccctggcataaagtgtggccaggtagacgttttacaaagtcaaacaaaagctaccacctccacctcattcgcctgccgagctgttaacctctgaccccgcctcatgtattcccccttgtcagaacgatttgtgtccccattttcatcccgccgtctttaccccacccactcggtcattgggaattttaattaaatttaaatgaagatttattacacttttctttggggtctgcccgaccttcaattgtccttcgattaagccgcaattgaaagcaaaataatcgattcaaaaacaagagcaataaaatataaaatataaaatattgaacgaacaaacctaataaagcctcttctccctcatggacggcggtggtccattggtcgccgtagctgtagatccactatccgactcaaagcccgtgggtcgcgaaaacggtctcggacggatgatgacaaagtggcagaccagtttggcgtccaccaccagaacagctccgcagttatcaaagatgtcgcagtagttcggggccgagaaaatggtgaccaactggcggtcggcgaagaactcgtagccatcctcgaccacttggtgggcgcggacaatcaggttaaacttgtgctgcatgaggaagccctccactatgttggctccaaaggtgaagctgacacctcgatcgttggacgcccacgttccggtggtctcatccggatccgaccaaagcaaatcgcacagcagcccatcgctgggcacatcggtggggcgattcagccgccggatgtcatccaggttattcagatccggactcagtccgccgtggacgcaaaagatgcgatcggctatgatggcggccactggcatgcagtcatagcaatcgacaaaggagcgccacaacttgatgctatatcgtcgcttgcactcgtcgaaaaacccatatacccgattcaaatccgccgattcatgattgccgcgcagcaggaagaaagtctccggatagcgaagcttataggtcaacagcagcgataaagtctcgatggagcagtgaccccgatccacgtaatccccaaggaataggtagtttgaaagcggtggcacaccgcactgctggaatatcctcaatagatccttgaactgaccgtgcagatccccgcagatctttaccggagcactcagttcgaggagcatcggctgggatagaaacagctctcggctcgcctggcatatatatgtgatggtggcctcggatagatttccggccctccggtttccaaccgccatcgtcttcagttgaccgataataacgtccaattgggacattcgattcttttcctccttggagctctccttaccagttgataaaacggtcgaacgacgagacatcgttttcttatttctgaattacggatggagtgttacagttttcgtctggtaacttttcttaccgaaaggaaacacaaagcaaatggtacaacgttatcaaagccttcccatccttttgtagcttaggcaaaatatattcgaaagtcaaaaacaacacttcgtgtagttttttcttaaagcttaagttgttaactggaattggtataaaactgcactttaaaacttagttgtttcgcgtgagtttttcactccgtttactttaacattttgtttctctggccgataatccgaatcctctccaattcactttggcactatcttttgcacctcgaccgtttcaattatcagacacttggcataaatttggcaaaaacaaaaagacggaaaacattaaaatgttcgctttcgataacaaagcaaaagcgccgcaaagttgcttgtttactcgcagttgacccttgaaccgcgtgggcgaagccacccactccccctttggccacgaatcaaggacccagctgcattttggctactcgtaatcccgattcacagggcttcctgcacttgtaatgcggcttaaaggagtgaacgggagcgaggagctttttgatagcatttcgggccatctagggttttaagttcccgctcgaaaaaatcctttatttcccagcccaacgctttcctgcagttctcggagcgcattttgaatacatttttgaatcagtgtcgacactgtttgctttttatgtcactctctttttttggacccaactctcagatctcagttcggacccagctccttgtgtcccacatcgcgccctttttggattttatgcgatttgtgtacttccggctgtagtggctccacccgggactcatgtgtgttttaccactcgggcaacctaaaaaccactggcaactttgaagcccaccgacccatttgtcccgcccagaatgtatttaattgcaagcggcgctcaaataggatttgtgcattgttttctgtggtggatttaatgcatggcccgggga

SEQ ID NO: 5987 - DNA, 1070 bp, DROSOPHILA
tccatccgtaattcagaaataagaaaacgatgtctcgtcgttcgaccgttttatcaactggtaaggagagctccaaggaggaaaagaatcgaatgtcccaattggacgttattatcggtcaactgaagacgatggcggttggaaaccggagggccggaaatctatccgaggccaccatcacatatatatgccaggcgagccgagagctgtttctatcccagccgatgctcctcgaactgagtgctccggtaaagatctgcggggatctgcacggtcagttcaaggatctattgaggatattccagcagtgcggtgtgccaccgctttcaaactacctattccttggggattacgtggatcggggtcactgctccatcgagactttatcgctgctgttgacctataagcttcgctatccggagactttcttcctgctgcgcggcaatcatgaatcggcggatttgaatcgggtatatgggtttttcgacgagtgcaagcgacgatatagcatcaagttgtggcgctcctttgtcgattgctatgactgcatgccagtggccgccatcatagccgatcgcatcttttgcgtccacggcggactgagtccggatctgaataacctggatgacatccggcggctgaatcgccccaccgatgtgcccagcgatgggctgctgtgcgatttgctttggtcggatccggatgagaccaccggaacgtgggcgtccaacgatcgaggtgtcagcttcacctttggagccaacatagtggagggcttcctcatgcagcacaagtttaacctgattgtccgcgcccaccaagtggtcgaggatggctacgagttcttcgccgaccgccagttggtcaccattttctcggccccgaactactgcgacatctttgataactgcggagctgttctggtggtggacgccaaactggtctgccactttgtcatcatccgtccgagaccgttttcgcgacccacgggctttgagtcggatagtggatctacagctacggcgaccaatggaccaccgccgtccatgagggagaagaggctttattag

SEQ ID NO: 5988 - protein, 346 aa, DROSOPHILA
MSRRSTVLSTGKESSKEEKNRMSQLDVIIGQLKTMAVGNRRAGNLSEATITYICQASRELFLSQPMLLELSAPVKICGDLHGQFKDLLRIFQQCGVPPLSNYLFLGDYVDRGHCSIETLSLLLTYKLRYPETFFLLRGNHESADLNRVYGFFDECKRRYSIKLWRSFVDCYDCMPVAAIIADRIFCVHGGLSPDLNNLDDIRRLNRPTDVPSDGLLCDLLWSDPDETTGTWASNDRGVSFTFGANIVEGFLMQHKFNLIVRAHQVVEDGYEFFADRQLVTIFSAPNYCDIFDNCGAVLVVDAKLVCHFVIIRPRPFSRPTGFESDSGSTATATNGPPPSMREKRLY

SEQ ID NO: 5989 - DNA, 3970 bp, DROSOPHILA
ctagaaaagccaacgtaatttaaataattgccttttgcattatgcagatcccaaaatgcgagtgacagctttttaagagcatttttctgcgatttcaattagtgtcaaatgcgcaggaataacaaaatttgctgcttcatccatattcattcgttcccggatcatttatgtgcggatttgcgcgaaaatgccaaaaagttaagcgagtgggcgggtgaggcggggcgttaggaaaagccgccctaagccataatttaatatattgacacaaagctttgtcgtaagacgtgtcttggcaccatcataatccccaatattgtatattgacagctgtcaaaggagccacttcttcacttcctactgccgccgtaaagcacgaaaaaaagccacagaaaaagtgtagggaaccaaagtaagtttttggcctaatgcgcaactatgcggaaaatatttgcgcttagtttgggttcagcctaggaaaatgtagtcgcacactgagcccactgctacgtgtgctggttgaaggacacgaaagtgggccacggcataagccagggaagcagggcaggttgacgacacacaaatgaactgggccagaatggaaaggagctggtgacaactttaagatgccgaattacacaagtgcgtcctcaatcgtcagcgatttatctgggccaaattcaaacgaagaaattcttactatagagctgcgttgctaggttttacttaatttatataaaaatacacaatttggctcgttttacttacttttcagggtgatgataagtgaattgagttaatgtaaattatgtccatcaaaaaaagaaagataccattattagatttctaggcagagccaacaaagtatattttgtaatatataggtaagcccatttcattcatctacatttatttaaataaagtaaacaaataattttgacaatctttttaatttgaataacttgctgtagaagtcgataaggcgtttgatttctgagttttagggaaagttgcgccctcggaattgtgccagggatttggtcagcatcatggaggcctcccgttgggagcttcccttcctctggaccagctgctgaccggatgtgggataagtgggcttagatgttggtttctgggatctgttcaagtcgttcgcggtgttggtgtgttgctgcgcttggttgccaccacctggcatcgatgtggaggaggcacatggaaagagtcgctgggtggacgactggcaaacaatatctgacatggaagtgcttccaaggttggcatcgggcatccgtttagatgggatcgactccacacttagttccttcacccgatccgcataacgcagcgtgttcaaggtatgctccaccgaatgcaagcatggcgagatcatggctatcatgcaggttttcaccttcttacctccgatgaaggagtcccgcaggacttgggtcagcttggagccacggaatggcaaatgactcgactggcgccccagagcgcgaatgcattccttgaggaccagcagcgatttattgatctcggatccttccaggcgcgtctgtcgatccgccgagctgttgtccgctcctctttcattcccggccagatctataagcgagaatttcccgtgtagcttctcgcccgccgcggatctcagcacgatttggaacacagcatgcgatcgggaggacttggaattggcagaggtgtgacccgaggttcggacactattgcccaactcgagtaggtccagaacttcggcggtgttctgtactggattctgggtgaggcccaccacttgcacctgctggtttctatcctccaagacacgcagttgtggcttgccaggcatcaggagatcgaacacccgggtgccgtagatctcgaagaagctgcagtaaactttcagattaagcttgttatagggaaccgtctttagagtggagaacacgtccttagcggccattgcatagatgccatccattgagctctgatgccttccggggaactgaccacccatcgtataggtcttgccgcttccagtttgtccgtaggcgaaacacgtggccattccgccatcaaaaatgtgctttatcaagggtcgggctgtgaattcgtagaccgtggcattggagcactcctcgtcgaagacgtaatcgaaacggaagctatgattttccaggaacttgaccaggttcacatgcttgcggggctcgtggaccaccaatgtgtgcttagacggaatgctgaccacatcctgttcccggtcagccagctccttgcgcctcagtggtctcttcctcacacaaaccataatttggtggcaattgattcgttcgttcgtagtaccacttctcacccgctgactctccatttgctcgcgttgcagtcgtatcattctggctacttcccagttgggatttcccggatcttcgttcttcccctgctcccgatctagacgagtcctggcttgtgcttctcgcctccgttcccgttcttttcgcattctttcagcctggtgcaccacctcgtcctctcgaactggcggcgccgtctgctggcgtggcggggcagtggccagtacaggagataagctcccagtcgctattcgttgtttcattgaacgtggcgatatggaggcagtttgattggctgacgccgcattgccgccactgcagcggggcgagtcgaagatatgaggattcatcaggaccaccagctccaggggcagttccttaccacgcaccgtatgtccttcgggccactccaccgtaatcagcttggagtcaccgccctccagtttgataatctccgccaagtggactctaccgtccgagcgacggatgaaaatcttctgttcgatcgacaacttatccatggcagcaaatcagtcagtgcgactttccttcgatttctgcaacaaattttgttaactgctaatttttaccaattgagcgatcatattatttagaccgaattcttatttggtattatgattagggcagaaaacgggagtgacagtcaatgcaatgctcgattttccgttagccatctatgctagaaatttttcaaaaatcatatcaaaattatactcaatttcgatgatttatgcatctggtaagtgcatgtgaatgaaacaggtagttatagcgctctatttctggtcttcccgtgccattctagtgatatctgttctggcgggaattgttttagctatttgttcaatttgagggcaaacaacaggcagcaggaataaccgaatcaacaaacaacaccattccgagagcctctctcgtcagccgtgctgcatgtcctgtgtgtattctatttgccaagcgggcggtgttctgaaatgaagcattctttcgacgaaagagacggaaagagatagagcgaggaacaagttgcagatacgtttgcataagccgagacgtgtgtaacgtaccaaattgttatttattttttgaagtgcttgcgccattgcctctgtgtaaaggtgtatctgtgtgtgtcgtatctgtgttttcgccgccaaacgtatgggtgttctagtgtaggcaggcgcagatacacagatacattgcccacagatacgtgcaacttgtttgggtcttcagtggcgtcttgtttgctatttgccgtcacattttgccaaatttaccgtgtaattatcggcaaaggcgaacgccaaaccagtaccacctcagaccgaccaccacccgccacccactggaaagtgcaacatggaaggggcgatcaggctggactctggacactcctgctccccagctgataggagtatgcaaatttcgatagctttttgtcctgtttggccgggacccccaggcatatttgtttaaccgtagtcagaacgagccggacagtttgatttcgtttcgggtatttccattttcattttgatttttagccggcattttgcacctgtacgcaggtagcacgtaagctg

SEQ ID NO: 5990 - DNA, 1970 bp, DROSOPHILA
ataatatgatcgctcaattggtaaaaattagcagttaacaaaatttgttgcagaaatcgaaggaaagtcgcactgactgatttgctgccatggataagttgtcgatcgaacagaagattttcatccgtcgctcggacggtagagtccacttggcggagattatcaaactggagggcggtgactccaagctgattacggtggagtggcccgaaggacatacggtgcgtggtaaggaactgcccctggagctggtggtcctgatgaatcctcatatcttcgactcgccccgctgcagtggcggcaatgcggcgtcagccaatcaaactgcctccatatcgccacgttcaatgaaacaacgaatagcgactgggagcttatctcctgtactggccactgccccgccacgccagcagacggcgccgccagttcgagaggacgaggtggtgcaccaggctgaaagaatgcgaaaagaacgggaacggaggcgagaagcacaagccaggactcgtctagatcgggagcaggggaagaacgaagatccgggaaatcccaactgggaagtagccagaatgatacgactgcaacgcgagcaaatggagagtcagcgggtgagaagtggtactacgaacgaacgaatcaattgccaccaaattatggtttgtgtgaggaagagaccactgaggcgcaaggagctggctgaccgggaacaggatgtggtcagcattccgtctaagcacacattggtggtccacgagccccgcaagcatgtgaacctggtcaagttcctggaaaatcatagcttccgtttcgattacgtcttcgacgaggagtgctccaatgccacggtctacgaattcacagcccgacccttgataaagcacatttttgatggcggaatggccacgtgtttcgcctacggacaaactggaagcggcaagacctatacgatgggtggtcagttccccggaaggcatcagagctcaatggatggcatctatgcaatggccgctaaggacgtgttctccactctaaagacggttccctataacaagcttaatctgaaagtttactgcagcttcttcgagatctacggcacccgggtgttcgatctcctgatgcctggcaagccacaactgcgtgtcttggaggatagaaaccagcaggtgcaagtggtgggcctcacccagaatccagtacagaacaccgccgaagttctggacctactcgagttgggcaatagtgtccgaacctcgggtcacacctctgccaattccaagtcctcccgatcgcatgctgtgttccaaatcgtgctgagatccgcggcgggcgagaagctacacgggaaattctcgcttatagatctggccgggaatgaaagaggagcggacaacagctcggcggatcgacagacgcgcctggaaggatccgagatcaataaatcgctgctggtcctcaaggaatgcattcgcgctctggggcgccagtcgagtcatttgccattccgtggctccaagctgacccaagtcctgcgggactccttcatcggaggtaagaaggtgaaaacctgcatgatagccatgatctcgccatgcttgcattcggtggagcataccttgaacacgctgcgttatgcggatcgggtgaaggaactaagtgtggagtcgatcccatctaaacggatgcccgatgccaaccttggaagcacttccatgtcagatattgtttgccagtcgtccacccagcgactctttccatgtgcctcctccacatcgatgccaggtggtggcaaccaagcgcagcaacacaccaacaccgcgaacgacttgaacagatcccagaaaccaacatctaagcccacttatcccacatccggtcagcagctggtccagaggaagggaagctcccaacgggaggcctccatgatgctgaccaaatccctggcacaattccgagggcgcaactttccctaa

SEQ ID NO: 5991 - protein, 626 aa, DROSOPHILA
MDKLSIEQKIFIRRSDGRVHLAEIIKLEGGDSKLITVEWPEGHTVRGKELPLELVVLMNPHIFDSPRCSGGNAASANQTASISPRSMKQRIATGSLSPVLATAPPRQQTAPPVREDEVVHQAERMRKERERRREAQARTRLDREQGKNEDPGNPNWEVARMIRLQREQMESQRVRSGTTNERINCHQIMVCVRKRPLRRKELADREQDVVSIPSKHTLVVHEPRKHVNLVKFLENHSFRFDYVFDEECSNATVYEFTARPLIKHIFDGGMATCFAYGQTGSGKTYTMGGQFPGRHQSSMDGIYAMAAKDVFSTLKTVPYNKLNLKVYCSFFEIYGTRVFDLLMPGKPQLRVLEDRNQQVQVVGLTQNPVQNTAEVLDLLELGNSVRTSGHTSANSKSSRSHAVFQIVLRSAAGEKLHGKFSLIDLAGNERGADNSSADRQTRLEGSEINKSLLVLKECIRALGRQSSHLPFRGSKLTQVLRDSFIGGKKVKTCMIAMISPCLHSVEHTLNTLRYADRVKELSVESIPSKRMPDANLGSTSMSDIVCQSSTQRLFPCASSTSMPGGGNQAQQHTNTANDLNRSQKPTSKPTYPTSGQQLVQRKGSSQREASMMLTKSLAQFRGRNFP

SEQ ID NO: 5992 - DNA, 3935 bp, DROSOPHILA
ttacattacacattcaacaccttaactttttaaattactaaatttaaaacagaattgcgacattaattctcttatagcccatgcagtatgaatattaaatcccattcactgacttaatatccttttgaacccaaaaatctgtccagatcttcaaattcgccgagcagcacttgagttttaagggtcacatataaatttgaaattaattcaaatagcactaaggggtaatgagttgcgagtaattatccatttaaagctttaaaatgttccacttctttgctgtactcctttaaatttaaagtccttaaagcagtccaaatatttaatgttttgtagaagcactttttaaggtttatttgactaaaaaaacacactttgcacaaacacttcactttatccaattgtattaccggaagtcacgaggggaaagatggcccgaagcacgataatcgagtgaaccagtggccacaactgttggtccttttatatccgcaaggacctctgctcggcaaaactcgtcctgcagcccgaatgccggcagccaatgagagtcctgcaaatcggcgggcaaatgacttcgtctgcacggaaagtgaatctctaggttaggcgaacaaggttttatggcctcacttgttgctccttggccaaatctgaatggtaatcgcttggaaacgccgtcgcgtgccgccagcaattaatgcgtctctttggtggcactcgtgtagactgctttaagacgatgctgccttaatacgcccggtgtttagtgaacccaaatctgatagcccagggaaaaggcatttcaaaggggggaaaacaattaccaaagtcgtaagcaaaagtaaatcatgttgctgcctaagaatctttacatacacacattatacagcatccctaaatttagtgtattgacttattattagactagcaacgccgtaatgtttatttttgaataatttaacatttatttactgaccagattctaaatcaactaagttcacttgcggtgcagaccaccacctggacgaattactgcagcggctgcctttttgacctcatcaattgcatgcatcatgcgctgcggctcagtgagaaaccaaatccacaggactacgctatagcgatacagtttatcccgctcctaaaaggataaacaacattaaaatgttatattccatgattttatagttaattagtatacttacaatgcgccccacgacattttccaggaaatcttttcgcaaggaacgccctgactcatccaggcgagtttgctgctgggtgacattgtatatggcgctcaagtagcgaacgttctcaaacatgggctgctccaatggggaatcatagacaaacggccgcaaagtctgctccaagcgcttgctaaaaaaaaatattaatagcttaaacgatctgtatcaaagttaagtattgcaacttacagttctgccagttgatcctgaacagcagcacacgactttcggttcagcatgctctgaaaggagtaagacagcaggcgaccgaacttttcgtattcgaagagacaagccttggcctcagttgcctttatgttctgtcccaagtgggctgacaacaaattggcaatctcctgcacaaactgggcacaaatgccctgataactggcgttaatggagcgcatggtctggattctttgccaagtggcctgcgcttggtcgcgcaactcctccgaagtgtccaggcagttgcgcttcttgtcgcagtccagttggatcgcaatccacagcaattccgcattggacagagcatctgagatgattttagtgagcttcttgtcgctttcatgacgtcgaacagctctttccaacttcagtttagtgttctcgtagagaaccagctcaatacgtcgctgggtgtgctgctgaatgtgaatggttagatcgtttaaaagcgtatcgtgtgtattgctcagttgatagtcgttgagcagctgcagatcgtgcatttcacgcgccatgtccgttaaactgaggcagtgaatcttgccaagatccaactggtcaataagacactgcgtggccttcaccttggcctttgttcttatgtaggatagtgcataaaactggatgctgtaaaaacggtcatatcaattaatgtgcattgtttttagcacagaacctttgtgcttacccacgttccaagtcctccagcttggccttttcgcgcccaagatcttcctccgcgctctggaactcatcatagtcctggatcttaaaattctccttcacatacagagtaaagtattgcataaatgaatcgcatttgtggaaatactgctccaatggcagttgatgcatgaatagaggcggcaactgtggggcggtgaatgcctttttggcttcggcgcttagccggcagttctcctgctgcagttcctccagttgcttggctttggactggcactcggctatcagatccttctccctcagttgcaactcggcggtgacgcactccacctcgcctaggtgcttagttatcgagtgctttgtggtcctgcaaaagtggattgaccatcgatcgaacatatatgaggaaggttacagtttttcccttacatcatatcttccagaagcgtagcataatcccttgaggcatcttcgatcgcctcaatgctcatggtcaaggcgtcgacatcctgctgcttgtagttgagaagccccggactttcggcctcgatttgcaggagcttgagctcgcgatccgaagcacttagccactcgccccgccgctgcatctcctcccgctccagaacctgtcgctctgtgaggatatttgcatccgtgatgttcccggacaggaacttgaagaacatctccatctgctcatcgtacagaatccactggttcgagctgtccactcccagcttcttgaagaattccgagttctgcaatcatggcgattataagctgatcattaattaaatcatcacacatacgctcagcagatcgcccatcttttaaaaaaatgacaacacaagctgattacttatcggttatatcgaaaggtttcagagacgttactagagatggtaccttttgaaaattaacaggaaatagtgcttaataattaagcttaataaaaatcgtagaaattcctgatttcctatcaacgatttcagaaatatttactcttatctatttctgttaaatatatatatatataatatatataatatatatatatatatatatatatatatataatatatataatatatatatatatatatatatatatataataaatttctgtttattatatatatatattttatatatgaattattttaaatttttgctatgaagtaaggatacaatttttctaaatttgacacaagttcttaagtttaattcaagtaaatattatgttttagtacacctcaatcttaaagggcttataaattgatctttgttaaaatgattttaataccttatatcgatatgtggataaacgtgcacaccacccctggtaaatagaaacaccctaacgccatctagtttgcagccctggtaccgctttggacgcacttcgtgtggcagtctggcaaccctacactgaatgacaagtaaattctgttcgttttgcaaaataaacttgtaaattggtatattccttagcaatggtaagtaccgcgcccagaagaccggtattggtctgagagccaccattgggccgatgaccattgaaggctagcaatcgtggtagtaattgacttgcgtgtattttcccaggctcgccgctatgattcccgcaccacgatcttctcgccggagggccgtttgtaccaggtggagtacgccatggaggccatctcgcacgccggaacctgcctcggaatcctcgccgaggacggcatcctgttggcagccgagtgccgcagcacaaacaaattg

SEQ ID NO: 5993 - DNA, 1689 bp, DROSOPHILA
tgattgcagaactcggaattcttcaagaagctgggagtggacagctcgaaccagtggattctgtacgatgagcagatggagatgttcttcaagttcctgtccgggaacatcacggatgcaaatatcctcacagagcgacaggttctggagcgggaggagatgcagcggcggggcgagtggctaagtgcttcggatcgcgagctcaagctcctgcaaatcgaggccgaaagtccggggcttctcaactacaagcagcaggatgtcgacgccttgaccatgagcattgaggcgatcgaagatgcctcaagggattatgctacgcttctggaagatatgatgaccacaaagcactcgataactaagcacctaggcgaggtggagtgcgtcaccgccgagttgcaactgagggagaaggatctgatagccgagtgccagtccaaagccaagcaactggaggaactgcagcaggagaactgccggctaagcgccgaagccaaaaaggcattcaccgccccacagttgccgcctctattcatgcatcaactgccattggagcagtatttccacaaatgcgattcatttatgcaatactttactctgtatgtgaaggagaattttaagatccaggactatgatgagttccagagcgcggaggaagatcttgggcgcgaaaaggccaagctggaggacttggaacgtggcatccagttttatgcactatcctacataagaacaaaggccaaggtgaaggccacgcagtgtcttattgaccagttggatcttggcaagattcactgcctcagtttaacggacatggcgcgtgaaatgcacgatctgcagctgctcaacgactatcaactgagcaatacacacgatacgcttttaaacgatctaaccattcacattcagcagcacacccagcgacgtattgagctggttctctacgagaacactaaactgaagttggaaagagctgttcgacgtcatgaaagcgacaagaagctcactaaaatcatctcagatgctctgtccaatgcggaattgctgtggattgcgatccaactggactgcgacaagaagcgcaactgcctggacacttcggaggagttgcgcgaccaagcgcaggccacttggcaaagaatccagaccatgcgctccattaacgccagttatcagggcatttgtgcccagtttgtgcaggagattgccaatttgttgtcagcccacttgggacagaacataaaggcaactgaggccaaggcttgtctcttcgaatacgaaaagttcggtcgcctgctgtcttactcctttcagagcatgctgaaccgaaagtcgtgtgctgctgttcaggatcaactggcagaactcaagcgcttggagcagactttgcggccgtttgtctatgattccccattggagcagcccatgtttgagaacgttcgctacttgagcgccatatacaatgtcacccagcagcaaactcgcctggatgagtcagggcgttccttgcgaaaagatttcctggaaaatgtcgtggggcgcattgagcgggataaactgtatcgctatagcgtagtcctgtggatttggtttctcactgagccgcagcgcatgatgcatgcaattgatgaggtcaaaaaggcagccgctgcagtaattcgtccaggtggtggtctgcaccgcaagtga

SEQ ID NO: 5994 - protein, 537 aa, DROSOPHILA
MEMFFKFLSGNITDANILTERQVLEREEMQRRGEWLSASDRELKLLQIEAESPGLLNYKQQDVDALTMSIEAIEDASRDYATLLEDMMTTKHSITKHLGEVECVTAELQLREKDLIAECQSKAKQLEELQQENCRLSAEAKKAFTAPQLPPLFMHQLPLEQYFHKCDSFMQYFTLYVKENFKIQDYDEFQSAEEDLGREKAKLEDLERGIQFYALSYIRTKAKVKATQCLIDQLDLGKIHCLSLTDMAREMHDLQLLNDYQLSNTHDTLLNDLTIHIQQHTQRRIELVLYENTKLKLERAVRRHESDKKLTKIISDALSNAELLWIAIQLDCDKKRNCLDTSEELRDQAQATWQRIQTMRSINASYQGICAQFVQEIANLLSAHLGQNIKATEAKACLFEYEKFGRLLSYSFQSMLNRKSCAAVQDQLAELKRLEQTLRPFVYDSPLEQPMFENVRYLSAIYNVTQQQTRLDESGRSLRKDFLENVVGRIERDKLYRYSVVLWIWFLTEPQRMMHAIDEVKKAAAAVIRPGGGLHRK

SEQ ID NO: 5995 - DNA, 5934 bp, DROSOPHILA
aacttgcgaattgtataatatggaaacggaaaaccaaatgcttctcaaacattacctattttgttctttctcctctcgctagccaatacagaaatattaagcaaacctaaagaatttataaatgtatatttaacggaaattagtttaaagttaaagttaatgaaccccacacacagacacaaaacataccaaattcgattgttaaagagtacacaaatgaaacaaatcccgcattacataagcctaagcgataagcgaacttcggacaggattcaagttacaaaactaagatattacacacaattcctagatgattaagaggatgaggatgaggacgaggatcaagtggaatgacgacatgtaaagctctcacgttgccttaatatattagactgattttttctacacacatttgtagacgtatggtggatgacatttgagaagtcccagccaattgcctggggggggaggagttgcagcaaacggagtcctaatcccaatcccaactagcgatttacatgtacatatagggaagagcgaagctaagcgaacaaagctacagttgtcggcctatccgaatccgatcgttccgttcgttcgatgagtatataccatataccaaggcgtatacacactatatagccacatgcccaattagccaaatctctcattaacacaagtgtaaatgctaatttctcaccaagagcagacaaattttcttacgattaattaccaagagacaaaaccaacagacaacaaaaaacaaaatacaatgaatattgattatttctatgtacatatatggattgtattaaacatttatcgaaactagctgttaacaaaacatttttattccccctcactccactccatttttttagttccatttaaaacaaatttcatatttatattatacataaaaattatataaatatatatcaattaaataaataataaatgaaacttgttatacaaaaaaacccccttttatctagcttttttactggcgttgtggctctttcttgtccaccggtggccataaaggcgtcagttcgctaagcgccacgtcgtagagcaggttctgatactcctccaaaaggactaagaagaaacggaagattagcaaagaaattagggttcgagagactggggtaaacttacagtgaggatcgctattccattggtcgatcagagcctggcggttatggatctgcttggtaattagagcgcgcttaaagcgcaataccttgttgttcatactggaccagctcttgattacggaggcgggtgtggactttagtttgctccggaagtctgctaacctcgagcaaacctctccatccagcagaaacattccgaagtaactgaaaccacatgattagtatgatcacttatctaaatacccaacctttaaaaagacactcaccagcaggccttttcgctgagcggcatctccacttccccgagaggcagctcccaccccgacttgccaaacgtggcatccacgtgacagaagatcttccctgatgttttatcaaatctgggagcaggatcctcgcgcacctcacgtatgttgcagagcaggggaacgtatagaagaagccactccggctcaatggcggtgatgccgcggatgaacatcttggtagagtcgccgttttgcagctcgtatgcctcctgatagattacccattcgggtgctttttgacgcaacacggatgagacgtgcaggaacgctggttcctccatgtcagcacaattgtatgcgtactttaatcgccgccgctcttccttgtcggcgatgtctgccagaggtacctttctagccacccggtcgcccatgccggccaatagaatttggcgaaggaaacgcgcctgggcatcggtgggaggcttcagttcggggtccacacccagctcaacgtcactaacattcaggttaatctcgttagtcagctggacgcgcaattttcgcacctcgctcatcgctttctggcgcaatccattcgcagcacaaaactctggcaagcggccctgcgatccggcgtactctgcagctcctacggcacgtaataagaccataggatctccaagcaactgatagttgccgctggccgcccaactttggcgtttgcggtggaaccgattcgcgccaggtgccacatcctcatccctttgaacgcccgtttcgattagcacctcctggactgaaagtgcggccaccaggcagacggtgtagggcagtaggttctgctggtgggacagagccagcatttttccaaagcgcggcgccacgggaaagcgggagataacgtgacccaaacgagtaacggctggtggcaaatctgtattctctgtcttggcgacctccagggcacctagcacgatcaatcgccgctcggcggcttgcagctgcacttgatccggtggtgagggaaagggaaagtgcaccacgcgatcgatgcccatgcagcgcatttgcagcataaggtcctcgacgggctttttctggatatccggctgggaaaagtcctcgaagcagtcgttgtacacggcactcgagtagaggcgatagcaatgtccggcgctgatgcgacccgctcgtccagcacgctgatccgccgaggccttagacgtgtaggttaccacaaaagcactcacacccgtcagtttgtcgtaaagacgcgtcttctggcgaccacagtcaacaacatacttgatgtgcgggatggtgagagatgtctctgccacattggtgctaaccacgcatagccggcagccatcgggaacgggcaggaagatgcggttttgcttctccgaggagaggagcgagtagagcggcaggacccacagaggttgcctttgaccagatcccattcccgactcatcctccaagcctagttcatcgtcgttatcctcttctagtccctcctgctcatcatcctcatccggctgctcgtgcatgtctgcttccgtatcatcaccagggagcttgtagtcgtccaaattgattttgggtaacgccatttgcgccaagaactttttcttagatttacgaatattacgtataactcgtttcatatcaaactccagctccttgggatcctccacagtcgatgccgcatcatctattgtttcctctttttcttcctccgatacctttccatttttagcgacatccttggttggcgcatgatgatacggaaacgtacgtcgcagcttgcgcaccagttggttgacctcctgctgtcccgtcacaaaaattagtatgccgccttccggaagcttattatggatttttaaggtcttgcggtaagcctccgccacatagtcatcaggtgtgcgcttctggaagtgaatagtcaccggaaattgtcgagcctccactttaagcaacggtggcggaatcttaaacaagcgagtattctctgtaaaatcggatacccgcaaagtggcagacataatgatcagcttcagcggctgcccgcgtttgtgacgcaagggcacgatccttgacaggagacccactaggatgtctgtgtaaacactgcgctcgtgcgcctcgtccaggatgatcactgagtacttactaagcagaaagtcagtttcgatctccttaagcaacacaccatctgtcatgaatttaatgcgcgtcgctggtgttacgtttccctcgaagcgaatgaggtatgacacctcgctctccggcaggttcatctcgtgggccacccgcttggacatggcaatagcagccactcgccgcggctccgtcactccaatcatcttgtgctgggcataccccgcttcgtacaggaactgcggtagctgggtagtctttccagagccagtctcaccagccacgatcacaatggggttttcgttgattgtctccatcacctgctgctcctccgcgaggataggcagtcgaagacgggcattctgaacttctgttgtccgatgtacgggcacatagacagtctggtggatacaggcaggtgggttaggctctggcttcaactttttaatgggtggtttaacagcgatttgcggtggagctatagacactggagtgggtatggcaataggagcggattgagctggtgcctcctcatcgtcctcatcagaggatgaagaatcttcgtcatcttcctccacgctaattacattcggattctttcgcttggcctgtagttcctcctcctcttcgacgagaagcttgcgcttggagccctttatagcatttacgcggagacccgacgccgagcttttttcagctaaaacttgggcctgtctttcctttttcttggctagatactcgtcaagggtgggtagacgctttaatcccacggtttgcacttggctaatggaagtatactgctgcagctcctcctccggaatttgaacggcagcaaggtcacccaacagctgagcgcgctaaattagaaaagatttcaattaaatatcagttttatattagcactgaataaaaacctacaccctctttctttttcttcttgtccacaatagcctggaggtgcttgcgctgcttcttggaaaggatcttcacgtgttgcactttgtccaccttaatcttggtggcccgcttctcggagggcagaaccagagcgttggcctcatcgtagccaacctggttgccgccggccacagcatccacatcgatctgaatctgtagagtattggatttggaaagggtaagaaagcggattcgagtgtgtggtccgacggatgacctaccttcttcacggccgagttgtccacaattgtttgtggattctgccgcgccttggcattgtgcaccttcttgcccatgattactttactttaccaatatagttaataaaataaagtaacagaattaactttgggcaataatataaacattgatttaaatcacacgtgcgaagtacgcttatcgataacagcgcaggcgataacaaaagttgagatactctaaaatgtgctgtgatgttacatttgtgttagtggaaacatacattagtgggaaaaactgattgttatagttgttcacactccttcgacagcactggtatcgaaacgttatcgcaatcgattcatcgtaatattttcaatataagtttttgtgacaaataggcgtgcaacattttagatccatctgctccccgcctgtcgtttcggcttggctcctctgctcgagtcctgaacccccgttttcagtgaaatccagctacctgcaatggtgtccaagaaccaattctatcagaactggaccatgcagtcgcagcagcagcacccgcaccaaatgcagcaacagtttcagcaacagcagcagccaaatctgcagcaccgcaacaaccagagcaacaataataattgcaacaataatccccgcgcagctgcggctccgtatagaaaaccgtttcgttcgggcaaaattaactccggaccaggaggaaatgggaatggtaacagggtcaacggtaacaatcagatgatgttttcctccagccaaatgccgagcgatcccctgtacattgacttcagcagcccgccaccaggattcaaacacaatcaggtaggcagtcccaagaagaagtctatgaagggcatcaaacagcagcagcatcccagtccgaaccagcagcagcctcccagtccgaaccagcagcagcatcccagtccgaaccagcagcagcatcccagtccgaaccagcagcagcatcccaattcgaaccagcagcagcatctcagtccgaaccagcagcagggcaagatgaacaaccagaacaacaatcatatgaaccagtcgcagcagcccttcaacaatcagatgaacggaagcgattggcagcgccatccgggcaacaatcccaatcagattcgcggtggctttaatggattccaacgcgggccgcctccgaaccgtcctcctcc

SEQ ID NO: 5996 - DNA, 3683 bp, DROSOPHILA
ataagcgtacttcgcacgtgtgatttaaatcaatgtttatattattgcccaaagttaattctgttactttattttattaactatattggtaaagtaaagtaatcatgggcaagaaggtgcacaatgccaaggcgcggcagaatccacaaacaattgtggacaactcggccgtgaagaagattcagatcgatgtggatgctgtggccggcggcaaccaggttggctacgatgaggccaacgctctggttctgccctccgagaagcgggccaccaagattaaggtggacaaagtgcaacacgtgaagatcctttccaagaagcagcgcaagcacctccaggctattgtggacaagaagaaaaagaaagagggtcgcgctcagctgttgggtgaccttgctgccgttcaaattccggaggaggagctgcagcagtatacttccattagccaagtgcaaaccgtgggattaaagcgtctacccacccttgacgagtatctagccaagaaaaaggaaagacaggcccaagttttagctgaaaaaagctcggcgtcgggtctccgcgtaaatgctataaagggctccaagcgcaagcttctcgtcgaagaggaggaggaactacaggccaagcgaaagaatccgaatgtaattagcgtggaggaagatgacgaagattcttcatcctctgatgaggacgatgaggaggcaccagctcaatccgctcctattgccatacccactccagtgtctatagctccaccgcaaatcgctgttaaaccacccattaaaaagttgaagccagagcctaacccacctgcctgtatccaccagactgtctatgtgcccgtacatcggacaacagaagttcagaatgcccgtcttcgactgcctatcctcgcggaggagcagcaggtgatggagacaatcaacgaaaaccccattgtgatcgtggctggtgagactggctctggaaagactacccagctaccgcagttcctgtacgaagcggggtatgcccagcacaagatgattggagtgacggagccgcggcgagtggctgctattgccatgtccaagcgggtggcccacgagatgaacctgccggagagcgaggtgtcatacctcattcgcttcgagggaaacgtaacaccagcgacgcgcattaaattcatgacagatggtgtgttgcttaaggagatcgaaactgactttctgcttagtaagtactcagtgatcatcctggacgaggcgcacgagcgcagtgtttacacagacatcctagtgggtctcctgtcaaggatcgtgcccttgcgtcacaaacgcgggcagccgctgaagctgatcattatgtctgccactttgcgggtatccgattttacagagaatactcgcttgtttaagattccgccaccgttgcttaaagtggaggctcgacaatttccggtgactattcacttccagaagcgcacacctgatgactatgtggcggaggcttaccgcaagaccttaaaaatccataataagcttccggaaggcggcatactaatttttgtgacgggacagcaggaggtcaaccaactggtgcgcaagctgcgacgtacgtttccgtatcatcatgcgccaaccaaggatgtcgctaaaaatggaaaggtatcggaggaagaaaaagaggaaacaatagatgatgcggcatcgactgtggaggatcccaaggagctggagtttgatatgaaacgagttatacgtaatattcgtaaatctaagaaaaagttcttggcgcaaatggcgttacccaaaatcaatttggacgactacaagctccctggtgatgatacggaagcagacatgcacgagcagccggatgaggatgatgagcaggagggactagaagaggataacgacgatgaactaggcttggaggatgagtcgggaatgggatctggtcaaaggcaacctctgtgggtcctgccgctctactcgctcctctcctcggagaagcaaaaccgcatcttcctgcccgttcccgatggctgccggctatgcgtggttagcaccaatgtggcagagacatctctcaccatcccgcacatcaagtatgttgttgactgtggtcgccagaagacgcgtctttacgacaaactgacgggtgtgagtgcttttgtggtaacctacacgtctaaggcctcggcggatcagcgtgctggacgagcgggtcgcatcagcgccggacattgctatcgcctctactcgagtgccgtgtacaacgactgcttcgaggacttttcccagccggatatccagaaaaagcccgtcgaggaccttatgctgcaaatgcgctgcatgggcatcgatcgcgtggtgcactttccctttccctcaccaccggatcaagtgcagctgcaagccgccgagcggcgattgatcgtgctaggtgccctggaggtcgccaagacagagaatacagatttgccaccagccgttactcgtttgggtcacgttatctcccgctttcccgtggcgccgcgctttggaaaaatgctggctctgtcccaccagcagaacctactgccctacaccgtctgcctggtggccgcactttcagtccaggaggtgctaatcgaaacgggcgttcaaagggatgaggatgtggcacctggcgcgaatcggttccaccgcaaacgccaaagttgggcggccagcggcaactatcagttgcttggagatcctatggtcttattacgtgccgtaggagctgcagagtacgccggatcgcagggccgcttgccagagttttgtgctgcgaatggattgcgccagaaagcgatgagcgaggtgcgaaaattgcgcgtccagctgactaacgagattaacctgaatgttagtgacgttgagctgggtgtggaccccgaactgaagcctcccaccgatgcccaggcgcgtttccttcgccaaattctattggccggcatgggcgaccgggtggctagaaaggtacctctggcagacatcgccgacaaggaagagcggcggcgattaaagtacgcatacaattgtgctgacatggaggaaccagcgttcctgcacgtctcatccgtgttgcgtcaaaaagcacccgaatgggtaatctatcaggaggcatacgagctgcaaaacggcgactctaccaagatgttcatccgcggcatcaccgccattgagccggagtggcttcttctatacgttcccctgctctgcaacatacgtgaggtgcgcgaggatcctgctcccagatttgataaaacatcagggaagatcttctgtcacgtggatgccacgtttggcaagtcggggtgggagctgcctctcggggaagtggagatgccgctcagcgaaaaggcctgctgttacttcggaatgtttctgctggatggagaggtttgctcgaggttagcagacttccggagcaaactaaagtccacacccgcctccgtaatcaagagctggtccagtatgaacaacaaggtattgcgctttaagcgcgctctaattaccaagcagatccataaccgccaggctctgatcgaccaatggaatagcgatcctcacttccttttggaggagtatcagaacctgctctacgacgtggcgcttagcgaactgacgcctttatggccaccggtggacaagaaagagccacaacgccagtaa

SEQ ID NO: 5997 - protein, 1192 aa, DROSOPHILA
MGKKVHNAKARQNPQTIVDNSAVKKIQIDVDAVAGGNQVGYDEANALVLPSEKRATKIKVDKVQHVKILSKKQRKHLQAIVDKKKKKEGRAQLLGDLAAVQIPEEELQQYTSISQVQTVGLKRLPTLDEYLAKKKERQAQVLAEKSSASGLRVNAIKGSKRKLLVEEEEELQAKRKNPNVISVEEDDEDSSSSDEDDEEAPAQSAPIAIPTPVSIAPPQIAVKPPIKKLKPEPNPPACIHQTVYVPVHRTTEVQNARLRLPILAEEQQVMETINENPIVIVAGETGSGKTTQLPQFLYEAGYAQHKMIGVTEPRRVAAIAMSKRVAHEMNLPESEVSYLIRFEGNVTPATRIKFMTDGVLLKEIETDFLLSKYSVIILDEAHERSVYTDILVGLLSRIVPLRHKRGQPLKLIIMSATLRVSDFTENTRLFKIPPPLLKVEARQFPVTIHFQKRTPDDYVAEAYRKTLKIHNKLPEGGILIFVTGQQEVNQLVRKLRRTFPYHHAPTKDVAKNGKVSEEEKEETIDDAASTVEDPKELEFDMKRVIRNIRKSKKKFLAQMALPKINLDDYKLPGDDTEADMHEQPDEDDEQEGLEEDNDDELGLEDESGMGSGQRQPLWVLPLYSLLSSEKQNRIFLPVPDGCRLCVVSTNVAETSLTIPHIKYVVDCGRQKTRLYDKLTGVSAFVVTYTSKASADQRAGRAGRISAGHCYRLYSSAVYNDCFEDFSQPDIQKKPVEDLMLQMRCMGIDRVVHFPFPSPPDQVQLQAAERRLIVLGALEVAKTENTDLPPAVTRLGHVISRFPVAPRFGKMLALSHQQNLLPYTVCLVAALSVQEVLIETGVQRDEDVAPGANRFHRKRQSWAASGNYQLLGDPMVLLRAVGAAEYAGSQGRLPEFCAANGLRQKAMSEVRKLRVQLTNEINLNVSDVELGVDPELKPPTDAQARFLRQILLAGMGDRVARKVPLADIADKEERRRLKYAYNCADMEEPAFLHVSSVLRQKAPEWVIYQEAYELQNGDSTKMFIRGITAIEPEWLLLYVPLLCNIREVREDPAPRFDKTSGKIFCHVDATFGKSGWELPLGEVEMPLSEKACCYFGMFLLDGEVCSRLADFRSKLKSTPASVIKSWSSMNNKVLRFKRALITKQIHNRQALIDQWNSDPHFLLEEYQNLLYDVALSELTPLWPPVDKKEPQRQ

SEQ ID NO: 5998 - DNA, 3293 bp, DROSOPHILA
tgtctgcaggtgcaaaataatatattaattggattaacttgggattaatcgagcgatcacagccatggccacgatgcgcatacccaaacaaaaggtgatcctgtgcggcgactacggagtgggcaagagctccctgttccggcgcttcgccaccaacaccttcatcacggatacggacaggaaatccacgttgggactggaccacatcgatagggaatacagtgtgaatgaaaagcagatcaaggtgggctcgggaacctctaaaagggcgtgatggctgagatatgaatccttaagctctttagttcgatttctagacgaaagccacagttcttcagacttacaacttattgcgttgtgagacacttatgtatataccgtcttctttgacagctccaactctgggacaccggtggcatggagcgtgtggcctcggtcacatcctcgtactacaagttcgccgagggagccatcctggtctttgctttggacaacgccgcttcgttccactcgctgtcgcagcacttgctggacattgtgacctatgcagagaatgccaagatcttcatctgtggcaataagagcgatctggatggcagggagccggaggtcagcgatgaggaagtggaggccttctgcgagcagtgccactcactgatcagtgccacgtacaagacctcctgtcgcagcggcgccggtgtggaggagatgttccgtgacatctctaggcaactggtccacgccaatcgctccaaaatggaactgcaggcactggagcacaagagcttccaggtggacactgcgagcagcggcgcggcgaccaacgaggaggacgcctcctcctgcggctgctagcagttggggaacattgagttcggctaggaacccttattcccgccaggctcaatgctcacgcagagatgcatttttactgtttcctttatttattgatagctttcggctatgttatgatttttagatacgtacatgttcaattcgaatttttacgaaaaatacgtcccgaacgcgaacacgagtcatagagtaggattagtttctattaaccaggcgccaaacattaaccacttaaactttgtacacgtaagctaggatggcggatacgcgagtgataggttagaaatctgcggtaagaattaaaaagtaataggaattccatcgattaacaagaaggtcaatttaatcttaaaggtaaaaggacaacaaaatatatagacatcgattgaccgcagataactactctaagcttcgactcttattgcacgtaatactccatcctatcttatatagattagtgcgtaatctgcagctttcttccacagaatatctcgtaaaaataaaatatactaaacaataaataatcaactcacgaaattggaatggacaggcttctataacatttgaatttgggctaagatcattggctattggtttgctagctaaaattactacgacgaggcggtgctgcttgaactgggtgcgaaggtcagatagagactgacgcccacggccaccacaaagcagacacccactccatacaagaccaccttctcccgcagggctcttaacatcatggtattcagagtgcgagaagctcttcccagctcggcattggtttctcgaagtcgagccctggctccctgtagagtttccctttggtggtgcagatcatttaggacctgggcgcccagttgctccgtctccaaggccactctgtacccttcggttaacctgttgcccgtccgttcaatcctttccgagttgtccaagaggcgttggcgttgatctgtacttatggacacatcctcatagctgtcacccaagtccagagtggtgaatgtgttggcttgggagcgctgtttgtccttggtcaacctgtactccgcctgcagccgtttcagttctgcctgggccacctgcagctttccgttgaagctgctccgcagtccaggatttagctccctcacctccagacccatctgctccagcaattcctgagcctcgggcaaactggagtcgatcttgctgcacaaatcatggcgctcgcctggagtaaatggacaaatggtaatcaccataatgtacaatccatggacaatcatcccactcactgttgttgttttgctgctgcagccgtccaatatgggccgttatttctgctattaacgtggcgtattgctgttcgtattgctccagaagcgacatttgtgcggtttttattctaccttattcagttgtttatggtatttgttctgttttagttcgcgaaaattacagatttatcgaagaaaagaagtaaacattgtccaagtgtggccgagtcatgaggtgaacagtaatacagcaatctataaatacttttaagtcgtggtcactctgatttcgagtcagcgttgccatactcatgtaaaaaacactgccaacttcaaggactacaatattctcgtaagaactcagataaaaccaacttccgttttaaatacgtaaataaaacacaaacatatctattattttataaattccattttattgtacttagagtaattaataaattaattaattaggttcagctttatgcgagtggagattctttgttaacctaagcaactgttttggcggtagtacgatttaataatactacatgatacatatgtacactgttcatcacatttatgttttgtgctgtcctggtccgcgattagaaaactcttaaccctcgaccagtgtggccttgtccccttttcggagcaccagttccaattgggacagcaagccaatagcccgaaagttctccttgaagagcacgaagtcctccagcggttttaggtactccaaggcctggtggtagctttccaactccttcagcatgcataaagccttcttatcctcggggtctggggatgtgtgtccattggtttggctgccggaggagctggatccattggggatcttttttggcgaggcgggagcagaggcgggtttggtggacgcagctcgagctggtgcaggtgagtcctttcccttggaagaaagggcaggcgtggatttgccacttgttccgcctcccttgggggcgttctccttgctgctggcactgtctcttcccccgctattattgttgttctgctcgttgggactggaacttcgactgtgcttgctggttaaggttgattctgctagcggatatggtggtgagttcaccgctgagttaatctcttgcacttcgtcatcatcgggtgactccattttgggtctcttggccaactgaacgggct

SEQ ID NO: 5999 - DNA, 1229 bp, DROSOPHILA
gtaattttcgcgaactaaaacagaacaaataccataaacaactgaataaggtagaataaaaaccgcacaaatgtcgcttctggagcaatacgaacagcaatacgccacgttaatagcagaaataacggcccatattggacggctgcagcagcaaaacaacaacagcgagcgccatgatttgtgcagcaagatcgactccagtttgcccgaggctcaggaattgctggagcagatgggtctggaggtgagggagctaaatcctggactgcggagcagcttcaacggaaagctgcaggtggcccaggcagaactgaaacggctgcaggcggagtacaggttgaccaaggacaaacagcgctcccaagccaacacattcaccactctggacttgggtgacagctatgaggatgtgtccataagtacagatcaacgccaacgcctcttggacaactcggaaaggattgaacggacgggcaacaggttaaccgaagggtacagagtggccttggagacggagcaactgggcgcccaggtcctaaatgatctgcaccaccaaagggaaactctacagggagccagggctcgacttcgagaaaccaatgccgagctgggaagagcttctcgcactctgaataccatgatgttaagagccctgcgggagaaggtggtcttgtatggagtgggtgtctgctttgtggtggccgtgggcgtcagtctctatctgaccttcgcacccagttcaagcagcaccgcctcgtcgtagtaattttagctagcaaaccaatagccaatgatcttagcccaaattcaaatgttatagaagcctgtccattccaatttcgtgagttgattatttattgtttagtatattttatttttacgagatattctgtggaagaaagctgcagattacgcactaatctatataagataggatggagtattacgtgcaataagagtcgaagcttagagtagttatctgcggtcaatcgatgtctatatattttgttgtccttttacctttaagattaaattgaccttcttgttaatcgatggaattcctattactttttaattcttaccgcagatttctaacctatcactcgcgtatccgccatcctagcttacgtgtacaaagtttaagtggttaatgtttggcgcctggttaatagaaactaatcctactctatgactcgtgttcgcgttcgggacgtatttttcgtaaaaat

SEQ ID NO: 6000 - protein, 230 aa, DROSOPHILA
MSLLEQYEQQYATLIAEITAHIGRLQQQNNNSERHDLCSKIDSSLPEAQELLEQMGLEVRELNPGLRSSFNGKLQVAQAELKRLQAEYRLTKDKQRSQANTFTTLDLGDSYEDVSISTDQRQRLLDNSERIERTGNRLTEGYRVALETEQLGAQVLNDLHHQRETLQGARARLRETNAELGRASRTLNTMMLRALREKVVLYGVGVCFVVAVGVSLYLTFAPSSSSTASS

SEQ ID NO: 6001 - DNA, 3505 bp, DROSOPHILA
tttgcaaacgactgacatgctgaattccggagcctcgctatttgtaaggttaggacacgagtcctgatcgtacggtcgaaatccgccggccatttgcacgcggattttggcaacaggtaaaggcaaaaaggtttatttctggcaaaaaacgcagctgcgtcggctttcttggcttattttgcgtattattcgttggaaaaattggtgttttatggcccggcttaacagttattgttccttgcgccagatacctgagaatccgaaaatcttaatcttgcagggctgccaaggtcgccgaataaagataatttgcattcgataattggaagtagagtctaaaatattcgcctttaggctttacttaaattcttatggaaatataggagtaacatgattaaaaaaccgtttgcttctgaaggctagtcttaaatacgaaatactcgtacatgttttaactcaaaaagttatgccttgaaattttaaaggcagtaccatatatccttgagtgtattttccgctcattcaaaatgcattacaatggacggaattccagtagacttacccttaaataggtatcccttctaaaatggaatttaagggtgttttttttccgatcagagagcatttgagcgaagaattatattccaaaaggatctcatgtattggaagggttcccaatacattcaaattgcaatggataatatgcagtccgggtcctgaaaaccggttttttttttacaaaacccaactattgtcctttttggttcttggaactgtggaaagaattcttacacattcctttgttacatttacttttttctcttattttctgaccttcgccaaagtgcagaatacagaattttaaccaaacggatattctgaaaagaaaaagaaaaaaactttatagagagaacttaaaaatttaaaaccctcgtgacttgcaaccgatagttttatttcatagccctaggtgtcaaccctgtcgatgaaagagagagcaaaagcagctttattcgcaattatttataataataattataatacatatactggttcccgcgcaaacaacaaatcccatgcgaagaaaggaaaagacagctggacttggactagttgggaaatagacggggtcctgaaacagaaacaggaataggatatcagctacctggagggcacactcacacacacgcagaggcaggcgctctcttccccgtatatgcgtgcgcatgtgtgcgtgcaggtaggaatgcaaccacttttcgcattctgccgccaattttcagttgacgcagatcctttgaggattgaacatggaaaacgtgagtagctgcaggatatctccaccgaatatgttgatcaagagtttttcccatcgaattgcagcaatatcagcgcatagtcagcgccactgcacgcgaggattcgcaggcaaggaggagcaagcccttgtttctgaatgcctggtcgcagacttctagcgtggacttcgaggtgcttcgcagcatctccgcgccggacccgcaagtggaggtcgagaacagagcgctccgcgataaggtccgctacttggaggccaaactgcagcagcacaaggatctgctatcccagattcatgccacctccgccaggatgcaacaggcatcctccctgctggcagaaagtagaccacccacgccgcccgcggtccagagccaccacattctcacgccaccgagttcagagatatgtgcgcccgcgcagaatccccagattctggactacaagatcatctcggcacccgacgatgcggatgccattgagattcgcctggcggcggagagtctgaacagcctgagcacctctgcggactcagatcgcctggagatttgcctgggcgacgagaatcatcagcagagcaatcatcacaattcccagcagcagtacaggattagcaacggcataaagagggatggttcctccgagtccgccgacactccactacagttcatcaaacgccgcaagctgcaggagattcagttgcaggaagaaatcccgcggcagaacataaaactaccagccaaaccccaagtcaaagcccgtaatggcagttttaccgatctcaacaagggccaacagcaaaacatggacaacgtgatggtgtccattggcccgaacaacacctgtgtgcccgccagtgtcttcgagaatattaactggtcggtgtgctcgctggccacccggaaactactggtcacgatcttcgaccgggaaactctggccacccattcgatgacgggcaagccgtcgcccgccttcaaggatcaggacaagccgctcaagcgaatgctcgatcctgggaagatccaggacatcatattcgcagtgacgcacaagtgtaatgccagtgagaaggaggtgcgcaacgccatcaccaccaagtgcgccgacgagaacaagatgatgaagatccagaacgtcaagcgacgcagcagtggcatcaaacacgaaaaggagaacattatttagatgtattagtagaaatttgttagcacttaatcattaatgacttagaatagcaccaaaaacggctgtaatgcccgcacaaactctcacaatccatagatagtagagcactacatcgaactaacgtgtagcagatttttaaagatctcgaagatgattttaccaatccgaaccaaaagttattgtggttttatttacatttcaggggttgtgcagggtagataagggtttctgcataaagccttcattctttaaaaagttgaaaagagtaaatgtcccaattcgaattagataattggcgcgaaattcatttaccatataaggcttggaactggtcaccctaataattaaatcaccaatatgcagcgctgccagacttttgttcagaacagctgttgacgcctgacgactttttggcggtattgtttataaacaaaattcacttaagaaactggatttaataatgtcctgaatggcgtccgagtcagaaaacactacatcctattttgttccgcatctggttgatcaagtcttcgaattatatcggagtaaagcagagtccaacagccttacaaaaggtacgagctatcaaatcagaaagattctgtagtaactactctggatttcaaacttttcagaggaacgcggacagttcttttacgatctatccattttattgggccaagaactggtcctgcgatcgctacacctcttggacgaccacaacttctccttcttccacgccaagaacaatcgatccgtgtgcgtggtagaaatttccaagggaaccgagtacttccgcttgattccgggcgtaagtttctgcaagtgtgagttcttccagtgccacgtgctgcagttgccgcgaggcatcctctaccaggaccttcccagtggcgaaccgggcattttagaggattggagcgaggagagccgggtgtcctacacctgccagcacatcctggcattgcggctccatcaatttctgaagcacacgggcggg

SEQ ID NO: 6002 - DNA, 1441 bp, DROSOPHILA
aaagcagctttattcgcaattatttataataataattataatacatatactggttcccgcgcaaacaacaaatcccatgcgaagaaaggaaaagacagctggacttggactagttgggaaatagacggggtcctgaaacagaaacaggaataggatatcagctacctggagggcacactcacacacacgcagaggcaggcgctctcttccccgtatatgcgtgcgcatgtgtgcgtgcaggtaggaatgcaaccacttttcgcattctgccgccaattttcagttgacgcagatcctttgaggattgaacatggaaaaccaatatcagcgcatagtcagcgccactgcacgcgaggattcgcaggcaaggaggagcaagcccttgtttctgaatgcctggtcgcagacttctagcgtggacttcgaggtgcttcgcagcatctccgcgccggacccgcaagtggaggtcgagaacagagcgctccgcgataaggtccgctacttggaggccaaactgcagcagcacaaggatctgctatcccagattcatgccacctccgccaggatgcaacaggcatcctccctgctggcagaaagtagaccacccacgccgcccgcggtccagagccaccacattctcacgccaccgagttcagagatatgtgcgcccgcgcagaatccccagattctggactacaagatcatctcggcacccgacgatgcggatgccattgagattcgcctggcggcggagagtctgaacagcctgagcacctctgcggactcagatcgcctggagatttgcctgggcgacgagaatcatcagcagagcaatcatcacaattcccagcagcagtacaggattagcaacggcataaagagggatggttcctccgagtccgccgacactccactacagttcatcaaacgccgcaagctgcaggagattcagttgcaggaagaaatcccgcggcagaacataaaactaccagccaaaccccaagtcaaagcccgtaatggcagttttaccgatctcaacaagggccaacagcaaaacatggacaacgtgatggtgtccattggcccgaacaacacctgtgtgcccgccagtgtcttcgagaatattaactggtcggtgtgctcgctggccacccggaaactactggtcacgatcttcgaccgggaaactctggccacccattcgatgacgggcaagccgtcgcccgccttcaaggatcaggacaagccgctcaagcgaatgctcgatcctgggaagatccaggacatcatattcgcagtgacgcacaagtgtaatgccagtgagaaggaggtgcgcaacgccatcaccaccaagtgcgccgacgagaacaagatgatgaagatccagaacgtcaagcgacgcagcagtggcatcaaacacgaaaaggagaacattatttag

SEQ ID NO: 6003 - protein, 376 aa, DROSOPHILA
MENQYQRIVSATAREDSQARRSKPLFLNAWSQTSSVDFEVLRSISAPDPQVEVENRALRDKVRYLEAKLQQHKDLLSQIHATSARMQQASSLLAESRPPTPPAVQSHHILTPPSSEICAPAQNPQILDYKIISAPDDADAIEIRLAAESLNSLSTSADSDRLEICLGDENHQQSNHHNSQQQYRISNGIKRDGSSESADTPLQFIKRRKLQEIQLQEEIPRQNIKLPAKPQVKARNGSFTDLNKGQQQNMDNVMVSIGPNNTCVPASVFENINWSVCSLATRKLLVTIFDRETLATHSMTGKPSPAFKDQDKPLKRMLDPGKIQDIIFAVTHKCNASEKEVRNAITTKCADENKMMKIQNVKRRSSGIKHEKENII

SEQ ID NO: 6004 - DNA, 7385 bp, DROSOPHILA
tctccaagtccgtgggtgtggtggagaagacggaatacgtcactgatgtcgccacgatttccatgccaacgccatcctcgcagtatcccttctcgatcaacccattcaatcccttcaacccactcttgcccattgccccgcaacagttcatcacatccaccgaggtccagcagtccatggtaacggaaacgagctccaaggttctaaagctgacctttggcgcgaggaccgcctacaccaccatcttctcaacctctgtcgttcccacagctgtcactagattaataaccgccaccattcccggccagccaggccaatccttccccaactactttccgcctccttacaatccattcgcctatgttggctagtttttaggagcatctacgcaagcgagagtgtctaaccccattacttctttgtaattaggaatcctgtattatatttaagaacacgtgcaaatatcgaaaaggcggtgatacaaaaagcagtagattttattatattgtatgtgcactttgtcgcaaaagttgttaatgtaaatactcgagttaagactaaattaggattgcatcgaattttttggatctaagataagcaaaatatggttgtagttcggtttaactgatgttaataaatttttgaacccttttattccctaaattagtttttcattccgtatttactgcagcttaagagttatttgattcttcaaatgatcgatactaatagttatacactgtgttccattccaccgtttcacgcggaagagaaccgacagaaatgcagaattgctgcctttgcaaacaatatatagaaatcgattcccagctatgcacatttaccaaatgctttccgttacaacacttatcaacattatctaataaagttcaatactttcactttgtaatataaattacactccaacatcgatatcgatatctgtgtctctatcgatacccgcgtgtgcgttcgcatttcacatctctggggctttggcgtcacgttcgcatctctagtaaattggaaaaaaataaaatcgtcggagtttttatgtgcttgcagagtagtgtaagtaattgctatttttgtgccagctgcttgccggtagtaaacaacgcgcgtgaactgtgatgccttgcaatcctcagcgcaattcaagtgcggtttaagtccgaacgacccaagaaacccgaagtgtacgtacatatgtatgttttcgcgtgtgtatttttatgcacatgcaattctatgctgctgccatgcaaaggtgcaaaaaatgcgaaatgcaaatatcgttcacagaatgcccattgatctgaccggattttaggtggcacatacgcatatgcatatagcatgttcccggaattgtgcaacttcgcatacatacatatgtaatgtcttatgttggcataattatccgctgttcaagggaagtgcatggtgcaaatcgggaatctatattcggcatactttggtaaagggccaatgagatcgtatttattagaaaattgcccatccgccgtaatatatagcacagcaccaatgattaagttcgcacttccatcttatcccgaagcaatcaagaatgatttctgaacctgcatggcttgctactgcttagtagcttattttagtgatctcttaagatttgatgcaatatcatgtttcccactaatcgactatatgcatagtttcagttttagactgtccacttaaacgtgttaatcatgtttttaggattgcagcgcattgtcacacacattatctaaacagctttatctgtttgtttattaagatatttatgaagcatattatgtattccccctgctttgactctgataacgcaagtgccgtggacactataagataatcgtatttaatctcttcttcgcagatttctttcatatgcaactatgtcggtacactataaatttaagagtacactcaactttgatacaattacttttgatggacttcacatttctgtcggggacttaaaaagggagattgtgcagcagaagcgactgggcaaaatcatcgactttgatctccaaataacaaatgcgcagagtaaagaaggtatgtccaccgcaatttagaatttttcccctgctacatggcttccttcccttttccagaatacaaggacgatgggttccttattcccaaaaacacaacgctgatcatatcgcgcatccccatcgcccatcccacaaaaaagggctgggagccaccagcagcagaaaatgccttttcggcggcgcctgccaagcaggacaacttcaacatggacctgtccaaaatgcaaggcacggaggaggacaaaatccaggccatgatgatgcagagcacagtcgactatgatcctaagacgtatgtggttttaaattgttacaaaaccacctatctaatgtattttctgtttaggtaccatcgtattaaaggacaatcgcaagtgggagaagttcccgcatcctaccgatgcaacaaatgcaagaaaagcggacactggatcaaaaactgtccctttgtggggggaaaggaccagcaagaggtcaaacggaatactggtattccgcggtctttccgcgacaagccagatgcggctgagaacgaatcagccgattttgtgctgcctgctgtacaaaaccaagagataccggaggatctgatatgcggcatatgccgagatatattcgtcgatgctgtcatgataccctgctgcggaagttccttttgtgacgactgtgtgcgaacctccttattggagtcagaggatagtgagtgccccgattgcaaggagaagaactgttcgcctggctccctgatacctaatcggttcttgaggaattcggtgaacgcctttaaaaatgagactgggtataacaaaagcgcggctaagccaggtaagttcattatactcgtttgcatcgcttaatgcaaatgaatcgaatttctctttttagctgcagtaaaaaatgaggaaaaacctcctgttgaaaaagaagtggagaaaaagccagtcgcggaggtggaacccgaagagactgaggtgaaacctgaaaagcaaaaagaatccgaaaccaatggcagtaatccgccaaaatcggaatctccagagcctcccgcaaccacagaaccatcacagaaggagaaagataaatatgattcagactacgaggataacattaccataaaaatgccccagcctgcagctgattctacaacagtgcccagcaaagtgagacatacatatttgacacatctgcaacatagatacataattattgccttaatgtttcagagatcccccagttattcccacagaagtgaatcctctcatcgacgggacaggtcggattatgtttccgatcacgatcacaagcaccaacgtccatcaaaatcggagtctgttaacaaggatcgcagtctcctgcccttgcccattggcaccctgcctagctaccagggccacatgatggccgaatcagaagaagctcgtcgatcgagtgcctataagcccccttatatgcaaatgcagcggggcccacctcctatgcacatgatgagtcaccacatgccagcctacaacaacgggtttaacaacatgggacagaggcctcccctcaggtaggtttcttttccacccgtccggatcccgctaccatgtggatcgagtcaagtgtcgaggccactggaactccgaggtgttgacgagtccatacgcagccggtcctgcctgatctcaatatttttaagttccaacagagactatacacacacactagttaagagtaatttaagctctgggctctgcgcctttatgctttgttgaatattggttattcctaattaaaacagtattgcttacaatcaacgttaagctttttgaattgtaattaacttctaaaatttcagctatgtgccgtatcaaaaccaatccgtacacccaatgcgtgcgccgtacggatctgcaggcggaggtatgaatatgaatatgtcacaaccatttcagtccccaaatttagcctcgatataccaaggggtggcagcgaaggtcggttccgggtgagtatctttagggcgttgtagaagcgtgggatgacaagtaatcccaatgttttgcagtcccattgacgatccgttggaggccttcaatcgcatcatgaaggagaaggagcggaagaaggtggaccgctttcgaagctctgaccgccacaggtcaaggtccccggatagacaaaggcaccgctttaagtctcccatgtacgaaaaggacaactccagggataatctcaaggacaaaagaccgcgatcccgggaaaggaagcgagaacatagctacgaacggcatatacgccaccctcgttctagtcgccagccgaatgatggctctaagtccccaggtggcagaatcaaaaggtagttttaccaccagcccttttccatgtgcttacattcatggtctactctctgctttttagatctggacatcgtcgctctgcatctccaaagccgggctacaagagtgattacagagacaagccgtacaacaagcctagtgctcccaaaacggaggcagttgagcctcctccccccggattcgagccgttgcagctgacggatgaagacggctacaggaacaagcacccgaccagttcggaagcatcacaaagcagcaagggtgatagcagcaagaagagaggggaaaacaggcacgaagaggcgccacgaaagaggcacaggtctcgcagcattagcaaggaaccgaagccgaatgacagcaactacaggagcctgactccaccagcaaagatcaccacaccgaaaatgactgctgcccagttgaggcaacgcgaaagttcaccgaagacgccggaaaagagtcacgacgattatctgaccgcgaaggccagaattatggcctcccagcccgtcatcaacgacacggaaatggagaccaatgtgggcaaggagaacaaggccaagagtccgttgtcaaaagatcgcaagaagaagaagaaggacaaggacaaggctgagcgcaagaaaaacaagaaggacaagcgcgctaagaaggagaaaggggatcgccagaagaagagctcctcagttaatcgatctgactcggatattaacaacagctcactaatgaacgagtcaaattataaagtattgtctcccagggctcaaagtcccagcattgagatcaatgcggctcaactttcccctactcacaacgctactgaaaacgttaatccgaagagtcattccatccttactgtgggtgctgctagcgacgataatcttggcccaagaagcaaactcagcgaggctaattctgtcaatctatccaaatgggaaatcgacgagaatatcttaggtttggaggattcctccaaaaaagctgccggggcctccgacgatccgtcggaaataacttcagacgtcctgcgaaaggctgagaacgcaatatttgcaaaggctattaatgccatcaggcctatggagtttcaagttattatcaattccaaggacaacagcaaggaccgctccgtagttcgaagtgacaaggatcgctcctcctcacccaggcgtaacaacagcagcaggtcggtaaaggataggctgggcaccaagatttccaatgatagaagccgttcgcgagacaagtcgaagggcaggcgccgggccgcaaggagctccgacgacgatgcgaaccgcggcaggtcggatcgtcatggcagccggaagagggacaacagatcccgcgacagggcggcgccttcagagaagaggcaggagcgttcgtacaagcgaagctcgccggaggacgacaagctgaggcgccagaacaaggaacagtccgaatccaagcacggaaagcatgatcaaaacaatagcgacgactcggatcggagggcggccaaaaacaccaagtccagcgacagccgagtggtctcctctgtaacagccgtggttgctcctcccaaaccctgtcgtccagacaacccgttccgcaagttcgtcgacaccagttcgtcgagcagcttagttgtaaaatatgataacacgatacagaaggagggcgcgtcctcggacaacggcatggagcacaggaagcagagggataagaagctgaagaaacattcaaaatattcgtcaaccgattcgttgaagagcgagaagcgcaaggatccgaagagcaaaaagaagagcaagattttgaagaagaagaaaaaatcaaagaagtaggttacggtaggctacgagataagaatgatataaatattgaagattaatgtgtacaaatcaaagatttttaatgtatgtatttatcatgcaactataagtatacaaataaaacagaactactcaaggattgcttgcttgtgatcgatctaactttcgattgcccgccgagttagaagacggtggattgatattcgagaaattaaatatgtttattacaaacagttatcttaaaaaatcgattaaattacacgtgtagagattgactgaagttaatcattattgcttaagccgtccatgaaggacgatgccattggactgggcgttctggagataatgttgtcattgccatagtcatcggagtttgcatccactaaaagcacagaataataatatatatatgcattaggaaaactccgactagtctgtgctgtgcattaaatgctgcttgccttgttctagaaaattggattttctactctggggtatgcaactcagcgaatgtattattggactgcaggcttgatcggctgtttcgagcgtggttggtaagtctaggagtcgttgattttgaatgccatcccctggccccatgtgagaaatgtggttgaaattagtcggtgctgatatcatctttgatctacgatcactacaaataaaaagcgaataatgaggactcgaatcgattgcgccaataggttaactgaagcccaaccttttgatggtcttgtttatctccctgatagagaatctccgctttatgctcggaagtccctttcgatttccgtcacggtattgcaaaaggccctctgcaaataaagcatgtggtttaatggccctgataaacagacgtgaatgatttagcttacttgtgtgaatattggataggtaaacaatcagcggagtgtcattgactgaggacagcaccacgtttcccaaattgtttaagggaagtgattgcttcaatccaatcgactgcacccattcggcagtctgcgtattgaatatatccaaatgtgtatccgaaaacaccagcaagtgaccatcacaaaaggctggaatgagtccacaaaagagttatacatcatgagtcataaccgcatctcgttttttactcacttatatac

SEQ ID NO: 6005 - DNA, 3910 bp, DROSOPHILA
gtcacgttcgcatctctagtaaattggaaaaaaataaaatcgtcggagtttttatgtgcttgcagagtagtatttctttcatatgcaactatgtcggtacactataaatttaagagtacactcaactttgatacaattacttttgatggacttcacatttctgtcggggacttaaaaagggagattgtgcagcagaagcgactgggcaaaatcatcgactttgatctccaaataacaaatgcgcagagtaaagaagaatacaaggacgatgggttccttattcccaaaaacacaacgctgatcatatcgcgcatccccatcgcccatcccacaaaaaagggctgggagccaccagcagcagaaaatgccttttcggcggcgcctgccaagcaggacaacttcaacatggacctgtccaaaatgcaaggcacggaggaggacaaaatccaggccatgatgatgcagagcacagtcgactatgatcctaagacgtaccatcgtattaaaggacaatcgcaagtgggagaagttcccgcatcctaccgatgcaacaaatgcaagaaaagcggacactggatcaaaaactgtccctttgtggggggaaaggaccagcaagaggtcaaacggaatactggtattccgcggtctttccgcgacaagccagatgcggctgagaacgaatcagccgattttgtgctgcctgctgtacaaaaccaagagataccggaggatctgatatgcggcatatgccgagatatattcgtcgatgctgtcatgataccctgctgcggaagttccttttgtgacgactgtgtgcgaacctccttattggagtcagaggatagtgagtgccccgattgcaaggagaagaactgttcgcctggctccctgatacctaatcggttcttgaggaattcggtgaacgcctttaaaaatgagactgggtataacaaaagcgcggctaagccagctgcagtaaaaaatgaggaaaaacctcctgttgaaaaagaagtggagaaaaagccagtcgcggaggtggaacccgaagagactgaggtgaaacctgaaaagcaaaaagaatccgaaaccaatggcagtaatccgccaaaatcggaatctccagagcctcccgcaaccacagaaccatcacagaaggagaaagataaatatgattcagactacgaggataacattaccataaaaatgccccagcctgcagctgattctacaacagtgcccagcaaaagatcccccagttattcccacagaagtgaatcctctcatcgacgggacaggtcggattatgtttccgatcacgatcacaagcaccaacgtccatcaaaatcggagtctgttaacaaggatcgcagtctcctgcccttgcccattggcaccctgcctagctaccagggccacatgatggccgaatcagaagaagctcgtcgatcgagtgcctataagcccccttatatgcaaatgcagcggggcccacctcctatgcacatgatgagtcaccacatgccagcctacaacaacgggtttaacaacatgggacagaggcctcccctcagctatgtgccgtatcaaaaccaatccgtacacccaatgcgtgcgccgtacggatctgcaggcggaggtatgaatatgaatatgtcacaaccatttcagtccccaaatttagcctcgatataccaaggggtggcagcgaaggtcggttccggtcccattgacgatccgttggaggccttcaatcgcatcatgaaggagaaggagcggaagaaggtggaccgctttcgaagctctgaccgccacaggtcaaggtccccggatagacaaaggcaccgctttaagtctcccatgtacgaaaaggacaactccagggataatctcaaggacaaaagaccgcgatcccgggaaaggaagcgagaacatagctacgaacggcatatacgccaccctcgttctagtcgccagccgaatgatggctctaagtccccaggtggcagaatcaaaagatctggacatcgtcgctctgcatctccaaagccgggctacaagagtgattacagagacaagccgtacaacaagcctagtgctcccaaaacggaggcagttgagcctcctccccccggattcgagccgttgcagctgacggatgaagacggctacaggaacaagcacccgaccagttcggaagcatcacaaagcagcaagggtgatagcagcaagaagagaggggaaaacaggcacgaagaggcgccacgaaagaggcacaggtctcgcagcattagcaaggaaccgaagccgaatgacagcaactacaggagcctgactccaccagcaaagatcaccacaccgaaaatgactgctgcccagttgaggcaacgcgaaagttcaccgaagacgccggaaaagagtcacgacgattatctgaccgcgaaggccagaattatggcctcccagcccgtcatcaacgacacggaaatggagaccaatgtgggcaaggagaacaaggccaagagtccgttgtcaaaagatcgcaagaagaagaagaaggacaaggacaaggctgagcgcaagaaaaacaagaaggacaagcgcgctaagaaggagaaaggggatcgccagaagaagagctcctcagttaatcgatctgactcggatattaacaacagctcactaatgaacgagtcaaattataaagtattgtctcccagggctcaaagtcccagcattgagatcaatgcggctcaactttcccctactcacaacgctactgaaaacgttaatccgaagagtcattccatccttactgtgggtgctgctagcgacgataatcttggcccaagaagcaaactcagcgaggctaattctgtcaatctatccaaatgggaaatcgacgagaatatcttaggtttggaggattcctccaaaaaagctgccggggcctccgacgatccgtcggaaataacttcagacgtcctgcgaaaggctgagaacgcaatatttgcaaaggctattaatgccatcaggcctatggagtttcaagttattatcaattccaaggacaacagcaaggaccgctccgtagttcgaagtgacaaggatcgctcctcctcacccaggcgtaacaacagcagcaggtcggtaaaggataggctgggcaccaagatttccaatgatagaagccgttcgcgagacaagtcgaagggcaggcgccgggccgcaaggagctccgacgacgatgcgaaccgcggcaggtcggatcgtcatggcagccggaagagggacaacagatcccgcgacagggcggcgccttcagagaagaggcaggagcgttcgtacaagcgaagctcgccggaggacgacaagctgaggcgccagaacaaggaacagtccgaatccaagcacggaaagcatgatcaaaacaatagcgacgactcggatcggagggcggccaaaaacaccaagtccagcgacagccgagtggtctcctctgtaacagccgtggttgctcctcccaaaccctgtcgtccagacaacccgttccgcaagttcgtcgacaccagttcgtcgagcagcttagttgtaaaatatgataacacgatacagaaggagggcgcgtcctcggacaacggcatggagcacaggaagcagagggataagaagctgaagaaacattcaaaatattcgtcaaccgattcgttgaagagcgagaagcgcaaggatccgaagagcaaaaagaagagcaagattttgaagaagaagaaaaaatcaaagaagtaggttacggtaggctacgagataagaatgatataaatattgaagattaatgtgtacaaatcaaagatttttaatgtatgtatttatcatgcaactataagtatacaaataaaacagaactactcaa

SEQ ID NO: 6006 - protein, 1231 aa, DROSOPHILA
MSVHYKFKSTLNFDTITFDGLHISVGDLKREIVQQKRLGKIIDFDLQITNAQSKEEYKDDGFLIPKNTTLIISRIPIAHPTKKGWEPPAAENAFSAAPAKQDNFNMDLSKMQGTEEDKIQAMMMQSTVDYDPKTYHRIKGQSQVGEVPASYRCNKCKKSGHWIKNCPFVGGKDQQEVKRNTGIPRSFRDKPDAAENESADFVLPAVQNQEIPEDLICGICRDIFVDAVMIPCCGSSFCDDCVRTSLLESEDSECPDCKEKNCSPGSLIPNRFLRNSVNAFKNETGYNKSAAKPAAVKNEEKPPVEKEVEKKPVAEVEPEETEVKPEKQKESETNGSNPPKSESPEPPATTEPSQKEKDKYDSDYEDNITIKMPQPAADSTTVPSKRSPSYSHRSESSHRRDRSDYVSDHDHKHQRPSKSESVNKDRSLLPLPIGTLPSYQGHMMAESEEARRSSAYKPPYMQMQRGPPPMHMMSHHMPAYNNGFNNMGQRPPLSYVPYQNQSVHPMRAPYGSAGGGMNMNMSQPFQSPNLASIYQGVAAKVGSGPIDDPLEAFNRIMKEKERKKVDRFRSSDRHRSRSPDRQRHRFKSPMYEKDNSRDNLKDKRPRSRERKREHSYERHIRHPRSSRQPNDGSKSPGGRIKRSGHRRSASPKPGYKSDYRDKPYNKPSAPKTEAVEPPPPGFEPLQLTDEDGYRNKHPTSSEASQSSKGDSSKKRGENRHEEAPRKRHRSRSISKEPKPNDSNYRSLTPPAKITTPKMTAAQLRQRESSPKTPEKSHDDYLTAKARIMASQPVINDTEMETNVGKENKAKSPLSKDRKKKKKDKDKAERKKNKKDKRAKKEKGDRQKKSSSVNRSDSDINNSSLMNESNYKVLSPRAQSPSIEINAAQLSPTHNATENVNPKSHSILTVGAASDDNLGPRSKLSEANSVNLSKWEIDENILGLEDSSKKAAGASDDPSEITSDVLRKAENAIFAKAINAIRPMEFQVIINSKDNSKDRSVVRSDKDRSSSPRRNNSSRSVKDRLGTKISNDRSRSRDKSKGRRRAARSSDDDANRGRSDRHGSRKRDNRSRDRAAPSEKRQERSYKRSSPEDDKLRRQNKEQSESKHGKHDQNNSDDSDRRAAKNTKSSDSRVVSSVTAVVAPPKPCRPDNPFRKFVDTSSSSSLVVKYDNTIQKEGASSDNGMEHRKQRDKKLKKHSKYSSTDSLKSEKRKDPKSKKKSKILKKKKKSKK

SEQ ID NO: 6007 - DNA, 2960 bp, DROSOPHILA
tgtggccaactcctggcacataactcgatcggccattgttcctcaggagcacaatcttcttgggcatcggcgtattgatggtgcttgtggtggttttatggcggtttttacagaaaaaaaaagtgcctaaaaagagcaaattttgacacggaattttttttattaaaaaatttctgttctcggccaggccaaagtgtaaagcaaagtgtttccgaacggttgaacagttttgacatttgccgtatggacgagcggcagcagtaactgagatgacaactcctctactcacttggatagtttttgtttccaatccggagtcctgctgcgccgcccttttaatcccggaactctggctgtggcgcagcgtccgttggttgtatgtggataccctggatggagcacatgaacaactctggtcactggtcgtattgtctgaatcgtgtgttctggtcggcgttccgcgggagctgaggtgctatcaaaccatcgatggcgctactgataatatcgatggttcagttccagccggttcgatgccatcgatggttttttcgagattatggatcagtgtgctcgccgtccgccggggatgtaataccaaaattgcttgtgtgctgcctccaactggtcaccctggtttggcgggaaaatcgcttttccggcggaagtagaagtttataacaaaaatcatatcaattaataatggatcatgatttactagtcatctgcccattcttggattcaaatatcacgtatttctaatttgacattagtaagctctaaaacaaaacaaccctttgtcgtagtaatatatacatttaataattaaatgtaacattttgtgcaccaaagctggcacttgatatactgaaaataccgtgaaatagtatttttcgcagtgtgctccgtgctcgccacgcgttaatcgttttttagtacattcaccacgggcgccggcgtcattgaattgctcgaaatttctgcgaacctacaaaattaatcaactgttattcagacaaaacaaaatgtcattggaacaggtaagtccgagttgttgaaaaacgagccatcagtgaaataaccccacacccatcgaataacacagctgaaaagcgatgtggccgagctggcggccttcctgcagcaggcgaaaggtgcccgcgtaaaagacgtgctgaccaccgctaaagcggaggcggaacgggagattgtcaatctggagttgaaggccaaaattgcggcagagcgacaggccaccgggtcgagcgaagccaagaggtgagcaaatccatgaggtccaagaaacccaacacccaatcgaccgaaacacaaaatctcttcgggattagtccatatcccaaatgtagttccacatctttctacatcactatatatgggcagagatttcttaaaccatgcaagccccactaatgaatccccatttcgatcgcccagatatctgcacgagctgaccgactacggctgggaccagagcgccaagttcgtgaagctcttcatcaccttgaacggagtgcagggctgcacggaggagaatgtgacagtcacctacacacctaactcgttgcagctccatgtgcgcgatcttcagggcaaggactttgggctgaccgtaaacaatctgctgcacagtatcgatgtggagaagagctaccgaaagatcaagaccgacatggtggccatctatctgcagaaggttgaggacaagcactgggatgtgctcaccgctatccagaagcgtttgaagcaaaagaaggacagcgaattgtccaaagatggcgacaatcccgaatcggcgcttgttaacatcatgaagaagatgtacaacgacggtgactccaagacgaagcagatgatcgccaaagcttggaccgagagtcaggataaggcgaagcttggcaaggagacgggcggcggattggattctttcgacgatctttagatatgataataaccacacccattcgcgaattagctaactacctaaggcactgcttcgattccagcacaatttgtatatgtggataaataaactcccagctagggcattaagttaaaacgagtggtggttggtcctttttttttttttttttttttttttttttgggctttttatatatatatttgtatataggcttttatttaattaattaaattcttgtgattaaaatcaattatgctgctcgtcgcttagagtacacccttgcggtctaatctattccatttgtaatagttagtttgctttcgaaatgaattgataattacactttagctgtatttaaaatacactttatatgttctgcgatatatatccaagtacacatatataatatatatatattatatgtgatgcgatgctcatcatggccagcgctcgagaacccgtggtgcacttcatcttgttttttgctcgatttcttatcaaccttttggcatgcaaatcgggcaattgcttaattttctataattaagtttacaccacgggtcaggtgtgtgtgtgtgtgtgtgttgtggtgtgtgtgtatgtctgtctgtttgtattggaacaatttaattgttaaacaattaatgattaattattttggttgcgatctttctcgccgcttcgagtttacatatacataaattggtatcatttggtgtacaataaaaagctgaaaaacgcaacttaaattcaaaatacaaattataatgataagaaaagaatacaaaatgaaactgatacaagatatcgacagactgaacattaaggccgattttacgagtacataagaactatacaacatgtgggcaattggacaaacacaatttacaatctatatatgatgtatgtaatttatatgcataggtacgatgtactaaactatatgttaacattgctaaatctaaagaaacaaaaaaaaaaaaaagaatgaaatcatacaataaatgtttaatagttg

SEQ ID NO: 6008 - DNA, 718 bp, DROSOPHILA
tcaactgttattcagacaaaacaaaatgtcattggaacagctgaaaagcgatgtggccgagctggcggccttcctgcagcaggcgaaaggtgcccgcgtaaaagacgtgctgaccaccgctaaagcggaggcggaacgggagattgtcaatctggagttgaaggccaaaattgcggcagagcgacaggccaccgggtcgagcgaagccaagagatatctgcacgagctgaccgactacggctgggaccagagcgccaagttcgtgaagctcttcatcaccttgaacggagtgcagggctgcacggaggagaatgtgacagtcacctacacacctaactcgttgcagctccatgtgcgcgatcttcagggcaaggactttgggctgaccgtaaacaatctgctgcacagtatcgatgtggagaagagctaccgaaagatcaagaccgacatggtggccatctatctgcagaaggttgaggacaagcactgggatgtgctcaccgctatccagaagcgtttgaagcaaaagaaggacagcgaattgtccaaagatggcgacaatcccgaatcggcgcttgttaacatcatgaagaagatgtacaacgacggtgactccaagacgaagcagatgatcgccaaagcttggaccgagagtcaggataaggcgaagcttggcaaggagacgggcggcggattggattctttcgacgatctttag

SEQ ID NO: 6009 - protein, 230 aa, DROSOPHILA
MSLEQLKSDVAELAAFLQQAKGARVKDVLTTAKAEAEREIVNLELKAKIAAERQATGSSEAKRYLHELTDYGWDQSAKFVKLFITLNGVQGCTEENVTVTYTPNSLQLHVRDLQGKDFGLTVNNLLHSIDVEKSYRKIKTDMVAIYLQKVEDKHWDVLTAIQKRLKQKKDSELSKDGDNPESALVNIMKKMYNDGDSKTKQMIAKAWTESQDKAKLGKETGGGLDSFDDL

SEQ ID NO: 6010 - DNA, 2594 bp, DROSOPHILA
ccgaggaaggtggcgagaagtacgagtaccacggtgatcttcatggtgagcaaatgctacaatagatgccttgctactgatgctgtcttgaagaacgaaagccagcttttatagtagtcttctctactgggtttatcctcttcggccaaactgtgtcagccaaagaaaagatgttatttttggccaaacaaaaattcgctatttttcgtattggcacaattgtttaaacagataaaatttgcacatgtacaagaggcatgataatctatttttgtatggagcttgtcattttgcgaaaatttattaactgttattataaaaatcacttaagccactaatgccaacggaagtctagttttgtcaaccgttacttggtttttaaataaatgcaaatgacttaggttaaatctatatacgataaacgcattgtaaaaactgcagaaaaattcaactttatatactatactatatatatagattctttactatatatatactatatactatactatattcaactatatattctgccacttaaataatttcccctaaaaagtatactacggcttttaaaacacggaacacatcagctttaaacttattctcttaagcaaataatggaaaaatattaaccaattaaaatgattttgccataaattgtttactttcatttgtagcttgtctgaattatagacaaacaaacacattgtgtacgtagcttaggaaagcgctattattaactatattaaataacgtctggggtagataataatacttaagattataatatatagcatttattgtaggagtatgccctttatattttttctgaaagtaactatttgatcaaaatttcaatggttaattatacgttgtaacgaacttgacatacactttaaacaacaagtgatgcttcttatctcgatctgttttgtaaagtaaatgcataagtaaaagcataagtaaatgctttaagcggcattgataagcagaatgaactaatatcgaaatattcattttatttgccttaagtgttttgaacggaaaaaagaaaaccaaaaagaaaaactacattttcaaaggcgtcacgatcagatcagttggtttgttgtacaagatgtggtcactaagacaggcgtcgggcacttcgggctctcctgcggcggatgcgactgttaccactgcggctactggtgctgccactgctgctactgctgctactgctgcggcgacgacgacggctgcgtgtgctggtgcgatcggtagagctttcgtcgtcgtcggccttgtgcctatagatatgtcgtatccgctttggcctataaacatgacgtgtatagtgatacgtcctcttcttctttttactctttgaggaggaggacgaagtggttgtggtagccgctgtggtagtagttgtatccgacgcagtggttgtcgtggccgaggcggaagtggtggtggtagccgaagcagaagttgaggttgtggtggccgtggagccacctgtctgtgggattagcagacaggcaacggtggccagaagtaaaagaacacaggagtagcgcatgttggatggccagtggctggacaactgatgtctgcagccagaggccgtggtcttttatactaattaccacagttaagcaattacgtaacaaaatctttcatatcttttgcgtagcgaatataaattggacatacataattgggcatttcttaaaagttatattatatatttgcacttaacttacttgactgtttgaacaattgggcacaatgaacaattgacaaacttgcgggttttttgttctgcaaaaacgctccctttgttttggccaaaactgttgacaaaaatttgcaaaagaggataaacccagttgagaagactactataaaagctggctttcgttcttcaagacagcatcagtagcaaggcatctattgtagcatttgctcaccatgaagatcaccgtggtactcgtacttctcgccaccttcctcggctgtgtgatgatccacgagtcggaggcgtccacaaccaccacgtccacctccgcctcggccactaccactacttccgcttcggcgaccaccactacttccgcttcggccaccaccaccacttccgcttcggccaccacaacaacagcctcaccttcctcgagctcaaaaaagaagactgtcactcactataagcgaaaggtcaagaggccaaagaaggtcaggaaaatcacaaggagaaggggtctcaggagccgcaatggtcgcagatccgatgaatgaaagatccacaggaccaataggaaatccactccaatcccaatgctgaacccaatgacaaccatagcacttaacttttgaatagtttataatgaaatagcaatattgttcgtttataaggcaaatatataaatcaatgaaatagtatttctcatgttgaatttctgcattttttcaaatcagtttaaaatgtttttttttttttggttgacagattgactgaatgtaaagttatcagtagttgaaaaagtttgtgttaattatatgtatttatttagtaatattacggctgatcatagttgcattttcaaaat

SEQ ID NO: 6011 - DNA, 594 bp, DROSOPHILA
cagttgtccagccactggccatccaacatgcgctactcctgtgttcttttacttctggccaccgttgcctgtctgctaatcccacagacaggtggctccacggccaccacaacctcaacttctgcttcggctaccaccaccacttccgcctcggccacgacaaccactgcgtcggatacaactactaccacagcggctaccacaaccacttcgtcctcctcctcaaagagtaaaaagaagaagaggacgtatcactatacacgtcatgtttataggccaaagcggatacgacatatctataggcacaaggccgacgacgacgaaagctctaccgatcgcaccagcacacgcagccgtcgtcgtcgccgcagcagtagcagcagtagcagcagtggcagcaccagtagccgcagtggtaacagtcgcatccgccgcaggagagcccgaagtgcccgacgcctgtcttagtgaccacatcttgtacaacaaaccaactgatctgatcgtgacgcctttgaaaatgtagtttttctttttggttttcttttttccgttcaaaacacttaaggcaaataaaatgaatatttcgatatt

SEQ ID NO: 6012 - protein, 146 aa, DROSOPHILA
MRYSCVLLLLATVACLLIPQTGGSTATTTSTSASATTTTSASATTTTASDTTTTTAATTTTSSSSSKSKKKKRTYHYTRHVYRPKRIRHIYRHKADDDESSTDRTSTRSRRRRRSSSSSSSSGSTSSRSGNSRIRRRRARSARRLS

SEQ ID NO: 6013 - DNA, 14766 bp, DROSOPHILA
ccgtcaccagtgcaccacaatggcaaacacaggcgatgccacgaatgggtgattttgaagtcataggtgcttgtggcttaaattagaaatggtaaaggaaatacaaaaagttaatatgtagttcaaatagaatgtatgataatcatgttaaaccctaaatgaaactccatttaaatcattatcattcattgtgccttaagtatattattaagcccagatattgtccgtgaataaattaaataatatgggcattttggccaacaattaaacgaggaaataaacttagccaaaacggaacttccgaactggtcgccaaccacagtgaatcacttacctctcaagagcctctcgccattctagccaagtcgagtcgagtcaagaactcgtggccaccgagaggggactgtcgtcttggccatgttgcaattaactagccaactaagcagcaattggccacaattattattattatttcttgtacgagtagtatgcttatgctacgatggccgattgttgtgcccgccgcattttggtaattgttttagccatgttttgccatttatgtatgggccagaccaagtcccaatatgtgactggaaccgagtcgcctaagttttatttttattacactgtgactacacaaatttgtgaactaacttgatgaattgaatatctcttggtcttggagttttaagggcagcttaaaataaaagcaattatttaagattgtgaatcatatatttgaaatatttttctttttctagtaatatttgttcagtgcacttttttctaatatttctttggcgctgtggctatttctcagttctatcggctaccgtgcgtggagtctccccagattggtttctcgcccgatcccctgacccccggattggccagatgaccttaattcgcggtgcccaccgctcgttttttatgcggctccgccaatttgctgcacattattcacatttggatttgcacccagtcagagacgaagatttgtggcttttggctacagggaaagctttattactgctaagcataacttatgactaaggatatacatacagatggtttttggtggatggacaccggtcgctcttctttcttaaacgtgtaaatagatttatgtgtgtatatttgcactatttgaaccaggaactgcccatttacatgtatgtgtgtgtatgtggtaggtaggtataccgaatacgattggaaactaaggttaacttaagagtatctagtgggctagcataggcaaacagtctgcagagcctcacattcattaaccaaataatgcacttttcttcactttctgcttggactttttttgtttatccgcgtaatttacgttatgcgtagctaattaatcaggtatacttttgcatttagaggtcataaaatgtacaatccttgtgccgggtgatattaaacgttacttgatttgattgattaaggtacaattctttccagctgggtgggcctcactcaaaactcggatatcggatcggatcggttaggatcgattggaattggatcctcagtgatagtggggcacccggatctcggttcgctcaagtcgatcgtcctcatcgctcacatacattctggtcaggtccgaggccaaagagacattgtcgctgctgcaatgatcatgagccaaaagacgaaacatgagcacacacacaaaaaaaaaggccaagaacaatttggtggccaaaaaagagccattgaaatcgcgcatacgaactggaaaacgtttgccagccgcaaatggctgaaattgaataattgcttgccataaatttatgtgagacactgttcagcaatgcccggcattctccagcttttcccctccttggtcgacatattgacagaatgacgggctgccatttgcgcaatctgtctaattgtcaattagccaggtcgaaatcttggctggggattgactagagcctcgcctccatcggtttcgattttcttttttatctttcgttgaaagccaatatatatctgagttaactcaatggtaaaggggtttgggtcacaaaataaacgaatgaaatggtttggatagtgccacatttcaccatccttaatatataacaattatgtatcttaaaatatgcttctaagctgtgtgccaaccgactggccgagatatgccgaacaattaattaggtttataataagtatttggtaaaggggagatctggaatacatatttctaagtatgtacgtaagaggggaactatctattcaagaaatctgttcaaacaatattttcaaattatcacaaaaagcattgaaaatattttagaaaaaggccatgtgaggcgactgagaaaatattgcatggaagaaatctgtcaaactgagaggtgacatgtttaaaataacgttataaaaatattttttttttaaacaaataaatgtaacctatgtgcgactcgttaaataggcatccattgagctgggacaccaggctcaatcgcactcactttaattccttctccttttcgtacacagatgccaccatggcactgtactcctggtccaagttgttggcccgcgagaagtgcgatccgtttacctccagccgctcgaacgaggacttcatggaggcgtccacatccatttccagcccggaggtgttacctcctccgcctgccgcgccggtgctcatcagagccaccatggacagggaggagacggtgcccccgcaaccagaactgctgctgttctcgttgtggcttcccatgaaggtgtttagcatgttcaggctcaaagtggttgtgggattaaccgtgctcatggaggtgctcgccgcctgcgaagtggctgcactgatggacttgccaaatccctcatcgtccacggttgtcgacgaggagccaatgctgtaaaagaagatggaatcaaacaatgagtttagtaaaatgaattgctggactgtgaggcatagtaagattatattgtagaatattatcatcaagctattaattaaatgtatcaacatttcaatctcccaagatgtaccctttcattacctatacctttcctttcatataaactttacagatcgctgctcaattaaccctttgctaccagagcccatatattctcacactttatggttgtagaagcagtttctgaataaaatgactcagcagactccacgactgcagtagttcttttttccgcaacttgtttatttaataattaaaatgatttatgggcctgattgatgtggtggcagacccagtccaccggagagcaataggtgtccatgtttcggctgcatgttgcacttattgctctgcagcagcaacaaagtgcattggcaataataatgcaaaatgttaacaaaatgtagaagcaagaaggaaaaaaaaaattataagccaggccaacccaacatgaattcggagcccaagaaggtcgccaattgaagctgggaaatccaatggaaaaatcgtatatatatatatatggttagtagtcttctgccccatgttgctgctgttcacttggtgttgctgcagttcctgacagattgcggagtggaaaacacagcccacgggccacttgaaaggtgcaactcaagctgcaactcgagctgttgacttgggcttcctagtgggctggccaatgcctgtacgacttcgaagtcagcaaataacggcaaaaaatgagaaaaatgtcaaattcaattttcgccaggcgtcagagtaaattactttggaaaattgccttttgtcaacgcccacgcctcgagggcaactagaaaaaaatacaataaaagcggccagagtgataatttgcttaagcttttacgcagttatgcaattacttaaagtatctgaaagatactttaccgcttctgctggcatgtggaacagttgtaaaacctatttcatccttaatgatctaagtctgcaactgagtcagcaacttagctagctttttgtatattttgttatagtatcgagactggaaaaagaacttgtttggtcgcactatggcactcacgcactgccttttcagctcgaggatgccccagggggccaaagatcgcgtaacatttgacttttactttccacgcaaaaagcaaataaaataaaaaaaaaataaaaaatagtaacatactgcaaagacaaaactcgtttgacaaaggcagaggaaccaccgcaccgtttgtgcagcaaaccataaataaaatatcagcaaggtataaataaaaatatcacatgccttcgaagagcaaaacgcagatagcggacaaaaaatatgcaaatttcagtccaaaaactggttcagtgtactggaagttctcatggggtcgacgacagtttcttctaaggatgcacagcagttgtcggatgtttgtaagacctggctaaatgtcaagatctctcgatgtgattaatggcggtctccatagccaagctcggatttctaattacccagaacaatgggcaattattcaggcggtttattaaagttaattcggtgtaaacgctttgatttcgccctataagcctaatgaattgattgactgcaaccagctgccgcgattatctggtttatgtatgtgacagaggcacaaactcaatttatgcagccagggtgcgagtgtagccactgtcctccactctacgtgtatctatcagatacaactgccccgacattcataggctctgtctcagctgcgcgtgctaatcgcgatgacttcatttcgtgttgctcttgatgttgctgcggctgctgctcattttgctgctgggtttttgctgctgctgggttcgctgacagaggtcaggcccatgtatctcacagataccattgattgccggatagctgtgtgttcgcttgtggcgaaggtgtaaatgattcttaagaaaaaacttaggtgagggtgtgttgaaagtttgggtatcactgggggaagcttgaaaaacaaacatcttaaaattcaaatactatgtttataatgttcttacttgttttgcctaaattcacattcaatttaagtcttgcttaacacaaacaacttgggttttccaaaagcgaataaatcattgagcttatggagttatgtaaatttcagatttcagaaatttgatatttaacaaaataaatgttttgatatcatcatagcaagtaaaacagcggcacactcattaattcaatattatgcctgtttaattagaactcgaagtatctaattgccagatatcaatcaagcaaactcgtttaaacgcccaaattaaacgcagccccaccctttgcggtggcattctcaagcgtgttccacggcagacccaatatactttgcgttatcctgtaatcggccagcccgcctatttatcgcgaatctaagagtttcggtgtaacaacaaaatgccatacaaaaagtcataaacccaaattcaaaacgctgttcaacatgagcagcagccgtcgcaatcggaatcgcaaaatcgaaggagcagctagctccgccagcgggtgagctgcatctgatcgtgtggggtcttgagacgtagacggagtcggagatggagtcggactcggagtcggtccaaaactacgagtaatacggacacacatggccaaagcggatgggaaacacactctaaatgcatctagatagatagtcgagcggtggtccagtgtgcactgggaaaaacaagggtactagttcatgaaaaattgctgtagctacaatattccaattatctatatcttgccttctactccttgactaacttagttaaggtaaccaaaagaattctaaaaatgatgcccaatgatagaactatcttcttttttactgctagcttctagacaccttgataaatgatcttaaaatgctgattttaattacttttccaaacccataactttcaagatacataataaaacgccagtgcagtcagttctaagtggaaggcagggagactggccagacagacacaatggccaaaacggagctgacatttagtgcgcaactggcgacaacgactgtcaacacaggaaagtaaatgcaccgggggccgcaaagttcataaatcgcggaccagagctcgaagttggctgatttcagttggcagagagagcgcaacgtcgtgttaacaatatgttcgctgcttggagagccttaacggctgccgtgtgccataaatctgaagattttcggcattgtcttcgctcagattgggctaggtcgcaccacttggctctgcatatggatatggatatgcatgtggatgtggatggggatgtggtggatgtggatgtggatgtggatatggatgcatgtggataaagtgcacttaccaatcgctgggatcaccagacggacctgtgcgatgattgcatttgctgcgcatgaccaactgcagccagttgggcactggaggcgtgggatctggtgtgtatctgtgggatagcgataatataaggcgaaattagcaattggaaggtcaggagagaggacagtccttcttgtattccgatagatgctcacctgatgatcgagttgcagtgcttcgtcttgggaaccgcgaaaatctcgctgggcgatggcgtggatgccatggcgtgtgccttctccacggccgcatccacctcgggtataagggccagctcctcggtatcgccgagatccacgtccaggctgcttaccgagctgagcgagttgcggggtccggtgtggtggtaacgcgacggactcgacgccgtcgcatcctccagttcactggcgtcgaacttgaggttgactataagagcccagaaggaggagaaggagagaggcacacagcatatcgagatacaccgacggacacacaatgagaatgggaatggatggaagcacggatttggattcggtttcgggcgagattcccatgatcaaaatttcacacagagagagagcaaaaattgttgataacggtatatacatcacctttgtggaatgacaaatgggttgtttttttctgtggttgactttaactcacgtttgtccagcggtcccagctttttggcgagtccgtacattgtctccggtgtccagtagtccggaattctggcgaagatcgagcccgcgtccgccggcagctgaatgcccagcttgtggagcaggagaacaaaaggctggtacagcatcgtagtggattgctcgttgttccactgcaccaccggaatggacttctgcttgcagatgcagtggtaggccaccggctccatgatgtgatcgccttccggaaccttgagaccactccgcagggtcagtttaacgaagcagcactcaatgaggatcctttgcagccataacaaatgctgcgccttgttttccttaatgatcaggtccagcaggatctagaaaaatgtaaaatgcattcttatttaatctaatgccagtaatatccagcaaacccacctgaacatcatctgagggtttgccgtaggcgcactccttaatctcaattccagactctgttgttgcggaagtgggagttgtcagcaaagttctctgatactccgcatcctcgaacttcatcaggtcatcgtattccaacagggtgataatgtccttgaagaattaggcaaattattaataaaatcgactttgagagttcttcattaaagcctcacttgttgcaaaagttgttggataatagaaatcctggttttcagcttgttgccgttgttgctgaagagcttaactatctttcccacaatatcgttgttcttcttgctctgcacataataccaataaagtgtgtccatttcctcctgcgaccaagagctaaagaatatagttataggttaataacatataccaaaggtctaattcaagtgaacctaatatagttgtgattagtaagcaaattcttagggaaagtcatgttaggaagccttgtaaatcaactaaagaatcccataaatacttggatccctacaaacgattgaattttaaaaatctcttgtagctcatccacagatgaagttttgtttaggacgactaaatatgtctaaaagaaaacgctagacaccttgttcttatggtccacaaatgttaaaaatgttatgtttattgcttatgttagttgtatcttagatcaaagattatattgcttatacccttattaaatatattgcttcaaggaaatcttctgaaatccttaccaaacggtatgctcctggttgtgttccttggtcatttccgtcaaggaagttgtaggaatggtgagtggcgacttcggaggagtattcatgaacttgtgaatcacatactcgataagatcagaccagtcctgtgaaaataaattgtttaatgaatgcaaatgactcaatctaataaaatctaataaacttacatcgcacagttcatagtccgcttcccaaattcttgaataggttttcaaaataattggttgaaatagaaccccaatctggcccagatcgccaccgatgtgatgcatcatggtgaagatgcagtcattgacaaactctccgttgttgttgaagtcctccaacagaatgccatagtagtgcatcacctccagcgtggcaaacctgtaatattaatgcattaataatctataatataatataataccatataaccctactgtgttatgtgctccgacaggcgaatggtttgacatccaccaagtttggccgaactgtccagaatgagtaggaggatgtgattggtaaccaccagatcctgaagatactgcttggaatgaatgctgggattgaaacgcctcagcagaagcacaaaaaggcacctcagatcggacatttcgctaatctgcagctgaagctgcctcaaatgggctttgtcgtcctcgttcagatgagtcactttgttgtacgtatcaatggcctggaggaactcccggatggccgtcaccaccaagtgcattcgccttagatagggcttcaggtcactgccctcctgtcgggcattcagttccagttgctcacatagggacacaccctcataggtcaagtagctcaaaacatcgtaggtgagaatagtgtcgatgtgctccatatccagctccagttgggcggcaaacttcaggaagtaggtgaccagccagaagaagtgcgatgtgtcaatgggcaccttctggaggaaagtcagagaagttctctttagtttttatgataatatataatattataattaaaataataatagcaagatgtgaggtatttcaaaagataatgaacctaatctactttaagcctgttaagttttaagcctccgaaaaacatatgaaaagcgatgagcgcatcataaatgacaaaaattcaccttgttctgtctcaattagttagttagtgtgtgtaaatttgtttttaagaaaatcgaaattatagtcctcataataatttctatatcaatatcgacataccgcattggaaagcagttgcatgtgcagttcctccaccagatagctgtaacccttgaggaggaaatccacggtgaattccttcagcagattggagatgtcatcatcggtgggggtgtgctgtaccagacccttcatgttgatgctgtgaatttaatattattgttaaatggttacaaaagtttttttttctgatttctaatcaatttgctgtggattttcctgaaacttacaggctgcttttgctgcgcttgaccagttttttgcgtctaagctcctttttgtccattggcgacataatcgtccgtggtttattccgtggcttcgtgttacacggaggcttctggtgctgcggcttgccctgcggcccatcatcgtcgttgctggaggtggaaatggattcctgattttccacctgggtgccataaccgcaatccgatagctccgactgcgaggaggggcattcccgcttctgtgggcaacacttgcccttggtcagctggagctggccggcatgtggggacttttggcccaatttgaccgcagatacgtgggacgcgtaggacgattcgttgaacttctgcatttgagcgtgtgccgaggtggaggctctgactggcagaggaggtggtggcttgaatggctcattgcccaggcagccttgtggcgcactggacgttgggttggtagtgttgttgaccttgtcagctggttgttgtgttaagtttaggggctccgaggctgggcccaattgtaggtactcttcctcctccacttcgtcctggaagagtacgatattttgttatatatttcaatggcactggtcatagaaactcacctcatcttcatcctcctcgccatgctcgttcagttgcctgtgtctctggtcctcgtaatctccatcgtccatggactcgccggcgggctgcgattgctccggcgatccaggctgctcgctgtcgttccccgtcatatcgctggcctcttcggagccatcgggcttatccgctggcactctggccatggcgttctgatactcctgacccttgcggctcacctcctgcaaagtggccgctgttccttcccgcatgccaccgcccatgccacggccattgctgccattgtccgaggaatcagaggtaggatcagaggtcagcatggggctggaatcgccactgccctgtttggggggcgaggtattactctcattatcctcagagctctccgacagagaggcttcgaaccagaggctaagtagtttttgcagagtgctcacatgctgatccttgtagatcaaagcaatcagttgcaccatggtcactccccagaaggctctctgcggacaggtcatcagatacaggagtaacttgtcgatgctctggatgaagagattccacaagatcgtgttctgcatggagatgccatgcggcatcgactgcatcatgggcatcacgcaatgggcatgcgtctctggaatgtgcaggatatttctcagcagcagcagacagttgttgatttgatcgcatttgtgcggcgacagcttagggtccgactccagtatgtgtttcatgtactccaccacgctcttggtgctcctggcctcggtaaatgcttccttgctggtgtacagcagcttgttcagctcgaagatggtgtggcgacccacatccgtgcggtacatcacgtccacggagaagaggcactccaccggcaccgtcagattgacgagtatccggatgaccgactccaggaccgcatcatccttggcattctccagcagcggtatcaggtctgacctcacattctggccaaatccaatggcccgtcgaaaggtgcgcagtgtttggtcctcataggtgagcttgtagttgatctcctccagaatggctggggattgaaaataagttaaatacctaattaatgtagtagtcctatattgattactcacccaatgcattcgggttgaccacataggtatcgccctccaagcaacccaaggaggagaacgcgctgtacaactgcggagttgctagtaaccagtccataaccgatttcactttatcaaagttctgattattccagatgtgattgtggagctgcctaactctgctcattgtcgactgcgaacattgaggtacttcttagccatttgcgcggtatctgtaactataagtaaacaaaaatgtatatttaattgttattaaaacttaaatattcttaacgtggtaccagaggtgaatttaaataatattacacatttaaactgagatgtgaaatggtgaaaaatttatggcatttttgtaagctgtaacagtcaccttaaaatatgttaaggtcactaacccatcgtcttccagggcattacgcaaccacaaatgattcccataaatatttgcactcgcaaacaaaatcgccacccatgtgaccatcaagggcgcagtccatgcaatgtgctgcaattgcagccgctcggggatgaaacccgaatcaactcccattccacatcacctcacacacgtgtccgcacagcacgtctcccatttaccacccgttgcgagtcgaatcaaggaaactgcctaccagacgagccccgaaagttcccagaagccacacttgccagtccggaaagtgaaaaagtgggctggattggcaaacaccaccaccccccccccccacacaggggggagcccaaccttcagccatcacgtaacgaggcaaatcctcaacaggcgactgcggcacccggtggccgcatgtgactcacttgcagacatccgggctgattgtgtaaacaacacagttggaggacaaagccactgggttcgcaaacggactacggactacgggactccggaggaacaaagcctgcagtcggaaaagccgaccacccgtagcgatatttataggacatgaatcgggatgcaggatttggcatttgtgcggcttccagcctgctgactttgaatgtttcgtgctatatttggccattaaagcgaatgcagtttagttgcattggttttcgttgccctcttttgggcgaacacgttaaatggcacgctaaatggccaagagcggaaaataaacagcgcaaacagttgagaaaattttaaaattacaaagccatttatggcctagctgatttactataaaattgttttaaaatgtaataatgctcaataggaaattatatctaagaagggagatttaattgtgtgtaaattgagggacaataaattatggacattttatagaaaatattaaaaaatataattaataagaaaacagtgatatctaagagaaaaaaaataaaaatacttttcttttaaattttacttagatatttctactgaaactaatatcgaattttgttggtcgagcataatttttgcaccatccgaaatcatagatcatctgagcatctttgtatctgtgaaacgtttctagcaaccccaataccatttccgctgactggttatgaaatcaaagacccaacttacataaaacgcaaggcgagaactacaaaatgatatgcgcattgaaatttcgagctgagtatctacttttcttggagagtgaaaacaattttcattctttcgcaaaggggaaattcattgaagcgaggttgaatttgcatttgaaacggaaagcaaagatagatcacgaataaatatttaagatttgaatttgcaatgcaaatacatctgagggtcgttaaaatcctagctaaacgagcagaaaccactgaacatctgtgtgccaggatgaaatctgtcagtttcaggacgattcccgtacttatttcgctatcctgtttctgacaggaattccgtggaaggccaagcctccttttttgacagttcactgcgtgctttttacataagaattgtaacggagaattgttgtgcttcgtaaattgcccctttaacttgttttcattttcccagtattatgtgatttcgttttcatgtggaaatgggttttctttctgtgcaagctttaattgcttgaatatgtcgccgcttaaagctactttttagaaagctttgttaaagtgtaattttgtcaggggtcaactgataacgaactgtgttaggtcaggtctaagctatgtaatgttaaatatactagtggtttatatttcttaccaattatttaaattttttctatcgcagacaattttactgttttagttttagccgaattgcaatcaacaattaaagctgattgtttatgtttctaagcaattgagcttttctgagcactttttgggtttctttgcagaatagatcgtgttatagtttcagtgctgttatatacactgatgaaattatttttgttttatatctgaaagtagttttaagaatatttgttagggtaaattcagtttttttggtaatattaagattttaaccactcatgaaaaatttgttaaggatttgcaattttatttaacactttgtgaactttgctttgttaacactgcacaaaaaattctttatactcgttgttggcttatgtaaaatgcaacttcaatagcaattaatttgcacttttttcgattgcaatctaggctaaacactgagagaaagaccagtgagtcatgtaagcactctctttaagattattgatatgtgaattaataaatattattgcatgaattcacaaaagtattcaagattattttagcaaaatatctttattaaattttctttatttaagagatatttattttcgaaacttctattttgttgataaacttcgaaccgctcaacgaaccgcttacttggaacgcacaatgctgaatgcgatctgagttacggctagctcaccgaagtcagatacaaaatgcatctcacagatacacacactgaccgaaacacccactcacacagggccaacgtgccgctgccggcgtttgtgcgaacgaaagacgctagccgaaagctctcgccgcgctgctccgtcccgctcgcactcaatgccggacggccggggaaatcggctcacgtgtaatcacaacgtgccgcacgtttatttgccaaccgccactacgatgttcgataacatgaataaccagcgccggaaaatacggagaacagtctgggaacaacagcaatagtcagaacgtttctgtgcactcaaaaaaaaaaagtgtgtcactttaccaaatggtatcttcaataacgagacttcactttactttaatactttactttactttatttaataaatgtatatatttagtgtgcaaaataattaatataaatgatttcaaaactacgtttttttttgattatacaacactcacgtttatatgtatataatatat

SEQ ID NO: 6014 - DNA, 4897 bp, DROSOPHILA
aatttcatcagtgtatataacagcactgaaactataacacgatctattctgcaaagaaacccaaaaagtgctcagaaaagctcaattgcttagaaacataaacaatcagctttaattgttgattgcaattcggctaaaactaaaacagtaaaattgtctgcgatagaaaaaatttaaataattgatgagcagagttaggcagctccacaatcacatctggaataatcagaactttgataaagtgaaatcggttatggactggttactagcaactccgcagttgtacagcgcgttctcctccttgggttgcttggagggcgatacctatgtggtcaacccgaatgcattggccattctggaggagatcaactacaagctcacctatgaggaccaaacactgcgcacctttcgacgggccattggatttggccagaatgtgaggtcagacctgataccgctgctggagaatgccaaggatgatgcggtcctggagtcggtcatccggatactcgtcaatctgacggtgccggtggagtgcctcttctccgtggacgtgatgtaccgcacggatgtgggtcgccacaccatcttcgagctgaacaagctgctgtacaccagcaaggaagcatttaccgaggccaggagcaccaagagcgtggtggagtacatgaaacacatactggagtcggaccctaagctgtcgccgcacaaatgcgatcaaatcaacaactgtctgctgctgctgagaaatatcctgcacattccagagacgcatgcccattgcgtgatgcccatgatgcagtcgatgccgcatggcatctccatgcagaacacgatcttgtggaatctcttcatccagagcatcgacaagttactcctgtatctgatgacctgtccgcagagagccttctggggagtgaccatggtgcaactgattgctttgatctacaaggatcagcatggcagtggcgattccagccccatgctgacctctgatcctacctctgattcctcggacaatggcagcaatggccgtggcatgggcggtggcatgcgggaaggaacagcggccactttgcaggaggtgagccgcaagggtcaggagtatcagaacgccatggccagagtgccagcggataagcccgatggctccgaagaggccagcgatatgacggggaacgacagcgagcagcctggatcgccggagcaatcgcagcccgccggcgagtccatggacgatggagattacgaggaccagagacacaggcaactgaacgagcatggcgaggaggatgaagatgaggacgaagtggaggaggaagagtacctacaattgggcccagcctcggagcccctaaacttaacacaacaaccagctgacaaggtcaacaacactaccaacccaacgtccagtgcgccacaaggctgcctgggcaatgagccattcaagccaccacctcctctgccagtcagagcctccacctcggcacacgctcaaatgcagaagttcaacgaatcgtcctacgcgtcccacgtatctgcggtcaaattgggccaaaagtccccacatgccggccagctccagctgaccaagggcaagtgttgcccacagaagcgggaatgcccctcctcgcagtcggagctatcggattgcggttatggcacccaggtggaaaatcaggaatccatttccacctccagcaacgacgatgatgggccgcagggcaagccgcagcaccagaagcctccgtgtaacacgaagccacggaataaaccacggacgattatgtcgccaatggacaaaaaggagcttagacgcaaaaaactggtcaagcgcagcaaaagcagcctcatcaacatgaagggtctggtacagcacacccccaccgatgatgacatctccaatctgctgaaggaattcaccgtggatttcctcctcaagggttacagctatctggtggaggaactgcacatgcaactgctttccaatgcgaaggtgcccattgacacatcgcacttcttctggctggtcacctacttcctgaagtttgccgcccaactggagctggatatggagcacatcgacactattctcacctacgatgttttgagctacttgacctatgagggtgtgtccctatgtgagcaactggaactgaatgcccgacaggagggcagtgacctgaagccctatctaaggcgaatgcacttggtggtgacggccatccgggagttcctccaggccattgatacgtacaacaaagtgactcatctgaacgaggacgacaaagcccatttgaggcagcttcagctgcagattagcgaaatgtccgatctgaggtgcctttttgtgcttctgctgaggcgtttcaatcccagcattcattccaagcagtatcttcaggatctggtggttaccaatcacatcctcctactcattctggacagttcggccaaacttggtggatgtcaaaccattcgcctgtcggagcacataacacagtttgccacgctggaggtgatgcactactatggcattctgttggaggacttcaacaacaacggagagtttgtcaatgactgcatcttcaccatgatgcatcacatcggtggcgatctgggccagattggggttctatttcaaccaattattttgaaaacctattcaagaatttgggaagcggactatgaactgtgcgatgactggtctgatcttatcgagtatgtgattcacaagttcatgaatactcctccgaagtcgccactcaccattcctacaacttccttgacggaaatgaccaaggaacacaaccaggagcataccgtttgctcttggtcgcaggaggaaatggacacactttattggtattatgtgcagagcaagaagaacaacgatattgtgggaaagatagttaagctcttcagcaacaacggcaacaagctgaaaaccaggatttctattatccaacaacttttgcaacaagacattatcaccctgttggaatacgatgacctgatgaagttcgaggatgcggagtatcagagaactttgctgacaactcccacttccgcaacaacagagtctggaattgagattaaggagtgcgcctacggcaaaccctcagatgatgttcagatcctgctggacctgatcattaaggaaaacaaggcgcagcatttgttatggctgcaaaggatcctcattgagtgctgcttcgttaaactgaccctgcggagtggtctcaaggttccggaaggcgatcacatcatggagccggtggcctaccactgcatctgcaagcagaagtccattccggtggtgcagtggaacaacgagcaatccactacgatgctgtaccagccttttgttctcctgctccacaagctgggcattcagctgccggcggacgcgggctcgatcttcgccagaattccggactactggacaccggagacaatgtacggactcgccaaaaagctgggaccgctggacaaactcaacctcaagttcgacgccagtgaactggaggatgcgacggcgtcgagtccgtcgcgttaccaccacaccggaccccgcaactcgctcagctcggtaagcagcctggacgtggatctcggcgataccgaggagctggcccttatacccgaggtggatgcggccgtggagaaggcacacgccatggcatccacgccatcgcccagcgagattttcgcggttcccaagacgaagcactgcaactcgatcatcagatacacaccagatcccacgcctccagtgcccaactggctgcagttggtcatgcgcagcaaatgcaatcatcgcacaggtccgtctggtgatcccagcgattgcattggctcctcgtcgacaaccgtggacgatgagggatttggcaagtccatcagtgcagccacttcgcaggcggcgagcacctccatgagcacggttaatcccacaaccactttgagcctgaacatgctaaacaccttcatgggaagccacaacgagaacagcagcagttctggttgcgggggcaccgtctcctccctgtccatggtggctctgatgagcaccggcgcggcaggcggaggaggtaacacctccgggctggaaatggatgtggacgcctccatgaagtcctcgttcgagcggctggaggtaaacggatcgcacttctcgcgggccaacaacttggaccaggagtacagtgccatggtggcatctgtgtacgaaaaggagaaggaattaaacagcgacaatgtctctttggcctcggacctgaccagaatgtatgtgagcgatgaggacgatcgacttgagcgaaccgagatccgggtgccccactatcactgaggatccaattccaatcgatcctaaccgatccgatccgatatccgagttttgagtgaggcccacccagctggaaagaattgtaccttaatcaatcaaatcaagtaacgtttaatatcacccggcacaaggattgtacattttatgacctctaaatgcaaaagtatacctgattaattagctacgcataacgtaaattacgcggataaacaaaaaaagtccaagcagaaagtgaagaaaagtgcattatttggttaatgaatgtgaggctctgcagactgtttgcctatgctagcccactagatactcttaagttaaccttagtttccaatcgtattcggtatacctacctaccacatacacacacatacatgtaaatgggcagttcctggttcaaatagtgcaaatatacacacataaatctatttacacgtttaagaaagaagagcgaccggtgtccatccaccaaaaaccatctgtatgtatatccttagtcataagttatgcttagcagtaataaagctttccctgtagccaaaagccaca

SEQ ID NO: 6015 - protein, 1389 aa, DROSOPHILA
MSRVRQLHNHIWNNQNFDKVKSVMDWLLATPQLYSAFSSLGCLEGDTYVVNPNALAILEEINYKLTYEDQTLRTFRRAIGFGQNVRSDLIPLLENAKDDAVLESVIRILVNLTVPVECLFSVDVMYRTDVGRHTIFELNKLLYTSKEAFTEARSTKSVVEYMKHILESDPKLSPHKCDQINNCLLLLRNILHIPETHAHCVMPMMQSMPHGISMQNTILWNLFIQSIDKLLLYLMTCPQRAFWGVTMVQLIALIYKDQHGSGDSSPMLTSDPTSDSSDNGSNGRGMGGGMREGTAATLQEVSRKGQEYQNAMARVPADKPDGSEEASDMTGNDSEQPGSPEQSQPAGESMDDGDYEDQRHRQLNEHGEEDEDEDEVEEEEYLQLGPASEPLNLTQQPADKVNNTTNPTSSAPQGCLGNEPFKPPPPLPVRASTSAHAQMQKFNESSYASHVSAVKLGQKSPHAGQLQLTKGKCCPQKRECPSSQSELSDCGYGTQVENQESISTSSNDDDGPQGKPQHQKPPCNTKPRNKPRTIMSPMDKKELRRKKLVKRSKSSLINMKGLVQHTPTDDDISNLLKEFTVDFLLKGYSYLVEELHMQLLSNAKVPIDTSHFFWLVTYFLKFAAQLELDMEHIDTILTYDVLSYLTYEGVSLCEQLELNARQEGSDLKPYLRRMHLVVTAIREFLQAIDTYNKVTHLNEDDKAHLRQLQLQISEMSDLRCLFVLLLRRFNPSIHSKQYLQDLVVTNHILLLILDSSAKLGGCQTIRLSEHITQFATLEVMHYYGILLEDFNNNGEFVNDCIFTMMHHIGGDLGQIGVLFQPIILKTYSRIWEADYELCDDWSDLIEYVIHKFMNTPPKSPLTIPTTSLTEMTKEHNQEHTVCSWSQEEMDTLYWYYVQSKKNNDIVGKIVKLFSNNGNKLKTRISIIQQLLQQDIITLLEYDDLMKFEDAEYQRTLLTTPTSATTESGIEIKECAYGKPSDDVQILLDLIIKENKAQHLLWLQRILIECCFVKLTLRSGLKVPEGDHIMEPVAYHCICKQKSIPVVQWNNEQSTTMLYQPFVLLLHKLGIQLPADAGSIFARIPDYWTPETMYGLAKKLGPLDKLNLKFDASELEDATASSPSRYHHTGPRNSLSSVSSLDVDLGDTEELALIPEVDAAVEKAHAMASTPSPSEIFAVPKTKHCNSIIRYTPDPTPPVPNWLQLVMRSKCNHRTGPSGDPSDCIGSSSTTVDDEGFGKSISAATSQAASTSMSTVNPTTTLSLNMLNTFMGSHNENSSSSGCGGTVSSLSMVALMSTGAAGGGGNTSGLEMDVDASMKSSFERLEVNGSHFSRANNLDQEYSAMVASVYEKEKELNSDNVSLASDLTRMYVSDEDDRLERTEIRVPHYH

SEQ ID NO: 6016 - DNA, 2175 bp, DROSOPHILA
gaaaaagtttgtgttaattatatgtatttatttagtaatattacggctgatcatagttgcattttcaaaattctaagaattgtatgatctttcgctcatatatcatttaggttagtaacttttctcacttataaaatgaaagctttaataaacaatcatcccgcaaaagtgtgctacaaaaaaaaagctgtgttttgtgctgcttttgtctcttgaacaaacaaaaaatagagattaacttaaaacgtataatgcttaatttgtttaccttagcttatgtagcattcatgtttggacttcgcaaatatccgaatgcaaaaattttggtaagcaataaagattgctatgttttcgaggtcaactggcgtcgtctacaattgaatactattgtatatttgaaccattgcaaatgggttttctgtcaattgtttaaatatttgaatatttttgcttgattatatttaaatgcaaaaatgtatgcgaactttctctttcacttgttcaaagatgttttgtctatgtggcgtcgtataaatttagctggtctgtacaattattttctataataacccagtctatgaccattttggtctttcccacaagtctgtttaaataataataggctgatgataggatcatgtttttgctaaacaattgtttgattaatatttacgattaatctttacgttttaaatccattgattatttaccctttaaatccaacgattaatatttacgttttaaagccattgattaatatttaccctttaattatgttttcaatttgattacttaacttgagattttttaatttgaacgcacagataaatgcaaaccaaacttgagcaagatcatgtttttcaacatgacgttccaattttgcccattagtttatcatagatatattcgcttaattaatattcaacatacacaacgctttattcaagactttttaacaaacaaaaaaaaaaattaaacaaaaaggaaacaccagcatactctcaatactgaaagtagtcatgcttctgaaagtcggtgaaggaatcgatgtagtcctcgggatgatagtcaatgctttggtaagcgacatcaggctccgtaaagtcctcgaccttataaaaaattttacatacgagcagccagggcaggactattagcagcagtttccattccattatctctctcgcccaaaataacagcggtttctgcgatgaccgacgaagtactaattaaggggaagctaaagtgtataaagcttccatatagccatatagctatatagccacacagccaggatgtgggtcagtttgtgcagctggcgtctgtccctgtacaagctcaaatatgtgactaacccactttcatccgcacagccagccgccaggtggaatactttcaggcgggcgaaaaaaaaaaaagaatcgaaaatgggggaaagtaagtggccaagcgctatggccaagtcgaaatgcgaatttaaacgctaattgacatagaaatgcgtcggggaatgtaaaacttaacggaatattaaacaaaattgtcataaagaaactatttgagcgagaattgcagttaaggaagtggatgtatatgtatatagagtaaggtatagtaggtacttagttatttaaaatctttaaaatatttcttatttagaataaattatatttgtagcaactgtttcctaattcgcttttttctccattctttctttacagatctcggcttgatagaaaaaaaaaatgttttcgcgcaacagatagctcccaaccgaagtgggaatgatgcgattggcgcgatttacgcagggtttctcgtttaacaagaatgtggccaaggtggtgggggaaatgggcttcaaaacagccgtttatatgctctttttcaatttttaaactttggttcttgccaagaaatatacaatagaacacgtttaaaggccaaatcatgtgtagatgaagaattgtatattttgtgactaaaccactcttgaatatgatagaaaaaaaaaggaaatttatattgatataagtatttggtttctctgcatttttagcatcgcggcagtggcagtagcaacggcaccggaaacggaagcgggaccggaaacggccagggattaggtggcagctgcagtgccaacggcctggcagccactggcggcgttggagg

SEQ ID NO: 6017 - DNA, 175 bp, DROSOPHILA
atggaatggaaactgctgctaatagtcctgccctggctgctcgtatgtaaaattttttataaggtcgaggactttacggagcctgatgtcgcttaccaaagcattgactatcatcccgaggactacatcgattccttcaccgactttcagaagcatgactactttcagtattgag

SEQ ID NO: 6018 - protein, 57 aa, DROSOPHILA
MEWKLLLIVLPWLLVCKIFYKVEDFTEPDVAYQSIDYHPEDYIDSFTDFQKHDYFQY

SEQ ID NO: 6019 - DNA, 7312 bp, DROSOPHILA
aaatcacactaaataaattacataatcaagcgatcaatttgcatatttatgagcgaaaataaaaagcaaacataaagctttttaagaacaatctcagatccggctggcaccgccaagcactccgaagctatatatatatatttttttttcatttttgggggaggtgtgctgatggccagccgacgatcctttccccgccagttcattcacatggcaattaaagcacaaaaatcgaatcaaagtttgtaaatgccgaaaaaaaaacccatcgaaccgcttttgtatctaatttttttcaaacgcgtgcgttgtgccgagcgcggaagccaaatcattggcgatcttaaatggcatttcgaaaggcttttcaagatcaaggcctaaaaaagaagacaaacactccatcaaatggtgatatatgaagctggccagggagatggatgccagcgcggcggttccaagagtgtttgcataaatacatttcgaaacaaaacccaaacacccgacacgatccaaatctctatctacttcgagctcaagtttctagtgcctggcggcactcgagcaacaactacttaatggatctctgcggctataaaaattatcaaactacagttttagaccgaacaatagatcgagaagatgctttaaataaaaactaaataaataagacgcgagcgggaaaaaaagtcggaaaaaaaagaacataaatatttatagacaaaagttgtcgttgtctaaagatgttctgagcagctcatctcgttgtttttggattttgttttgctgctatatggctatatggctatatggctatatgggctgccttttgcctttgctgctgccaaagcttcgctgcagcagcagctgcggtcagcgtcgccgtcgccgctggcgtcgcagtcgcagctttttcaaagctgcacgaaatgttgttggtgggcagccagcgcggcttcgactataaaacagtttgctgctgccaattgacttttgttttcgtttgcgtctggtctcgtctggttgtctgcttggacaattcggcgactacagtatagaaaccgtgctgtgcagtgttattccaaatagcaagcaaaggtaagcagcagcgctccgcgtccaaggatataaagtgtgctctattactatgccatatgcgatatgtgtgtgtgcggacaatcgaaggactaaccaaagtgcaaactcatattgtgttcgaaaaaaaaacataaaaacaatcataaattgtacaataaattgagtgctgtgcgctgttcaaggatatggaaacctgaaacatccgaaatccaacggaaaaaattaaaaaaaaaagtaccgctcagaactggcaagacctgaatgaatgagaactaaagctagtggaaacgagttcgttgcccaagtctttcgtttgagaccgctgactgaaaaagttcgcttctcgagtctctcgcttgagaacttagaaaaggtttgctgtctaagtcattcgtttaagaacctttgttgataaagtttgctgcccaagtcttttgtttgtcacttttaaaaaagttcgttgcctaagtcttttgtaccataaatttacatgacggataatttgagttataaaattaatgacaaaattattagttgaacatatttccaacgaacatatagtttgcgcaatgttgcacataaaatttccatcacccataacccctttgaagaaaaacccaaaaagagaaacactcgataatgcacaaagaccaccacttggcctgtaatttgcccaatggcattaaagggcactgagctctctgtaggagtataattaaatgcctcatcagctcgtcggctgattgattaacatgcatgaaacaagaaatggacaaagcgctgatggacaagttacaaaacgcaacaaatgaacaaacaaatgagtcaaaaaaataaacaccaaaaagtagccacaataacttacatacacacatatttcccaatgaactcttcacttttggaaatgtcgctgtcgaagatgaaatcaatacgaaatccaattttcattatgtattgttaccaaattaggcgcttaccgctgataagcgctggtccgtcgttaatgatttatagttgccaaatcagcggacagctggcgatcaaataaacactggcgttaagccacacagacacgcaatcgccgcccagatcaaatccaattaatatgcaacaatttccagctgcgcgcggacattgagccgccggtccaatcgatcctttgcgaattgcattagcataaggaggaagaaacgactcgaaaacgggctttcagtccaattgaaatgctagccgacgtggaaggttctagccgaagacacgcagcgtctcaaaaaaaaaaaaaggaaaaaaactaaataaaatcagagagatagaaaataaaaagtcaataaaaccagttaaggtcagccccagtgctgcttgtgtaatcagcagcatgctttgccgccgttgcagatgctaaatacatttttatttatgaataatgtgatgtgctgacgccgatattgatgttgctgccgatgctgatcacgttgccgctgcgctgcgccacaataaaaatgaaaatgaaaataataaagtctcaagtgtcgtcgatcgtcgatggtcggcggtcgatggcgtttggtagtcactgtggcactgtgtcagtggccgccgggggcaaccggttgcgcatccttgacataaaaaagcgatctcgaccagcagcttacatcttcggatcgatgcggatcgtattgaccagcgagctgaaaaatttatacgaaattgcgtatacgcaatatgggcagaggtggtggcgaacaaaagggcgcggcatcgttatcgctcgataatcgtgtacaaatttatgttaatgacaacgtgttaacaatttgcatatctatatctgtacctgtaccagttacttgccaaatcgcatatggcctggcactttgtcttaccaataattcaagtttcatgttttaacaacttttctctctctttgcgttccagatgaaagtcaccctggcaatagcgactttctgcgtggtgatggcctgcagccatgcggccagaaccacaacgacaacagcgaccaagccgggtcgcttcctctcactgcccgtgcccgccaagtgcgctagccgtaagtatatctatcatcaaacaccattgcacacatacccgaaaccaatcccacaatggcgaaaagtaaaagtgacgaacgcggcgagaatattaagcggctttgattgccaagtttgcacttgaaatagtttggcaatgcgacgtgtagctgttggtgtaaccacaaatgttgaggggattttttttttttttttttgctgaaggtcgtcgacgtgtgagccagctttatggcgccctataagactcactttctttgcccgcctttttcgtaaacaaattccatttgatatagtatatattatatatattttttaaatttattatatctaatgttaatgtgtaaatggagttgttcgccatcaaattaattgatttcctctgcacttttaagctgataattgttgaaatccgaaggggcttaacaagcaaatagttcagttgaagtggattttcctcatttattctacgtatgattgtcgctgccagtcatcgcctgagattactaaccattgcatcagggcttagagatcgggctaaaacgggcgagacgcctgaacaatagcatcatcgctgcatatccggtacactaatgaacactttgcagttattgctaattagacaagccctaactcacaccggcgcacacactaacgtattgctaacacatacatacatgcacacattgagacttagccaaagccgttaaacatgcaacttaatttttggggcgtcaccggagttgcatatccagttttttgaagccagtgccgttggcagcgacttagatctttcatctcttagaaaattccagttatacaagcgcaggttttttaggtctgccttccaatagttaaatcacctgattaataattccacttaattacctttttgtagacaactctctcaggcgtgcattcgcccgataattaagattcgaaaacgtttcggtttttctaactcactgttgaaagatgccaatcgaaaaaaaaaaaaaaaacggcatcgacacccggattattacgcaagtttcgggttaggaaaatatatatacatatatgtatatatacatacagtcaagatgagttttagccacattatcgccttgacccgcgcacaaaaagggccagaaatgtgaggaaatggcaagtggcagccgaagcggcagcaaaataaataataatgtgcaaacaatggccaataaggctattatgtgttggacttaagctgatttgacgcttagcgttgcccgcctgcgaagaggcgtggcaggggggcagttgcaaaagtggcctaaagcggggctaatgacgcgtgccaactgtggcaacaggcgggtatatctttactcagttttttttttttttttttttgggcgcgtccgaggggcggacatatcgcacattgcgaagacttccaaagaggcagctaatcaaatggtagctggcagttggtagttggtagctggcagttggcagcttgctcaggcgaaacaagttcgaggatggagttgtcaggcgggggatcccattgtttcctcgaaaaaaaaaataagctaaaaagcaaatatatacgcggggaagctgaaaaccttttgacacccaagacaaaaggaaagcggcggcgtcggcggcaggcgcaaaaagaagcatgctgcataaattgcgcggattgcgtaacacgccgccaccggggaagttgtgtaaggcccggggcagcttcatccactggcatccacattggtatatatagtatctcttgattttcggcgctactcgctttcggtttcgtttgcccatgatggggcaggctgtgagatattgcactgggcctccgacttcagatggagatggagatgaagatgaggctgcagcggcgcggaaaaccggttgccacatgccacacccacacgggaaaaaaattagttaattcggaagcaaaggaaaaatgcatctaagtttgaatcttaaagttcaaaggtctactattattcaatagttaaattattttttatatattttggaaagccataacatacccctactattttctcagtgcaagcatgaaaacagtttccgctaaccgactttctcctcgctgacccgcaggtcccaaggagttctcctaccgcggcaaaaacatgttcctaaccacccacgtgcccgcgctggccaacaagaaggtcgattggttggatggtcgcaatctgtgccgcgagtactgcatggatctggtcgccctggagactcaggagaagaacaatctgatcttccgcgtgatccagcagaacgatgtgccgtacatctggacggccggacgtatctgtgactttgctggctgcgagaatcgtccagatttggagcccaagaccgtctatggatggttctggtccgcaacccgcgagaagatccaggccaccaaccgcatcccacagggctggggctacaacccatggtcgcagactggccacaagaagcgcccgcagccggacaacgccgaatacgacatcaaccagaccaaggagcagtgcctgtccgtgttgaacaacgtgtacaacgatggcatcgcctggcacgacgtggcctgctaccacgagaagcccgtcatctgtgaggacaacgaggagctgctgcgctatgtggcggccacgaatcccggcatccgtctatagagcggctcgctgggcgttcgctgtttgcctaattttaaagctacttattataatattccttaaacgagtttttgtataatttttgtttgtatgtgtacgacgaaaacggaagaaagcaagacaaatagactttagaatttacaatttccgatcctacaaacaccacaaaaccacccacccaccaaatccacaatactgctttcatcacaccttagcacccagcacttagtctcacttctccttcctccctaccttcgaaactgccaattttacgcgtagaattctattccgttgtaaacagttgagtcgttttcagatcgcaccttaaatatttataggcaatcctaaattgcaagtgtttcgctctgacccactgtctgtcattcaagcaagaaattcggaatctctttagtattttgtttgagacactcatgttttgtccacaaagagattgaataaaattttgtaaagatcccataaaaaagaaaacacttgaattaatactttggtttttattggcaatggttgtgctgatgatcgggtgttgtggagttgtgatgatgatgatgcctctttgatctgcgatcgtcatgtgaagatcccgaggagctgtgctctcttttagagcgcacggaactccggtcacttcttgacctggaatgatgattccgctgttggttgtttttgagatcccgacctcggttgcccaagtccttggagttttccagttcaacctcggggcttgccgaccagcgccagttcctgccgtgctcgctgtgctcatcccaactgaagagatagggaaagtatttaaatagtttgccggaatataaactaatattatatttaaatccacctgggtgtcttggccgttggagtttggctggagcgtcgttcactgcgtggaccgctggtgtactccagttccgtgttgaacaggttgttcggattgccaaacaggtgcagatagccgcagtcgttacctttgggacatttacgtgttaaggacaaacctttaagaagtcacagattgtgttaaagaaaatggtattaaaacatatgaatgggcttgctttgagttttggttttttaaaggatacggcttcctcttggcatgcagttcacgtaccgcagactgcgccgcgccaggtcctcagattggagaactccacgtttagtcgcttggaggcgtagtagcgaccttggagattggtaaatgcgcgaagtgcagatctgaaatcatgacgtacgctttataataattagtttatgacctctttagacattattaacataacataaaagtatgcaagcgcagagacaatacaatatatatattttttggcgagagaacaggtataaattaaaattgtgaattatatgaattaacttttacatgaaaatgctgggaaataggctgcatttgaatatccgaattgcttgcatataaacaatgtcatattaattaaataa

SEQ ID NO: 6020 - DNA, 1256 bp, DROSOPHILA
cgtttgcgtctggtctcgtctggttgtctgcttggacaattcggcgactacagtatagaaaccgtgctgtgcagtgttattccaaatagcaagcaaagatgaaagtcaccctggcaatagcgactttctgcgtggtgatggcctgcagccatgcggccagaaccacaacgacaacagcgaccaagccgggtcgcttcctctcactgcccgtgcccgccaagtcccaaggagttctcctaccgcggcaaaaacatgttcctaaccacccacgtgcccgcgctggccaacaagaaggtcgattggttggatggtcgcaatctgtgccgcgagtactgcatggatctggtcgccctggagactcaggagaagaacaatctgatcttccgcgtgatccagcagaacgatgtgccgtacatctggacggccggacgtatctgtgactttgctggctgcgagaatcgtccagatttggagcccaagaccgtctatggatggttctggtccgcaacccgcgagaagatccaggccaccaaccgcatcccacagggctggggctacaacccatggtcgcagactggccacaagaagcgcccgcagccggacaacgccgaatacgacatcaaccagaccaaggagcagtgcctgtccgtgttgaacaacgtgtacaacgatggcatcgcctggcacgacgtggcctgctaccacgagaagcccgtcatctgtgaggacaacgaggagctgctgcgctatgtggcggccacgaatcccggcatccgtctatagagcggctcgctgggcgttcgctgtttgcctaattttaaagctacttattataatattccttaaacgagtttttgtataatttttgtttgtatgtgtacgacgaaaacggaagaaagcaagacaaatagactttagaatttacaatttccgatcctacaaacaccacaaaaccacccacccaccaaatccacaatactgctttcatcacaccttagcacccagcacttagtctcacttctccttcctccctaccttcgaaactgccaattttacgcgtagaattctattccgttgtaaacagttgagtcgttttcagatcgcaccttaaatatttataggcaatcctaaattgcaagtgtttcgctctgacccactgtctgtcattcaagcaagaaattcggaatctctttagtattttgtttgagacactcatgttttgtccacaaagagattgaataaaattttgtaaagat

SEQ ID NO: 6021 - protein, 210 aa, DROSOPHILA
MRPEPQRQQRPSRVASSHCPCPPSPKEFSYRGKNMFLTTHVPALANKKVDWLDGRNLCREYCMDLVALETQEKNNLIFRVIQQNDVPYIWTAGRICDFAGCENRPDLEPKTVYGWFWSATREKIQATNRIPQGWGYNPWSQTGHKKRPQPDNAEYDINQTKEQCLSVLNNVYNDGIAWHDVACYHEKPVICEDNEELLRYVAATNPGIRL

SEQ ID NO: 6022 - DNA, 2699 bp, DROSOPHILA
gggtcgacagcaaagtgaattagagcaaaagccgcaaaaataaaaaaaaaaattaaattttggcgcgcttggagagcaaagcccgactaattattttactgtttcgcaatgtttgtacaactgtttgcttaaattaacgtatcaaaaccccaacgtgacccatggcgtcatacaaaccgactagtggcaaccaattttaagcggaccaacttaaaagttaggccaatgaagtcggccaattagcgacttacaatgaaatcaatttgcagttagtcaacttaatcgaattagaaaagttaaagtgacagaaactttgagttaccgcaggaagttggccaacggagaaaagctgttgattttcattttccccggaccaaagtgtgcgtgcgtgcgtgtgtgtgtgtgcctgtgtctgtgtgtgtgtgtgtgtgtgtgtgtcagttgggcctgaataacttatatagcctggataattgagtagattgtgaacggtttgaaagctccagcttgaaagccagccatcgataagtcatcgacacctgttgagattttgacaggcattttcctccacaccaacgcacaccaacgcacaccacaccacaccactacacacagcacattgttgtaaaaatattgttgcctagtttgcagcacattcaatgtgcattgtgtccataatattttgtgatttcaaattgaagctcgtcgatgggcacctattgttctcgtttagagtgtaacacatatttgttttggttttgttatgtctgcttttgttgaaaagtgcttgtccattggaaataatgcctgtattgttacacttcaaatgtatgtatctctttaatatgtgagagcatagtctttaaatagtcatcagcattttttgtctcaaatttttcgtgtttacccacacgaattggtcatgcagattgcatttgttaatttcaaccgaatggggtttcctcggaattttttcgatcaccaaaaaaaaaatacagtgtttttcgtgtgtgtgttttcgaatcagaccaatgcaccaatcaattattgaatcatgaacaaaaaaaatatttattatgcatatagtccacatgtagttgttgtttcaaccattttcgctctaaccacgcctcctggaattgttgttcctgcgcctgtgctgttgttgttggatgccttctttttattgttgttgttggacgccctccttttgcgattgttgttgctgttggccctcttcttgttgtggtgttgttattgttggccttcttcctattgttgctagctctcttcttgttattgttagccttcttcctattggccctctttttaacaactggagctgtagtaggtgtatcataatccgtatcggatccagaatcagtatcatcatcggaaccatcgtccacatcggaactactgccagaagcatcatctgaggaaccggaactgttcgtggcactggactccgtggttgaggttactatcgatccggatgcggttgtattctcatcggaatcggcggatgaatccgaatcggcggatgaatccgaatcggcatccgagtccgtatcggcactcacaaccagggtaacgaaaagccccaggcacacaaaaagcaaccataactttgtcaacttcatttcgacactatattctatttgactctgagggatccgataatgctatgtcgcaatttatagtaaaagctccagaccacgttttatttacccaagcgaaggccaaaattaagtcaaatatcaaatctctcagaacaaaaaaaaaatggttgaaaacaatagagctggtgattggtctccgcgatgacggcaattggttggaaaaatgtgtatctaattggcaaatgacagggtaactggaatgatcctagttgagtcttgtctatgtctaaccatcgccacaagtaataaaatttgtttaccttagtaaacgatttgagcaaaactatttgatttgctcacacaactagtacacgcaatttttccacaactcgattcagtcaaaaaaaaataaataaataataaacaaaataataaacaaaaccacgatcaatatggaagactgcaacagctgcggttaagtaaactaaagctggtgctcgagataagttggtttaagccaacccgccggtccaaaaatggaaaacatacctttctattctgtaaatatttgtgaaagacaagttcgaggcacccgcactgtcctacacttcacgaacatattaataataatttttgattccatatatattgaatttaatattaaaatcattaaacaaatgggctttaattacaatgcgcaaacaatttcaacaagtttatcatgattcagcatacccttagctgaattatatttgtatatcgcttacttttagtttcttcattttaaaccgtagaaattgttatttttttgttgagtgtatcttaaattgttcgatgtgtcgatggcaaaatgcagtgggtatataaagcgcatcacgcggtattgaattccaaagtcaagatgcgcttggagttgttggttgtgttattggtggggctggctgcacttgccccgtcaggttctacatgctgtaaaactgaaccaccgagatgcgaaaccgaaccaccgagatgcgaaaccgaaccgccaagatgcgaaaccgaaccaccaagatgcgaaaccacgccacccacatg

SEQ ID NO: 6023 - DNA, 699 bp, DROSOPHILA
aaattgcgacatagcattatcggatccctcagagtcaaatagaatatagtgtcgaaatgaagttgacaaagttatggttgctttttgtgtgcctggggcttttcgttaccctggttgtgagtgccgatacggactcggatgccgattcggattcatccgccgattcggattcatccgccgattccgatgagaatacaaccgcatccggatcgatagtaacctcaaccacggagtccagtgccacgaacagttccggttcctcagatgatgcttctggcagtagttccgatgtggacgatggttccgatgatgatactgattctggatccgatacggattatgatacacctactacagctccagttgttaaaaagagggccaataggaagaaggctaacaataacaagaagagagctagcaacaataggaagaaggccaacaataacaacaccacaacaagaagagggccaacagcaacaacaatcgcaaaaggagggcgtccaacaacaacaataaaaagaaggcatccaacaacaacagcacaggcgcaggaacaacaattccaggaggcgtggttagagcgaaaatggttgaaacaacaactacatgtggactatatgcataataaatattttttttgttcatgattcaataattgattggtgcattggtctgattcgaaaacacacacacgaaaaa

SEQ ID NO: 6024 - protein, 196 aa, DROSOPHILA
MKLTKLWLLFVCLGLFVTLVVSADTDSDADSDSSADSDSSADSDENTTASGSIVTSTTESSATNSSGSSDDASGSSSDVDDGSDDDTDSGSDTDYDTPTTAPVVKKRANRKKANNNKKRASNNRKKANNNNTTTRRGPTATTIAKGGRPTTTIKRRHPTTTAQAQEQQFQEAWLERKWLKQQLHVDYMHNKYFFCS

SEQ ID NO: 6025 - DNA, 9041 bp, DROSOPHILA
catcggactggggacgaggacgcagcctgatggcgcactggcccacgccgctggtgccgggaatgttgcgacagcgggtgatgcatgtctcccgaatgggttcgagtccattgtcccgacggcggcaattcttctcccgcagacgacaggccggcaggcgggtgcacacattggtcaccttgttgcggatgcacacactctggccgctggacagaccggtgcagcgacccacacacggacgccgatcgccatcagcctggatggccacgatggccaggacgacgaggagaaggcaaatggtgaacttgctcatgatttctctggtggatctggagatctttgctgctgtcaactgttgccggttgattgatacttttccgctggactggccgagtataaatagcagcttggattggtcgcatttactaccatatttttgggaacgccatctgttctcttgtttgtcgaaattgttttgtttttatcgaatgcggttgttttgttcacgttttattggggtaatcttgccagtaataaatctttttaatctttttaactatcttataactatctattaatatgctctaataatcatttaggaagttagcattaagattctttagcaaagcgttgcaaacttactctaatatctgcggtgaatgggagtgaaagtaattgtttaaaggagcagagtaactaatcatctagaaatgtaatgcaatttaaatacttcacatcacttataagaacgttcagcataactacatgttattgcaatacatcattcccgaatcaagtctccagtggcatgtttttctacaataccagctgccactgcgccgggtaaatggctcttgataattaattgttgattaaatattgaaaacaaaagccaaagcgacgcgtgccaaggaagaattgtcttggatttgcttccccgtaattgtcatgttggtataaatacttcggacccttggcgagaatggcatcagaagttcagccaactgccagcaatcaagcaaaatgcacagccaacaactgactttgattttcggtattgaaatggacagcctactactttctatctatgccacttgtaaactcccaaattttttctttcatcaggcatgaccctcctgtggtcaatggccagcggcaccacccaaccgccgagccgacgtccgccggttaccaccgcccgcaccacgccccgcaattgcccgctcttcccgcaggtctgctcccagacaagtcccagagtttgcggacgaactgcgcgtggcgagtgccaacgtttcgagaacatctgccacctgatgctggccaatgtgctacggcagccggagggcgtgcggcacacccgcgacatcgattgccgcaacgtgaggggaacgggtgccgccaatcggcgaccctgctataatccctgccccgcacgtcccgtcgtctgcaagagatcaccgcccagccagcaaatctgcgtgcgtagcagggacaaccggcagtgcaaggtgttggccaatagttgccagctgcgcaaccagaattgccacagtcagcccaggaacagtgagtagccgttaccgtggacattgccataagctaccatggtcatagcattcagagcttctttattcgaaacccaattcctttattccctttttagactggctgcgcaccgacaggcggcgttgtggacagctgcagctgggcgataagccgcagaattgcatccgggtgccagtgcggcccagacccacacgtgcgcagcaccactcgacgcagcactactaggcgcagcaccactcgacgcagcaccactaggcgcagcaactccacaagcaccaccaccaccgaccggccagcctaaaggatcagggacatcggtggccagacattacaatttcttttttttttctctctctgcccaacatccactgtgcgcaataaaagtcataaataaactgcaagttgcgcttaaaaaccgcttttgatctgagctgatggggggtggggaacatgtctgtaagtctacgtttaacttgatccaaactgtgcaccaaaatgcaaattgaaaaaggtgtagcctttgcagcataaactcaagcaaataagtttataggtagtaacactatactggagctaattgattccgttgaaaattggaaagcaacataagatgacaatacaagttactcgcaattttctacgcaaaacttgtgctttactttacgttttgtctcgattgcatgcttctgtgatcgttggatttcaggtataattaactgttcaatgtcctttggcgccggtccagagaaaatccccgctaatgaccattggcatttcccagtttgcttttaccggcccctactttgcctactttcagccattgcccagacgacggtgatgggcgaatgggcgaatggcaatggcaagttggccaagaagccccaagtaataagaactcaaattacaattgccgagttccacgttgtttcgtatgaaattcctgcatgtccaactttctgagtagcactaattaattgatagatgcccaaccaaattgactgaaattgcatattcaagttgctgccagccgctttagtttccattgcgagcgaaaagtttattgaattacatacacattacacacattacgcatacgcagcggtggccaagtttggtaagacaactactcgaacttgtcgcgaactttactcgcataactttttgctctaattaaacgccttggagtccttgatcaaaccgaattcaaattcaaatcaaacaaatctagtttgcggttaagtcgtctgccattggtttctatggctttttgctgtggcttcgattgcaatggatacatccttctggttgttaatgaaaagtccttgtcgttggcaatgatgagtaaaaaaaactggatgagttttgtgcacgcaaaagaatatttaactctttgctggcacattttcagcaatttgaaatttgaaatcaacataccttgaatacgtgtagaacaattccaaattgtaagttagttattattacaaattacaaatctaatcatttttcaagagcacatagctcagttctgagccacttgagctaactttatttggccagcaattgttttgcccaacttgtcgtatattttcccactcgattcagtcgtattccttgctcacattttggtttcctttcgcttttccatttgattccattttgtggtctcgaaatttatgacaatcatctacatctgttgaacattggccgtcggcaaaaccgtttgtcatttcgagccaacttaatgaatgcgaatgaatgccaaatgttgagtcaacatttcggccacgcccccacacacagacacacacacacacacataagtgtatgtgtatatgtttgtgtgtccagctaatttgggaacctggcgaggttattaaagctaattgcgttgattcataaattagaaacacctttgattgcgggttcgtgactatatccactattttcaccatatccaccctgtgtatatgccacataccaaacgaatatctgctgttcggggtgctgggtgctaatgactggccactcggggtgtccgaaatatttggagacattcacccgcaagcgcggtgcactgaaaaaaaatattctactactattcggcctgtaactaacgaacaattttccgtagttatctcattgctgatgatgtttcccagatcttaaaataagtaaagatcttttaagccaaataaagttctcgcggtgttggcctaaatggagtccttaatttatgaaccctctgaaaagagcagagcataatttgccacttgacctgccacacgtgaacttccatttttttttctttttttttttttttttggtcggaatgcgctgaatgcagagtcatcggttgacactctctgtgcggcatagtcaatagtcatggcccgactatttagggacttcttaaggatgatgaatgactatgactatcaactgctatccttgcatttgcaagcacttcgtggattgcaaggaatgcaatgtatgtacatacatatatagtaattcgttacaagcaagaatatttcgttttcttagaaattagaaacaattaaagcgtattatgcacactgaattggccatcatggcagattttaacactacaaaacgggtcaaccatgaacataaaccaagacaaagtgcaactataaattctcgccactttttattcactactacactactgtggtcagtaaattgaataaggcgctgcgtttcggggtaattacgacgattaattgcatgtagaacggcatttcaagaaccgcagaccatggaaattgtggttttccttagcatctggcagcaaatatctgaaaagtgtggtcaatccaattgccgggcatctagttatccaaacatttggatttgaactcggaccacgattgccaggattattctacctgactcgcctgatggaaattagaaccaaattattaagaatttatctatccagttaagtaaattaacttcgaatgaaatatgtgaaattgcacgcagtttatttccgggctgcctaatagtttagaacaaaactaatcaatggattacgtctgcactttgcgggtgtgcataaattataatgaaaattaattagcgattgtctggaaagcctaattgcctttgataatacccatccatccatcgatactcgggcattacgatgggcttaccccatggcagcacgcacatgagctcatctgccagatatacgagatgtgtgggcggggatatgggacgcggcatatggggcatggggcatgtggcatggggcatgggatggcgtaatagaggcgacttagacagacataagccacacgcagcattaaattggcattaggtcaggccagtggaccagcaggcctgctcggttctggcccaaaatcggattgaactcgtcttgtttttgccggttttttttgttttgctcttgccacgaccagtaagcgatgggttggcgggggaagcggagcgagggctcacaacatgccacattgtcgctttgacttttatttattttgttagacgcattttgaaaagccaataagcagctttctgattgattatctgctgcccgctcattgtctccgtgttgatttaagctacgcagcacaccactcacgcacagtggggcctcgctaagcggttcggtactagcatctctctcgtgtctagtgccagcatagaaggggcccactgtacctctatgcctccgtccgtcaatgcgtcctttgtgtgctgtatttgtgtggaaggcgtcaatcaattttgagtgaaataaatgaggcttatgccgcccttttggtccgcaaaaaggcttaaaattgtaaattcctaccagacacatattaacccgtaccgcctgttataaattgctgctatctcatctgaaaacctgagttgggtcgctagcaggttcctgaattcagatcagattgcccaggccttcgccagcagctcgaacacttgcgtaaaagttgctgaaaatcccatgactttgatgaaaactttcaagtgcactggcattttgcagacagcttactttcctcaaacccctttggcatttttgctaccaaatatttgggcacttagccagcccaaagcaatgcttttggccaaagtgcattaaatataaatgagtgaccttattttcacttaacccttttttgtggctccgaaaagttgtggttttttcatatgtgctctgcaacgaaaatgcgtgcagctttgcaagtgctatatgcaaaatgcaaagtgttttgcagcgctaaacttgcgcgctctagtttttcataaaaaacttattatattgtagtatttactaacctttaaattattgccttgactgcaagctgtgtgcgttttgtttgctacatcatgctgctaatctttctgagatcgtcgtctggctgtaggttttcatggaattccgtaatccgctgatgagcccagcgatttcgatccgttgagataaccctcaccgctgttgagcccagtgatctcgatccgttgagataaccctctgagcggttgatttgtttagtctcacatttagcgcaatcagtcatgcatttcaaactgagattgctggagctcatcgttggcttacttgtagttcaggtaaagtcgcatccgcaagctgatccctgccagaatttctataaggtggcctgcggcaattggtccgccagtcatgcaaccgattcgtacgaaagttttatggaccgactggactacaattatcaggagaagttggcagacttgctggataatgagtaatgtgattttatgaaaagaggaagcttaaactgaatacttgactgattgaatcgattacagaagagaggacgacgagccacattttctgcagcagttgaggaacttttacaccgcctgtcgaaaacctttgagccaggatcaagtcctgcgcatactggagcatctgatcgtaatggagaatatccaaaatgaagagctgtccgtcggcttgactgccgcctttcgtcttcaagtactcatagatctaaatgactccaatacgtatgacatttggaagcagttgatgtcccacaggaagcattgggatccaaatacaacgaacagggaacccttaactcgcgaaatgtttgacaagctatgggccagcctgccaaaaattccctttccgtttaaggagtactattggcgcgaattaagcgagctggaagagaaaataatgagctatggaagcgaggacgatggctttgatagcggtgatttggttacgcggataccacccttttggatgatgccctggccaaatgggaatattacctatgaaaatctttcccagatggcccattggctggatataaaagccaatgagttcattctcacatatatctatatgcgattaaagctagttgcggaaggagtctcaacggaatcctggcatatagatcgcgaccagtgcgccgagcagtccagacagatcctcagtcatcctgctgcatggttggtagagaagaatcatcccaggctcaaggaggagccagtgctgcaggacattttcgcggagctgaagcagcgctttggccaaaagcttctggcgaacaggaataactttactcgcagcacacagcactttcttttgggcaaattgaaaaggatgcggctgcgattgagcatcctgcccagaaattcttcggcccaatccatggtgcgacgcatcgaaaggcactacagggatgttcacatgaatgctagcgattattttggaaatctacatatcggccttaatcactccagatcccacaagaagtacgcccaactatgggccatagtcttcggccgccagttgattccaagccgaatatccaagagcgatttgtatcccacccaagtgcgtgggtatggcacctatgcctctgcgttctacatagtcaaacagaatatgctaattgtgccactatcgctcctggaaccgccgttctacacacatggccagccgtcgatacttacctacagtgcactgggcttcatcctgggccacgagctctcgcacggctttgattccgagggcatgaccttctcctcgcacggagtgggaagtagcgccgtggacagggagcttgataggaatccgcgattccagcaggagcttggctgtttgcgcagaagattcgggaggaagcggtatgaaaagttcgcggacgccagtggcttggaactggcctattccgcctactttgacaccgcacaaacggatcataagcggaatcgaagtgccgaggagttggtcactcagaagcagcagttctttcataactttgcccaattcttctgctccgataaggagctcttgcaggcgcacgatcatggcagcgataggaagagggtcaacgatgcagttgcccactttgagccatttcgggaggccttctcctgtggcccctcgcccaggcgaaggcagtgtcgattgtattagcaaatgcctggatcaacgaacttttagaacgattgatgaataaattgcaatttattctcctaatatacttacgaatgtttacacaccaaaaaaaaaaaaaaaaacaatcgaaggcaaaacgcaactgtgtgacatttaattagtttatttattcattattggattcacccgacgaaatatatatacaaaatcaggtcgtaatcgtcatcagaattaaaaatcaaattaaacggaagcggaaacggaaaccgtatctttcgtcaccaatacatataaatagttaacacattccattcagacagacaactttcagctatagttatggttatagttcatagttgtgtagttgtaattcaagttgtagtattagctttagccgtagttgtatgcttagtcaactagttttgtgtacactgaaaacatttaaaccggaaactgcaattgtaactgttagacgagtgtacacatattaacattgcattacaattgtatatgctgttgcttacactagaaaaaaaacgtacgcgtagcctagaacattgagttgaaattcgttaggactgatttgttatgttcttatatattttttttttttttgtttttgtgtattcttaactttcatttaaatcggtaaacactggggctcaaaaggtttacgaatttaaacgagttttccatcctacaactaactacgctaaagaaccctagttaaaatacaaaaatattttacaaatgggcgcacaaaaagttgctctcaaataaacatatttacccaggcattgtttcaaaatttcgtaaataccctagaagctaaaactaatcgtcaatactatcgattatttcgattaattcagtttcgcttttcaatccgatagttatgacttgtgagtttcctgtaagtatttttcctaactttactgtagtattatgttattgttgttacccaaaatcttcacccagcactttcaccctaccactatcacttcttgaaagtttcacc

SEQ ID NO: 6026 - DNA, 2234 bp, DROSOPHILA
ccaactgccagcaatcaagcaaaatgcacagccaacaactgactttgattttcggcatgaccctcctgtggtcaatggccagcggcaccacccaaccgccgagccgacgtccgccggttaccaccgcccgcaccacgccccgcaattgcccgctcttcccgcaggtctgctcccagacaagtcccagagtttgcggacgaactgcgcgtggcgagtgccaacgtttcgagaacatctgccacctgatgctggccaatgtgctacggcagccggagggcgtgcggcacacccgcgacatcgattgccgcaacgtgaggggaacgggtgccgccaatcggcgaccctgctataatccctgccccgcacgtcccgtcgtctgcaagagatcaccgcccagccagcaaatctgcgtgcgtagcagggacaaccggcagtgcaaggtgttggccaatagttgccagctgcgcaaccagaattgccacagtcagcccaggaacaactggctgcgcaccgacaggcggcgttgtggacagctgcagctgggcgataagccgcagaattgcatccgggtgccagtgcggcccagacccacacccattgcccagacgacggtgatgggcgaatgggcgaatggcaatggcaagttggccaagaagccccaagtaataagaactcaaattacaattgccgagttccacgttgtttcaagagaggacgacgagccacattttctgcagcagttgaggaacttttacaccgcctgtcgaaaacctttgagccaggatcaagtcctgcgcatactggagcatctgatcgtaatggagaatatccaaaatgaagagctgtccgtcggcttgactgccgcctttcgtcttcaagtactcatagatctaaatgactccaatacgtatgacatttggaagcagttgatgtcccacaggaagcattgggatccaaatacaacgaacagggaacccttaactcgcgaaatgtttgacaagctatgggccagcctgccaaaaattccctttccgtttaaggagtactattggcgcgaattaagcgagctggaagagaaaataatgagctatggaagcgaggacgatggctttgatagcggtgatttggttacgcggataccacccttttggatgatgccctggccaaatgggaatattacctatgaaaatctttcccagatggcccattggctggatataaaagccaatgagttcattctcacatatatctatatgcgattaaagctagttgcggaaggagtctcaacggaatcctggcatatagatcgcgaccagtgcgccgagcagtccagacagatcctcagtcatcctgctgcatggttggtagagaagaatcatcccaggctcaaggaggagccagtgctgcaggacattttcgcggagctgaagcagcgctttggccaaaagcttctggcgaacaggaataactttactcgcagcacacagcactttcttttgggcaaattgaaaaggatgcggctgcgattgagcatcctgcccagaaattcttcggcccaatccatgaagtacgcccaactatgggccatagtcttcggccgccagttgattccaagccgaatatccaagagcgatttgtatcccacccaagtgcgtgggtatggcacctatgcctctgcgttctacatagtcaaacagaatatgctaattgtgccactatcgctcctggaaccgccgttctacacacatggccagccgtcgatacttacctacagtgcactgggcttcatcctgggccacgagctctcgcacggctttgattccgagggcatgaccttctcctcgcacggagtgggaagtagcgccgtggacagggagcttgataggaatccgcgattccagcaggagcttggctgtttgcgcagaagattcgggaggaagcggtatgaaaagttcgcggacgccagtggcttggaactggcctattccgcctactttgacaccgcacaaacggatcataagcggaatcgaagtgccgaggagttggtcactcagaagcagcagttctttcataactttgcccaattcttctgctccgataaggagctcttgcaggcgcacgatcatggcagcgataggaagagggtcaacgatgcagttgcccactttgagccatttcgggaggccttctcctgtggcccctcgcccaggcgaaggcagtgtcgattgtattag

SEQ ID NO: 6027 - protein, 719 aa, DROSOPHILA
MASGTTQPPSRRPPVTTARTTPRNCPLFPQVCSQTSPRVCGRTARGECQRFENICHLMLANVLRQPEGVRHTRDIDCRNVRGTGAANRRPCYNPCPARPVVCKRSPPSQQICVRSRDNRQCKVLANSCQLRNQNCHSQPRNNWLRTDRRRCGQLQLGDKPQNCIRVPVRPRPTPIAQTTVMGEWANGNGKLAKKPQVIRTQITIAEFHVVSREDDEPHFLQQLRNFYTACRKPLSQDQVLRILEHLIVMENIQNEELSVGLTAAFRLQVLIDLNDSNTYDIWKQLMSHRKHWDPNTTNREPLTREMFDKLWASLPKIPFPFKEYYWRELSELEEKIMSYGSEDDGFDSGDLVTRIPPFWMMPWPNGNITYENLSQMAHWLDIKANEFILTYIYMRLKLVAEGVSTESWHIDRDQCAEQSRQILSHPAAWLVEKNHPRLKEEPVLQDIFAELKQRFGQKLLANRNNFTRSTQHFLLGKLKRMRLRLSILPRNSSAQSMKYAQLWAIVFGRQLIPSRISKSDLYPTQVRGYGTYASAFYIVKQNMLIVPLSLLEPPFYTHGQPSILTYSALGFILGHELSHGFDSEGMTFSSHGVGSSAVDRELDRNPRFQQELGCLRRRFGRKRYEKFADASGLELAYSAYFDTAQTDHKRNRSAEELVTQKQQFFHNFAQFFCSDKELLQAHDHGSDRKRVNDAVAHFEPFREAFSCGPSPRRRQCRLY

SEQ ID NO: 6028 - DNA, 4131 bp, DROSOPHILA
gacgatcgaccagtgctacacggacgatgccgtctgccgtttcgaggccgatcagcagttccgccgggatcgcatggtcgacaacgagattgtcaacattctgcgccagcgcttcgaggactgcaccctctacgaggcacccgatcacatggtcaagtgcaggccgctgatggatcagtacgagaaggccaccgagaactggttcatcaagtgtgagtggaatcccttacccatcttctttaaagttgtatgtgatatataacgagatataacccattatagatggcgacttgggaggctacgccaatgccaagaccgcgtacatgaagcagaagcatcgtctgatctgggagcgtcgtcatggaccagtgggcagtggcatgaaggaggaggccgcccattaaactccgcttttatgatgatgttttctagtttcattatccgttaaaacaaaatatacacgccgtaaaacgatattcccaaggattgagctttctttcaattgtttcagtgtaaattataaggtaagagctactaggaattatttattactacagcagtttcaattcatttgtctattagttgcatttattcttagtcatgtttttcttaaaataaatattaatattggcgtttgatatagaattttggctatagactagcttaaaactaatagttctcaagattaagagccttggttaagttgttccagtgagtaaaataaagtttttgcctgcgtactgcaataagtttacagaatatagtgataaatcataaaactcacactgtaattcttcagactttttcgaaaatttagacaatttcaaaaagagttccataatttctcattttttaaaaaaaggaatgcacagtccataaatcatttgcttttcttaaaaaaagaaaaaattacacttttagaaatagataccaatagataggcaatagtgaaatttgttcaagctttctagaattacgctatcttagattactttcgagctcagctaatcgagaccagcggcttgttgatgagactctttttgagcttagccagagcgctatttgcggccttgtctcctggcttcttgtccttgtttttgggacccaatggtatcatggttgtgtccattagcttgcgtctgaatcccttgtagaactgcagcacgtgtggattggcccacacttgcttggcgtcaaagtccaggatgcgaatggactgcagggatttcgcacgggataaggccacataggcctgtccagcctcaaatactttggaaagggacatctccacgcagtcgagggttagtccctgactcttgtgtatggaaaatgcccaggctaacttcagtggcacttggcgtcgtgttatatggtttcctgaggcggtctttattatccacctttcgtgcttgcaaacgtattcctggttgtttttgaaccttaccactggcagatccttctccattcttacaacgacgcctcgagctccgttcaccagtccattggatatgtttatattcttgagtagcattacttgggcgttaacttttaggtacaactgagatggagcctggatctgttgatccagtgtcctggtcatgctggcatcggagtcgtcagccttgaataaaatcttgtcgccatcgaggttttccagcttggactcgttaatggagttcgcatcgtttgtgtgggagcagagttgagtggccagaatgccgtttccctcaattttctgctttgatgtagctgcaagtcgactggttatggaatcgttcacatggccaattcggaggtggttcagaatctttacaaactccggatccgattgccgatgcacttgcttcagttcgtagacacactggatgcaagtctcccatgcggaggactgaaagcagaatcgttgctggggcgtggcagtgggggctgcaccaaaatctccctttatgaccggaggcagttgcaagaagtcaccacacaggatgagctgtatgccgccaaaggggcgatcattgcgccgaatgtgacgtgcgacggcttcaattttctgggaaaataattgttaacaccttgctgaattcaaagtaaagataaagtacctcaaagaactgtccgtccaccatggagatctcgtcaataatcaaccgcttgcacttcctccacgtctgggcatttgcgggtcgggaagccagctccagacaccgctgcatggtggcgtctcctcctcctatgccagcgaaggcgtgcaaggtggtcccaccgatcaggcaggctgccactcccgtggaggccgtggccaccgttccatcgggcggcagggctgagatgatcctgcggagcaagaaactcttgccagtgcctgctgaaccggtgaagaatacgctcttgcccgaggtgcacgcccgcaggacttccatttgctcctcactgagtctcagcgactcgtcggtagtcgacgcatatagtttcttggccgcgggcatggtgccccgttccttctcctccttgagctcctcgaagcgacgctttttggcgccctggggcgacggcgtggtcactgaccccttggacaacaaacccgcctttttgcgcgccaaaatcatctcggccgtggtgactggagaaacgtcgttaaagctgcttggcttgcctgacatcaggtgctcgcggagtttcttctgcaaggtcgcatcgtccggctgggatcctccctcgtttccgttcattttaacgaagatcgtccgcaggaagaacatcaaagtccccggcggtgcattcgatagatagagggtgcacttctccgccttgaagttgaaggtggccttgccctcggacatgaacttcttgtgcaccatcagatccttcagcttgaacttcaggggctttagtttctccggcgtcacctcaacaaacaattcacgcaaatcgttccgcaccaggcgcaatgtggcagtcttgtaggccagtttgcgacccgtgatgcccaccgcattggtccactccatgttcaccgcacaggtgagcactgcgtcattgagatccatggcgaaattaacttcacttcagtcagtttccgattaaattaaattaaatacaaaagccaaatcttttccatgcgcttggtcgccgatcggcttatcgatatcagcgtaaaattatcgatatcacatcggatggcgtgaacgcatcatgatcgtgcacaagtatgttataaagtagcaaagttccactccaggatcagctgtgttacaattccgttacaatttaaattgctacatttaaggattacaaaacaagtaggccaggaaaagtaatttgctatgcctataactttcaattgcacactaattaagaaatatcaccatgaatgtggatctgagattgattgtgcgcctgttgctggccattctattgacttccttggtaactaccattttaatgggcaagcagatacacagaagactcgtgaagtccatggtcaaaacaaccggcgaaaaggatagtttgccagcaaggcagctcccaaaaagggagatcagcccgaaggtcgcagatttcccaccaccactaacactgaaccaaactgaactggacatcttaaagatccagcgaaacaatagtttccgcctgccccagcaagaagctattaaggagtggcaggatgcgattttctttaaagaggatagtaaccgcaggggattgggtgagcagggaagagcagttcagttaccaaacgctaaattaaaccccgatgatttccaagacttctatgccgaactctccgatcgcattcccctgaacagatccttgccggataccagacctataaggttagttcctatgaagtttaaaatactatacaatttaaagactaagaacttagttgccggaaacggaagtatctggagaacctacccaatgtgacagtgataatagcctttcacgatgaacacctaagcgttttgctaagatctataacgagcattataaatcgatctcctgttgagttactcaagcagattgtgctcgtggatgacgatagtaatttgccggaattgggacaacaactggaagagattgtggctcaaaactttccgaaaattattcacatactaagacttccagaacgac

SEQ ID NO: 6029 - DNA, 2079 bp, DROSOPHILA
atcggcgaccaagcgcatggaaaagatttggcttttgtatttaatttaatttaatcggaaactgactgaagtgaagttaatttcgccatggatctcaatgacgcagtgctcacctgtgcggtgaacatggagtggaccaatgcggtgggcatcacgggtcgcaaactggcctacaagactgccacattgcgcctggtgcggaacgatttgcgtgaattgtttgttgaggtgacgccggagaaactaaagcccctgaagttcaagctgaaggatctgatggtgcacaagaagttcatgtccgagggcaaggccaccttcaacttcaaggcggagaagtgcaccctctatctatcgaatgcaccgccggggactttgatgttcttcctgcggacgatcttcgttaaaatgaacggaaacgagggaggatcccagccggacgatgcgaccttgcagaagaaactccgcgagcacctgatgtcaggcaagccaagcagctttaacgacgtttctccagtcaccacggccgagatgattttggcgcgcaaaaaggcgggtttgttgtccaaggggtcagtgaccacgccgtcgccccagggcgccaaaaagcgtcgcttcgaggagctcaaggaggagaaggaacggggcaccatgcccgcggccaagaaactatatgcgtcgactaccgacgagtcgctgagactcagtgaggagcaaatggaagtcctgcgggcgtgcacctcgggcaagagcgtattcttcaccggttcagcaggcactggcaagagtttcttgctccgcaggatcatctcagccctgccgcccgatggaacggtggccacggcctccacgggagtggcagcctgcctgatcggtgggaccaccttgcacgccttcgctggcataggaggaggagacgccaccatgcagcggtgtctggagctggcttcccgacccgcaaatgcccagacgtggaggaagtgcaagcggttgattattgacgagatctccatggtggacggacagttctttgagaaaattgaagccgtcgcacgtcacattcggcgcaatgatcgcccctttggcggcatacagctcatcctgtgtggtgacttcttgcaactgcctccggtcataaagggagattttggtgcagcccccactgccacgccccagcaacgattctgctttcagtcctccgcatgggagacttgcatccagtgtgtctacgaactgaagcaagtgcatcggcaatcggatccggagtttgtaaagattctgaaccacctccgaattggccatgtgaacgattccataaccagtcgacttgcagctacatcaaagcagaaaattgagggaaacggcattctggccactcaactctgctcccacacaaacgatgcgaactccattaacgagtccaagctggaaaacctcgatggcgacaagattttattcaaggctgacgactccgatgccagcatgaccaggacactggatcaacagatccaggctccatctcagttgtacctaaaagttaacgcccaagtaatgctactcaagaatataaacatatccaatggactggtgaacggagctcgaggcgtcgttgtaagaatggagaaggatctgccagtggtaaggttcaaaaacaaccaggaatacgtttgcaagcacgaaaggtggataataaagaccgcctcaggaaaccatataacacgacgccaagtgccactgaagttagcctgggcattttccatacacaagagtcagggactaaccctcgactgcgtggagatgtccctttccaaagtatttgaggctggacaggcctatgtggccttatcccgtgcgaaatccctgcagtccattcgcatcctggactttgacgccaagcaagtgtgggccaatccacacgtgctgcagttctacaagggattcagacgcaagctaatggacacaaccatgataccattgggtcccaaaaacaaggacaagaagccaggagacaaggccgcaaatagcgctctggctaagctcaaaaagagtctcatcaacaagccgctggtctcgattagctga

SEQ ID NO: 6030 - protein, 663 aa, DROSOPHILA
MDLNDAVLTCAVNMEWTNAVGITGRKLAYKTATLRLVRNDLRELFVEVTPEKLKPLKFKLKDLMVHKKFMSEGKATFNFKAEKCTLYLSNAPPGTLMFFLRTIFVKMNGNEGGSQPDDATLQKKLREHLMSGKPSSFNDVSPVTTAEMILARKKAGLLSKGSVTTPSPQGAKKRRFEELKEEKERGTMPAAKKLYASTTDESLRLSEEQMEVLRACTSGKSVFFTGSAGTGKSFLLRRIISALPPDGTVATASTGVAACLIGGTTLHAFAGIGGGDATMQRCLELASRPANAQTWRKCKRLIIDEISMVDGQFFEKIEAVARHIRRNDRPFGGIQLILCGDFLQLPPVIKGDFGAAPTATPQQRFCFQSSAWETCIQCVYELKQVHRQSDPEFVKILNHLRIGHVNDSITSRLAATSKQKIEGNGILATQLCSHTNDANSINESKLENLDGDKILFKADDSDASMTRTLDQQIQAPSQLYLKVNAQVMLLKNINISNGLVNGARGVVVRMEKDLPVVRFKNNQEYVCKHERWIIKTASGNHITRRQVPLKLAWAFSIHKSQGLTLDCVEMSLSKVFEAGQAYVALSRAKSLQSIRILDFDAKQVWANPHVLQFYKGFRRKLMDTTMIPLGPKNKDKKPGDKAANSALAKLKKSLINKPLVSIS

SEQ ID NO: 6031 - DNA, 7201 bp, DROSOPHILA
cgaaaaggtcttcatctataaccaatatgccactaatttctccaagtacgtttgtcaaaatagtgttatgaaatttgtagatttaatacgatttcttgtacttcaggtggctgtcccccaacacaaatgaaacggaagtatccgtcagccatgttgtaacgaactttgaattcctgtatgaaccattctacatagcagtggacaacgcaccagcgcacgacgaacgatttctgggttatgggttcaccaggaactcccaggtgagtagaatttaaacgtagaaaccacgcattgctcattgacttccaacttgcaggtttatgagatgcacattgctggctatcagttctacgtcctttcccctgtgtttaccggtcattggggattgcagaggaagcaggccagacccgcttggcgggagcaacagaataatgcgaatcgccggaagttcgacgttttcaaaagcgaaatattcgtgcggtacaaaaacgatccacgcctgctgttaaaggccaaaaagaatcaaatcctagtaaaataaataaaatagttaaaattattgagttgtccgtctatcagccggcgcgttttacttttgtcaagtgctgttctcattgattagtctttgtattttgcgaaggaacaaggataaactttaaactagataagcactcctaattttaagtaggatatcagatccgatgggtttgtgggacagtaatgtattaaaatgtatttacatgtattttgatcgtgatttctagaggctaggaggtgtgagtggagggcaacagtcatcaacgggctttcacgcgaattcggcgcccaaagcagagggagcgaggatggtccgtgtaaaggaaaagagcggaggccgaatgccggaagggcagagcgccggcgcaggactttcgcaagctgtgtgctccctcaaaaagctcacgtcgccttcgcaggacaataaaagctcgctccctcggccagctttccgcagtctgtggcaatcagaaggcccagtggattatttattgtgagtgttgaaaaaaaaaacgaattcatcgcaacgcgcaatgaggcaaggtgattgcctgattccgagcagcaaagaagtcgggaatagccagcataacttcataaatccccatccgatccggctgtaagtccgccgcaggtgagtccttcatccttcgccgttcggcgatgcaaggctgcccagtcgggtcgcccgtgttttcgatttttcgtaacgagcaggacacaaaggaaaaatgcgaataatggggaaaaacaagcgtcgactgacccacccatccatccatctatccaaccatccatccattccatccaacgagttggagcccccggctgtttgctcaattaggtatcagttttccaacgacagacgcattatcctgcgaagcctgcaatagctgtccttatggcgatgatgccatggcccaggcgttccatcatcgccaccacctcgctatcgatatacggcgcgaaggacacccttatcagaccccatcctcgtgccccaaggcgcatttgtttacctggctgcccttcgatgtccactaattgcggtccgagtgtcagcggcgggcttaggagcaggttcagggtagccaattaatatccaatttgtgtaattgtgccgcacccgccttccattccgagtgcgagtgcgagtgccagtggcattgaaacggtgccccaaaatccaccagtcacttcgatgagcacttgagcgtaaaaaacgcagctaaaatattcatttctcgccgataagggcaaagagctcactttccggctgattttatgaccagcaattcgactttaatgggtgggaaaaagtgaagtctcgattgaaacggaaagcgactttgaaaacagttttcaaaagttcatttcaaatatatatagagcacattttttataggttttttttttgggggaaacataacattatgtgcaaactgcaaggatatgcttccttgcaagatgtcgtcgctcagtgtattttttatgctgatgaccacgaaatgggaagcgatttaatcaggctgagctgtctgtgtgaagggaggaggggtgggtggtaaggacatttaaatatcgtgaccatcatccagaaagtggcgggaggctaagcccgggatgagaagtgaccttgctggcgtcaattgcactacaaacaggctacattcgctagcatgcttttggttctggttctgacttggaatccgcatctggtcctggcagcaggatggagcagggggagtgcaactgggtcaggccactatttatatatgacattggtcgaatatgcctggacaagctcagttccacggccaagttaagtcaagtcaagtttttaatgtccctgtttacgacaggagcagggaaaaacaatttactgcaggatgacaccaccatgtaaccaactgtccgggccgtaaaactaggaatccaatcccgctccaccccgctccgcctgtctgctgcgaaattaatgagaatgtcaaatgcgctctgccattgctcaaagtcaaaagtgaaaagtttcgattaaagattaagttggctgccatatcggagcgactccgtgtcccgcgactcatgaacaattcatagtccacttcccggaatgcatatgcatccgagtagcgagtggtgcccacccagcgcgaactgttgctccgatgggcgccaatccttgtctggttccatagtgccactaaccataagcagcattagatacttgaggcttatagatggatacatatagattggcttaaagtcaatccaacaaataggaaacgctctttagaatatatgtatcttgagtacaaaggagaggtaaagtgggattgaaacttccgagctcatggtgtacagatacatggatccttgctgctcgaatcaaacgcctcccaagcgaggataattcgcacacaaaatgttcggtatgtgagtgaatgacatggagtgggggataagcaaatgactcacagcctggcagagattcagatgccttgcaattgtctggtgtttgtatgggatgcgtgacttggggggaggatgcgcctgcacccaatcagcagttccatgggattccgcttgccgagtcaacaccggcaattggcagtttatggttggcaaatatgccaagtcgaatgtttgtcgaattatgtggagccaatcccaccctgctcgctggatgggttatcaatcagcagctgatgggcatcggcatgcaaataggctggcttaattgggatgcagacacccacatggggcacgggcacatgctccttcaaggacgcctccatgcgagacttaatgagcttcctcggcgcaataagcataataatagttcgcctgcacccgagaccgactttgtgcatcttgcatcctttggatgggcatgcgaaagtgggttttgctgcaatctgcataataatgacaaaggggcggtaaggggcgtggccggagggtggttacctggatatccaaccacttgtcgtgccctaatgaaaccacaaacagctaaggtgtgtggctgtgagcgaagacgatggcgatggcgatggctatctcctcgtggggagcagatggatatggaaattgggaacaaggacgtttgggaaatggaaagtggtatcctttaaaattttaaatatatgttgaacgcaatccaatgtaaaacaatgtaatatttcattatgttgcatacattcagacaccttaaccttaatctttgccatcttctgattccaggtaccttcttttggacacccaggtaatttaggcagttagctgcttcacgtctaagaataatcaagataattgcatgccactaatcaaaaatcgagaggagctgaaaacggagtcctaattccgtaaatccgatggcaaatctatgtttattactctttttattcgtactcaagtcaccatttctgaaatagtaccgtattgtaaagctgtttctgtctccctccctctctctccccgttacctctctcactcgctctcttctgtaatttccgtaatccgtgtacctcttccgtactcttggtgttgtccagtccgccgcaacacccatgcccgttcgaatagcaaaggtatcgcagtagaaagttaaccaccacgagccagccggcagcaggaggagcaggtggacccgacgccatggcgcccttcaagatcaagttccggatgggcagctcgcgcagcacctcgcaggagcacgaccccgacccgcaggtgaacgaggcgctcctgggcgcccagagccagcagcagaacgggcagcccctccaggaggcggtggaggccagcagcagctccagcctcgacctcgcggactccagcagtctcggccagctgagcagcgagcgcaagctgctcctgccgcccaccaccagtagcagcaccatgcgattgggtaaggacgacacagtagcatcctgcacacaaagcaatccagagtgggtatcccgaaccaagcaaacatcctttaagtagcagcaaacgagattggagctgaaattaggcctgtaggataactaaatcaaatcgaggacgaacaaggactctttttaagatcaaatcgtatacttaattttaaaaattccttatgaaccgagacttttattatgatattcgtagttcggcagactttgtacctctttttttttctgtgtagtaagtacatacatcgcatgcaaaagcacatatgtaatcgactgggtaatatgatagtagttacagatcctacacttctccacgcacgaatatttccacatctgttgcacatccttctttttggaaaagtgaaatgggcatttctccttcggtgtaccgctgtttttctgaatcctgtttcgccaaacttattgcaggatatcttaaccagaaccgcactccgtgcatcaacgaatcgttggcggatacggatgcagacacagtgcccaccaccccaccgccttcctacgagcatgttctagaggaggtaagtccaagtctggagcggatgcacctatcaatgaggagtatgtgaaaaccgtttccattccacacagaacactcggttgtcccaacaccagcgacagttgtccctggacagcgccactccgaaccagaacagccggcgcagctcggcgaacagctcacggcacagtgccgcccagctgagtgccgccttggagcagctggccgggaatggaggcgccggggagtactgcaacgacccggactgcaggcagaacttgaacaacaacggagccaccagccacaacggcaaccacatccagaacgcgaacaacaacaacgacggcgagcagatcttcgagggcgtcacggaactggagctgcgaagcgacaacgaggagcagcttagcatcaacgagttcctgctggagacagagatggcggcctcaccgtcccgccgtctggaggatcgatacgcgggtggcgcaggagcggacgaggatcagggcggccagtgccaggacgatcagtgcgcgcagtgcagcgaggagcgggccagcggagaggacagggatgcggccagcaccagcagtcaggcggcggcatcgtccggcggtggcaacaacttttacgatccgctcctgaatcggggcagctacgcaaactacagtgaaggtactatctattcttcagcatcattcggatttgatatcttcatattattgattcctaggtggctctgcgagttcgggacctggttcggccaacggccaaatgtgccaggaggcctgctgcagcggatccgcatccggatcgactgcatccaggagcgggcggagtggaaggcggcagaaccagcagggtcagccgcccaactgccacaccagcctgctcacgccggagatgatgagcaacaagacgagcaaggagatctacaaggacctggccaagcagtggggcatcacctgcaagatgtccgagagctgtcggtgcatggagtgtcagagtcactacttcgactgcgactacgatgatgtgagtagctgcgatagccatggcatggcagattccacatccataatatatcgaatcccctttgaaatcttgcagaacgagcaccagaagacggacggaggattgggcgctggcacgcccatgtttatcagcgaggtgatgcacggatccgggtgcaacattttgtaggggacgacatccggacgcggaatccccaaggatttgctgaacaactacaattatttatccgtattgtacatgttatgatgagggagatatcgcctcctcacgtacttagcactgagtgtttgcacattattttaaggtaatgctgcacggacatatgttacatagaatcggggaatcgggagtatcacgtatggaattggccaattggccagtcgctttaggggctctaaaagtaggggaaacggagaggactactgttcggcggtaggagtatatttttggtgttagccgtaggacttgggggaatcgaatcggaatggataggtcatgttacccacctagcagatgaacatctaaatatccttgagtgtgttcttcttcggtcaatagatttcgaaatttatatatatcccacacttggccagcttgtcatcccgacttcttcataggtactccccctagctgctttgccccccaatatttatatgtatgtatttttctaagtgtagcgaggaggagctgaagcttgaggcggactaggatgagcggcattccagtgcactttccgatcagaactcgacgcgtttcaaaaacagtttggaggagtctctggtaggcgagagttcccgtaaacccgtaaacccaaaaacccggaaaggcccgctttaaggacactactagtcaaagttatccacatcagcaaaccgtagaataagctagacggcacttttgtgccattttacacccaaatcgatggtgtttttttttggggaaaacttaaaaccaagttagctccatcgaaatggcgatacgaacctagttactcgaacaaacgaatatgcaaacttagtctgaaggtcaattggtcctcatttagagtcgttgaatgttcattacttgctttccgtgtacgttgacgacatttaccgaagatggatctggtttcactggacaaatccactccgattagcactcgaaaatcgaaagatagtgaagcaaa

SEQ ID NO: 6032 - DNA, 1640 bp, DROSOPHILA
gcaatcagaaggcccagtggattatttattgtgagtgttgaaaaaaaaaacgaattcatcgcaacgcgcaatgaggcaaggtgattgcctgattccgagcagcaaagaagtcgggaatagccagcataacttcataaatccccatccgatccggctgtaagtccgccgcaggtaccttcttttggacacccagtccgccgcaacacccatgcccgttcgaatagcaaaggtatcgcagtagaaagttaaccaccacgagccagccggcagcaggaggagcaggtggacccgacgccatggcgcccttcaagatcaagttccggatgggcagctcgcgcagcacctcgcaggagcacgaccccgacccgcaggtgaacgaggcgctcctgggcgcccagagccagcagcagaacgggcagcccctccaggaggcggtggaggccagcagcagctccagcctcgacctcgcggactccagcagtctcggccagctgagcagcgagcgcaagctgctcctgccgcccaccaccagtagcagcaccatgcgattgggatatcttaaccagaaccgcactccgtgcatcaacgaatcgttggcggatacggatgcagacacagtgcccaccaccccaccgccttcctacgagcatgttctagaggagaacactcggttgtcccaacaccagcgacagttgtccctggacagcgccactccgaaccagaacagccggcgcagctcggcgaacagctcacggcacagtgccgcccagctgagtgccgccttggagcagctggccgggaatggaggcgccggggagtactgcaacgacccggactgcaggcagaacttgaacaacaacggagccaccagccacaacggcaaccacatccagaacgcgaacaacaacaacgacggcgagcagatcttcgagggcgtcacggaactggagctgcgaagcgacaacgaggagcagcttagcatcaacgagttcctgctggagacagagatggcggcctcaccgtcccgccgtctggaggatcgatacgcgggtggcgcaggagcggacgaggatcagggcggccagtgccaggacgatcagtgcgcgcagtgcagcgaggagcgggccagcggagaggacagggatgcggccagcaccagcagtcaggcggcggcatcgtccggcggtggcaacaacttttacgatccgctcctgaatcggggcagctacgcaaactacagtgaaggtggctctgcgagttcgggacctggttcggccaacggccaaatgtgccaggaggcctgctgcagcggatccgcatccggatcgactgcatccaggagcgggcggagtggaaggcggcagaaccagcagggtcagccgcccaactgccacaccagcctgctcacgccggagatgatgagcaacaagacgagcaaggagatctacaaggacctggccaagcagtggggcatcacctgcaagatgtccgagagctgtcggtgcatggagtgtcagagtcactacttcgactgcgactacgatgataacgagcaccagaagacggacggaggattgggcgctggcacgcccatgtttatcagcgaggtgatgcacggatccgggtgcaacattttgtag

SEQ ID NO: 6033 - protein, 447 aa, DROSOPHILA
MAPFKIKFRMGSSRSTSQEHDPDPQVNEALLGAQSQQQNGQPLQEAVEASSSSSLDLADSSSLGQLSSERKLLLPPTTSSSTMRLGYLNQNRTPCINESLADTDADTVPTTPPPSYEHVLEENTRLSQHQRQLSLDSATPNQNSRRSSANSSRHSAAQLSAALEQLAGNGGAGEYCNDPDCRQNLNNNGATSHNGNHIQNANNNNDGEQIFEGVTELELRSDNEEQLSINEFLLETEMAASPSRRLEDRYAGGAGADEDQGGQCQDDQCAQCSEERASGEDRDAASTSSQAAASSGGGNNFYDPLLNRGSYANYSEGGSASSGPGSANGQMCQEACCSGSASGSTASRSGRSGRRQNQQGQPPNCHTSLLTPEMMSNKTSKEIYKDLAKQWGITCKMSESCRCMECQSHYFDCDYDDNEHQKTDGGLGAGTPMFISEVMHGSGCNIL

SEQ ID NO: 6034 - DNA, 3628 bp, DROSOPHILA
caattcccagcagcagtacaggattagcaacggcataaagagggatggttcctccgagtccgccgacactccactacagttcatcaaacgccgcaagctgcaggagattcagttgcaggaagaaatcccgcggcagaacataaaactaccagccaaaccccaagtcaaagcccgtaatggcagttttaccgatctcaacaagggccaacagcaaaacatggacaacgtgatggtgtccattggcccgaacaacacctgtgtgcccgccagtgtcttcgagaatattaactggtcggtgtgctcgctggccacccggaaactactggtcacgatcttcgaccgggaaactctggccacccattcgatgacgggcaagccgtcgcccgccttcaaggatcaggacaagccgctcaagcgaatgctcgatcctgggaagatccaggacatcatattcgcagtgacgcacaagtgtaatgccagtgagaaggaggtgcgcaacgccatcaccaccaagtgcgccgacgagaacaagatgatgaagatccagaacgtcaagcgacgcagcagtggcatcaaacacgaaaaggagaacattatttagatgtattagtagaaatttgttagcacttaatcattaatgacttagaatagcaccaaaaacggctgtaatgcccgcacaaactctcacaatccatagatagtagagcactacatcgaactaacgtgtagcagatttttaaagatctcgaagatgattttaccaatccgaaccaaaagttattgtggttttatttacatttcaggggttgtgcagggtagataagggtttctgcataaagccttcattctttaaaaagttgaaaagagtaaatgtcccaattcgaattagataattggcgcgaaattcatttaccatataaggcttggaactggtcaccctaataattaaatcaccaatatgcagcgctgccagacttttgttcagaacagctgttgacgcctgacgactttttggcggtattgtttataaacaaaattcacttaagaaactggatttaataatgtcctgaatggcgtccgagtcagaaaacactacatcctattttgttccgcatctggttgatcaagtcttcgaattatatcggagtaaagcagagtccaacagccttacaaaaggtacgagctatcaaatcagaaagattctgtagtaactactctggatttcaaacttttcagaggaacgcggacagttcttttacgatctatccattttattgggccaagaactggtcctgcgatcgctacacctcttggacgaccacaacttctccttcttccacgccaagaacaatcgatccgtgtgcgtggtagaaatttccaagggaaccgagtacttccgcttgattccgggcgtaagtttctgcaagtgtgagttcttccagtgccacgtgctgcagttgccgcgaggcatcctctaccaggaccttcccagtggcgaaccgggcattttagaggattggagcgaggagagccgggtgtcctacacctgccagcacatcctggcattgcggctccatcaatttctgaagcacacgggcgggaaaaccaccgagaagatccttaagaaagaggatatcaaggagctgcggacggacgtctttcgggactaggatgactgatgtggagccatcgccctacggcgactgcaaattcgtcgctcgagtggagcacatcaagaccttcatccaggccatcaagtcaatctgctttaatgatgtaaggattaactcgaactctctttattcgttaaccaacttaactcggtaacaacctattgttttacccacagtatgggatggtgcaagtctccgaagatggtctgcgcatcaccgtggagcagggcaagtccatccaggcaacgcttttcatgccgccgggtgccttcatggagttccgtgtgcaggacttccagtgcttcggtgtgaaaatgaatgtgctgtccgagtgtctcagtctcttcggatccgccgattgcagcctgcgaatgatgtacagggataagggcgatcccctgaagataattctgtatccgcacgacgacgatgatgtgagcacggagtgcgccatcaaaaccatggactgcgatgagcccattgactacgatcagaatctgaaggatccggatcttaatgttattttcgtacgcggaccgaacctatcgaaggtgttcaatgagctggagaagtccgcggaggagttcgagttcgtgacatcgccgaaccgcccgcactttaagatcaccacagtggggatcatgcaggcggtgttcagcgtcgaagtggcaaagacgagtcccatgatgatgatgtttaactgcaaacagacggtggtggctcgctacaagagccagcagatccgcatgaccaacaaggcgatgcagtcggccaccaaggtggccattaaaacgaactccgttggcctcctagaactgcatctggtaatgcagggcgatagccaggaggagatattcattcagttcttcataattcctttgctcaacactgattaaaccgaaactactaggtagctaataaaatagaactttaaaatattgctaaaatcttgaaatcatgtaaatctaattgaggtctgtagttagcgtgtgggtcaattgttaatgcttctcatgcaaatataagatggattcagcattcagttgagtacttaaggtggccttggaacgatttgatattactttataatactttaaatgacgtggactcccggaggagaaagttgcatcgccatttacaatgactctgaagaagagggcatgataatggtacgctgctccaatgaaaacaactttatttgtcagacagaacaataaagaacattgaatatgtttatttctatttgttcaatgcactgcacagtgtgaaagtaaacagaactacaatcgaacagtagctgataagtcagctatcaataaatacattaggattccgcatcgatagattttccatccgattccgggcagcgatgatgccggagagattcagcttcgacttccgtccgatcgatcagtactggacgagagccaaaggcgcgtgcagcaacacgaaacgcggaaacatgtacatcctggcatcgctggccctgatcctgctgcacctgctggtgctgcccatctacctgtacctcacctggcaccacaagtactggcgcaagcggggattggtcacggcgcggcccctgaccctgctgggcacgtatccgggcctgctcacccgcaagagcaatctggtcttcgacgtgcagaagatctatgagtgagtacttccaatctctagtcataatgagatatgtaactatataatcccagtaaatacaaggggaagcaccgagctgttggcgtctttgtgacccgacagccgcagatcctggtcctcgatccggagctggcccacgaagtgctggtgagtaactttcgctgctacaaggactctctgcaaagctcgtacctccggcatgccaagtgggacaagtacgcgcgcctcaatccgttctgggcatccggacagtcctggaggcggctccgcacggacgcccaggctggtatctccgg

SEQ ID NO: 6035 - DNA, 1495 bp, DROSOPHILA
ctgacgactttttggcggtattgtttataaacaaaattcacttaagaaactggatttaataatgtcctgaatggcgtccgagtcagaaaacactacatcctattttgttccgcatctggttgatcaagtcttcgaattatatcggagtaaagcagagtccaacagccttacaaaagaggaacgcggacagttcttttacgatctatccattttattgggccaagaactggtcctgcgatcgctacacctcttggacgaccacaacttctccttcttccacgccaagaacaatcgatccgtgtgcgtggtagaaatttccaagggaaccgagtacttccgcttgattccgggcgtaagtttctgcaagtgtgagttcttccagtgccacgtgctgcagttgccgcgaggcatcctctaccaggaccttcccagtggcgaaccgggcattttagaggattggagcgaggagagccgggtgtcctacacctgccagcacatcctggcattgcggctccatcaatttctgaagcacacgggcgggaaaaccaccgagaagatccttaagaaagaggatatcaaggagctgcggacggacgtctttcgggactaggatgactgatgtggagccatcgccctacggcgactgcaaattcgtcgctcgagtggagcacatcaagaccttcatccaggccatcaagtcaatctgctttaatgattatgggatggtgcaagtctccgaagatggtctgcgcatcaccgtggagcagggcaagtccatccaggcaacgcttttcatgccgccgggtgccttcatggagttccgtgtgcaggacttccagtgcttcggtgtgaaaatgaatgtgctgtccgagtgtctcagtctcttcggatccgccgattgcagcctgcgaatgatgtacagggataagggcgatcccctgaagataattctgtatccgcacgacgacgatgatgtgagcacggagtgcgccatcaaaaccatggactgcgatgagcccattgactacgatcagaatctgaaggatccggatcttaatgttattttcgtacgcggaccgaacctatcgaaggtgttcaatgagctggagaagtccgcggaggagttcgagttcgtgacatcgccgaaccgcccgcactttaagatcaccacagtggggatcatgcaggcggtgttcagcgtcgaagtggcaaagacgagtcccatgatgatgatgtttaactgcaaacagacggtggtggctcgctacaagagccagcagatccgcatgaccaacaaggcgatgcagtcggccaccaaggtggccattaaaacgaactccgttggcctcctagaactgcatctggtaatgcagggcgatagccaggaggagatattcattcagttcttcataattcctttgctcaacactgattaaaccgaaactactaggtagctaataaaatagaactttaaaatattgctaaaatcttgaaa

SEQ ID NO: 6036 - protein, 179 aa, DROSOPHILA
MASESENTTSYFVPHLVDQVFELYRSKAESNSLTKEERGQFFYDLSILLGQELVLRSLHLLDDHNFSFFHAKNNRSVCVVEISKGTEYFRLIPGVSFCKCEFFQCHVLQLPRGILYQDLPSGEPGILEDWSEESRVSYTCQHILALRLHQFLKHTGGKTTEKILKKEDIKELRTDVFRD

SEQ ID NO: 6037 - DNA, 11963 bp, DROSOPHILA
gaaactgtgagagggcagtcggatctggttggagtacttgcggccgggagttggactattcaaagctctccagttgcgatgatcttccttatggaagtgtgttgcgatttaattgcctggctctttcgtacgaattccattaattgctcatgtgggcgcgcaaatatttaaacagcagtctgctcgaaagattcttctctacataattgcctcgatttttggctgggcggggaggctgtgagagctggactctctgctctactttccgcttactttgtagttattggagttagcaggttatcgctggcacagctgataaggaggttaatgtaccacaaacgtcgccgcactttcggtttcattgaagaagcataaaaatttaagtttgtgatcatttttaaaaaatttagccaactattatttatttgggataagcaatttaagctagtactaaaattttttattgtaatctacacatgtttttttcagttcgaaataaagaaaaatttcacatcaacgtctgtatataatatttatggtacgaaatttgtaattattttttttttgagccagatttaaattttcctgttcaaattccttaaacttaaaattttaccttagtggcgccccaaaagtgtggacacttttcgaactgctggcatactgcttgcatccactgcttgcaatagtgttttccaatactgaacttggcgcgtcatttaatttcccgtgaacggattataaatttgatttcaagcaattaatattaaaagtgaaaaaaatacacatataaattaagtgcaatttagagtggtttatttttatttattacggaaataagctaatgaatgaaacatcattatttcgtaaggatcgaaaggtttctttttatattctgaagaacaagattcaagctaaatagtaagtgaagtaggaagaatgctaatatgtttattcaagaagacaatctggtgttcaaggcacttcttcgcttggtacatcatttctcatgctcattttcaatgtcaatccttataatgttgaccgtgggctccggggaagcactccgcgggtcgggaagcccattttgtggagcagctgcgtccacaatgcactcatcgctgccggtggtgcttatagtaatagtgggtatattatccgaccaaatggagctctgtgaatcctgtctcatagtgcgacggcgatgggaatcgctgcgcctgggaaatgtaataggaccggctgtgtccagttcctccaggtcatccatggtggccgttggagcagtggcggatgcgggaaccattggaggctttggtggcttggaaggcgcacgagacgatgtgctgctgccaaagtgcagtggtgcactgggcgttggagattccggttccggagtaggtggcatttccaaggccgtcgaactggacacgctggacaatactgatggtggtggtggcggtgtgtaggccaagtaggtgggcgttgtgggacccggcgactcatccgagcccgcctgctccacatcgtcctttttgagattgacggcttcacgaaccagggccaacaggttgccgatcttcttgcgaccctgccgggaaagcacagacaattgccgctggtggtgaccctgaccctggctgggagtgggtgatggcagactcctatcctgctcctcagtgccggatggctcgttgtttaggtactctgcggcgtgagttgccggtacatccgaactcctttccacactccgctcgtcaaacttgaacacctctggctccggcttgacggcagccacattatttgacttgaatttgtgcttacggaacttgaacttgcccaaacttccaccgccactgccactctccttgggtgtcggcaagggtttatcttccacttcatgcggcgggggttttttttcatcaactatgtggaatttgcttttggccagcgtgggagtttcgggtgtggattcctcgagcgcctgttccacgggctctactggcgagttgggtgtttgtggtgcgtcgggggtagtgggtggttcctctccctccgcctgctccttgtggcgcctcagcaaactggcgctgacaattcttgaatttgtatccggatcatgttcattgtccttgggcgattcatagggcggcggctgttgctgctgctgtggcgactgtctgtgcctggtgtcctttttatccttcatgctgcccctatccttgcgctcatgtttctccactttgaagcggctctttggatgggtctcctttatgggaaaattgccagttccagaggagcttgttccggccacaatggatcccgcccgtgcccgctcctgcttggcaatctgaacgatgtccaccagcgatggtttgcgggtacgccggatttgctgcaatcgcgacaggccgaaccgcttgtccttggcctcctcgtcgtggggcagggagtcctgatgctcggtgtccgtgtcatcgtcgtcgcgccgcacaaacgaatcctcatccgacgtggcggatcccttgcgcaacgccttcttcatgatgcgtgagattagctctaaatgcagggaatgaagaagcgaaataaatgagttgtgaacttaaatctctcacttgacatggcttacctttccgggcttgattcttgtactcctccgtatcgaaatcgggtggttgggtgggtgtcaccggagagctggcctcgagtactttgcgccagcgatttgtcagcgtggtggccgttggttccgcttgtttgacctccggcaccttaaagatcttcttgcgctcctcctcgcgttccttctggagttgggtgcgcaaatcctggttggcttcgcgtagagcgccagttagcgaaaccaggtagtatataataaggataagaagcagaagcaatggaatcacagtgctcgaggaggtcagatagtccaggggttcgtggagttgtctggaaagttttaaatcaagataaaaatccgtttcattcggttaaaaaaacttactttggcagagcattcctcgtggtgttggtaatgaactcagctatcctgttgtactccgagaagggtccacaatgccaggaaggacgcagccacacaatcgcatagcccacgggcaggacacaaaggaacagcatggtcaacagcagcgataggtagaagttgttcgacttggaggccctgattacggattacggattacaataagttcacatcaccagatgagaccacttacttgaacaccacctcatgcggcacattgcaggtgagcactatccacgaacggaagtacatcatgatcatcaatttgaccaggttgataagcaccaggcccggcgagaagaatatgcccatccacacttggccctggttattaatcaacgtcaggatgttctcggctatcttgaagtcaccgtactgcgaagcgacaacaaagcctcacattagtcaccacggacacccgaaaaccggatgacgtcgtcagctcacctggggaaaggtcttctccatgtcccagcaccagttttgattgacataccggacgaagagggcgcgcagaaagtcgatgcacagcggcgccacaatggacatcagctttttggattgaattggtttcgtggtggaaagagataaggttgggaagtggggtttaataagcgcattgtaatgaactcggtaaccggatgttggagcttaaaagttgccacacgtaatccggatcgttgcatcttcgttgttgtgccgccttcaatcctagtttacggctgaatttaccttctcgattctgtggtcgaaattcatgcacggacacgtgccccaagtttcgaatcgaaacccgaatgagatggagatgtagatgtggaggtggatgtgcacccaatcccaagccgcacatgaccaaactcaatttcccatcgccccagcattttgttatgcgtaaagcataaatgcgtttaagcccggcccgtaacttgcctaatttatgtgcttaaatcgtttaatagagattatgtacgccatgtttgggggggtcgcataatcaaatcgggcacgggacccatgtctactattttttttgggatttccgaccggcggcccacatactcagtttacaagaatgtcggacaaatgttaagtacgaaataaaagggcaagtaatcccatggattgagatgtctactaccaatagggttattgacttcgttggtatatctacaccgtatgcttatctcaaaaatgcctggctgaccttgaaaactttagcaattccatgaatttgtttacgattagactaaaagttcacggcccaatgggatgccaatcgacactcgaagtggcaaatggccaaataaaagttgccattcgacgggccaaaagttcacaatcatgcttatggcttatgtaaattttttgactggaaatcgaagagcgagtccccagttaccaagtttcggttcctgttcctgttccggccaccagctgagtttcgcatcaatagggaaaaggactcccgagagcgattattatgataaaatgccttacgcattgctgctattttgcctttttctttcccaaatcgtttggccttttaagtcaagtggattttggttttgctagacgagcgcaaaaatttgattttcaaaattcccatggcaccctcaaaacgaaggatacaaaaaatggtgaaaaaaaaggaagacaaagagtactcaagtgcaaaggcggaagacaaattttgcgttaaattttccggataatttagctaaacgggctttcacgcccacaaagcttcgagcgcaactcccatttcagttcaatcatatttaagtctaaatagattctgatacagaggcactggcttccgagctggcaggccagggaaattgatagcagcagctcatggtgataaatttaattttgaactgctaagtgaaaaggggaaccaccgtaatcgcactcaccccatcgaaaacgatgactttggagagctcctggcccaaggaggtctcccagcacatggtcgtcagattggtttgtatttgcttaatcgccagctgcacttccttcaaacgcttctgcttccgctccagcggagtgagcttcactgtggttagctgcttggagtcgctgctctgggtggtgctatccggactttcagtggtgctgccaaaaaagtcatcgcccttggggcaaatggtaatcacacactcctccagaaattcactatctccatcgtagtagatagtacttcccatttccgatatgtccacgtagcccacatagtagggtctattctccgatccctccgtggtggtgtattcatcttcttcggtggtgctactgctgctgtcgaaggcattggtagtgctccctggactcgatgaatcagtggaactctccgttgtggaggattcttcctcggtggtgctggtaagttcggtagtcgtggttcgatatctccacctgggtcttcttgtggttgtgctggtggtggacgtactggtagttgtggtaatcctgcccctaagtcgtctgagtctttcccattcctccttggttagaattccactgggaactcttcttgttgtggtggttctcggtgtggtttgcctaaaagatgcccaattaaatggccaccgactgggtgtggcattcaccgattcagtggtttctcgtggttgtccagctgagacagcggattcattgcgatgtcgcctgctgtacttgctggtaaagaatggtgattcggccaatgcccttttcctgcgtcccttcgtctcattttcatcgagctgctccaatactttggccagtggatcgtccgcctgatccgtgctttcctgttcatcgaaatcttcaatttccgacggttccgaagagtaatccgttatatcggagtagctattattatccggagcgtctgatgtggaatcactgccataatcgtaggagccctcatcttctccggtggtgtagataaagttatcctctccctggggcttctccgtggatgtggttgtagttagtttggtggtgctgttcaggggtaaattagtggtgtttaaagtggctggtattgtgctcaaagtggcagaattcgttgttgagttgggtatttcagtatcaatagattttcccaggggttttgtagtatctgatagtgtactatttatttcggcagtggtgatcttcagtgtggttgtgctcgttgcttctgtggttgtggtggctctttcagtcgttgtggttgcctcagtggttgttgtcgagggcggtaacgtggtccaaggtgatgtcgttgtagttgtcggagatgtttcctctgtggttgaccaaatacttgaagtcgtcgccgttgtggtggctaatgtggagggcaatgtagtaggcaatgtggtgggcaatgtggtaggcaatgctgtaggtaatgtagtgggtaatgtggtgggcaatgtggtgggaaatgtggtgggcaatgtggttggcaaagttggtggcaccatggctggtgttgtcaggttgagaaccatcagagtggtggccaagtgcttgccactgatgatgttgcgccgcagctttgagcattttacagtcatgttgtaacacttgagacgctgcacggtggtggagattaaggcagcagccgctgtggtcgaaaagaggccaccaccatcctcaccccaagttgccgttgatgtagagtcatcgaatagcccatccgaagtactttcaccatatagcgatgtcgtgggtgtcatggccctcagagcctcaattgaactaagtagattctttagctccatggtgtttgtttcgttctccaatttcaacatctgtagcggtttctccttgctgttgatcttgtagatgaaggagaacatcagcgagtacaagtttaacatgttcaggatcataatgctgcaaagtgagggcgcttcagttatatacaattatttatcattagcactggtttttttattaccgagccaattgcaaacgcagctgctgcctgggatgccagttctcgaacagacccagtgcctcgaatatcatgggcaggaagaaggagagcagggtcatggtcacgttcaccgcattgcgactcagccagttgtcatgcttggccaaatcctcagagctgtaaataaaaagaattacagaagaaagcaattttgaaataattcatataaatgtttaatttctcatttaaataaatatttatcaacgaatttaaatcagtatttttcggtgcatatttcatcgccatttccccaatccacttactgattaaccagcagcacgaccgtagcgcccgacaagcccagcagccccatcaccagtatattgaccagtatcctctggagtatgacccgccagctgaaaggacatggcgtatcgattatggtaagtaaatagcttcagtttggcagcgacttacttgcgattatccttctttttctccgcttcctccagcagtgcctccttgaagcccacgaccacggatgcgatgcgattgtgcgccgtttccgcgtgtcctgtgggagatgcaaaacttgtgatgatggcagctcgttgcggaaccaacgccggccacttaccaatcataaagtcccagccggtgaagagcttccacgagaagacgcactcgtcgtccttcgaggaaagttttgagttgcgcgagttttccgccattctgtcgatggatcaaaagtggaaattcagtcataatttgttctgaaatacccgcaattcccacaatttgaatcccgtatagcattgcgattgaattaatccacgcacgttgagcacgtgacccgcaaaagtggctatatggaaaggccagtgccggctgctcactgttgacattgctgctttgttcaattacgaaatcaacataatgccgacaaagccattaaagcgtgtcagacgcccaatgctcaaaatggcgttttgccgtttccgtttcctgtcccgcccctcactgccagcccccttcgaggcacgtgctctgttgtgtgcgtgcgtaaatcataatggccaatgctttctcctttgattattttgaggcgtcgaaactttttcagacccccagacacgcctcgtggccaagatttgtattatttaatcagagctttagttttgtttaattaattaacgagcagtctgacatttagtttactttttgcggcttcgatgaccaagtatttaatgaagtgcctacccaacacactgggaaccatatccatacccatgaccccttgacccctatttctttgtgctcccaccatactcacttcctcaacgtggccacaaagctgtagatgtagaccagaacggcggtaaggaaataggctaagggaagcttatatccggacgtgctaatgccggatgtgcttgaatagtatctgggggataggaaaacaagaggagggatgatattgggatattgccagcaattaatagagctctcataactaatttataattaagatgaacaaataaatatttacataagaacataattttcttccaaagttatgttatgttaaaaaggcaaatgaattaaaggaattattattgatttatttttaaacagactgacttgaaagggaagcttagcccttgtccaacaaaaaaccagtctggcttacccataaaacataggtgaatatttcaggtatccctcgaactcccagaacgtgaaaagattgccggccacccgagcctccgggtcggacatccttttcctgggatccgtttcgccgtgctttgtggcaaagtactggaacaaagccaagcggaaacataattgtgtgtaaagtgtgtggcaaacgaattggctacttctgaggacactcacctcggggccaatgacgaaggcgaccagcggaatggcaatcatgatattgacccacataagccatcgcaggaatgtaaagtaggaggctacgccggagccgaagtgtgattcgatttccttgatgcgcagctcccagggaatgaggacggtaaggaagctggccgtctcacgtttccagtgtcgccatcgctgcagaaaatgtcggatgcaagaaaggatttatttctagaaaggaatggcagtcggcaagttcgcattttaattggtctcccagcacagcgagaatgccatggggctcacatagctcggtgaactatgcgaacagtggggatttattgaatgtccgtcccgaccggaaagtggcccataaattgtgtaaacattaatatttttttgcatggcttgggggcctttcgccttgtgctcgttgcatttcgcattctgcaggcgtttcctccaaaaaaaaaaaaaataataataaagaagggggttacaaaatcacttactgccgccattaaaattttaaacctcgcccacaagtctctggtgctgcgtgacatggcgaagcgctcctggagcgcgccctcgtggcgtgccacatatgttttggcctgtcaacacatacaaggagccgcaggatccgcaaagtccaaacatcattaaaaattccagggtgtagcgaaagatgggagataaagaatgaaatcgaaaagtttggctcagcatttgatgagtgttcggtgaggtttgcaaggaaggaaggataggcggtcgtaacattttcaacgacctgacaagcggcgtgaaaacgaacgcgcccagtttttgggcaaatcccccattcaattccactcccatctgaaaaccatggatacccacctgccgcaccaacttgagcttcttgcggatgggccatggctgtagcttcaccgactgtatgacctccttgtgcaggcggatgttctcaaagatttgctcttgcgttgactcctgattggtgccctcctctgcaaagtaaaacgaaagtcaaagcaaggcaaacagattacacatacgccccgtatgccacgccatcaaaacggtccgcacgtagcatgaaaaattacagaaaacaggcccccagacgttgattagcttgccacttgaggatgaccgagaaggaccggggagcagtccgctcgttaactaaacgaaatctgctctggacacttatgggccacggaccacagacttgcctgaacttgtcgtatagacactggagcgtcgtcgctccacactgtccagaacgtgatccatgggactggatgcacgtcgcgaactccggctgccgcgtttgccccgatagccgcgcacactggcacgtctctgcattattgccgatacggaaattgtgtagctctcctcatcgtcaatgtcgccaccgccgccatcctcgtcgaatccgattccaggcgaacgctggtgggcaaagtgaggctcctggtggcaactctcggcgtcgctgctctggttttgcaatgggaaatctggagtggcagtggtgtttggtcattagttggttactttatattaaacacagacagaaaagattactctgcattaaaactgctaaccaaaatgtttaaatgcttttatttagataacaaaatttaatgcaaaatattaaaaaaaaaaattgttggtaatttatagaatcaataatgctagaaacaaataaagatatttaacttattaaatattaaatgtttaaataaaatacctaaacaagcgtatataacaactaataaaaaactatagtttggtttgctagctattatatatatttaaccagatatacgttacgcaccgttcagttcgtaggatctgtggtcctcctgtgacgcagctctttaaaggaagttaatagaaacgcagagaccgagatagtgatggtccaaggtatccctttaaaggactcacctcctgcctcgctgtcctttgtagaattccctcttggcatcggcgctgctctgcatttgccagccacctctatccaagtcgcatggcggtgcccaggtcacagagagttgatgaggcgatgtgactcccgagttgttctacgaatggatgggcagcagcttaactcaactaattttcaagtgctgttccgggacagctaattactcaaatcacactggtactctttgcgtgcggaatgaccttcgctgttaagtgcttatttattaatttcactgctgtgcaatttatgtgttacatctcttctagtgccctcaaagaaaatccctttaatggacaagctagcactttttgctcccgatttagccagttataagccgaagcgctttggagcagccttgtgcgcagactgaacggcttagctggctggcagggctaccaaggcacaaaatgaccatcatccaaagggacggcgaccacgaaggcacctcacacagacaggtgaaacttaaatttttctaataatgaatgaatatgaatgaagaacgaaccaccaacaccccccgccccgccccgcacgatgggcaacttatcaaagccaaaacgtgcccaaaacccacacaagcgcacacactctaaaggaatttacatggacatgcggcaggacattgcgactaggtggctgaaggggatcgggagtccgggtccgagtggctgacttcctcgccctgttggaacgaagacgaatgagtgtaaaaattgccaacggcatgtgataacaacgccgtatccgggcgtaaccagccaggacttcgaatgtccatttagatggcgcttgtgtgtatgtgatattgagtcaccttgtattcttggcccggccatgtaaatgaaaatcaaacatgcaagggttgataaagaaaatcgcgaaattctaggtttttcccggactttatcctcttgcctgtttcccccattttccggtgtgtgtgtgttagcttgtgtgcttttctgggggagcgcccactattgaaatatatgttttggcgctctccactgtgttctctgtgttttgcctttcactttctctgatttcactttcgttccttttaattaaatggatttctcggccggctttaatta

SEQ ID NO: 6038 - DNA, 5929 bp, DROSOPHILA
aacaactcgggagtcacatcgcctcatcaactctctgtgacctgggcaccgccatgcgacttggatagaggtggctggcaaatgcagagcagcgccgatgccaagagggaattctacaaaggacagcgaggcaggagagctgcgtcacaggaggaccacagatcctacgaactgaacgatttcccattgcaaaaccagagcagcgacgccgagagttgccaccaggagcctcactttgcccaccagcgttcgcctggaatcggattcgacgaggatggcggcggtggcgacattgacgatgaggagagctacacaatttccgtatcggcaataatgcagagacgtgccagtgtgcgcggctatcggggcaaacgcggcagccggagttcgcgacgtgcatccagtcccatggatcacgttctggacagtgtggagcgacgacgctccagtgtctatacgacaagttcaggcaagtctgtggtccgtggcccataagtgtccagagcagatttcgtttaaggagggcaccaatcaggagtcaacgcaagagcaaatctttgagaacatccgcctgcacaaggaggtcatacagtcggtgaagctacagccatggcccatccgcaagaagctcaagttggtgcggcaggccaaaacatatgtggcacgccacgagggcgcgctccaggagcgcttcgccatgtcacgcagcaccagagacttgtgggcgaggtttaaaattttaatggcggcacgatggcgacactggaaacgtgagacggccagcttccttaccgtcctcattccctgggagctgcgcatcaaggaaatcgaatcacacttcggctccggcgtagcctcctactttacattcctgcgatggcttatgtgggtcaatatcatgattgccattccgctggtcgccttcgtcattggccccgagtactttgccacaaagcacggcgaaacggatcccaggaaaaggatgtccgacccggaggctcgggtggccggcaatcttttcacgttctgggagttcgagggatacctgaaatattcacctatgttttatggatactattcaagcacatccggcattagcacgtccggatataagcttcccttagcctatttccttaccgccgttctggtctacatctacagctttgtggccacgttgaggaaaatggcggaaaactcgcgcaactcaaaactttcctcgaaggacgacgagtgcgtcttctcgtggaagctcttcaccggctgggactttatgattggacacgcggaaacggcgcacaatcgcatcgcatccgtggtcgtgggcttcaaggaggcactgctggaggaagcggagaaaaagaaggataatcgcaactggcgggtcatactccagaggatactggtcaatatactggtgatggggctgctgggcttgtcgggcgctacggtcgtgctgctggttaatcactctgaggatttggccaagcatgacaactggctgagtcgcaatgcggtgaacgtgaccatgaccctgctctccttcttcctgcccatgatattcgaggcactgggtctgttcgagaactggcatcccaggcagcagctgcgtttgcaattggctcgcattatgatcctgaacatgttaaacttgtactcgctgatgttctccttcatctacaagatcaacagcaaggagaaaccgctacagatgttgaaattggagaacgaaacaaacaccatggagctaaagaatctacttagttcaattgaggctctgagggccatgacacccacgacatcgctatatggtgaaagtacttcggatgggctattcgatgactctacatcaacggcaacttggggtgaggatggtggtggcctcttttcgaccacagcggctgctgccttaatctccaccaccgtgcagcgtctcaagtgttacaacatgactgtaaaatgctcaaagctgcggcgcaacatcatcagtggcaagcacttggccaccactctgatggttctcaacctgacaacaccagccatggtgccaccaactttgccaaccacattgcccaccacatttcccaccacattgcccaccacattacccactacattacctacagcattgcctaccacattgcccaccacattgcctactacattgccctccacattagccaccacaacggcgacgacttcaagtatttggtcaaccacagaggaaacatctccgacaactacaacgacatcaccttggaccacgttaccgccctcgacaacaaccactgaggcaaccacaacgactgaaagagccaccacaaccacagaagcaacgagcacaaccacactgaagatcaccactgccgaaataaatagtacactatcagatactacaaaacccctgggaaaatctattgatactgaaatacccaactcaacaacgaattctgccactttgagcacaataccagccactttaaacaccactaatttacccctgaacagcaccaccaaactaactacaaccacatccacggagaagccccagggagaggataactttatctacaccaccggagaagatgagggctcctacgattatggcagtgattccacatcagacgctccggataataatagctactccgatataacggattactcttcggaaccgtcggaaattgaagatttcgatgaacaggaaagcacggatcaggcggacgatccactggccaaagtattggagcagctcgatgaaaatgagacgaagggacgcaggaaaagggcattggccgaatcaccattctttaccagcaagtacagcaggcgacatcgcaatgaatccgctgtctcagctggacaaccacgagaaaccactgaatcggtgaatgccacacccagtcggtggccatttaattgggcatcttttaggcaaaccacaccgagaaccaccacaacaagaagagttcccagtggaattctaaccaaggaggaatgggaaagactcagacgacttaggggcaggattaccacaactaccagtacgtccaccaccagcacaaccacaagaagacccaggtggagatatcgaaccacgactaccgaacttaccagcaccaccgaggaagaatcctccacaacggagagttccactgattcatcgagtccagggagcactaccaatgccttcgacagcagcagtagcaccaccgaagaagatgaatacaccaccacggagggatcggagaatagaccctactatgtgggctacgtggacatatcggaaatgggaagtactatctactacgatggagatagtgaatttctggaggagtgtgtgattaccatttgccccaagggcgatgacttttttggcagcaccactgaaagtccggatagcaccacccagagcagcgactccaagcagctaaccacagtgaagctcactccgctggagcggaagcagaagcgtttgaaggaagtgcagctggcgattaagcaaatacaaaccaatctgacgaccatgtgctgggagacctccttgggccaggagctctccaaagtcatcgttttcgatgggctgatgtccattgtggcgccgctgtgcatcgactttctgcgcgccctcttcgtccggtatgtcaatcaaaactggtgctgggacatggagaagacctttccccagtacggtgacttcaagatagccgagaacatcctgacgttgattaataaccagggccaagtgtggatgggcatattcttctcgccgggcctggtgcttatcaacctggtcaaattgatgatcatgatgtacttccgttcgtggatagtgctcacctgcaatgtgccgcatgaggtggtgttcaaggcctccaagtcgaacaacttctacctatcgctgctgttgaccatgctgttcctttgtgtcctgcccgtgggctatgcgattgtgtggctgcgtccttcctggcattgtggacccttctcggagtacaacaggatagctgagttcattaccaacaccacgaggaatgctctgccaaaacaactccacgaacccctggactatctgacctcctcgagcactgtgattccattgcttctgcttcttatccttattatatactacctggtttcgctaactggcgctctacgcgaagccaaccaggatttgcgcacccaactccagaaggaacgcgaggaggagcgcaagaagatctttaaggtgccggaggtcaaacaagcggaaccaacggccaccacgctgacaaatcgctggcgcaaagtactcgaggccagctctccggtgacacccacccaaccacccgatttcgatacggaggagtacaagaatcaagcccggaaagagctaatctcacgcatcatgaagaaggcgttgcgcaagggatccgccacgtcggatgaggattcgtttgtgcggcgcgacgacgatgacacggacaccgagcatcaggactccctgccccacgacgaggaggccaaggacaagcggttcggcctgtcgcgattgcagcaaatccggcgtacccgcaaaccatcgctggtggacatcgttcagattgccaagcaggagcgggcacgggcgggatccattgtggccggaacaagctcctctggaactggcaattttcccataaaggagacccatccaaagagccgcttcaaagtggagaaacatgagcgcaaggataggggcagcatgaaggataaaaaggacaccaggcacagacagtcgccacagcagcagcaacagccgccgccctatgaatcgcccaaggacaatgaacatgatccggatacaaattcaagaattgtcagcgccagtttgctgaggcgccacaaggagcaggcggagggagaggaaccacccactacccccgacgcaccacaaacacccaactcgccagtagagcccgtggaacaggcgctcgaggaatccacacccgaaactcccacgctggccaaaagcaaattccacatagttgatgaaaaaaaacccccgccgcatgaagtggaagataaacccttgccgacacccaaggagagtggcagtggcggtggaagtttgggcaagttcaagttccgtaagcacaaattcaagtcaaataatgtggctgccgtcaagccggagccagaggtgttcaagtttgacgagcggagtgtggaaaggagttcggatgtaccggcaactcacgccgcagagtacctaaacaacgagccatccggcactgaggagcaggataggagtctgccatcacccactcccagccagggtcagggtcaccaccagcggcaattgtctgtgctttcccggcagggtcgcaagaagatcggcaacctgttggccctggttcgtgaagccgtcaatctcaaaaaggacgatgtggagcaggcgggctcggatgagtcgccgggtcccacaacgcccacctacttggcctacacaccgccaccaccaccatcagtattgtccagcgtgtccagttcgacggccttggaaatgccacctactccggaaccggaatctccaacgcccagtgcaccactgcactttggcagcagcacatcgtctcgtgcgccttccaagccaccaaagcctccaatggttcccgcatccgccactgctccaacggccaccatggatgacctggaggaactggacacagccggtcctattacatttcccaggcgcagcgattcccatcgccgtcgcactatgagacaggattcacagagctccatttggtcggataatatacccactattactataagcaccaccggcagcgatgagtgcattgtggacgcagctgctccacaaaatgggcttcccgacccgcggagtgcttccccggagcccacggtcaacattataaggattgacattgaaaatgagcatgagaaatga

SEQ ID NO: 6039 - protein, 137 aa, DROSOPHILA
MQSSADAKREFYKGQRGRRAASQEDHRSYELNDFPLQNQSSDAESCHQEPHFAHQRSPGIGFDEDGGGGDIDDEESYTISVSAIMQRRASVRGYRGKRGSRSSRRASSPMDHVLDSVERRRSSVYTTSSGKSVVRGP

SEQ ID NO: 6040 - DNA, 4383 bp, DROSOPHILA
acttgtaaaaatagctataatatgagatttcttcttattggcaagttcataatgtaagctgcatctgttacttgtgcctaaatctatatttaaaacctttaattatccgtcaaaattcttcagtttccaaggttaaaagtacttagcaaagcttgcgaaatttcctagaaagaatcataaacaactacttgcaaaaattatataaataaacgaatattatcagacaagagggagctggcacgatgggcgagaaagagatggcacgaccaggagggaaagagagggtgggcaaaacacccactcaaaatcaaaatcaaaatcaggcatattaaccacagaaaccggttctctctttctcaccttgcacgcgctctcgctctacctctgatttaaatgcgcgtgtgtgggtgagagcgggagtaaaggtgctcagaatacacagacaaaacgagtttgcacctggccaacctgaatttctcccgctctccgctcgctcttttcgtgggtgatcttgtgggccacgctctcatccgctctcgcagggagcgatcgccaatggcgagagagatgtggcgatcaacaagtgagcgcaggtccgcgatatgtccgcagagcaatggacttttagttattccgtgatcttttaccaatattgtgtgcagcgacggctgatcgacgtcaagagaagaagaagaactggcagaatcagagaaaataaacaatattatatatacgtacatatatatatacatagctcaacacgtgtatgtgtctgtgttggctaagaccggaagttgcattaaacggaagttaactaatagtaactgcacataattttaaagatcgattgtacccaaattgttcgcgtgtgctagccagaagaactaccatattatttcagtcgaaaaaatcgaaaaagcgtgcctgccaatttgacttaacttggctgagactgcactttgttgttttcgtttttggccagacgtcaaattcgatttttatgacttttgaaagcgtgactaagacgtgatttatgatggcgtgtggtttttaatattcatgtggacgcgctccgaacctctcaacctgcgtaggtgcgccaaacaataaaaaatacaaaaaatcaccacggcaaccagcaacacagcaacatcgctggcccgaggctttatcccgatatccagctgagtgtgtgcgtggattcgacttttttatggaggcagttaagcatttgagtgccgctgctgctgctgcagctgcagctgcaacttgcagcgattcgccggccaaggcagcagcctcaccggcagcaagcagcgatattgccgaggcgcttggagaactcaaggcaagcgcaacagcagcagcatcatcagctagcaaggcagcaacatcgaagcaccacagcaacaacaaccacaagccaagtgccgcagcaacagccacagcagcgcacaagaaaagcgagagttgcaacagcaacggcaacaagtgcaccgctgcaacatcgccgatcggcagtaagaccagcaacgcagccatggcagctgcaacagcaacggcggccgcagcaaccaacgatcttgcagcggctgctgcggtcgttctttcgctgcaaggaaccatggtcagcagtttgcagcaggccgccctactgccggccaattcggcggcagcagcagctcttaatctccaggccctggaatcctatttggcgctgcagcgactaaccgggaaatcggatgtatttcgcttttccaacagcaacaccggcagcagcaacagcaacaacgccaccacctgcaacagcagcagcagtgaagcggacaacaatgccttaccctcgctcatcgatatagccaatatagagctcaagtcgagctgctcctccagctcctcgggggaaccccctttgacggcagcgacagcatcagctgccgccacatcctcgcccagcagcaacaacagcaactccaccagcacaccaacaacatccaagtgcgtgcctctgccctccattggcaccgttagtgctgcagtggcggctgctgcggctgccgcagcagctgctgcgagccaacaggcggcgctggactgcgcaacagccgcagaactggcagcagagtgcgacttaccgttgctcgatggcgaggatgctctctccttcgaggcgggagatttggacagcagctatggaagcttcatgtttaatccctcagccttcagccaggcggaaacggactcggctctgcactcgctgcaggccaccatgtaccaggacaagatgagtgtcatttcgggagcggctggcggcgtaggtgcaggtgcggtaggagggctggaggaggcgggcagctcggcggcggcagcggcagcccagcggtccaagaagcagttcatatgcaaattctgcaaccgacagttcaccaagtcctacaatctgctcatccacgaaagaacgcacacggacgagaggccttactcctgcgacatctgcggcaaggccttcaggaggcaggatcatctgagggatcataggtaggtcaaaaatagcggataagctacttcatggtataataagaaatgatccttctcttgagaatcactctgtcacaaaagactagcatttggtttccataaaaatctaacccaccattctcctcattcattttggtaacccgcagatatatccactccaaggagaagcccttcaagtgcgcggagtgcggcaagggattctgtcagtcccgcactctggctgtccacaagatcctgcacatggaggagtcgccgcacaagtgccccgtgtgcaatcgctccttcaaccagcgttccaatctgaagacccacctgctcacccacaccgacatcaagccgtacaactgcgcctcctgcgggaaagtcttccggcggaactgcgacttgcgacgtcacagcctgacgcataacttgtccgccggagtgggcggtgtggtgggtggcaacctaagtgatccatttggctccggctccagctccagctcggagttgggcttgcccacgggctccgccagtactgcagcatcctccagagatttggtggccgtcagcgattgatcttcctcagctgattcctcactctttgatacccactcaataaaataaaatctcaattgcagctctcatgaatacgaatccctccatttcgtaatcgtaatcttagtacgactaaacagcatttagtttagtgtaagtttagccttagctactttggtttaagccttggatatttgtgacgtaagcatagcaggaaagtttgactttgcgtaaattaacgttagatattaagttaaattgtggactcttaatgtacgatcgaataaaagacaatagcttaaaggaaattgtgcacatggctttttattgttgacttgggcttatggttatagaaaggttttcttgagactaaaaagaacgttagttgtattataatttgaatattctagaattttaccacgggtatggagtttgagttgtttgagtttccaaaggcctgttgttcatttcaaaattcaagaattttccaaaacgtttttctcaccctttctacctttctaccgctttgattccactcttgtacttacactatttacgcacttgtagcgaactaaaatcaaatatttgtaccgatgtttatcgctcgagtgccaacaagggcaattaatgtagcattaaggtgcacaccttcaaacacctctttcaacaagcctttgacaacaaacaaaacaagatcgacaatagtggggctaaaacaaagaaatgcccatattttcccaccacttccaggctgttccacatttccagtcaaataatgtcgtacaagccggtggacaagtggagcaggcgctatctcatcgggtcgaaaggaccacccactagagtgtgatatatagatatcggggcaccccatttcccacacaagaacatccagataattccgggcgtgtccgctgaaagagctcgaaagagattttatagcgaaaagtgggctgtccattccagaacgagggtggagctccagctccagactgccacaaagtttacaatttttattatcgactacaaaaagatgcggccataacgacacaaacacatacagtgcagttcaaaagcgaatgccgaccgcgtttccttccacggccatctcacccctttagcttacttttattttctttccttaactctgactctgacttcccgaaaagatcggcgcgtttgtcaatcgttaaacggatcaatgtaaagccgcctgcaatgttgtctttatggggcctccactgttgctgttgcatttcctgtgcttcagctgcaccaaacccaaaccaaaccaattacaacgatcaa

SEQ ID NO: 6041 - DNA, 2237 bp, DROSOPHILA
atgacttttgaaagcgtgactaagacgtgatttatgatggcgtgtggtttttaatattcatgtggacgcgctccgaacctctcaacctgcgtaggtgcgccaaacaataaaaaatacaaaaaatcaccacggcaaccagcaacacagcaacatcgctggcccgaggctttatcccgatatccagctgagtgtgtgcgtggattcgacttttttatggaggcagttaagcatttgagtgccgctgctgctgctgcagctgcagctgcaacttgcagcgattcgccggccaaggcagcagcctcaccggcagcaagcagcgatattgccgaggcgcttggagaactcaaggcaagcgcaacagcagcagcatcatcagctagcaaggcagcaacatcgaagcaccacagcaacaacaaccacaagccaagtgccgcagcaacagccacagcagcgcacaagaaaagcgagagttgcaacagcaacggcaacaagtgcaccgctgcaacatcgccgatcggcagtaagaccagcaacgcagccatggcagctgcaacagcaacggcggccgcagcaaccaacgatcttgcagcggctgctgcggtcgttctttcgctgcaaggaaccatggtcagcagtttgcagcaggccgccctactgccggccaattcggcggcagcagcagctcttaatctccaggccctggaatcctatttggcgctgcagcgactaaccgggaaatcggatgtatttcgcttttccaacagcaacaccggcagcagcaacagcaacaacgccaccacctgcaacagcagcagcagtgaagcggacaacaatgccttaccctcgctcatcgatatagccaatatagagctcaagtcgagctgctcctccagctcctcgggggaaccccctttgacggcagcgacagcatcagctgccgccacatcctcgcccagcagcaacaacagcaactccaccagcacaccaacaacatccaagtgcgtgcctctgccctccattggcaccgttagtgctgcagtggcggctgctgcggctgccgcagcagctgctgcgagccaacaggcggcgctggactgcgcaacagccgcagaactggcagcagagtgcgacttaccgttgctcgatggcgaggatgctctctccttcgaggcgggagatttggacagcagctatggaagcttcatgtttaatccctcagccttcagccaggcggaaacggactcggctctgcactcgctgcaggccaccatgtaccaggacaagatgagtgtcatttcgggagcggctggcggcgtaggtgcaggtgcggtaggagggctggaggaggcgggcagctcggcggcggcagcggcagcccagcggtccaagaagcagttcatatgcaaattctgcaaccgacagttcaccaagtcctacaatctgctcatccacgaaagaacgcacacggacgagaggccttactcctgcgacatctgcggcaaggccttcaggaggcaggatcatctgagggatcatagatatatccactccaaggagaagcccttcaagtgcgcggagtgcggcaagggattctgtcagtcccgcactctggctgtccacaagatcctgcacatggaggagtcgccgcacaagtgccccgtgtgcaatcgctccttcaaccagcgttccaatctgaagacccacctgctcacccacaccgacatcaagccgtacaactgcgcctcctgcgggaaagtcttccggcggaactgcgacttgcgacgtcacagcctgacgcataacttgtccgccggagtgggcggtgtggtgggtggcaacctaagtgatccatttggctccggctccagctccagctcggagttgggcttgcccacgggctccgccagtactgcagcatcctccagagatttggtggccgtcagcgattgatcttcctcagctgattcctcactctttgatacccactcaataaaataaaatctcaattgcagctctcatgaatacgaatccctccatttcgtaatcgtaatcttagtacgactaaacagcatttagtttagtgtaagtttagccttagctactttggtttaagccttggatatttgtgacgtaagcatagcaggaaagtttgactttgcgtaaattaacgttagatattaagttaaattgtggactcttaatgtacgatcgaataaaagacaatagcttaaaggaaa

SEQ ID NO: 6042 - protein, 578 aa, DROSOPHILA
MEAVKHLSAAAAAAAAAATCSDSPAKAAASPAASSDIAEALGELKASATAAASSASKAATSKHHSNNNHKPSAAATATAAHKKSESCNSNGNKCTAATSPIGSKTSNAAMAAATATAAAATNDLAAAAAVVLSLQGTMVSSLQQAALLPANSAAAAALNLQALESYLALQRLTGKSDVFRFSNSNTGSSNSNNATTCNSSSSEADNNALPSLIDIANIELKSSCSSSSSGEPPLTAATASAAATSSPSSNNSNSTSTPTTSKCVPLPSIGTVSAAVAAAAAAAAAAASQQAALDCATAAELAAECDLPLLDGEDALSFEAGDLDSSYGSFMFNPSAFSQAETDSALHSLQATMYQDKMSVISGAAGGVGAGAVGGLEEAGSSAAAAAAQRSKKQFICKFCNRQFTKSYNLLIHERTHTDERPYSCDICGKAFRRQDHLRDHRYIHSKEKPFKCAECGKGFCQSRTLAVHKILHMEESPHKCPVCNRSFNQRSNLKTHLLTHTDIKPYNCASCGKVFRRNCDLRRHSLTHNLSAGVGGVVGGNLSDPFGSGSSSSSELGLPTGSASTAASSRDLVAVSD

SEQ ID NO: 6043 - DNA, 4810 bp, DROSOPHILA
ttcgcatatataatatgggtatatatggcttacttgaattgttgttcttaatcctaggttcacgtgctcaaaaaaattcatgctcaaaaaaagtcttagcctattcaaaaaaatgtcttagcctattaaaaaaaaaggttttttttagctcacagcatccacattttgggcaaagcaatctataattcgctgttcgttgaacgaaaataatctttagttttgactaatgctttactcttaaatagattatctttgctgcagctgcagaattgctttaaatagttatgtatacgacttttggcttaatacgtattaaaaaaaaattgagttttggaaacgtttgctggatgattacaaaaatcagattgtagaatgctcctaaaagatatttgggagttgatttgagtggaagttgtttgagtgggggaatatatagcataacgaaaccacaagttaaaaacaagagagaatgctaaagtcgaatttcccgactatcagatacccgttactcagctagtggaaatacgaacgcgaaatttcatcatttttctgggatatccaagagatattgggaaataaaatgagaaaaaatttaaaattgtgggcgtggaagttttgggcggtaagtgggcgtggcaacatgggtaaacaaccaagcgctgcatctatgtctctagaatttatatgcttaatctcaaccttctagcttttatagttcctgagatcgagacattcatacggacagggccagatcgactcgactattgatcctgatcaagaatatatatactttacatggtcggaaacacatctagtatacccttttactctacgaataacgggtatgataagaggatcaaagacgataccacgttatggatgcaattcagtgctgaattcgaccatccataacgtacataaaaattatctattaaaggattgatacctggacatcactgagcacataaaaaaacaaacatatagggatgagtcgtcttgcttacaagtcatccgagcccgacatgatctcctcgaacagtgaatgggcattgtcagtggccgatgatctgtcgccagcggcagaattgctcctggatccgccactgacaagctcatccaccgtgtcgagggccgagaagttggcccttcctcggcgtgttcgactggtcctgaatttcttggccggtggctcgatgacttccctgtcaggagcaggaggcggtggtggcgaaagtgatggagctggtggattcggcgggtcaattgttggcattatataagcatactggggaagggaaccgaagccatcggtgtgctgcagctggacacgaatagtgaagccaacggtgaccggatcaaggggcttgctgccctggaagatattgaagcctgcaattggaacagggttagataggtctaacacagcgatgaggtaacttaccctggtactcgcctttctcattctgaacaagcaccaaaggatgctgggattgctgcaaattatttagcggcactaggcttatgggggcagaagagtctggcggcgccatactgttctcctcctgcctaggctcagctaccaccggctcctccgactgagtcatcggctctggaacgtccttcggcatttcgaaatcctccaaatcatcgtcctcatcactttcaacgtagtcctccttgtgcggattcttgcagcacacgcaatgacacccggcacagctgttgtaactcttgtagcaaggacatcgggaattccggcaggtggtgagggtattgctcgagccggagataccgcagcggcacttcggcttcggaggcttcaccttttcctccttgtccttgccccgaatcctgcgaagagcgccctttccagattgcactttagtcttgacctcagacggtacaggctcaattttggcagcttgtgacgctttgagagtacgggttctctttcgcttaagtgttggctcgtcactgtcctccttctgcagctcagcactgattgcgtgcaggtccttctccttctccttcgcctcttcagccgctgcctttgcgtcctcaaaatctttctgcaacgactccgcatcctgcaattctgtttgcacatgacccaattgtgtttttgtggcaacatgctcctccactgcttcctccatttcggtttgtgtaggtgactgtgaagtgtgcacatccaagtgttgatcctcctccatgtgctcagctacaacctctgacgggattgaggtcccttcggcctcttcaacggtctcttcaaccagagcctcatcagattcctcaacttgcagattagccaattgatcagagatttcgttgggttcctcagcggaggtaagcacttctagctgcgtggatgtttcaacggtctcttcaacggtggtggagagcacagtcaactgtgtggacgtctcgacggtctcctcaacggcagccagcacagccaactgagtggagtccgccatttgcaccacctggccgatttgcagttcctgtggatcgaacttcgtggtcgcagaagtgggcatcacgtaggagacagcaaagttgttgccgctatttgtgtatttggacaccgaaaccgtgccagacaggtctacctgatccgtccacgcttggtccatgaagcccgactccgagctctcggtggcaatgactatttgcccggcgtgagagagcatgcccatgcgagatcctgtgggcagcaggggaagcggcgagaagtgaccctgctccgctgtggccgccgcctccgcctcaatgtcgctgatgttgaggtggtgatcatagggcagttccggagtcgtgaccgccgacgtaggcggcgtctctgcgggcagcgatgtgggcatgtccttgaggaacggcaaatccggctggggcagaaagatgtcaaaagtgtcggagatgtttgagccctcgcgaatgaactcctgtgtggttttgggaggcagcttgatgcgaggcaccagctccctggccacctggggccgcatcccggccagctcaccaaataatgccgagtggagcaggtggacgcacagcgtcttgtagcacagtagctgggcggccatcatacggttctcctcgtaggtcttgaagtcggagcaaccctcgcactgggtgcagctgggaaacagatgcttcttaccgcgcagacacagccggcacacgttgtgctggcaccgcttgcccttgggcgagtagggatccaccagcagctggcagcagaccacgcaagacagcagctgccgtagctcgccgagcccggagttcagctcctccacccgccgtttggaaagattcgaagcggagcgcatcgcgatgcgtgtcaccttcaagtatgccgtctgggccatgatggctatatttttatgcccgggactgtacgcacgccgctgtttgtttacgtttttcagcccaaaagtgagactccgctggccaagtaagtgccttgtcggtccgacccacgccacctgctccgctacctggtgcctcctgggctagttacctgcaattcctcgcccgtaggagctcagttacacatgcttagaccgcgttaatcctcgatttcattatctaatggtaactttactggaacgctttttgttggtttcacttttgtggcttcgttatcactatgtttcacgtgcaaaaaaaaaaaaaaaattggtttacgtttgagaggtctcaagtcattgttaatggttatgctgcacactgtgcaacagcgttgaaaacaataaattagcaactaaaaaaaaaaattacccaagcaatattttgctgagcgaagccagtgtgaccgcagtgtgccagtgcgaacatgctagctgcagtgcggcataggtgtgaccactacctcgaacagctgatttcagtgctctgaggaattttcgcagttacgaactgcggtcctacaacaaattttaacacttagtttttcaagtaaatatggttttttaagtattttccgtcaaaggaaagcggaaaaccttggaaattatttactaacagctcttccgcttacgccaggtggtaggagagccagaaaatgccggaaccgcgcagtccgatggccagttttgccgagtcggtgctgaatgtcatcgatggacccataacttggttccgtggtatgtagtccacagggattcccaatggccatggtcatgggagtctccagatgctgcaagtttgcgtttcctttggccaacgatcggaaaaaccggacaaattccagacaattacataatgacataacctcaactcgcagtccatttgtttttgtttacactgtattgctgaaatgctaaaatgtttataatcaaccgttttaagtaatttctagctagcgcaaactaaatctcttagaatactagtcggcagcccttaaatgccgtccgttactatatagttcatctagtcaaagcgggatcatgtttttcaacagaaatgcattacagctagtatattttattaatgcgccttgtgttaatcccacagagagcattgtggagccgaaccagcagaagcagaattggtaccaccagcgcttccgccgcgttccgacgatcgaccagtgctacacggacgatgccgtctgccgtttcgaggccgatcagcagttccgccgggatcgcatggtcgacaacgagattgtcaacattctgcgccagcgcttcgaggactgcaccctctacgaggcacccgatcacatggtcaagtgcaggccgctgatggatcagtacgagaaggccaccgagaactggttcatcaagtgtgagtggaatcc

SEQ ID NO: 6044 - DNA, 2758 bp, DROSOPHILA
ttcgctcagcaaaatattgcttgggtaatttttttttttagttgctaatttattgttttcaacgctgttgcacagtgtgcagcataaccattaacaatgacttgagacctctcaaacgtaaaccaattttttttttttttttgcacgtgaaacatagtgataacgaagccacaaaagtgaaaccaacaaaaagcgttccagtaaagttaccattagataatgaaatcgaggattaacgcggtctaagcatgtgtaactgagctcctacgggcgaggaattgcaggtaactagcccaggaggcaccaggtagcggagcaggtggcgtgggtcggaccgacaaggcacttacttggccagcggagtctcacttttgggctgaaaaacgtaaacaaacagcggcgtgcgtacagtcccgggcataaaaatatagccatcatggcccagacggcatacttgaaggtgacacgcatcgcgatgcgctccgcttcgaatctttccaaacggcgggtggaggagctgaactccgggctcggcgagctacggcagctgctgtcttgcgtggtctgctgccagctgctggtggatccctactcgcccaagggcaagcggtgccagcacaacgtgtgccggctgtgtctgcgcggtaagaagcatctgtttcccagctgcacccagtgcgagggttgctccgacttcaagacctacgaggagaaccgtatgatggccgcccagctactgtgctacaagacgctgtgcgtccacctgctccactcggcattatttggtgagctggccgggatgcggccccaggtggccagggagctggtgcctcgcatcaagctgcctcccaaaaccacacaggagttcattcgcgagggctcaaacatctccgacacttttgacatctttctgccccagccggatttgccgttcctcaaggacatgcccacatcgctgcccgcagagacgccgcctacgtcggcggtcacgactccggaactgccctatgatcaccacctcaacatcagcgacattgaggcggaggcggcggccacagcggagcagggtcacttctcgccgcttcccctgctgcccacaggatctcgcatgggcatgctctctcacgccgggcaaatagtcattgccaccgagagctcggagtcgggcttcatggaccaagcgtggacggatcaggtagacctgtctggcacggtttcggtgtccaaatacacaaatagcggcaacaactttgctgtctcctacgtgatgcccacttctgcgaccacgaagttcgatccacaggaactgcaaatcggccaggtggtgcaaatggcggactccactcagttggctgtgctggctgccgttgaggagaccgtcgagacgtccacacagttgactgtgctctccaccaccgttgaagagaccgttgaaacatccacgcagctagaagtgcttacctccgctgaggaacccaacgaaatctctgatcaattggctaatctgcaagttgaggaatctgatgaggctctggttgaagagaccgttgaagaggccgaagggacctcaatcccgtcagaggttgtagctgagcacatggaggaggatcaacacttggatgtgcacacttcacagtcacctacacaaaccgaaatggaggaagcagtggaggagcatgttgccacaaaaacacaattgggtcatgtgcaaacagaattgcaggatgcggagtcgttgcagaaagattttgaggacgcaaaggcagcggctgaagaggcgaaggagaaggagaaggacctgcacgcaatcagtgctgagctgcagaaggaggacagtgacgagccaacacttaagcgaaagagaacccgtactctcaaagcgtcacaagctgccaaaattgagcctgtaccgtctgaggtcaagactaaagtgcaatctggaaagggcgctcttcgcaggattcggggcaaggacaaggaggaaaaggtgaagcctccgaagccgaagtgccgctgcggtatctccggctcgagcaataccctcaccacctgccggaattcccgatgtccttgctacaagagttacaacagctgtgccgggtgtcattgcgtgtgctgcaagaatccgcacaaggaggactacgttgaaagtgatgaggacgatgatttggaggatttcgaaatgccgaaggacgttccagagccgatgactcagtcggaggagccggtggtagctgagcctaggcaggaggagaacagtatggcgccgccagactcttctgcccccataagcctagtgccgctaaataatttgcagcaatcccagcatcctttggtgcttgttcagaatgagaaaggcgagtaccagggcttcaatatcttccagggcagcaagccccttgatccggtcaccgttggcttcactattcgtgtccagctgcagcacaccgatggcttcggttcccttccccagtatgcttatataatgccaacaattgacccgccgaatccaccagctccatcactttcgccaccaccgcctcctgctcctgacagggaagtcatcgagccaccggccaagaaattcaggaccagtcgaacacgccgaggaagggccaacttctcggccctcgacacggtggatgagcttgtcagtggcggatccaggagcaattctgccgctggcgacagatcatcggccactgacaatgcccattcactgttcgaggagatcatgtcgggctcggatgacttgtaa

SEQ ID NO: 6045 - protein, 773 aa, DROSOPHILA
MAQTAYLKVTRIAMRSASNLSKRRVEELNSGLGELRQLLSCVVCCQLLVDPYSPKGKRCQHNVCRLCLRGKKHLFPSCTQCEGCSDFKTYEENRMMAAQLLCYKTLCVHLLHSALFGELAGMRPQVARELVPRIKLPPKTTQEFIREGSNISDTFDIFLPQPDLPFLKDMPTSLPAETPPTSAVTTPELPYDHHLNISDIEAEAAATAEQGHFSPLPLLPTGSRMGMLSHAGQIVIATESSESGFMDQAWTDQVDLSGTVSVSKYTNSGNNFAVSYVMPTSATTKFDPQELQIGQVVQMADSTQLAVLAAVEETVETSTQLTVLSTTVEETVETSTQLEVLTSAEEPNEISDQLANLQVEESDEALVEETVEEAEGTSIPSEVVAEHMEEDQHLDVHTSQSPTQTEMEEAVEEHVATKTQLGHVQTELQDAESLQKDFEDAKAAAEEAKEKEKDLHAISAELQKEDSDEPTLKRKRTRTLKASQAAKIEPVPSEVKTKVQSGKGALRRIRGKDKEEKVKPPKPKCRCGISGSSNTLTTCRNSRCPCYKSYNSCAGCHCVCCKNPHKEDYVESDEDDDLEDFEMPKDVPEPMTQSEEPVVAEPRQEENSMAPPDSSAPISLVPLNNLQQSQHPLVLVQNEKGEYQGFNIFQGSKPLDPVTVGFTIRVQLQHTDGFGSLPQYAYIMPTIDPPNPPAPSLSPPPPPAPDREVIEPPAKKFRTSRTRRGRANFSALDTVDELVSGGSRSNSAAGDRSSATDNAHSLFEEIMSGSDDL

SEQ ID NO: 6046 - DNA, 3060 bp, DROSOPHILA
ttcaaccccacatgtctgcttatttgccctggtgtttttgtttttcttgactgttgcgacatcgatatgcttgtgttgtcatttgtcagcaacatggcaaggatatttgcaagtgaaactcctgctcgtcctgagcgtatgacttttgggcatccttggtgcttagaaaattcaaattaaatatcggaaaaagctaaatttatgcatttgaattatagtttattattgtgccctaagtacataagtattgaatccacgaacttgtcatgtcacgcagcaccgctcccttctctctttcattatccttgaaatttgcattaatggccactgcgcatcattccaattttccgaaatggattgccattaatttattccctttgcaaattgctgtgtcatttaatttctctctttccccacatttattcttttttatttttcatatttccccgccaatttgcattgcccactgtgtgagtgtgcgtgttgtaatgcattttagtaattattttagctgcttttcactttcgttgagggcagtcattagcttttgaactgggcgaggaaaattgtacaaaattctttgccaactctgccataatttaattgcccttatgacttaactagatggaaattaatgattattatttatcaaattaatatatattactttttgcgcgactttacaaaatggagaaatcagtgtggttttttttatgctgaaattgttgatgagatgggatataatttaatggatttttcgattaattgcgtataaagtgcagttaattatgtaatgataatatcagctactttgtggtgttcacgtgatttcaaattgtagcctaatattgtttaaacgttttttaaagtattattttgaattgcaactgtttatattttaattgtgcttcttataacgctaactggaatatggaatttacaatatggtttaaaaaaataaactactttacaatgatcgaacggacgaatctttaaacctttaaacacttatatctgatagtctcctctgctccgatagtattggcctctgaactcgaaaggtgcacaacaaatcctgattgatgcacatcatggccccagcattatcgaactccccgcagtagtttggggccgagaaaattgtgatcagctggcgcttggcgaagaactcgtagccatcctcgaccacctggtgaccccgacaaatgaggttcaatttgaatcggtgcaagaaggcactgaccacatctgaaccgaaggtgtggctcacgcccctttcgttgggaccccagcccatgatccgcagatcagggtcggaccacagaatatcgcatatcaatccggattccggtatttcgatgggccggcgaatttcccgtatctgctgcatgctaaacagatggggactcagaccgccgtggcaacagaagatattctcctcgatgatcgccgccagtggcaggcagttgtagcaatctacaaaagtgcgccacaacttcaccgtgtatcgccttttgcactcgtcgtagaatccgtagaagtgatttatactggagcactcgtggtttcctcttagtaggtagaacttggtcggataccttgccttgagggccagtagcagggtcaatgtttcgatggactgcttgcctctgtccacataatcacccagtagcagatacaccgaatccggcggatagccattggactcgaaatagcgcaagagatttaggtactgaccgtgtatgtctcccagtaaattaatcggagcaggaatctccagcagagttggctgtttgagcagtacttccctggcccgagaacaaaccgcttcgatttcccggacggaaatctgaaccacggatcctatctctccgattagttttagctttgcaattatttggtccaaattgattccctcgtcgaacttaagagttttatttttgttcgagccgttgcttagtaacttcttcatcatattttcggcacacggaattttgaatcgcaatcatgtgtggggtaagaagggctttcgtttcttatgcagcagtttgctggtttagttttcctaggatttttgagagcaaaatcaaggtagatgaaatggaaatgttaaattttatttgttaatcttttgtttcttcaatttcatagtaaatcccccatcagactaaaaccatttaaaagccacattactgtcgtttcattcaatcaactaaatttgaatcaccagtccatgctaaacgcccccacccacccttactgtccacccggaaaatcccgccttataagcccccccccttccctctgttaactcctcgccaattgtcagtccgcccttcatctttgtgtgagcaatcgcatccgttgcttttatttttcaaatcaacataatggacactttgcccgacggcagcatcatccagtcacctcccacccccttttggccatcacccctccggccatgacaatgcatacatatataaagcatatataaaaaaaaagtgaaaaatacaaaggcaacttcagtttttgggctttgacagcagacatagaatgcagaaagagagcgacgcattttcgagtgggtgggccaacccccataccagcagccccacactcctccccatcttggggtggatcaagccctagtcccccgttttccatagtcagttcttaagccaaaacctaccgcagatgcaagtatactatcttcaaatgcactgtgaataaatatatatcaatattattgctaatgatttttaataactgctaagtacgatcaagtaaacatatatttttgttctttgataattctgtcaaatttcgaaatacatttttcgaacgttgaagatattataatatatttctgccagtgtatgtccgtctcttcgccactcattacacattttgctaactgcaacacggagtgttgttgctgccgttcttgcctgttgtcatggcaagtgtcacaacagtcgcctgcattttgttgattttacgagcatgtgacaggctgagattctgcgaatgcatcaacatcaacatcaagccagcgcatca

SEQ ID NO: 6047 - DNA, 1060 bp, DROSOPHILA
ctaaaccagcaaactgctgcataagaaacgaaagcccttcttaccccacacatgattgcgattcaaaattccgtgtgccgaaaatatgatgaagaagttactaagcaacggctcgaacaaaaataaaactcttaagttcgacgagggaatcaatttggaccaaataattgcaaagctaaaactaatcggagagataggatccgtggttcagatttccgtccgggaaatcgaagcggtttgttctcgggccagggaagtactgctcaaacagccaactctgctggagattcctgctccgattaatttactgggagacatacacggtcagtacctaaatctcttgcgctatttcgagtccaatggctatccgccggattcggtgtatctgctactgggtgattatgtggacagaggcaagcagtccatcgaaacattgaccctgctactggccctcaaggcaaggtatccgaccaagttctacctactaagaggaaaccacgagtgctccagtataaatcacttctacggattctacgacgagtgcaaaaggcgatacacggtgaagttgtggcgcacttttgtagattgctacaactgcctgccactggcggcgatcatcgaggagaatatcttctgttgccacggcggtctgagtccccatctgtttagcatgcagcagatacgggaaattcgccggcccatcgaaataccggaatccggattgatatgcgatattctgtggtccgaccctgatctgcggatcatgggctggggtcccaacgaaaggggcgtgagccacaccttcggttcagatgtggtcagtgccttcttgcaccgattcaaattgaacctcatttgtcggggtcaccaggtggtcgaggatggctacgagttcttcgccaagcgccagctgatcacaattttctcggccccaaactactgcggggagttcgataatgctggggccatgatgtgcatcaatcaggatttgttgtgcacctttcgagttcagaggccaatactatcggagcagaggagactatcagatataagtgtttaa

SEQ ID NO: 6048 - protein, 324 aa, DROSOPHILA
MMKKLLSNGSNKNKTLKFDEGINLDQIIAKLKLIGEIGSVVQISVREIEAVCSRAREVLLKQPTLLEIPAPINLLGDIHGQYLNLLRYFESNGYPPDSVYLLLGDYVDRGKQSIETLTLLLALKARYPTKFYLLRGNHECSSINHFYGFYDECKRRYTVKLWRTFVDCYNCLPLAAIIEENIFCCHGGLSPHLFSMQQIREIRRPIEIPESGLICDILWSDPDLRIMGWGPNERGVSHTFGSDVVSAFLHRFKLNLICRGHQVVEDGYEFFAKRQLITIFSAPNYCGEFDNAGAMMCINQDLLCTFRVQRPILSEQRRLSDISV

SEQ ID NO: 6049 - DNA, 6646 bp, DROSOPHILA
gagtgcacataaatttaaatttccagtttggtacttaaagtaagcaatcaagagtaagattacaccaataaattgtgcaattcactttatcaaggactttactgatggtaagtacatatacacattattccctctggtttttaggggctaatatacagatagctttaaagccacgggttaagtccctctgaataaaatattagggaagccattttaaatttataaaaaatgtataaaagaagcttaatatatttcttaaaataactagaagtagtctgcggttgggtgtccaaaacgttggttgttcccttgagtgttggccaccttatggtaactatattccttttccttatttttagaatttttttttggcttttgttttcatattttcggtctgccatttcgcattttcgttttcatttatacgctctgtgacgccgtaggtctcgcttcccatttgcccttgccctgccatcttgtgacccctctaaaacagccatctgagtccctcccttctaacccctttctgaccactcttgacccatcaccggatgcccccggtggatgtcctcctgtggatgtcgcgttggctgtcatcatcaaattacgcctggcttttgtggctgggttttgttttcgggcagcagaagagccaaattaaatttccttaaagggctatcaagggcttgcaatgttaaatattcaagagttattttgcctaatataacactttaactgttaaagaggccattcttaattcacagagaaatgaagcccgaacattgtattcgagatacattaattgtgtaactgagcttataaaattattattagtgcgaatcaatgaaaattgcctatttgttgcactcttcagctttggttgactctgctgataagccgagaacgctcttaaaggcgctcttttgtttaacggcccacttctcttgttttctctctttgataaatcacgtatacgccgtgtcgatcgtcgcctgatgccagtcgccaacgaatcgcgcgcgtaagcaaaccgccagcgaaccgcagcggaggagcatctccgcctgaatggaataaccctgtttgaggaccgaacatcgtagatatcgaggcagaagattgggcaatcaagtcacctttgacccggacaaggcagcagactggcagaatggccgctggaatgttgactgatcgggagcgggaggcgatcgtcagcaatctgaccaaggacgtgcaggctctgagggaaatggtgcggagtcgggagagcgagctggtcaagctgcaccgcgaaatccacaagctgaaggtgagggggtgaggtcatccaggtgagggagggtatgtcgggaaaagccatccatccatcgctgtctatggcatcgctttgtttgctcgcattttgtttgctgcccctggcagataagcaggagccgcacagaccgcactatttttcggactaaattcgaattcgctttgtgtatcgcagagatacaaagtatctgcaaatacacacgccgacaggcagacccctcctccatctctatcacatcgttatctgggcaacagcagcagactctgcccagatatcagatacaccccatagaccccctactccctagccaatccccataccccaagaccatgcccatgcctaccccactgaaccgcagcgacggaggagtggaggcggcgaaaacgggggctaacccatgcccttgtcggcgtatctactagatactcgtatctatctaatgccccatccccgccttataatttgtacttgagcccccgtccactgccttccatccacatatatttaaactgtaaggcagatttattgagcgaagtgattagcacttcttggcgagatctcatcgtcgtgcacaattttatagcccaaagagcggagtgaaaattcgagacttgcgactgcgagatacttggtagccacttctcaaataatctggaagccgaaaatcatttaatttccattatctcactaattggggctgtaaagtcggagacctgaaactgagaaattgctaatataagataattttatgttctcatggttatggagaggtatacaaattgaaatgcgcttactaagtcttcaataaatgacctttcttagggaagatctaggaaatgctttatcaatcaactcgccggataatgaatctttcctagtctgcatttttaccgggatgtaaagctctttgtcaccttattcaaatgcctcacgattgtacgtcgctaattgccgaatcacctccagctcgagcagttgatccggcgaccgcggctctgcttccccagatctcaggtctccagattactttgtgggcaaacagagatacaaagatacatagataatatagttccgaccgaggcagcacgcgcatctcgaaaaaaacagaatcagaatcggttgggaaccgaagccgacataaaaaagcggcgagcgagaaaaaaggaaatacgagctgggcccgcgaagagtgtttttgaaatgctaatttctatgcaaataatttggaaaacaagcaaaaggtggttggctattggggactggagcggggtggtgggtggtaacacctcgccctgacattcggcttatcatgtttaccctctgagctggaaatgaaaccaaaactgaaactccatgactaggtccaattgctggggtggcgccacggatttggatttgcctttcggctacggctttatctatgctatgtttttgggtcacaccgcctaggggaaaatttagcattctatttacggattgtgataagagagtcgaagaacgcacccaattggcatgcacttggcaaaaaatagttgtagaccttaaatcttaaataaccaacaaagaaattgagatatataaatgtatgtatatatatacaagttgaattgctcaacataaaaaaactaaattgaaaataattcaaagataatatgttagttctctctgtgtttaccaacgcggaattcgtcatcgggaaagcacgtgaatgccgtccgcagtgggtcacctaattgagttgggctcgggtgttgagggaatcacgcgcctccatcgattgattgtccgccaattgccgggggattgattaaccgacgcatcacaattgttgctccaacctctgaccccccccccctacttcgtttttcagagtgttctccagcagaccaccaacaacctgaacgtcacccgaaatgagaaggccaaaaagaagctctactccttgccagagcaatgtggcgagcaggaaagtaggaatcagaatccacatttgtgcagctcctgcggcatggtgctgcccaccagtccggagtttgccctggaggcgctttctctgggaccgctgtccccattagcatcaacatcttccgcctccccctctggacgaacttctgctgatgaagtgcgacccaaggcgatgcccgctgctatcaagaaacaaggtgtctccgccgagagctgtgtgcagtccatgcagcaatcctacagcataccgattccaaaatacgaaaaggatttcaggtacgtcttcttatgagctttcattttcaacacctctgcaactcacaaccctgatccttccagtgataagcagcaaatcaaagacgccattatggacaatgacttcctaaagaacatagacgcatcgcaggtgcgggaactggtagattcaatgtactccaagagcatagcagccggcgagtttgtgatccgcgagggtgaagtgggcgcacatctgtacgtctccgccgccggcgagtttgcggtgatgcagcagggcaaggtgctggacaagatgggggcgggaaaggcgtttggggagctggctatcctctacaactgcaccagaacggcctccattcgagtcctaagtgaggccgcgagggtatgggtgctggacagacgggtctttcagcagattatgatgtgcacgggcctccagcgaatcgaaaacagcgtgaacttcctgagatccgtgcctctgctgatgaaccttagtgaggagctgctggccaagatagcagacgttctggagctggagttctacgccgctggcacctacatcatccgccaaggaaccgccggggacagtttcttcttgatctcacagggcaatgtccgagtgacccaaaaactaactcccacctccccggaggaaacggagttgcgaacgctatccaggggagactattttggagagcaggcgctgatcaacgaggataagcgaacggccaacatcatcgcactgtcaccaggagttgagtgcttgaccctggacagggattccttcaagcggctaattggggatctatgcgagctgaaggagaaggactacggcgatgagagcaggaagctagccatgaagcaggcgcaagaaagctgccgggatgagccgaaggagcagctgcagcaggagttccccgatctcaagctcacggacctcgaggtggtcagcactcttggcatcggaggctttggtcgggtggagctggtcaaggcccaccatcaggatcgcgtggatatctttgccctaaagtgcctcaagaagcgacatattgtggacaccaaacaggaggagcacatcttcagtgaacgtcatatcatgctcagttcgagatcgcccttcatctgccgtttgtatcgcaccttccgtgacgagaagtacgtgtatatgctgctcgaggcctgcatgggtggggagatatggacgatgctccgggatcgcggatccttcgaggacaacgcggcgcagttcatcatcgggtgtgtgctgcaggcgtttgaatacttgcatgcccgcgggatcatctatagagaccttaagccggagaacctgatgcttgatgagcgcggctacgtcaagatcgtggacttcggctttgccaagcagatcggaacgagctctaagacgtggaccttctgcggcaccccggagtacgtggcacccgagatcatcctgaacaagggtcacgatcgagccgtagactactgggctttgggcattctcattcatgaactgctcaacggaacgtacgtaactgacaccacctcttgatttttttgaactcccccaaataatggttgtttttcgcttgtaggccaccgttcagtgctccagatcccatgcagacgtacaatctcatcctgaagggcattgacatgatagcctttcccaagcacatctcccgctgggccgtgcagctcatcaagcgactgtgccgcgatgttccatcggagcgcctcggctaccagactggtggcatacaggacataaagaaacataagtgagtaaaacatatatgatagaaagatagctattgatgatgtgtttaaaccttaggtggttcctgggattcgactgggacggcttggccagccagctgctgattccgcccttcgtgagacccatcgcccatccgacggatgttcgctacttcgaccgctttccgtgcgatttgaacgagccaccggacgagctctccggctgggatgcggatttctaggcccattccgtcgacctccttgacttagtaattgatcactctttagttaaatataggttactttactgattttcctagaaacgtagaaagaaaggaacatggaaactatcttattgaagtttatacatttgggtggaaaaagtacacactagatttggaggccagcagctggcaaatttgggagcatcgttcgatcaggggcttgtagatcttatcgcagccaggtgttggttccgcagccagtttcaagccggaaggcacgtccctgaaaaactcgtcgaagctgagtctcgtcctacggcccgtgggcatcatgcaggaatggcaattgcaggcggactctcggtgttcgtagaaggcgtacctggcacgaaaggcgcatcctaaaaggctgacctcgacaccggttcgctggtaaacaggagcattgaatatgtccgccacgatctgcaggacactttgacacctggagtcctcacccaccacaattatctttgtgttcggtgtgtggtggaagcccatctcgtgggcaatggaccagtggtgcatgatctgaccctcgattagagcccgaacctcaatctccggtgtggagaagcggtgtaggccacgtatgcactccgccgacatcgggcttatgtgcgcatcccagcgcagagtgcccttggcagtgggtataatctcccggtcccggaagtgcacagctacattgccattgttgcccgatggcgtggcgtctagcatttcgtagaagtgcctccaactgccgccggcgacatcctcacagatggcttttcgcgtcaatcctccgttttggaagcataggaggcccatgtattcgtcccttcttgtcggatggcacatcacgtggccgtcctccagccgcggagctttctttagaggcatcactaccacatcacttgtatccagactgagcatgagaaagtcattctctaccagtagccctgccagttccgaggctttgctcccggtggaagcgaccaccatgcagtccggcctgaagttccagcgtttcacgtagtagtccccgatgcgtccttgcagccgggacgagggaatgggcttcatcaaacgcctggcaaggtca

SEQ ID NO: 6050 - DNA, 2583 bp, DROSOPHILA
agtcgccaacgaatcgcgcgcgtaagcaaaccgccagcgaaccgcagcggaggagcatctccgcctgaatggaataaccctgtttgaggaccgaacatcgtagatatcgaggcagaagattgggcaatcaagtcacctttgacccggacaaggcagcagactggcagaatggccgctggaatgttgactgatcgggagcgggaggcgatcgtcagcaatctgaccaaggacgtgcaggctctgagggaaatggtgcggagtcgggagagcgagctggtcaagctgcaccgcgaaatccacaagctgaagagtgttctccagcagaccaccaacaacctgaacgtcacccgaaatgagaaggccaaaaagaagctctactccttgccagagcaatgtggcgagcaggaaagtaggaatcagaatccacatttgtgcagctcctgcggcatggtgctgcccaccagtccggagtttgccctggaggcgctttctctgggaccgctgtccccattagcatcaacatcttccgcctccccctctggacgaacttctgctgatgaagtgcgacccaaggcgatgcccgctgctatcaagaaacaaggtgtctccgccgagagctgtgtgcagtccatgcagcaatcctacagcataccgattccaaaatacgaaaaggatttcagtgataagcagcaaatcaaagacgccattatggacaatgacttcctaaagaacatagacgcatcgcaggtgcgggaactggtagattcaatgtactccaagagcatagcagccggcgagtttgtgatccgcgagggtgaagtgggcgcacatctgtacgtctccgccgccggcgagtttgcggtgatgcagcagggcaaggtgctggacaagatgggggcgggaaaggcgtttggggagctggctatcctctacaactgcaccagaacggcctccattcgagtcctaagtgaggccgcgagggtatgggtgctggacagacgggtctttcagcagattatgatgtgcacgggcctccagcgaatcgaaaacagcgtgaacttcctgagatccgtgcctctgctgatgaaccttagtgaggagctgctggccaagatagcagacgttctggagctggagttctacgccgctggcacctacatcatccgccaaggaaccgccggggacagtttcttcttgatctcacagggcaatgtccgagtgacccaaaaactaactcccacctccccggaggaaacggagttgcgaacgctatccaggggagactattttggagagcaggcgctgatcaacgaggataagcgaacggccaacatcatcgcactgtcaccaggagttgagtgcttgaccctggacagggattccttcaagcggctaattggggatctatgcgagctgaaggagaaggactacggcgatgagagcaggaagctagccatgaagcaggcgcaagaaagctgccgggatgagccgaaggagcagctgcagcaggagttccccgatctcaagctcacggacctcgaggtggtcagcactcttggcatcggaggctttggtcgggtggagctggtcaaggcccaccatcaggatcgcgtggatatctttgccctaaagtgcctcaagaagcgacatattgtggacaccaaacaggaggagcacatcttcagtgaacgtcatatcatgctcagttcgagatcgcccttcatctgccgtttgtatcgcaccttccgtgacgagaagtacgtgtatatgctgctcgaggcctgcatgggtggggagatatggacgatgctccgggatcgcggatccttcgaggacaacgcggcgcagttcatcatcgggtgtgtgctgcaggcgtttgaatacttgcatgcccgcgggatcatctatagagaccttaagccggagaacctgatgcttgatgagcgcggctacgtcaagatcgtggacttcggctttgccaagcagatcggaacgagctctaagacgtggaccttctgcggcaccccggagtacgtggcacccgagatcatcctgaacaagggtcacgatcgagccgtagactactgggctttgggcattctcattcatgaactgctcaacggaacgccaccgttcagtgctccagatcccatgcagacgtacaatctcatcctgaagggcattgacatgatagcctttcccaagcacatctcccgctgggccgtgcagctcatcaagcgactgtgccgcgatgttccatcggagcgcctcggctaccagactggtggcatacaggacataaagaaacataagtggttcctgggattcgactgggacggcttggccagccagctgctgattccgcccttcgtgagacccatcgcccatccgacggatgttcgctacttcgaccgctttccgtgcgatttgaacgagccaccggacgagctctccggctgggatgcggatttctaggcccattccgtcgacctccttgacttagtaattgatcactctttagttaaatataggttactttactgattttcctagaaacgtagaaagaaaggaacatggaaacta

SEQ ID NO: 6051 - protein, 768 aa, DROSOPHILA
MAAGMLTDREREAIVSNLTKDVQALREMVRSRESELVKLHREIHKLKSVLQQTTNNLNVTRNEKAKKKLYSLPEQCGEQESRNQNPHLCSSCGMVLPTSPEFALEALSLGPLSPLASTSSASPSGRTSADEVRPKAMPAAIKKQGVSAESCVQSMQQSYSIPIPKYEKDFSDKQQIKDAIMDNDFLKNIDASQVRELVDSMYSKSIAAGEFVIREGEVGAHLYVSAAGEFAVMQQGKVLDKMGAGKAFGELAILYNCTRTASIRVLSEAARVWVLDRRVFQQIMMCTGLQRIENSVNFLRSVPLLMNLSEELLAKIADVLELEFYAAGTYIIRQGTAGDSFFLISQGNVRVTQKLTPTSPEETELRTLSRGDYFGEQALINEDKRTANIIALSPGVECLTLDRDSFKRLIGDLCELKEKDYGDESRKLAMKQAQESCRDEPKEQLQQEFPDLKLTDLEVVSTLGIGGFGRVELVKAHHQDRVDIFALKCLKKRHIVDTKQEEHIFSERHIMLSSRSPFICRLYRTFRDEKYVYMLLEACMGGEIWTMLRDRGSFEDNAAQFIIGCVLQAFEYLHARGIIYRDLKPENLMLDERGYVKIVDFGFAKQIGTSSKTWTFCGTPEYVAPEIILNKGHDRAVDYWALGILIHELLNGTPPFSAPDPMQTYNLILKGIDMIAFPKHISRWAVQLIKRLCRDVPSERLGYQTGGIQDIKKHKWFLGFDWDGLASQLLIPPFVRPIAHPTDVRYFDRFPCDLNEPPDELSGWDADF

SEQ ID NO: 6052 - DNA, 3594 bp, DROSOPHILA
aggtgcaatctgtgtgcatgcaaagggagacccgggagggcaatctcctcgagccgcagtcggatggacagagagaggtgacacagcgactacaagaattcctatccgcgtttagcgcggtgatcgaggagctggccttccactcccacgacgaggagacgcccacccacaatgtgtcgcagctacttggattccccaatgcccagcagccagattcggtggctggaagcggcggagcagcggctgtgacctgggagcagcgcatgctctgttgcctggccaactatgcgtactgcaacaagatcttcttcccgcgccttggtgacatcttcgttcgctacggttacccgctgcccacgctggcaatcgaaactgctcgctacacggttaaccagctctttaccaatcttctggaggagtacgtcgagcataagggcgatccgctggtcggcaccatcgagccctccatgtatctgggtcgtttccagtgggatcacgagatggagatcggccagctgcgtccttacgctcacgagtgctgcgataatttggttggtgtctactccgagatctacagcatttcaccggcactgctgcgacccatcctggagtccattgtgcaaaccatatccgaagagctggcccgtctgatgagctgtgtccagcgctttagcttcacgggagcgattcaggcccacgtggatatccgtctattgagggactccctggaaggttacgtcaatgagactgccaagtgagtgatctaaatgaaatacctatgaatttcaataattcttctaatctgcaaaaggaactacttcatggaagcgctggaggccatcaatccgcccctgagtggcgagcagaagcgtaaggcggacgagattctggagcgggtcaagcggaacatgcgtctgcagctgctctgcttcagtgtcaaggacccctaggcacattccactgcagggcgcagcccatgtagatagcgtatactttaagtagcttgtgattacccatgttctagggataaatctttattcgattgcataactctcttacttactaccacgactcacaagcccaacagctttgggtcaaagttgaagttgttctgagccatggtcttgatgacctgctccacatcgatggtgttgaacttctcctgcacacgctgcttgatggggttctcgatggcgtccatgatctggtagcgcagcaggttgggaatgacgttcaccgcaaactccatgacgtagtccagcgttcccgctccgtcacatcgcacctgtatgttgcccatgtcaaactgcagatcggtgatctgcgcccgcttgcgtgtgtccagggattggctcaggccaacggtggcgcgtatgtgctgaaccgtaaattgtacgtgaccgacgcgtgtcatcatgcccacacccacctcccactggccggctcccgtcacctgctgggtgcctatttgcagaacgaccgacaccgttttgttggccatgccagcggttatgttgcccacgcggtagaagctagagattccattgatccaggtgtgtgctaactggacactgaacacgcccatggtgcgattgacatcaggcaggtggtacggatcgaagcccttctgccgaaccatcttgcgtgccatggcaatggcgctgtccagcggcgttatggaattgggcagtcggcgttcgcccaaggttttctggatcattacgttgatctcgctgcgcagctttttgtccgcctcctggagcataaatggcttcatggcgtcgaagaccaagttgggcgcaccgttcaccacgctctgaaagacactgcccaccaggccgaggttctggaagtccattgtcatgtccgagaatgtgatgtcgatcttgatgcggtccgtggccagctgaccgtctcgttcgacggccaagaaggcggttgcctcggcatagacattcttcaggactactgtaaagggtccattggctttcgaaaagaatgaactgagggtgtactggcccttgaccagcatctggtccagctggaggccaccgttgaactgcaggacagaggagtggaaacttcaagccaattcgaattcaacttgaaaacttactctcatttccttcaggtctaggttcattttatcaatgcggaacttggacaagccatacgccttgacctgcttcatgtccagattggccatgcccatgctcttcttcacattgggcacctccaacggatcgggcacgggcacgccgggcagaccctgcggatcctcctgctgaaagtgcacgagcatggcctccacctgggcggctatgctggcctgactctctttgatcttaagtgcgtcatccgactcgctggcttcctgctccacagctgctcaaaggtcattaatgagtggcttagttccggtagagctcagactggaattcgtcttaccatcgccaggctcctgggagtgaacaatgtggcagccacttgccatcaggcccacgagcacgaccactatcaacggcttcatctttcggggattagctggagcttctgcttatcagttggaaaatggaagaaaacgcgccagcctccgttctctactcggaacaaacacgcactgtcgactggcgcgttaatcaaaagataatgatgagccgcaggcggcgatccgcttatctaagggcgactctgctcgcggagctgctgattaaactcggaattgagattgagtgacttaagtgagcggaagcggccagcacattgtaggcactcatggaactcactccactcccaggaacgatgttctagaaatcatgaactagcagcttgcatgaggcaaagagtgttacggttcgaaaacggttttgaaacccaaagaaaatcgcgcatttttctgtagtagcaatgctcatttttatttgaatattttaatagttatatgttcgcatatataatatgggtatatatggcttacttgaattgttgttcttaatcctaggttcacgtgctcaaaaaaattcatgctcaaaaaaagtcttagcctattcaaaaaaatgtcttagcctattaaaaaaaaaggttttttttagctcacagcatccacattttgggcaaagcaatctataattcgctgttcgttgaacgaaaataatctttagttttgactaatgctttactcttaaatagattatctttgctgcagctgcagaattgctttaaatagttatgtatacgacttttggcttaatacgtattaaaaaaaaattgagttttggaaacgtttgctggatgattacaaaaatcagattgtagaatgctcctaaaagatatttgggagttgatttgagtggaagttgtttgagtgggggaatatatagcataacgaaaccacaagttaaaaacaagagagaatgctaaagtcgaatttcccgactatcagatacccgttactcagctagtggaaatacgaacgcgaaatttcatcatttttctgggatatccaagagatattgggaaataaaatgagaaaaaatttaaaattgtgggcgtggaagttttgggcggtaagtgggcgtggcaacatgggtaaac

SEQ ID NO: 6053 - DNA, 1474 bp, DROSOPHILA
gaggctggcgcgttttcttccattttccaactgataagcagaagctccagctaatccccgaaagatgaagccgttgatagtggtcgtgctcgtgggcctgatggcaagtggctgccacattgttcactcccaggagcctggcgatgctgtggagcaggaagccagcgagtcggatgacgcacttaagatcaaagagagtcaggccagcatagccgcccaggtggaggccatgctcgtgcactttcagcaggaggatccgcagggtctgcccggcgtgcccgtgcccgatccgttggaggtgcccaatgtgaagaagagcatgggcatggccaatctggacatgaagcaggtcaaggcgtatggcttgtccaagttccgcattgataaaatgaacctagacctgaaggaaatgagattcaacggtggcctccagctggaccagatgctggtcaagggccagtacaccctcagttcattcttttcgaaagccaatggaccctttacagtagtcctgaagaatgtctatgccgaggcaaccgccttcttggccgtcgaacgagacggtcagctggccacggaccgcatcaagatcgacatcacattctcggacatgacaatggacttccagaacctcggcctggtgggcagtgtctttcagagcgtggtgaacggtgcgcccaacttggtcttcgacgccatgaagccatttatgctccaggaggcggacaaaaagctgcgcagcgagatcaacgtaatgatccagaaaaccttgggcgaacgccgactgcccaattccataacgccgctggacagcgccattgccatggcacgcaagatggttcggcagaagggcttcgatccgtaccacctgcctgatgtcaatcgcaccatgggcgtgttcagtgtccagttagcacacacctggatcaatggaatctctagcttctaccgcgtgggcaacataaccgctggcatggccaacaaaacggtgtcggtcgttctgcaaataggcacccagcaggtgacgggagccggccagtgggaggtgggtgtgggcatgatgacacgcgtcggtcacgtacaatttacggttcagcacatacgcgccaccgttggcctgagccaatccctggacacacgcaagcgggcgcagatcaccgatctgcagtttgacatgggcaacatacaggtgcgatgtgacggagcgggaacgctggactacgtcatggagtttgcggtgaacgtcattcccaacctgctgcgctaccagatcatggacgccatcgagaaccccatcaagcagcgtgtgcaggagaagttcaacaccatcgatgtggagcaggtcatcaagaccatggctcagaacaacttcaactttgacccaaagctgttgggcttgtgagtcgtggtagtaagtaagagagttatgcaatcgaataaagatttatccctagaacatgggtaatcacaagct

SEQ ID NO: 6054 - protein, 445 aa, DROSOPHILA
MKPLIVVVLVGLMASGCHIVHSQEPGDAVEQEASESDDALKIKESQASIAAQVEAMLVHFQQEDPQGLPGVPVPDPLEVPNVKKSMGMANLDMKQVKAYGLSKFRIDKMNLDLKEMRFNGGLQLDQMLVKGQYTLSSFFSKANGPFTVVLKNVYAEATAFLAVERDGQLATDRIKIDITFSDMTMDFQNLGLVGSVFQSVVNGAPNLVFDAMKPFMLQEADKKLRSEINVMIQKTLGERRLPNSITPLDSAIAMARKMVRQKGFDPYHLPDVNRTMGVFSVQLAHTWINGISSFYRVGNITAGMANKTVSVVLQIGTQQVTGAGQWEVGVGMMTRVGHVQFTVQHIRATVGLSQSLDTRKRAQITDLQFDMGNIQVRCDGAGTLDYVMEFAVNVIPNLLRYQIMDAIENPIKQRVQEKFNTIDVEQVIKTMAQNNFNFDPKLLGL

SEQ ID NO: 6055 - DNA, 3300 bp, DROSOPHILA
tcagtcgagtgagcaatgttacctataagaaaagtaacatgattatatttaagatggtaaatcgaatttgagaaattaatctgtgcttctttgaattttcaaacgtattaaaggggctgctttcgacaaagaggagctttattattcctaccggcaacttccattttgaccagagcctccttctcatatctttcggatagctccttcgcgaaaaccacgaattgctgcaacttccaggacctgtagaatatcgtatccgctgcagatcccggtaattttaatatgcctctcagttgtcttagtatctcctttgtattatttgcgatatccccgaaaatagaggctatgatggccaacttgttgcagggaagtaggagatcatctgggtaaagggagctgccttcatcctggcttttctccagacacttggtcttcttggcttcgatagtatagcaaatagaggtgccccgctgatgggccagctgccatttagcgtagttatcctggagttgtttgactattgtttccaatctggttttgcaggtggctaaattcgcatcgtgactcgtgggcgattgcaggcgctggctgtccaaatctggaaacgatgcaaagaaataataaccttttttgtctttggagccaacttacatcgaactggtgtgaaggaaccatttatattcggttcacttgctttttgcggcgttttattcgctttggtcattttgtaaacaatattgtttacttcagctagtgtatgcacacctcctctttgggaaatacgttcaacgcgtttatcaacactaatggtttctaatatcgataagtgaatatattcaatgttagcatagaactatagctatttaaatggggaatggacatttcgacatttatttcatttaatcttaatcgattacatgaatcaattgctttaatacacacaattgaaaagcttataatcgatatgtttcgaccaaatcaatgttcacacaccacattcagaaaaaagtaaagctcgtcaaaagtgccggtaattgtgtgtagaaatccttcattttcctgtgaattttcaatcagatcactgctaaagccaaattcaaaaatatgttaacctggacgccacttgaatctaatcccgaggtaatgactttacctgtaaaggttttgcctaccgcacttccagtttttgcacattcattgtttctttgttccaaaatgtcggatttggataataaagttaaaagacgccattaagaccttcccattcccacttttccaggttttgaccaagtacatacataaactgggcgtgtcgccagcctggtcggtaactgacgtcattggattggaagatgacaccttggaatggattccgcgtcccgtaaaggcgttcattttgctcttcccgtgcagcgaaaccgtaggtttagcttgaccttcttatcttattatcctggccaaccaggttccatttttagtatgagaagcaccgcgccgaggagcacgatcggattaaggaggtggaggagcagcatcccgaggatctcttctacatgcgccagttcacccacaacgcctgtggaaccgtcgccctgatccacagcgtggccaacaacaaagagtgagttcgtgacgttttttctatataagatcgttaataatcgtatctctttatatatcacaaaatgtaatctttccccagagtggacattgaccgcggagtactgaaggacttcctggagaagacagcttccttgtccccggaggaacgcggacgggccctcgaaaaagacgagaagttcaccgccgatcatgaggccttggctcaagagggccagacgaatgccgccaatcatgagaaggtgatccaccacttcatcgcactggtgaacaaggagggtactctgtacgagctggatggccgcaagtccttcccgatcaagcacggaccgacttcggaggagacttttgtgaaggatgcggccaaggtctgcaaggagttcatggctcgcgatcccaacgaagtgcgcttcaccgttttggccttgaccgcggcacaacaatagggtggaactaatcccataactgagaaccaccaagatcccggatctgccagactatatatttatatatccaacatattttaaaccaggctgcaaaggcgaacgaagccccgcctttcagccggtcaatagtttacgcatatttattccgcattgagccaaagccgcatatgtattgggaacaccatgattgttattaaagagtgcactctagcttgatgctaagcttattctgaacaccacacggcttttacttattaatatacatatataaaaatataggcttggctgttcaaactccccctttgtccaccacctctgtgccaacagctgataacgatgtggcctccattgcgcatgccctgccaattagtcgtgctccacgtaaacgcttgaaccttgttttttctacacttagcattaaaaaagcaatccccgtgcagcggagctctagcctgaaatttaagcactggataggagtatatcagagctatcgtatcgacagaaaccctccaggagtgccgcccaacgagttgatgccgaggagcagcagtggagctagcgggcagcagttaagagccggactttctggccaggatgaggctgctcaaggaactgatgcgagtggccacccaacacagagccttctactgctatgtgctgctcagcgtctggatattccttcttatagcgggtaagtggaaaagtagcggattaatggcaatcgtgggaaaacattcaatatatactcaatataaatctaagaaaagatttcttaagttgacccaattagttaatatggttgtcaacactcgaataggacgtgctttgttatattcataggcaaatagctaatccttgcctttgataatcctttttaggaatgtatcgctacatgggcaatgttgagtcgactccaagcggtggctcagttttcggacccagttcgtctggcaccgtcagttccttgggcggcgatagttcgccatcttccactgcccagcgattcgccaagtacagagaacgctgtgctccgttggctcagctgcagcgtttggatgatggcggcatcttggagggttggaagcttcagggcgtgctcctggtcatcaggcacggggatcggggacccatatcccacgttcgcagtgctggcatcaactgcggcgtgagtggtggctcagataacttggtcaacaggtgggctatcacatttccggaaatatttattcattga

SEQ ID NO: 6056 - DNA, 1022 bp, DROSOPHILA
agaaaaaagtaaagctcgtcaaaagtgccggtaattgtgtgtagaaatccttcattttcctgtgaattttcaatcagatcactgctaaagccaaattcaaaaatatgttaacctggacgccacttgaatctaatcccgaggttttgaccaagtacatacataaactgggcgtgtcgccagcctggtcggtaactgacgtcattggattggaagatgacaccttggaatggattccgcgtcccgtaaaggcgttcattttgctcttcccgtgcagcgaaacctatgagaagcaccgcgccgaggagcacgatcggattaaggaggtggaggagcagcatcccgaggatctcttctacatgcgccagttcacccacaacgcctgtggaaccgtcgccctgatccacagcgtggccaacaacaaagaagtggacattgaccgcggagtactgaaggacttcctggagaagacagcttccttgtccccggaggaacgcggacgggccctcgaaaaagacgagaagttcaccgccgatcatgaggccttggctcaagagggccagacgaatgccgccaatcatgagaaggtgatccaccacttcatcgcactggtgaacaaggagggtactctgtacgagctggatggccgcaagtccttcccgatcaagcacggaccgacttcggaggagacttttgtgaaggatgcggccaaggtctgcaaggagttcatggctcgcgatcccaacgaagtgcgcttcaccgttttggccttgaccgcggcacaacaatagggtggaactaatcccataactgagaaccaccaagatcccggatctgccagactatatatttatatatccaacatattttaaaccaggctgcaaaggcgaacgaagccccgcctttcagccggtcaatagtttacgcatatttattccgcattgagccaaagccgcatatgtattgggaacaccatgattgttattaaagagtgcactctagcttgatgctaagcttattctgaa

SEQ ID NO: 6057 - protein, 227 aa, DROSOPHILA
MLTWTPLESNPEVLTKYIHKLGVSPAWSVTDVIGLEDDTLEWIPRPVKAFILLFPCSETYEKHRAEEHDRIKEVEEQHPEDLFYMRQFTHNACGTVALIHSVANNKEVDIDRGVLKDFLEKTASLSPEERGRALEKDEKFTADHEALAQEGQTNAANHEKVIHHFIALVNKEGTLYELDGRKSFPIKHGPTSEETFVKDAAKVCKEFMARDPNEVRFTVLALTAAQQ

SEQ ID NO: 6058 - DNA, 11956 bp, DROSOPHILA
tgcaagttcaaagtcagaaaatgacaaataaccgaaaggcacacaaaaaacaatcctaaacatgtttgcttgcatgccgagacacgcacatacatcaatattcatgtataaacaagcttacagtgtaggaaatataaaaaattacaaaactagaactgtgattacccacacacatgcacaacaagatctgcctactaccttaaatttactcgctgcgatatgtgtagcacatgagcacacaacatatatgttttatagcacttttaggcgctttttattcgtttatgcgtaaatagaaaacgtgaacgacgtgaccaagtgtgaccgttgcttattttcgtcgcaaatctcgcgtgtggtcaatttgaaccgttgtcagaaactatagggtctcgaaacatgtgcaaataattcatttatatcattcaacttatgctgcaaataattgctattattattattttaattaattatccacactgcttatgttcttcgctcaaacaggaggtaattaaatcattgaagggatttcaaaaatctatgtatgcattcactactaactagcttggtcttttttttattttgcgccgctttataaatttaaaaaaatatcatttggaattacacacatcactgtgttaaattaaaaagaagatttttagtgattgttttctttgagatattgaagtcgctatctgctcctatataaatattatttcgaaattatcgatttatagtgcgctatactgacaaaaaataggctgaaattcgcatgaacaagcatattgtggtaagacaaaatgaaatcagaacttcccaagaactacgttggaaaattacaaatgcccaaaagtattgctccacaaaatatcgtaacgaaatatcgcgaaatttgcaacacttttgtgcacattcggtggcaacgccgcctaagaaaatacctattgccccaatcgatacctatcgatgagcgtgggcagccctgtttgtgcatgtgctgccattcgatttgataaccagcactccgtgcacacgtttttcggctttctagaaataattgggctgcgattcaaactgtgaagtgattttttctatattttttttttgtgtgcacaaaggctcttgtaattcgaggatttggccatcgcgagtgcgggtgattaagcaggcagctccgattgccagagttttgcggatgcatggcaacactgccgcacgccggccatgttattgtgatttgtaaaaggtggaacgtagacacgtgtttaattcgtgcagcactttagcgttgagaaaacgacagtaaatcgccagcaaataagcaaaaacaatacacaactcgcgtgtgcagtagatagctttgaaagcacccaaagatagtgagcaaaataagttacccaagcggttcacaaaggtaagaaatcgcagcacgcggaacataacctagtacaaaaaaagtgcgtgtgtgtgtttgccaaaacagagagatgtgacggaaaatggtgtcatgttctgttctgtgtggatttgttccaatgtccgtgtcttgagctctattcgcacctctttcccggtaccatagccaacgttttaactaccttttttttgtcaactttttgttaagtgtatgactctgccttgccgctgttgttgttgttccggcaaagtgacagtaagtggttatggaaaaaatttggagttcaattcggcgattacacaatgacagcactcacacacacacacacccacaatcgcacgcatacacatgccgagcataagtgcgtctgtgtgtgttacagctttcaccgttaatgttcggtttttttacgcctgaaagagaacaaaggcgaaaaggagctgccactcccacaaagaaaacattgcgtctatgcatacatacatatgtatacacatataaagtagtatatcccccgattatacaatccccgcccatttttggccaccatatgatcggaaaccacgttgccaagattataacaatgtggactttttcggctagctggcaatgttgttgcacctgatttgttgttgttttggtgctctcttctggcttgcctctctgtgtcgctcattctcgcttgttcgggggaatttcaaatttttaggctgttgcttcacctccccgttcgacggcttcctcttcttttggccgcactggtattcgagtttggagcaacaacaatgtgcaagttcaaagtcagaaaataacaaataaccgaaaggcacacaaaaaacatgcctaaacatgtttgtttgcatgccgagacacgcagacacatcaatattcatgtataaacaagcttacagtgtaggaaatacaaaaaaaaaataacaaaaactagaagaccattgcgaagttgttgtgcccttatcttacattttgtcgttttaattcaagagttgatacgaatacgtgtaaaactacacttctccctgctcttatgcatatccatttattaagaattttaggcaaaatgtggcaagctttgtcaacaagttttaatactctaagcaaagggtataaaacgtaatctgaaaaattcccgtcacccggtttcgacgattaggaaatgccacagctgtctggccagttgcccttccatggccattttatagcaccccactaggccccttatcccccaccccctgcatgctcccatcaaccgttgatctgtcgctatatgtacatttatacatatacatatgcatatacatatacatatgtacatacatacaatgtatgtttgtgtttcagttgcttgtcgattgagcttatcatctgaccactgtgtaacaggaggacctttgggccctaacaaagtgacgatattgtggatggggggaagcgggagtatagtgggtaaatcggttctatagtgagtaacttaaaagtactaaagatctcatggctttaaactactgttcggcatgacttgcacttttcgggccccggaaattttgaccaaattcgaaggagcgtcttacaatccatttgaatggattttgattaacggttttcggatttctttgttctaatgagctcgccactctcttttcttctctccggctttctgtctcgtttccgcttggtgggatgagtgtgtgtgtgggtggaaaggggcgctaaataaaaacttgccaccacgcatcctctcttttttcgcgggttggtgggggtatgccgatgcggaagagcggatggagtgaagagcggagaatcggtgccgaaataaaaaaaataatacaaataaaaagccagaggaattggcaattagaaggcgtgcaaagtagtttcccttcatatatcgagcagtcgatatctcgaatctctcgaacaatttcgccggcatatcgaaacccaacaaaaaaagaaagaaaataaacaaaagcatagaagaaactccaaaaaataagccgaagcgaattgatgccataaaacgacataaaatacaaacgaaaccggaagaagcaacgaattcagttttatcctagtggtaatacaaaaacacacatttattttgtgaataggtgatgaatttctggcaaagctgttgttttcgtaacttttagttttgttttgtaatgatttcgtaacatttgccattgccatacgtaaacgtaacggtttcttcttgcgcctctcttccgttcttcgccgacgctcttttgcgttcttgcgcacgcgctctttgcatgcgatctatcgctccatctctctcgctctctcccgttgcgtttttcccttccgcgtggcattcaaaaatcgctttgcacctttttcgtcgttctctctcgttgtctctctctctctcggcatttgtgttgttgtctatatttacgtatttatttgttgctattaatacgcaaaagttcagaaaggaaaaaaccaaaatcaaacacactggcaaacacacacacacacacgcacacttatgcagacgagcacatgcaggcgggtctcgtgacttgcaaaaccaattcgaaacctttaaataggttttttcaaatataacaacatgcatatgtcgttatttaaaaaacaacgttcatgtggatggtgttgacaaattagccctttaatctcacacttttcttcaaaattgatttcatatttgaaattctcgcttaaatttaaacgcaaattcaaagctctttactttgttttcaaagttattctacacaaaattgcatattgtgtaccgtttcttatcttgagccatgacaagctttttaaagtaattatatacgacgctacttgatttgtaaattgttgccctgataagaggtgttcacacattatttccaattgtaaattaaacaacaaaccataacttttccaaatattgcacaaacaaaagctacttcatttttatttcagtattagtgtgatcaaaataatcctatttgtgtgacagtacacaagtatattttcaaatcgcacagactaatataacttcttctccctttcagatctttcaatattcagcgaaaatggtatccggtcgtcctctactctacctctcactgcccggtgtagcatttatactcggcgtcttttggtttcggcgtagatataaaaattgtttagacaagcccgacgacgaggactcatcggccatcaatgactcgtcgattgaaccaactgtgcaggcgcgcaaggccaacggagtcctgcagaatggcaagctgccacagcagtcggccagcaagtcgatgaacatcaacggaactttagttaacggtagcggaagcggtagcggaagtagcagtgatgagaaggacagccccactaccatgttgtatggtaaatcagcaccaatcaaaatccagagcaatggacgcacttcaaatggcaagcatcagcagcagatcgattccgaaatactgaagtcaaagatacaggatgccgaacacaagacactctgctccatagacgaggatttcgagaatctatcgtcgccacgtgatttacccgattcggtaaatacacgcgtatccttctacaatcgtaaggctacccaaaagacggtggaaccggtggtgattaaggccacgcgcacacccaaaatatcgccagagaactccttcctggataccaactacaccaacaaggagtgcgagcagaacaacaactgtgagcccaaggaggagccctccaagaaggaggccgatcaggaggagctcgagcaggatcaggagcagacggtgctgaaggaggaagtggtggatagcaatggtaatcagaagcgcaatgtggatgcggccagtccatcgctgagcatttgcagtgtgcaatcgggcgattctggcaagggatccagcttgccgcgctcggaggcgacacgcgtgaaaaccacctacgagttcctcttcccgatcagcttgattggtcacctgtacggccgcaagcgggcgtttattaaccaaatcaaggccaagaccctggccagcgtgtctgtaggcaagaatccctactcgggcaaggtgcgcatctgtaccattgagggaacggagagcgagattgatgccgccctggccatgatccgtcaacgtttgccggccaagcgctatccgaacttcaccatgcaacgcatccactttgcgcttccccagaccatagttcctctttcgaccgaaagcctctacaatctacaagtgagtggtgatggtgtgacgatgacaatggtaacgatgccgccgacacgacatggctatagctgattagctggctaattagctgacttgatttgatgattttatggtagtattcctcccgttgaatacgcagagactatttcaaattctctaagtggttaacactgctgttcctgtcgtgtcggcgcaatcggaaaggcttcgatttcgagtccccatccatccattcatccatatatctctaatgccttggctaactcctccttcgcagctgaaactgattgagggcatcaacaacgatgtggtagtgagtgcggtgctatctgggtcgcatattttcatccagcacccgctgcatccctcgcatccatcgttgcctttgctgcagaagcagctgtacgatagctactccaccatggaggcgccattgctgcccagtttggagcttagtgccgtgtgcgtgatacccatcaatgatgtgtggtatcgcgtccagattgtcgacacagatcccgaggacgaggagcgttgcgtaatcaagtttcttgactttggtggctacatgaatgtcggcttcaacacactgcgacagattcgcaccgatttcatgaatgtgcccttccagtccaccgaatgcatcctgtccaacattgagcccatcggtgagtgtgtgtgtgtgtgtgcgcgcattatgcccttatacttattccttgattctcactttttccacgcaggtggcacctggtccattgaggcggccgaaatcctcaacaaacttaccaaaggcattgtcttgcaagcacaagtcgccggctataatagtcacaacctaccagaaatctttttattcgcatccctaggtcccaatgtgagtataaatttccgattagagagagacggagtgattatgaagagcgagagagcagactacagtgcgtgacataatagcaaaacggttacgagcagaaacttgcatcttactttaaacaagctaactaagccatttgatttgttatgcaactaaacttaaacttgtacacacatatgttacctttttaaaaacaagcggatgcgctatcgtctgtttttaaaaaggggacaaacccttgttggaacagaaagtttctaactcttgtttctaattgcagaatgtaatctttatcaataaggagctggtcggcagaaagctcgccaaatgggtggagatgagtgactaacagccttagtgaacaactcaactagcaaccaagaactatatgaaaacttaaaagcaaacttaaacaacaatcactcaaacccaaatcaagcaacttggcggtgcaacaaaaaaggaatgcttgagtattgcgcaacaggctccaagatgcggattcggattaaggatttcgttagcagcttttgcagttagcatgtagcatgtagcacacagcaaatagcaattgcccgattccaaaagaactggcaagtgcagaggcctcaaaacaaagaaaatgaaacgtttgttacgttgtttagattgcgactgagcccagagagagccccttaatcattacataacaaacaacacacactcgccaaatacacacacacacacacacacacacacacgcatatatgagtaagagcacctaacaccacactaacccatacacattacacaacaagacaaacgtttgtttgttgactgtccagaattggataccaaaatggagggggaagttagggatcagctgggttatgcgttttgtgaccacatggcaacacatgggcgggcgggcatgcaacggatcgactggagctgcagatattactatactcagtttataagtaggcattactaaataatgtacatagattttataacgagaacgagatgcgaaaaaaaaacaaagaacatactaaatagacccaactaaaataccatgcgttcatcagatatacagaaaaacagaaacacagaaacatagaaactctggataagaatggagaaaaacctgacaaaactttagttttatgctgctatttgctgagatctgtaaatattatattaggcctttttaaacaactgataatatctaatcgacgagttcatacatttacatgcattatacatttttttttttttgttaatttgtattcaaactgtaatcagaaaatgtattcaaaattcccaacccaaaaataactcacacccgcactaaagccacagaatgcctaacaaagaaagaaaccatttaaaagcagagacagagtgacgttacgaattcttcataattatatatgcgtgtgtgccattgttagacaacaaaccaacattaaacataaccaacataacaagcaaaacaacaaacacaataattaacaaaaaaaaaagaaaaaaaaacagaaatggctactttttccccaaaacaaacccattgtaaataaaatccatttcgacagacaaagaaatgcaaaaacaaatgagaaacaatgattgttgctaccaaaactagcctattgaaaagaaggagtgaaaacctcaaaatgcctttctttcaaacttcttttgtatatggaagaggaaacttcttgaagcgacaagaagaagcaagcaagcgaattgttgcaaacttatcgcttaagctaccaattctgggtgtctagcctagcagcaatattagctagaattgttctaagtgtagcacagccacaacagcatcaacaacacatcgataacacaatataacacacaaacacacactaataaatcaacaaagaaattaatcatatttattttgttgagattgaaaatagagttttatttcactgtatcattcattgtattttacattgacattttacattgatcggcagcaacggaattactatataaacatttataaatcgtttcaaaaaaagatttcaggctcaatcacaattcagcttaataagtcgtcgtcatcgttctcatgtcgtcatcgtcataattaaattacttagataatataatgtacaagtgatgatccacacaatatccatctatttggtcaacatgaaagactttggaggtgttttttcttcttcaacggtagtctacaaatattctagttaacgctatcattataccgttattattattattattataactattattattattacctctttttttgctgtttgtttttagatccttcttgataattaaagcaaattcattctaattgttatcctaaactaaaacaacttttggaggggctgccctccacacactgtagtgcaaattcgtttaatggttcctcgttttaataatgtcgtttaatgcctttggaaattcgaactacattttagtctatggaacactaaatacatattattggttacttttaaatgaagcattcaactagatgaagggagtaggatttcaatttttgcatgcaccagagttgtcaacgttctcggtgttctatcgaattcattgtagatttgtcacttgtacaattgttgataaactgattaactgataactgattaactgacatagagataatgcaaacacgacagacatgatgtagagcacatattgaaactaatcttagtcgatagcgagaagagaagaagagacgtgaagtgaagagtcctccctcaaagatcatcgtaagtgtgtggtacttctatttttttttcttatctagtaatgctgagagacgagagttacgaataagatttaatttatagacgcattcaagtgagaataatttacaaatctagttattaactaaatataatgcaagtacattaaaataaaatattattgaaaagtaaaaaaaacggtgtttcatctggatcgttgtgggggggggggggtggttcgttatcccaggaagtgatatcgccacttttatggatccgcccggctaaacgtgccaactaattttataattcatgtacttacccgtgtcagggtaaggttcttatccgaaaagctgaattgacgtgatggccgcgataaggaagttgctagcttcatattgtttgcgatccccccaataatgtccaatatccgattcccatgattccctccatgcaatcgatcaaagaaagccttgattgccgcactaatgtactattcgatgatcgtctggttggctcgttggctgcacgacgatctcttggatataaaacgattgcgatatcgaacttgcagctggaggtggagaactctgcgtcagagttggtggccagagatttgcttgtgaaactgtgaaactggtcagaagcggtctttggatcgtaaaactttcattgaccattgagtggaattcttccgaatctatatgtaccagccagcctaattaccccagcgattatcgactcctaattggttttgtctacggttctgttttcgtttccttttcaattgattggtcacttcgtggtggtttcacctaatcagtgtggaaaatgtccagtcacggccggttcggataagttcataaagtgcttttactgtgtctgggtctggcgggtccgtctatctgaagttatttactactgctgaccattttggcctgccggtttttatcgaagtaccaagtgtttcactcaccgcgtcgtacagtggaccccgcctatgttggccgcaatgatcgatttgggttgataagatcctggcatccccatatatagttatatctatgttcccctatcgccgtatctgctctctatgttctatcaacgatcttcgtgagttaatcagcaaaaaagagctcacgttcgggatttccttacctacacgcagagaaaaagatcacttcataaatttatccagcggcagctcatcaagtaacgtggaattcccagcttatcgcattgggtaatttgaatggagcgctggtagataattcacaaatggaaaacatttacccaatgacttatttactcgttttataacatcttgcagcattttctcttcgagtgcagactatatttttgggtaaacgccgtgctgatgtcttcagcttctcggcggatacttccttatccgagcgctggaatctccgatatcatcaacgatcgcccaacgaagagcaaccgaagtttgttttccccattcctaatcgagcactggggggctggggattggggattgggtactgcgtactgggtactgggtactgggtactaggtactgggcacttaggtaccagccagtcaggtactaccgctgattttctctacaaagcacggctatacggctatatgtgtgtgaataatttcacgcttattacctgctgagcgctggcaaaacgctgcttgactttggcggttcttaaagcggccggcactcgcaatattctcagttccagccgcggcattcacggcaccacaagcgcgcctccagcaccgccaagtagccaaaatccacagcccaaattacgaaaatattacagaaaactaaaccctgaaactgcagttggacgctaacccaaccaaccgtaaccaagggctggccaaatgcaatgtgctaattactattaacaaaaaaaaaaaaaataaataattagtaattaaataagcaaaacgcgagtagccgtcaactgttttcattaaccgggaaaattaacaagtggctagaaaaatggaattgaaaggagttcagccatcgaatggcagctcaaatggaagtggaaatggagccaccaatgctgcatcaacggaagtaagtgttagaccatgaaatcaggcaattaatagtatccctaatggaattgctttcgagtggcacttgaagaactcaagtggccagcgattcagattagaagaaggcagtgttcaacagttggaacattaagtatacgccgtgtggtgcatgaaagtttcacaatgtacactgtgaagaaacatttcccatgcaataaactttataaaacttcaatggacttttaccccgaaattatgctttgattggcccttcttcacaaccgtccttgcaattcgctcagtgtttctggctttacaatcgccaaatgactttatgatcattaaggctgttagaccttaattgcaggccaatcgaccgacaaacgaatatgcgatttacggtccaccccaatgtggggtgaaagactttgtcagccggttactccatgcatatcttatacgctttacgatacccagcgacacataaatgtatcttagagctattttcagccgaagaatgaaccgaaaacgttagttatctggccataacttagcgtacggctcgagatcagcgaaagctatactataataggct

SEQ ID NO: 6059 - DNA, 2523 bp, DROSOPHILA
ccattcgatttgataaccagcactccgtgcacacgtttttcggctttctagaaataattgggctgcgattcaaactgtgaagtgattttttctatattttttttttgtgtgcacaaaggctcttgtaattcgaggatttggccatcgcgagtgcgggtgattaagcaggcagctccgattgccagagttttgcggatgcatggcaacactgccgcacgccggccatgttattgtgatttgtaaaaggtggaacgtagacacgtgtttaattcgtgcagcactttagcgttgagaaaacgacagtaaatcgccagcaaataagcaaaaacaatacacaactcgcgtgtgcagtagatagctttgaaagcacccaaagatagtgagcaaaataagttacccaagcggttcacaaagatctttcaatattcagcgaaaatggtatccggtcgtcctctactctacctctcactgcccggtgtagcatttatactcggcgtcttttggtttcggcgtagatataaaaattgtttagacaagcccgacgacgaggactcatcggccatcaatgactcgtcgattgaaccaactgtgcaggcgcgcaaggccaacggagtcctgcagaatggcaagctgccacagcagtcggccagcaagtcgatgaacatcaacggaactttagttaacggtagcggaagcggtagcggaagtagcagtgatgagaaggacagccccactaccatgttgtatggtaaatcagcaccaatcaaaatccagagcaatggacgcacttcaaatggcaagcatcagcagcagatcgattccgaaatactgaagtcaaagatacaggatgccgaacacaagacactctgctccatagacgaggatttcgagaatctatcgtcgccacgtgatttacccgattcggtaaatacacgcgtatccttctacaatcgtaaggctacccaaaagacggtggaaccggtggtgattaaggccacgcgcacacccaaaatatcgccagagaactccttcctggataccaactacaccaacaaggagtgcgagcagaacaacaactgtgagcccaaggaggagccctccaagaaggaggccgatcaggaggagctcgagcaggatcaggagcagacggtgctgaaggaggaagtggtggatagcaatggtaatcagaagcgcaatgtggatgcggccagtccatcgctgagcatttgcagtgtgcaatcgggcgattctggcaagggatccagcttgccgcgctcggaggcgacacgcgtgaaaaccacctacgagttcctcttcccgatcagcttgattggtcacctgtacggccgcaagcgggcgtttattaaccaaatcaaggccaagaccctggccagcgtgtctgtaggcaagaatccctactcgggcaaggtgcgcatctgtaccattgagggaacggagagcgagattgatgccgccctggccatgatccgtcaacgtttgccggccaagcgctatccgaacttcaccatgcaacgcatccactttgcgcttccccagaccatagttcctctttcgaccgaaagcctctacaatctacaactgaaactgattgagggcatcaacaacgatgtggtagtgagtgcggtgctatctgggtcgcatattttcatccagcacccgctgcatccctcgcatccatcgttgcctttgctgcagaagcagctgtacgatagctactccaccatggaggcgccattgctgcccagtttggagcttagtgccgtgtgcgtgatacccatcaatgatgtgtggtatcgcgtccagattgtcgacacagatcccgaggacgaggagcgttgcgtaatcaagtttcttgactttggtggctacatgaatgtcggcttcaacacactgcgacagattcgcaccgatttcatgaatgtgcccttccagtccaccgaatgcatcctgtccaacattgagcccatcggtggcacctggtccattgaggcggccgaaatcctcaacaaacttaccaaaggcattgtcttgcaagcacaagtcgccggctataatagtcacaacctaccagaaatctttttattcgcatccctaggtcccaatgtgagtataaatttccgattagagagagacggagtgattatgaagagcgagagagcagactacacattttctcttcgagtgcagactatatttttgggtaaacgccgtgctgatgtcttcagcttctcggcggatacttccttatccgagcgctggaatctccgatatcatcaacgatcgcccaacgaagagcaaccgaagtttgttttccccattcctaatcgagcactggggggctggggattggggattgggtactgcgtactgggtactgggtactgggtactaggtactgggcacttaggtaccagccagtcaggtactaccgctgattttctctacaaagcacggctatacggctatatgtgtgtgaataatttcacgcttattacctgctga

SEQ ID NO: 6060 - protein, 695 aa, DROSOPHILA
MVSGRPLLYLSLPGVAFILGVFWFRRRYKNCLDKPDDEDSSAINDSSIEPTVQARKANGVLQNGKLPQQSASKSMNINGTLVNGSGSGSGSSSDEKDSPTTMLYGKSAPIKIQSNGRTSNGKHQQQIDSEILKSKIQDAEHKTLCSIDEDFENLSSPRDLPDSVNTRVSFYNRKATQKTVEPVVIKATRTPKISPENSFLDTNYTNKECEQNNNCEPKEEPSKKEADQEELEQDQEQTVLKEEVVDSNGNQKRNVDAASPSLSICSVQSGDSGKGSSLPRSEATRVKTTYEFLFPISLIGHLYGRKRAFINQIKAKTLASVSVGKNPYSGKVRICTIEGTESEIDAALAMIRQRLPAKRYPNFTMQRIHFALPQTIVPLSTESLYNLQLKLIEGINNDVVVSAVLSGSHIFIQHPLHPSHPSLPLLQKQLYDSYSTMEAPLLPSLELSAVCVIPINDVWYRVQIVDTDPEDEERCVIKFLDFGGYMNVGFNTLRQIRTDFMNVPFQSTECILSNIEPIGGTWSIEAAEILNKLTKGIVLQAQVAGYNSHNLPEIFLFASLGPNVSINFRLERDGVIMKSERADYTFSLRVQTIFLGKRRADVFSFSADTSLSERWNLRYHQRSPNEEQPKFVFPIPNRALGGWGLGIGYCVLGTGYWVLGTGHLGTSQSGTTADFLYKARLYGYMCVNNFTLITC

SEQ ID NO: 6061 - DNA, 5113 bp, DROSOPHILA
ttgaccagcagtgcaaatcggagagcaagaagatctacaccaatcgctgcaatgccaagggctgcaagcgaaaggagctcatcccggtgacctgctcgcagtgtcgcttgaacttttgcctgcgtcatcgacacaccagcgaccacgactgcaagccagtgcctgcatcttcgacaacgtccagccgtgggggatttcagtccatattcaagacctcctcggactcacgatccatggctgcccaggcggccgagagaaggcagaacagaaggcccgcgagcaatagcatcagcaataccaattccagacctcgacctgtgcaggccacacaagtacaaaacatacagggcaatatggtgagttggcaagctggtctcaactaatcatctagaccgttttagactttatcaaactttatgactccatgattgaaatactggtcatgagtcatctagaccgttttagacttcatcaaagtttatgaatacattattgaaaacttgcagagcgaagacgaggccctagcacgagcactagccttatccattatggagcaggatgacgcggcggaaagcaaccgtcaagctccggcaccaagcaacgcccagcaagtggctgttggcggtggtggcaatcagcagggaaatggcaaggacaagtgcctgctgtcctaggtcccaggaggcagcgcagcgagctctcaacatatccatcacttgaccagcagctagaaatctgcccaattattagatgttaatgaaactccgttattgtaatttgttggtaatttacttcgacttcgtcacattcttcgtggtttagcaaaaataaattaatgttaagtctacatttggaaagcgtagatagtttttaacacggatctttaaagggaaataagggaatcgaccctattgcgaacagatcttaatcagataaatatgatacaaggcttagctacataaatagatacacgattatagttatacagatacattgcaaattattcggaattggcctgcgtttgcgtttccgtcacttcctcctcctcgatcttggcaggaggttgtacttctgcgggcaccacttcgatctggccagcgacttcttcaacttttggctcctccacaagttcagatttgttggacatcgcgcttagctttctgccaaccgtggaaccttccactgacgacgacgtgctgattttgcgcgctgctgctgcaaagctggcgactccctcggcggccaaaatgctggcactggataaaagtatggaaacttgctccgccgacggacaactcgtgatgatcatatcatctgtggagtaaccattggtggtcagcagttgttccagctttacaaacgattgaatgatgttgttctgcatagaaaaacaaagataaattaatcatactttgtgggcaaacgttaaagcttactcggatcggtctgaagatgatgaattctgtatcacgattgcttaggtagagctgcatggaccgctgtagcaccgccagcttggctttgatcaagcgctgcgtctcctggattatactgctgatctgctgcggactggcccatggactttgccttagaacgtagctggctttcgtcgactccggcgattggggcgtggctggagtggactgcgccaacagactctgcgccttttctaggaatgtgatgagagggcccactagcatttgaactgcatccttgatgtacttctcgcacaccgacttgagctgacggtcaacttccttgcgagagtcgagtaaatgctccttgatctgcggcgtgccctccagaaggaattccaacagcgcattattgctacccatcgaaaagagctgtttgcgcttctgcagcaatccaaaggctgcggtcttcaccttgctaaagtccagcgaagtttccttcaccgtaaagtccacacgaaacggtgcaatctgttcccgcagaattaggagatgcttgatttcgaagagctcgccatcaattggcgtcttattggctgatatcttgccagccgcatgagagacactctggatgcacagcttgagcgcttcctgagaaaggccttggaaaatgggtcgatccacgcagcggtaaagccttgagaggcacaccagtgtccgacgtactgtggggtaccacatgccatgcagatcggccggggaatctatataaatttaagattaaactctgttcggactggaaggcttcataagcttactcatttgcttcaccgtgtaggcagtggccacgctttccgtctccacagcacttgaaacactggaaaccatggagttgcgagaatcggagcggcgcaaaggggcgggttcttgaagggacagggcaatgctctgaaatatatgcattattttagttttcaatcaattgaaaactccccaaaccactcacctccatcatttccaacttctcggggtaggccaaatctcccgatgagggattaaagttctgaatgtccgactgcagatatagatgcgctcggaagactaaacgctcctgcacatcctgcagcaattggtgcgcaatggtggcaaaggcttccagtgcaacagctaattgatacaaactcaattaaatgttctcgtattacaaaaggattctggaaacttacgattctgctggacatgctcctccagcatttcaattcgtagaatggagcagatctccgccagcgtttccaagtgattaatatgtataataaagggtcgcatggtgtcatagagaatggtgcacagaccctccagataaaccctgtgggaaaaatgagatcaatcctattttccaactagatgtacgagtattacgtcaggtgtggcgctcctgtgctgaagaactggtagaacaaacgctgttcgtcctggcaaacatgcaccaaaaaggcgcaggcgcttcgggtgagagagcagtgatcccctttgtgggccaccttaacgttttgtatggacagattcactgctggcgacataacgctggctctttgcgccaagtagtgctgttgaagatccgccattagttgggcgtagtcgaggctgtgttccgaccgggactcaatcaactgggcgacccgcttcacttttgccgcggccgtttgatatttgccgtagtacagagcgaatgcggcatctggtgccttgagagcagcggaggcatccggcatattgttcttgggatggagcgtggcctcggttgcctggtttatcacactcgtcacatagttacgcaccagacccgaggctttggccaggcactgcctgtacttcacattgtaggcggccgcatccttgaatttgggctgtgacaatgaaggatattagtatatacatgaccgaagtgtaacagacaagctcacattctcctcgatgtagtttaggcattcgtcgatcttgttgaggcactcccggaacgcttcgctagccaccgaaagcgtggggctctgaagtcgttggttgagcaactccacctggctgaagtagtgcagacggcgttgaatctcgtgactcagctcctgcagtcgctcctgctcctcgatcaactgctcgctggccgtgttcagagcgctggtcttttgcgacacaaagtcgtactcgtcgcagagggcacccaggcgctccatggccccagcgatctggtccagcatgtgggagcactccgctttgcgctgctccagctgctgcaggtatttgtggtagtcggcatcgccacgttgctcgatctcggcgctgacgtccgcgaaccaaagcagaaactcattggtgttctggagtccctccgcaggtagtctgatgtcatcgccgctttgcgaagttgcagctgccgatgaatcggtaggacccacctgggtgggcgtagtcggtgccggtgcctacaaagagtcgggttgcaattatacgattgccattcgaggaggagtcgactcaccgatggtccgctgtcgcgccacagattggtcaggacgtccaggtgctcctcttgctggatactcagagccgccagcgggtccgttttggactcccattgcatcaggcgattgcgaatcttgcgcaaattctcattctcgctctgaattcgttcgacgtcatccatttttctgcggcggatttggaaacaatcaatcagctgttcagagatgaccggtctgcgccttccagtgctgctcagcaaggagacttagctagaactaaaactcttgattgatataagttgcctttatttgaatggtatcatatgttaagtaatctttaattttagatttaatacattttaagctctttttatgctcgtccgtttcttacataagttttatattaaatatctgtctgtttagcttggcgattacttagccaagatttcaccactgacgggacgttttccatcactggcagcatcaataaagttctgttctctattgtttttattgcattttgatcagtttttccgcatcatatagcatacgatggcgccgcagccagtggttacggggctatctccgaaggagggtcctcctggcacccgcgttatcattcgcggcgagttcctgggcacccgagtgcaagatctaattggtaggcgtagcctgtcccaaatagcttctgttttctgatgactttcccttccaaaaaaaaaaaatgtaaggtctaaaaatctgcggttcagattgtctgctgtcggcggagtggaaatcacccaataaaatcatcgcacgcactggtccggcgaagggaaaaggcgatatcatagtgaccactttaagcggcggagtgggcacgtccacggttcagtttcgtgcataccacgagaccattggcccgctcaaggagtccgccgtgtggatcgaggagtcgccctcgcagaattttgcctggggtcggcgcaccctagcccaatccggactgacgcaggaggatccacttgggctgtccatcgagggtaacgagcagaagatccccgaggacctccgcgatctctttcccgaagcctgcggggatctgtcgcaggagcacttctccccggcctggttcctgcttgaaaatcacctggccacctccttcgaggatctcaaggcgggcctgtcctacttgaagcg

SEQ ID NO: 6062 - DNA, 2652 bp, DROSOPHILA
atggatgacgtcgaacgaattcagagcgagaatgagaatttgcgcaagattcgcaatcgcctgatgcaatgggagtccaaaacggacccgctggcggctctgagtatccagcaagaggagcacctggacgtcctgaccaatctgtggcgcgacagcggaccatcggtgggtcctaccgattcatcggcagctgcaacttcgcaaagcggcgatgacatcagactacctgcggagggactccagaacaccaatgagtttctgctttggttcgcggacgtcagcgccgagatcgagcaacgtggcgatgccgactaccacaaatacctgcagcagctggagcagcgcaaagcggagtgctcccacatgctggaccagatcgctggggccatggagcgcctgggtgccctctgcgacgagtacgactttgtgtcgcaaaagaccagcgctctgaacacggccagcgagcagttgatcgaggagcaggagcgactgcaggagctgagtcacgagattcaacgccgtctgcactacttcagccaggtggagttgctcaaccaacgacttcagagccccacgctttcggtggctagcgaagcgttccgggagtgcctcaacaagatcgacgaatgcctaaactacatcgaggagaatcccaaattcaaggatgcggccgcctacaatgtgaagtacaggcagtgcctggccaaagcctcgggtctggtgcgtaactatgtgacgagtgtgataaaccaggcaaccgaggccacgctccatcccaagaacaatatgccggatgcctccgctgctctcaaggcaccagatgccgcattcgctctgtactacggcaaatatcaaacggccgcggcaaaagtgaagcgggtcgcccagttgattgagtcccggtcggaacacagcctcgactacgcccaactaatggcggatcttcaacagcactacttggcgcaaagagccagcgttatgtcgccagcagtgaatctgtccatacaaaacgttaaggtggcccacaaaggggatcactgctctctcacccgaagcgcctgcgcctttttggtgcatgtttgccaggacgaacagcgtttgttctaccagttcttcagcacaggagcgccacacctgacggtttatctggagggtctgtgcaccattctctatgacaccatgcgaccctttattatacatattaatcacttggaaacgctggcggagatctgctccattctacgaattgaaatgctggaggagcatgtccagcagaatcctgttgcactggaagcctttgccaccattgcgcaccaattgctgcaggatgtgcaggagcgtttagtcttccgagcgcatctatatctgcagtcggacattcagaactttaatccctcatcgggagatttggcctaccccgagaagttggaaatgatggagagcattgccctgtcccttcaagaacccgcccctttgcgccgctccgattctcgcaactccatggtttccagtgtttcaagtgctgtggagacggaaagcgtggccactgcctacacggtgaagcaaatgatacgtcggacactggtgtgcctctcaaggctttaccgctgcgtggatcgacccattttccaaggcctttctcaggaagcgctcaagctgtgcatccagagtgtctctcatgcggctggcaagatatcagccaataagacgccaattgatggcgagctcttcgaaatcaagcatctcctaattctgcgggaacagattgcaccgtttcgtgtggactttacggtgaaggaaacttcgctggactttagcaaggtgaagaccgcagcctttggattgctgcagaagcgcaaacagctcttttcgatgggtagcaataatgcgctgttggaattccttctggagggcacgccgcagatcaaggagcatttactcgactctcgcaaggaagttgaccgtcagctcaagtcggtgtgcgagaagtacatcaaggatgcagttcaaatgctagtgggccctctcatcacattcctagaaaaggcgcagagtctgttggcgcagtccactccagccacgccccaatcgccggagtcgacgaaagccagctacgttctaaggcaaagtccatgggccagtccgcagcagatcagcagtataatccaggagacgcagcgcttgatcaaagccaagctggcggtgctacagcggtccatgcagctctacctaagcaatcgtgatacagaattcatcatcttcagaccgatccgaaacaacatcattcaatcgtttgtaaagctggaacaactgctgaccaccaatggttactccacagatgatatgatcatcacgagttgtccgtcggcggagcaagtttccatacttttatccagtgccagcattttggccgccgagggagtcgccagctttgcagcagcagcgcgcaaaatcagcacgtcgtcgtcagtggaaggttccacggttggcagaaagctaagcgcgatgtccaacaaatctgaacttgtggaggagccaaaagttgaagaagtcgctggccagatcgaagtggtgcccgcagaagtacaacctcctgccaagatcgaggaggaggaagtgacggaaacgcaaacgcaggccaattccgaataa

SEQ ID NO: 6063 - protein, 883 aa, DROSOPHILA
MDDVERIQSENENLRKIRNRLMQWESKTDPLAALSIQQEEHLDVLTNLWRDSGPSVGPTDSSAAATSQSGDDIRLPAEGLQNTNEFLLWFADVSAEIEQRGDADYHKYLQQLEQRKAECSHMLDQIAGAMERLGALCDEYDFVSQKTSALNTASEQLIEEQERLQELSHEIQRRLHYFSQVELLNQRLQSPTLSVASEAFRECLNKIDECLNYIEENPKFKDAAAYNVKYRQCLAKASGLVRNYVTSVINQATEATLHPKNNMPDASAALKAPDAAFALYYGKYQTAAAKVKRVAQLIESRSEHSLDYAQLMADLQQHYLAQRASVMSPAVNLSIQNVKVAHKGDHCSLTRSACAFLVHVCQDEQRLFYQFFSTGAPHLTVYLEGLCTILYDTMRPFIIHINHLETLAEICSILRIEMLEEHVQQNPVALEAFATIAHQLLQDVQERLVFRAHLYLQSDIQNFNPSSGDLAYPEKLEMMESIALSLQEPAPLRRSDSRNSMVSSVSSAVETESVATAYTVKQMIRRTLVCLSRLYRCVDRPIFQGLSQEALKLCIQSVSHAAGKISANKTPIDGELFEIKHLLILREQIAPFRVDFTVKETSLDFSKVKTAAFGLLQKRKQLFSMGSNNALLEFLLEGTPQIKEHLLDSRKEVDRQLKSVCEKYIKDAVQMLVGPLITFLEKAQSLLAQSTPATPQSPESTKASYVLRQSPWASPQQISSIIQETQRLIKAKLAVLQRSMQLYLSNRDTEFIIFRPIRNNIIQSFVKLEQLLTTNGYSTDDMIITSCPSAEQVSILLSSASILAAEGVASFAAAARKISTSSSVEGSTVGRKLSAMSNKSELVEEPKVEEVAGQIEVVPAEVQPPAKIEEEEVTETQTQANSE
